United States Patent Application Publication US 2022/0205049 A1 - sequence listing, part 2

SEQ ID NO: 9551 - DNA, 122 bp, Homo sapiens
  misc_feature (61)..(62): /note="This region represents a CpG dinucleotide"
  misc_feature (61)..(61): /note="Nucleotide may be methylated to form 5-methylcytosine"
gtgtaactctttttgttttttacaaccttattttggagatgaggtaatggaaggtcaaagcgctggagtgacctgcattcagcagagtgaaatttatcttgactccaagttcagaattcttt

SEQ ID NO: 9552 - DNA, 122 bp, Homo sapiens
  misc_feature (61)..(62): /note="This region represents a CpG dinucleotide"
  misc_feature (61)..(61): /note="Nucleotide may be methylated to form 5-methylcytosine"
ccagtctgagaatcaggtgccagttcttttctactgtgtgtctagtcacattggtgtagacgtccaggcaggaggagaagcaagttgtaggatcagctacatctgggcttccaaaggtaatc

SEQ ID NO: 9553 - DNA, 122 bp, Homo sapiens
  misc_feature (61)..(62): /note="This region represents a CpG dinucleotide"
  misc_feature (61)..(61): /note="Nucleotide may be methylated to form 5-methylcytosine"
tttgtaggggatataaagaagagtgggtttagtattacaaaataagttcagtttaactaacgtgtgttagtgtcttttatatcccactgaagtgctgagtatacagaaattaagacagttct

SEQ ID NO: 9554 - DNA, 122 bp, Homo sapiens
  misc_feature (61)..(62): /note="This region represents a CpG dinucleotide"
  misc_feature (61)..(61): /note="Nucleotide may be methylated to form 5-methylcytosine"
acttccagctctaaccttcatcctcaccccgccattaagctattctatgaaaaagggatacgagggctaacgatgcatttgtgatatagtgctgctaatcagcataaggctatattcagcaa

SEQ ID NO: 9555 - DNA, 122 bp, Homo sapiens
  misc_feature (61)..(62): /note="This region represents a CpG dinucleotide"
  misc_feature (61)..(61): /note="Nucleotide may be methylated to form 5-methylcytosine"
tgctccagaatttaattcaagaaattcaccagagagtcagaattatctggaaacacaatacgggatcctaactggctcattaatcaagttcctagaaaataactgattaatccatctgtcac

SEQ ID NO: 9556 - DNA, 122 bp, Homo sapiens
  misc_feature (61)..(62): /note="This region represents a CpG dinucleotide"
  misc_feature (61)..(61): /note="Nucleotide may be methylated to form 5-methylcytosine"
cgaaggtgcggtagcggcagagcatcaccaggctggccaggccattgagaaacgaggccacggccgatgccggctcttgaaagaacaggaaccgggagaagggccactgaaaaaggagcaga

SEQ ID NO: 9557 - DNA, 122 bp, Homo sapiens
  misc_feature (61)..(62): /note="This region represents a CpG dinucleotide"
  misc_feature (61)..(61): /note="Nucleotide may be methylated to form 5-methylcytosine"
ctctcctccacagcccccacctcacctacttccactccctgccagagctagccccactggcgcaggataaacagcccagaggcctctcccacgcagggcctgcctcggttcaggcctgctgg

SEQ ID NO: 9558 - DNA, 122 bp, Homo sapiens
  misc_feature (61)..(62): /note="This region represents a CpG dinucleotide"
  misc_feature (61)..(61): /note="Nucleotide may be methylated to form 5-methylcytosine"
ttccttggggttctgagcgcggatgtctgacttgaatgacctgagatttggacatattcccgttttctcccaagagttgctttaatgttgcgagtttaaattcactgaaagaggcccagata

SEQ ID NO: 9559 - DNA, 122 bp, Homo sapiens
  misc_feature (61)..(62): /note="This region represents a CpG dinucleotide"
  misc_feature (61)..(61): /note="Nucleotide may be methylated to form 5-methylcytosine"
acatcaagcaacaagataatgctagtagtacctttatcttctactctgataccctttcctcgtcgtcacatttttacttcactaagatgtgtgtattttagtgccaggtatactgtaatcct

SEQ ID NO: 9560 - DNA, 122 bp, Homo sapiens
  misc_feature (61)..(62): /note="This region represents a CpG dinucleotide"
  misc_feature (61)..(61): /note="Nucleotide may be methylated to form 5-methylcytosine"
agttgaaccagatggggctggttctgcgcttacataactggtccaactgtttctgtacctcgcttctgttttctggacatctatttcctttttcttttcttatttttaaattttaatgatta

SEQ ID NO: 9561 - DNA, 122 bp, Homo sapiens
  misc_feature (61)..(62): /note="This region represents a CpG dinucleotide"
  misc_feature (61)..(61): /note="Nucleotide may be methylated to form 5-methylcytosine"
gctgcatccagctgcaaagaggcctgctgggaaaagagctgatgccacagggaagaaacgcgacccccacgggccctgctggcctctccaaggccccgaccactggacgcagaggaagccgg

SEQ ID NO: 9562 - DNA, 122 bp, Homo sapiens
  misc_feature (61)..(62): /note="This region represents a CpG dinucleotide"
  misc_feature (61)..(61): /note="Nucleotide may be methylated to form 5-methylcytosine"
ataatgctcccagtttccctcccttgagtaggtcaggaaggaggaaggtttgtgaaagaacggagctattataaaacatagttacagggttgtatagctctagagggtttctgtgctgccct

SEQ ID NO: 9563 - DNA, 122 bp, Homo sapiens
  misc_feature (61)..(62): /note="This region represents a CpG dinucleotide"
  misc_feature (61)..(61): /note="Nucleotide may be methylated to form 5-methylcytosine"
tcacaggggaagcacaaacattttctaatttaagtgaaaccactagtgtcagcagacaaacgtgtgagctgaacttgacatccttttcttcaactgctcccttctcaaatattttcaaacta

SEQ ID NO: 9564 - DNA, 122 bp, Homo sapiens
  misc_feature (61)..(62): /note="This region represents a CpG dinucleotide"
  misc_feature (61)..(61): /note="Nucleotide may be methylated to form 5-methylcytosine"
gtatggctgctttgcttcatagctcagagactgaaccagagctagaggttatgaactagacgaggatttcatacatttttttctccagccacttttctccgttagtaaataaacaaatgaat

SEQ ID NO: 9565 - DNA, 122 bp, Homo sapiens
  misc_feature (61)..(62): /note="This region represents a CpG dinucleotide"
  misc_feature (61)..(61): /note="Nucleotide may be methylated to form 5-methylcytosine"
agctgagcacgctccatccgaggggagaaaaatcacacttcccctcccattgtcatcggacgagggtttggggggcctaaatcccattgtccactgcttaattctggttaggtcatgctgag

SEQ ID NO: 9566 - DNA, 122 bp, Homo sapiens
  misc_feature (61)..(62): /note="This region represents a CpG dinucleotide"
  misc_feature (61)..(61): /note="Nucleotide may be methylated to form 5-methylcytosine"
atcagaatgaagaaagacagtgtccagctgtagcagtagtttggtagcaggagaattagacgtaaaggtactaatgcctgaggggtgggtcatgaattaataattgctatgtggcggatgag

SEQ ID NO: 9567 - DNA, 122 bp, Homo sapiens
  misc_feature (61)..(62): /note="This region represents a CpG dinucleotide"
  misc_feature (61)..(61): /note="Nucleotide may be methylated to form 5-methylcytosine"
agccgttcccgcggacgtcggcgccagggcttggggtgggaacaggtgcggggctgcgtccgcccccgcctgcatgccagagtgaggcaggcctggccccgtgtgagacgagcctttccttc

SEQ ID NO: 9568 - DNA, 122 bp, Homo sapiens
  misc_feature (61)..(62): /note="This region represents a CpG dinucleotide"
  misc_feature (61)..(61): /note="Nucleotide may be methylated to form 5-methylcytosine"
ccaggggagctaggtggccttctatcttgcagccatctgtttaggaacaaaaggctattgcgtgactcagttcccaagcttaacatttccctttggcatagtaagtttggggtcccatgttt

SEQ ID NO: 9569 - DNA, 122 bp, Homo sapiens
  misc_feature (61)..(62): /note="This region represents a CpG dinucleotide"
  misc_feature (61)..(61): /note="Nucleotide may be methylated to form 5-methylcytosine"
tcgacagcgcgctgctgcctgcagtccgccgggcctgagcacacccgaggctcccacctgcggagccgctgggggacctcacgtcccagccaggatccccctggaagaaaaagggcgtcccc

SEQ ID NO: 9570 - DNA, 122 bp, Homo sapiens
  misc_feature (61)..(62): /note="This region represents a CpG dinucleotide"
  misc_feature (61)..(61): /note="Nucleotide may be methylated to form 5-methylcytosine"
gatccttgacttagtgggtacatttcctattttctaccttatctcagacaacagtgctgtcgaaatttccaccactccctaagaagagtttttttccccagcctccaataatatttttctca

SEQ ID NO: 9571 - DNA, 122 bp, Homo sapiens
  misc_feature (61)..(62): /note="This region represents a CpG dinucleotide"
  misc_feature (61)..(61): /note="Nucleotide may be methylated to form 5-methylcytosine"
ctgctcgaggtctgtttttctctccttgcctctcaacccctgaaagcaaagcccggacatcggaaagggaaaggggccagctaagggcagctggaaaagaagggaactgctcaggggagagt

SEQ ID NO: 9572 - DNA, 122 bp, Homo sapiens
  misc_feature (61)..(62): /note="This region represents a CpG dinucleotide"
  misc_feature (61)..(61): /note="Nucleotide may be methylated to form 5-methylcytosine"
agggcctcaaacaattactcatacctcaaggatcatggcagcattattcaccatggcggacgggaaatgtccatggaagaatgaatggatacacaaattggagtccagccaaacacaaaggc

SEQ ID NO: 9573 - DNA, 122 bp, Homo sapiens
  misc_feature (61)..(62): /note="This region represents a CpG dinucleotide"
  misc_feature (61)..(61): /note="Nucleotide may be methylated to form 5-methylcytosine"
tttataggtaaatcaaacacaatcctttcccttaaaatgcccacagtagtggaagagacacgatgagctgtcctttagaaagataaattcagcagcactgatgtgaggagattggagatctc

SEQ ID NO: 9574 - DNA, 122 bp, Homo sapiens
  misc_feature (61)..(62): /note="This region represents a CpG dinucleotide"
  misc_feature (61)..(61): /note="Nucleotide may be methylated to form 5-methylcytosine"
aactattgcataaacaaggctggtttgtgaaccaaaggacatgagccccaaacctggagtcgcagaggcagcatgacagcacagacagcacagcttctggtgtcaggcattcctgcactcaa

SEQ ID NO: 9575 - DNA, 122 bp, Homo sapiens
  misc_feature (61)..(62): /note="This region represents a CpG dinucleotide"
  misc_feature (61)..(61): /note="Nucleotide may be methylated to form 5-methylcytosine"
gtgggaaggaaagggagccgagagggctgagccgctgagccggagtccagatgaatgtgccggagtctctgcatttgtgatgggggcgaggtgatgggggcgaggtggccggcgtggctctg

SEQ ID NO: 9576 - DNA, 122 bp, Homo sapiens
  misc_feature (61)..(62): /note="This region represents a CpG dinucleotide"
  misc_feature (61)..(61): /note="Nucleotide may be methylated to form 5-methylcytosine"
tcctcctgtccctcaccctgctcagatcacactggccctgaacgctggttcccaatcacacgtcatatacttggcttgcaacagttttgttgactgagtgactgaatgcacagaagaattaa

SEQ ID NO: 9577 - DNA, 122 bp, Homo sapiens
  misc_feature (61)..(62): /note="This region represents a CpG dinucleotide"
  misc_feature (61)..(61): /note="Nucleotide may be methylated to form 5-methylcytosine"
ctgcttgcaaagctgttgcattttccattcccaccagcagtgtgtgaaggttcagcctgccgtactttaatgattattggtgacactctttcaagtaacttgttggtaataagaagtcaatt

SEQ ID NO: 9578 - DNA, 122 bp, Homo sapiens
  misc_feature (61)..(62): /note="This region represents a CpG dinucleotide"
  misc_feature (61)..(61): /note="Nucleotide may be methylated to form 5-methylcytosine"
agatgctaagccatgcacggcctcacgcacactgcgcttcaatcacggctgaagcaggaacgagctcttaatagttccagtaaatgcaaaggccgccctggaaaactgcgtgaacctttctg

SEQ ID NO: 9579 - DNA, 122 bp, Homo sapiens
  misc_feature (61)..(62): /note="This region represents a CpG dinucleotide"
  misc_feature (61)..(61): /note="Nucleotide may be methylated to form 5-methylcytosine"
gaaaccacaggtctaatcggagggcaacagtgtcatctggaagtgccggctcagggatgccgtcctgacggaagtcatgaatgctggaagtgggtctcgcagggtgagaggagtcaccaggt

SEQ ID NO: 9580 - DNA, 122 bp, Homo sapiens
  misc_feature (61)..(62): /note="This region represents a CpG dinucleotide"
  misc_feature (61)..(61): /note="Nucleotide may be methylated to form 5-methylcytosine"
atgaccactgctcctggttcatgattttcttctcaaccttgtctcctgttgttctcaagacgtcaacatccattgtattagttatctatgactacatatcaagtcactccaccttagcagct

SEQ ID NO: 9581 - DNA, 122 bp, Homo sapiens
  misc_feature (61)..(62): /note="This region represents a CpG dinucleotide"
  misc_feature (61)..(61): /note="Nucleotide may be methylated to form 5-methylcytosine"
tatttagcatgagtctagtccggctaggtcttaaataactttcaaaagttttttaaccttcgtcacttcctgggatatacatcttagcaatcacaaccttgagctaagccaagaaaagactg

SEQ ID NO: 9582 - DNA, 122 bp, Homo sapiens
  misc_feature (61)..(62): /note="This region represents a CpG dinucleotide"
  misc_feature (61)..(61): /note="Nucleotide may be methylated to form 5-methylcytosine"
atttggtttgcaggtatttgagtgtctgtttccctccctgggaaatcatgaggaccgaaacgctccttgtgcgctgtagctctgaggtggctgtcatggcccggacggcgggggaggcgagg

SEQ ID NO: 9583 - DNA, 122 bp, Homo sapiens
  misc_feature (61)..(62): /note="This region represents a CpG dinucleotide"
  misc_feature (61)..(61): /note="Nucleotide may be methylated to form 5-methylcytosine"
tggagcctttcactctgcacttcaggaggtctgacagggtcactagtacttcaagattcccgtccctatttctgtcttaagcatgttcgttttataccctgttatgagatgttctttgattc

SEQ ID NO: 9584 - DNA, 122 bp, Homo sapiens
  misc_feature (61)..(62): /note="This region represents a CpG dinucleotide"
  misc_feature (61)..(61): /note="Nucleotide may be methylated to form 5-methylcytosine"
tctgttgtgttgtgagcacagcttgagggcagtcatccacctcttcacatattttccatccgtcagctgtgagaggcagagtgtcaggttgttcaggttggtgcagcccatctccctcccac

SEQ ID NO: 9585 - DNA, 122 bp, Homo sapiens
  misc_feature (61)..(62): /note="This region represents a CpG dinucleotide"
  misc_feature (61)..(61): /note="Nucleotide may be methylated to form 5-methylcytosine"
agctgagctagattgatttaattatttaattctccccaaaattcaaagattaagaatatgcggttcaaatggaatggaaaatttggctgttttggcacagcaagtaaacagtggagctagga

SEQ ID NO: 9586 - DNA, 122 bp, Homo sapiens
  misc_feature (61)..(62): /note="This region represents a CpG dinucleotide"
  misc_feature (61)..(61): /note="Nucleotide may be methylated to form 5-methylcytosine"
ccagagcctggtcttcctcatccttcctgtgcaccagctccaactgctgctgagggctcccgggacagctacaaggcaccacaatgacctagaggcttcggaaagttgcacaacaggatatg

SEQ ID NO: 9587 - DNA, 122 bp, Homo sapiens
  misc_feature (61)..(62): /note="This region represents a CpG dinucleotide"
  misc_feature (61)..(61): /note="Nucleotide may be methylated to form 5-methylcytosine"
cttttggagggtggggtggctctggcctgcagacgcagaggtgctatgcagtgagatcatcgtcctcatattttaattctttagacatgctttcctttagtttatttagcatgttttaaaca

SEQ ID NO: 9588 - DNA, 122 bp, Homo sapiens
  misc_feature (61)..(62): /note="This region represents a CpG dinucleotide"
  misc_feature (61)..(61): /note="Nucleotide may be methylated to form 5-methylcytosine"
agtggactcaaagcgagggaagcggcagtggtgggtttaatgaggctccccgggcacacgcggtctgtgggcaggtgggtgtcctttgcatcacaagaggtgtgttttgggtgggatgaggg

SEQ ID NO: 9589 - DNA, 122 bp, Homo sapiens
  misc_feature (61)..(62): /note="This region represents a CpG dinucleotide"
  misc_feature (61)..(61): /note="Nucleotide may be methylated to form 5-methylcytosine"
atcagagcaagctctgtctcaaaaaaaaaaaagattataatagagctgaaaaattcctatcgcctagtgacactgtagccattgtaacagcataacacaatgcatgactcacatggatgtgg

SEQ ID NO: 9590 - DNA, 122 bp, Homo sapiens
  misc_feature (61)..(62): /note="This region represents a CpG dinucleotide"
  misc_feature (61)..(61): /note="Nucleotide may be methylated to form 5-methylcytosine"
ttgcagcaactgtatatgttttcattaaatctgcagataaatgatcaggcatgtatccggcgttgttccactggcactgctgtggactaaacaatggccagtgttctgatgtgaatcatttg

SEQ ID NO: 9591 - DNA, 122 bp, Homo sapiens
  misc_feature (61)..(62): /note="This region represents a CpG dinucleotide"
  misc_feature (61)..(61): /note="Nucleotide may be methylated to form 5-methylcytosine"
ctctgtctcagaaaaaaaaaaagaaagagtgctgcttgattatcataataatatcactgtcgttcatacaaacaggaatgcgattgagtagactgactttgaataggcttttctccagagtc

SEQ ID NO: 9592 - DNA, 122 bp, Homo sapiens
  misc_feature (61)..(62): /note="This region represents a CpG dinucleotide"
  misc_feature (61)..(61): /note="Nucleotide may be methylated to form 5-methylcytosine"
ccacgcctccgccctgggagccgccatcttgccacttcccctcgcccggccgtccgcgggcgtcaatagcgactttcagcacaaaacaaagatggcggcggcggcatctcggaaatgcccgg

SEQ ID NO: 9593 - DNA, 122 bp, Homo sapiens
  misc_feature (61)..(62): /note="This region represents a CpG dinucleotide"
  misc_feature (61)..(61): /note="Nucleotide may be methylated to form 5-methylcytosine"
ttatctccccataaaatcctttaacataaaacatcactgtaagccatggtagtggactcacggaggtttacatagagagttgtccacctgcacgtcccacgacagccaaatccccaggcctc

SEQ ID NO: 9594 - DNA, 122 bp, Homo sapiens
  misc_feature (61)..(62): /note="This region represents a CpG dinucleotide"
  misc_feature (61)..(61): /note="Nucleotide may be methylated to form 5-methylcytosine"
atgcgtggcctggacaagcagttggagtccagacggaagctggagtcggcatactcaatgcgtacattggtggggccacgagtggttttcactgacagcgtgaacaggtagctggggtgcgt

SEQ ID NO: 9595 - DNA, 122 bp, Homo sapiens
  misc_feature (61)..(62): /note="This region represents a CpG dinucleotide"
  misc_feature (61)..(61): /note="Nucleotide may be methylated to form 5-methylcytosine"
agagatcttcccttatatgttccaggacccgctagtgatacctagaatcgcagatagtaccgtcccctatatatactgttttttcaatatatacatacccatggtaaagttcaacttacaaa

SEQ ID NO: 9596 - DNA, 122 bp, Homo sapiens
  misc_feature (61)..(62): /note="This region represents a CpG dinucleotide"
  misc_feature (61)..(61): /note="Nucleotide may be methylated to form 5-methylcytosine"
agtagaaccagaaagatctttctctattacagagtcatggaaagttcttacgtaagcacacgtgaagttgttgttgataccttactgtgggtgtgtcaacatctggatatacgtgtatgaaa

SEQ ID NO: 9597 - DNA, 122 bp, Homo sapiens
  misc_feature (61)..(62): /note="This region represents a CpG dinucleotide"
  misc_feature (61)..(61): /note="Nucleotide may be methylated to form 5-methylcytosine"
gcatatcatatttaattatatctttttcctctgactaaataaagcatcactggctgggtgcggtggctcaagcctgtaatcccagcactttgggaggctgaggtgggtggatcacctgaggt

SEQ ID NO: 9598 - DNA, 122 bp, Homo sapiens
  misc_feature (61)..(62): /note="This region represents a CpG dinucleotide"
  misc_feature (61)..(61): /note="Nucleotide may be methylated to form 5-methylcytosine"
cctagccactgccaaccactattccactttctgtctctatgattttgtttactctaagtacgtcatataagtagaatcatacagtatttgtcctttttatttttgaagatgaggcctaaccg

SEQ ID NO: 9599 - DNA, 122 bp, Homo sapiens
  misc_feature (61)..(62): /note="This region represents a CpG dinucleotide"
  misc_feature (61)..(61): /note="Nucleotide may be methylated to form 5-methylcytosine"
tgctgatatgctcctggagccagtgccctgtgctaatagattctatcacagcactgaccacgctctaatgatagcaattgttaacttgtttgtttctctcaccaagaagtcacgaactgtgg

SEQ ID NO: 9600 - DNA, 122 bp, Homo sapiens
  misc_feature (61)..(62): /note="This region represents a CpG dinucleotide"
  misc_feature (61)..(61): /note="Nucleotide may be methylated to form 5-methylcytosine"
ctactaaaattgtgagtcagaagccaaactaattttggctactaaattagttacttccctcgggcctaccaatcttcatatgtataccatggcttattttgacttagctggttaatttatcc

SEQ ID NO: 9601 - DNA, 122 bp, Homo sapiens
  misc_feature (61)..(62): /note="This region represents a CpG dinucleotide"
  misc_feature (61)..(61): /note="Nucleotide may be methylated to form 5-methylcytosine"
gaaagctgattcatcattaggacgaggttcaagggagaagtcagtggctgcccacactggcgcatccgtcatgggaactttctatgtcaaaaccctgccaatgaatcatgaacattttagtt

SEQ ID NO: 9602 - DNA, 122 bp, Homo sapiens
  misc_feature (61)..(62): /note="This region represents a CpG dinucleotide"
  misc_feature (61)..(61): /note="Nucleotide may be methylated to form 5-methylcytosine"
ttaaaagatctgttaagtatcaacaatacttactccatagtcatgagttaaaatattatacgtagtcaaaacaatatcctgttttgaaagtaaggccggttctctaatacgatcaggaccat

SEQ ID NO: 9603 - DNA, 122 bp, Homo sapiens
  misc_feature (61)..(62): /note="This region represents a CpG dinucleotide"
  misc_feature (61)..(61): /note="Nucleotide may be methylated to form 5-methylcytosine"
ccttaataacatccagtctcccagtacctttaattgtttccagatcactaacgatttgatcgagagagcatggggagtggggtaaaagggaaagtgaaactgaaagctaaagagtttggaac

SEQ ID NO: 9604 - DNA, 122 bp, Homo sapiens
  misc_feature (61)..(62): /note="This region represents a CpG dinucleotide"
  misc_feature (61)..(61): /note="Nucleotide may be methylated to form 5-methylcytosine"
gctatacccagactcggtcattattcagccctgtccacatctgaagactcaagttctaaccgttactttcagattgcaacactctagtcttcctcttttctcactcagcttctcctgctaca

SEQ ID NO: 9605 - DNA, 122 bp, Homo sapiens
  misc_feature (61)..(62): /note="This region represents a CpG dinucleotide"
  misc_feature (61)..(61): /note="Nucleotide may be methylated to form 5-methylcytosine"
accaatcgtctgtggcaaatggagaagtatcgatgcccttcccccttctgattctatttacggctaggtttttaaaagcagcaataaaacaaatgtcgactctttgggggtttactgggtga

SEQ ID NO: 9606 - DNA, 122 bp, Homo sapiens
  misc_feature (61)..(62): /note="This region represents a CpG dinucleotide"
  misc_feature (61)..(61): /note="Nucleotide may be methylated to form 5-methylcytosine"
gagtgtccgtggggaaaggcaaacctgccgctgagttggaagacaacagctgctaacacacgaagcctcagaaagccctcgccaggactcagagattctctcgagtgactcgtgtggcaaac

SEQ ID NO: 9607 - DNA, 122 bp, Homo sapiens
  misc_feature (61)..(62): /note="This region represents a CpG dinucleotide"
  misc_feature (61)..(61): /note="Nucleotide may be methylated to form 5-methylcytosine"
ttgttaggcaatttcatcattgtgcaacctgcagagcacacttacacaaacctaagatggcgcagccccactatacacctaggctatatggtatagcctgttgctgctaggttacaaacctg

SEQ ID NO: 9608 - DNA, 122 bp, Homo sapiens
  misc_feature (61)..(62): /note="This region represents a CpG dinucleotide"
  misc_feature (61)..(61): /note="Nucleotide may be methylated to form 5-methylcytosine"
cttcctcaccccgtctacctttactgagctctgtatcctttaatacccagcctcaaaggccgtctctgctgcaaagccctgcctggttccctgtcagactcctctggctctctctgctgtgc

SEQ ID NO: 9609 - DNA, 122 bp, Homo sapiens
  misc_feature (61)..(62): /note="This region represents a CpG dinucleotide"
  misc_feature (61)..(61): /note="Nucleotide may be methylated to form 5-methylcytosine"
agaacatggccctgcgctgttggggcccattcttccctctgaccttgggtgggtgtgcagcgtgggcagggctttttcagggaggtgcggggtgagtttgccccttggcgtccccagtcttt

SEQ ID NO: 9610 - DNA, 122 bp, Homo sapiens
  misc_feature (61)..(62): /note="This region represents a CpG dinucleotide"
  misc_feature (61)..(61): /note="Nucleotide may be methylated to form 5-methylcytosine"
aaatggattggtaaggattaggcaggagaatgctcctgttcacctgtttgtcaagcattccgcagcttgatggtatttctctattctaagccatcttaatactttcccatgctctgtgtagg

SEQ ID NO: 9611 - DNA, 122 bp, Homo sapiens
  misc_feature (61)..(62): /note="This region represents a CpG dinucleotide"
  misc_feature (61)..(61): /note="Nucleotide may be methylated to form 5-methylcytosine"
aggggggacataagagtggcaggaggcagccaaatgcctaggccgacaggtgcaggtccccgtgaatccccacctccaagccaaagacagtttaaagcctgaaagccaagctacaagtcaac

SEQ ID NO: 9612 - DNA, 122 bp, Homo sapiens
  misc_feature (61)..(62): /note="This region represents a CpG dinucleotide"
  misc_feature (61)..(61): /note="Nucleotide may be methylated to form 5-methylcytosine"
ttaaagcactcgcaatttctggcatttatgtgctcataatgtagtggtgaatggcaattgcggcaaccatggcctgacaagagcaaggtcatcaagagcttagattgtttggagctgaaggt

SEQ ID NO: 9613 - DNA, 122 bp, Homo sapiens
  misc_feature (61)..(62): /note="This region represents a CpG dinucleotide"
  misc_feature (61)..(61): /note="Nucleotide may be methylated to form 5-methylcytosine"
gggactatctaagagccccagatacacaaaggcaaggcagaatgactggttttccctccgcgccttcctggtggaaccacatgttcatgagatgtattagagcgtgtcacattattcaggta

SEQ ID NO: 9614 - DNA, 122 bp, Homo sapiens
  misc_feature (61)..(62): /note="This region represents a CpG dinucleotide"
  misc_feature (61)..(61): /note="Nucleotide may be methylated to form 5-methylcytosine"
tttctttaaactgtttcttttaagttttcatttctgcatttgtctgccttcattcagtcccgtggtaaccatggcaaaccgcagtagatgttgtgttagcaggtatgaaaataacattaatc

SEQ ID NO: 9615 - DNA, 122 bp, Homo sapiens
  misc_feature (61)..(62): /note="This region represents a CpG dinucleotide"
  misc_feature (61)..(61): /note="Nucleotide may be methylated to form 5-methylcytosine"
aagctctggttaacgtaaccctcaggacagctcaagaaattcttgcactgtgctttcccacgtacatttcagtgtacaggctgtgtacctgtggctgtttatcaggttcatcttctttagca

SEQ ID NO: 9616 - DNA, 122 bp, Homo sapiens
  misc_feature (61)..(62): /note="This region represents a CpG dinucleotide"
  misc_feature (61)..(61): /note="Nucleotide may be methylated to form 5-methylcytosine"
ttaatcggtggacaatgttccattgtcattaagctttcacttctatagtaaaacttaatccgcacactttagagctcttaatagctccccgactttctccatcgccaacccaccattccagg

SEQ ID NO: 9617 - DNA, 122 bp, Homo sapiens
  misc_feature (61)..(62): /note="This region represents a CpG dinucleotide"
  misc_feature (61)..(61): /note="Nucleotide may be methylated to form 5-methylcytosine"
atatgccaacccacagtcactggcaatagttaccctgaactgtgaaaaggaacaaggtaacgagaggcaccaactcagcaggaaatgtaaacgtctacttgggaacacgatcaacactcatg

SEQ ID NO: 9618 - DNA, 122 bp, Homo sapiens
  misc_feature (61)..(62): /note="This region represents a CpG dinucleotide"
  misc_feature (61)..(61): /note="Nucleotide may be methylated to form 5-methylcytosine"
acaacaggaagtggctacattaacagcacactgtgtactatagttaattttatgcagttacggtttcagactgcatcccgacattggtttacatttctcttgactgagaatggtgccacgtg

SEQ ID NO: 9619 - DNA, 122 bp, Homo sapiens
  misc_feature (61)..(62): /note="This region represents a CpG dinucleotide"
  misc_feature (61)..(61): /note="Nucleotide may be methylated to form 5-methylcytosine"
aactgggcgttaggtgtcccaggggtgcctggtgttcatgctgattgcagtgatgatgcacgtcctcctgggccagtccacggggtgcgcctgtacacactgggcgtgtgcggatacaaggg

SEQ ID NO: 9620 - DNA, 122 bp, Homo sapiens
  misc_feature (61)..(62): /note="This region represents a CpG dinucleotide"
  misc_feature (61)..(61): /note="Nucleotide may be methylated to form 5-methylcytosine"
tcatatgagtaaatatgacccatatgagtaaatatgaccttttgattacttcacttcgtgcggatcagggaagactttctaaggaagtgataggcaattcagcaatgtgactacctggagaa

SEQ ID NO: 9621 - DNA, 122 bp, Homo sapiens
  misc_feature (61)..(62): /note="This region represents a CpG dinucleotide"
  misc_feature (61)..(61): /note="Nucleotide may be methylated to form 5-methylcytosine"
gtgtatcattttttagaagagcttctgaaagcctcaaacatctgtgagtgtgctaagagccgttacaaaggtattttatacaatctatgctgagtcagctaggagttagcaggaggctggat

SEQ ID NO: 9622 - DNA, 122 bp, Homo sapiens
  misc_feature (61)..(62): /note="This region represents a CpG dinucleotide"
  misc_feature (61)..(61): /note="Nucleotide may be methylated to form 5-methylcytosine"
gctaatcttgcagggagatcattcatgagttttcccagacattgagtcccacagtacctgcgtctgttccctccgctacccctacatcttccattcttctggaagttgtccagattacaatc

SEQ ID NO: 9623 - DNA, 122 bp, Homo sapiens
  misc_feature (61)..(62): /note="This region represents a CpG dinucleotide"
  misc_feature (61)..(61): /note="Nucleotide may be methylated to form 5-methylcytosine"
aaaattgggatcttaacaaagaaaagcttgcaacagatgcatgactactgctcaaatcatcgctgaggcacttagagacccagaaaagatcttatgtttggcttgcagtgtttctaagagca

SEQ ID NO: 9624 - DNA, 122 bp, Homo sapiens
  misc_feature (61)..(62): /note="This region represents a CpG dinucleotide"
  misc_feature (61)..(61): /note="Nucleotide may be methylated to form 5-methylcytosine"
tttaaagtctcagtgcatgtgcttatgccaagggatcactttaacacactgaacttaacacgctcttcccctggccgattctttgttgctctcagctaaaatcctaactcctcgacgcagca

SEQ ID NO: 9625 - DNA, 122 bp, Homo sapiens
  misc_feature (61)..(62): /note="This region represents a CpG dinucleotide"
  misc_feature (61)..(61): /note="Nucleotide may be methylated to form 5-methylcytosine"
agtaactatttaaaaatggtgtttcctttggccatctgtattctaaatggtggctcctcccgccagaggcctctgtgagaactgaactgtagacgcagaggggcagggaggaggtcaaacgc

SEQ ID NO: 9626 - DNA, 122 bp, Homo sapiens
  misc_feature (61)..(62): /note="This region represents a CpG dinucleotide"
  misc_feature (61)..(61): /note="Nucleotide may be methylated to form 5-methylcytosine"
tgcttcccatctctgagaagcagcaaagtcaccctccccatctgcccttccctgggggagcggtccccacccccacgtccatctggacctcagtgcggccatccctcccatgcacaaagctc

SEQ ID NO: 9627 - DNA, 122 bp, Homo sapiens
  misc_feature (61)..(62): /note="This region represents a CpG dinucleotide"
  misc_feature (61)..(61): /note="Nucleotide may be methylated to form 5-methylcytosine"
atgcaagagttcaaaatgctggcctgaagaagtctatgaaaatgtcaagtcatgcctttgcgaggagataactacttggcatatacctttccctgaatgataaagaaggaaagaaaaaatgt

SEQ ID NO: 9628 - DNA, 122 bp, Homo sapiens
  misc_feature (61)..(62): /note="This region represents a CpG dinucleotide"
  misc_feature (61)..(61): /note="Nucleotide may be methylated to form 5-methylcytosine"
gtgatatacctgtatcaaaacaaaaggcagtctgcagtcccgcaggcaagggtctgcccacggctccaggtaggcatcttccagggcttgtgtgcagcaggagagaacgtctcttctccagc

SEQ ID NO: 9629 - DNA, 122 bp, Homo sapiens
  misc_feature (61)..(62): /note="This region represents a CpG dinucleotide"
  misc_feature (61)..(61): /note="Nucleotide may be methylated to form 5-methylcytosine"
agttgggttgtccttggacaaactgcttgacctctgtaaatcttctgtccttatctgtaacgtaggggtgctaattagcattaattagctcattgttgggaggattaaatgagaacacccct

SEQ ID NO: 9630 - DNA, 122 bp, Homo sapiens
  misc_feature (61)..(62): /note="This region represents a CpG dinucleotide"
  misc_feature (61)..(61): /note="Nucleotide may be methylated to form 5-methylcytosine"
ctgagtcacctggagccccattgtggcatccaggttaaccttctctagcactgtagcattcgctgagtcaagaccggctgctgtttccttcctcctcgaaaaaatcactatccatattcaag

SEQ ID NO: 9631 - DNA, 122 bp, Homo sapiens
  misc_feature (61)..(62): /note="This region represents a CpG dinucleotide"
  misc_feature (61)..(61): /note="Nucleotide may be methylated to form 5-methylcytosine"
taacttctttttcatgtagatttcaggctgggattagagactgaatcttgaattgcttatcgtctctagaccaagttgttcggggccagggattgattaattaattaaaatcaatgtaaatg

SEQ ID NO: 9632 - DNA, 122 bp, Homo sapiens
  misc_feature (61)..(62): /note="This region represents a CpG dinucleotide"
  misc_feature (61)..(61): /note="Nucleotide may be methylated to form 5-methylcytosine"
aagcctgaccatcactcacagagggtagtcatggttcagaacacgagatgtggagtcaggcggccctaggttccggtccagggattactgagtcaaagagtatttgcatatttaccattgag

SEQ ID NO: 9633 - DNA, 122 bp, Homo sapiens
  misc_feature (61)..(62): /note="This region represents a CpG dinucleotide"
  misc_feature (61)..(61): /note="Nucleotide may be methylated to form 5-methylcytosine"
gagcccagacgtctacgccaggtcctaattcagttggttcaactgggctgggtgtggacacgtgttgtccagtgagtcatgaatatggataggggtcacacagaataaacttgaccattctt

SEQ ID NO: 9634 - DNA, 122 bp, Homo sapiens
  misc_feature (61)..(62): /note="This region represents a CpG dinucleotide"
  misc_feature (61)..(61): /note="Nucleotide may be methylated to form 5-methylcytosine"
gtacccagagctggtgctggaacgcgctctagatcgcgaggaagaggcggttcaccacctcgttctcacggccttcgatggaggtgacccggttcgctctggcactgccaggattctcataa

SEQ ID NO: 9635 - DNA, 122 bp, Homo sapiens
  misc_feature (61)..(62): /note="This region represents a CpG dinucleotide"
  misc_feature (61)..(61): /note="Nucleotide may be methylated to form 5-methylcytosine"
ctggcggaggctgctcagcccgagtggcactgcacaggctcctgaaggcagatgaggccccggagagaaaacacaggaagacagcccccacagccccgcccctccgcgaaggagagccgtca

SEQ ID NO: 9636 - DNA, 122 bp, Homo sapiens
  misc_feature (61)..(62): /note="This region represents a CpG dinucleotide"
  misc_feature (61)..(61): /note="Nucleotide may be methylated to form 5-methylcytosine"
gtgtttcctagaagcataacttaagacaggaattcctgtacaagtgattcactgagaagccgtttttagaagaaaccagtaatgaggtgaaggaagcaggatggggaaagttctgtggctag

SEQ ID NO: 9637 - DNA, 122 bp, Homo sapiens
  misc_feature (61)..(62): /note="This region represents a CpG dinucleotide"
  misc_feature (61)..(61): /note="Nucleotide may be methylated to form 5-methylcytosine"
agtcaccctactgcaagctcagatgggaagaacttttgtggctcagcttccctgatcagacgacacaggcacccaatgactctagcactcagtgacaaggaagacaagtagctttcccagcc

SEQ ID NO: 9638 - DNA, 122 bp, Homo sapiens
  misc_feature (61)..(62): /note="This region represents a CpG dinucleotide"
  misc_feature (61)..(61): /note="Nucleotide may be methylated to form 5-methylcytosine"
caggcacaggttgcagtcacagatgtcacctccaatggcagccctgactcaggaacagcacgatgatcatccaggaaacactgggagggccaatgaccatgctaggcccccgagacagagaa

SEQ ID NO: 9639 - DNA, 122 bp, Homo sapiens
  misc_feature (61)..(62): /note="This region represents a CpG dinucleotide"
  misc_feature (61)..(61): /note="Nucleotide may be methylated to form 5-methylcytosine"
ccgaggctcctcaggcatctctctccatctccctgtggtcttgacacatgcactctccagcgtggcagcctcagggtgctggacctctgactgtcagctcaacaccatcacccgcagcccat

SEQ ID NO: 9640 - DNA, 122 bp, Homo sapiens
  misc_feature (61)..(62): /note="This region represents a CpG dinucleotide"
  misc_feature (61)..(61): /note="Nucleotide may be methylated to form 5-methylcytosine"
agatgattttatttaatcctcacattgactccctaaggtagctgtattgtccttatttcacgtatgggaaaattgagattcagagaagttaagtttcccagggacaccgcagatcacgaaca

SEQ ID NO: 9641 - DNA, 122 bp, Homo sapiens
  misc_feature (61)..(62): /note="This region represents a CpG dinucleotide"
  misc_feature (61)..(61): /note="Nucleotide may be methylated to form 5-methylcytosine"
acgagcttttggctattgacttcattactttgacagctgaaataacatgttcatgccttacgtctgtcttgactgtttggggttagaaaaagaatgccaggttatgcatggtattttctaaa

SEQ ID NO: 9642 - DNA, 122 bp, Homo sapiens
  misc_feature (61)..(62): /note="This region represents a CpG dinucleotide"
  misc_feature (61)..(61): /note="Nucleotide may be methylated to form 5-methylcytosine"
tattaaggcttatttatatgatggagtattatccttaaatctgatgccatttccagagaacggtgagagaatcacagctatcttgaatcttcagggtctgttttgatgactttcttttctaa

SEQ ID NO: 9643 - DNA, 122 bp, Homo sapiens
  misc_feature (61)..(62): /note="This region represents a CpG dinucleotide"
  misc_feature (61)..(61): /note="Nucleotide may be methylated to form 5-methylcytosine"
cgaagcgggctcggaagactagggctcctcaggtagtagaatgcagcggccggcagatggcgtcacagcggcggaggccatggccctgcgcaagcgcattcggcgatgccagggagggcgaa

SEQ ID NO: 9644 - DNA, 122 bp, Homo sapiens
  misc_feature (61)..(62): /note="This region represents a CpG dinucleotide"
  misc_feature (61)..(61): /note="Nucleotide may be methylated to form 5-methylcytosine"
ggaagaaaaggaagcagagtgccaagccccacagggagtggttttgtcagttgctttcaccgcaggctctgaggaggggaaggaatcccaggatgaggccctcaggagcttttatttattta

SEQ ID NO: 9645 - DNA, 122 bp, Homo sapiens
  misc_feature (61)..(62): /note="This region represents a CpG dinucleotide"
  misc_feature (61)..(61): /note="Nucleotide may be methylated to form 5-methylcytosine"
ttttccttatgttgtctctgagagcctgacttccgttctccctgctaggctatccccaggcgtttccttccttgattcatgaactctaagatgactagatcaccaggtcggccccaagtatt

SEQ ID NO: 9646 - DNA, 122 bp, Homo sapiens
  misc_feature (61)..(62): /note="This region represents a CpG dinucleotide"
  misc_feature (61)..(61): /note="Nucleotide may be methylated to form 5-methylcytosine"
ttgggagctcccttctggcaggggcagccactggattgcctcatctttctccccattgcccggatgccaagggcaggacgggggaatggtgtgtcttcggggatgagagagaggcatcagga

SEQ ID NO: 9647 - DNA, 122 bp, Homo sapiens
  misc_feature (61)..(62): /note="This region represents a CpG dinucleotide"
  misc_feature (61)..(61): /note="Nucleotide may be methylated to form 5-methylcytosine"
gagtcaaactatccctgtttgcagacagcatgattttatatctagaaaacccccatagcacgtcccaaaagctccttgtgctgataaaaaaaaacttcagcgaagtttcagaatacaaaatc

SEQ ID NO: 9648 - DNA, 122 bp, Homo sapiens
  misc_feature (61)..(62): /note="This region represents a CpG dinucleotide"
  misc_feature (61)..(61): /note="Nucleotide may be methylated to form 5-methylcytosine"
atgagaacttacatttgtcttcagggtccacacatgagatacatttgttattctgtgactcgctgcatctctcacagtaattaaactggtgtagagtcccctcttcttgatcttccaccagc

SEQ ID NO: 9649 - DNA, 122 bp, Homo sapiens
  misc_feature (61)..(62): /note="This region represents a CpG dinucleotide"
  misc_feature (61)..(61): /note="Nucleotide may be methylated to form 5-methylcytosine"
aaatttaaaacaaatcaacaagcaaaaaacaaataaccccattaaaaaatgggcagaacacgtgaacagaaacttctctaaagaagagatgtaagtggccaacaaacatgaaaaaaatgctt

SEQ ID NO: 9650 - DNA, 122 bp, Homo sapiens
  misc_feature (61)..(62): /note="This region represents a CpG dinucleotide"
  misc_feature (61)..(61): /note="Nucleotide may be methylated to form 5-methylcytosine"
aggaggtggtaggcggtgggaaggagaggccggatccggagggggtcagggcagggagggcgggggacacccacctgggcaaagggcgtcacaatcatgtcctctccatgtctgcgaggaga

SEQ ID NO: 9651 - DNA, 122 bp, Homo sapiens
  misc_feature (61)..(62): /note="This region represents a CpG dinucleotide"
  misc_feature (61)..(61): /note="Nucleotide may be methylated to form 5-methylcytosine"
cttgtctgccttaccagatatgagacgtgatgcccttaagtctagtgaaaaccatctacacgataattatgagtgaagataataatggtaagcagtagaagcttactcttcatattcacatt

SEQ ID NO: 9652 - DNA, 122 bp, Homo sapiens
  misc_feature (61)..(62): /note="This region represents a CpG dinucleotide"
  misc_feature (61)..(61): /note="Nucleotide may be methylated to form 5-methylcytosine"
gcagcaggtgtgggcagtgggtcctctggggtggactgaggtgaggcctgggtgtgaccacgcggtggcactggtggctgccggcagctgtcgtctgcagagtgggtgagaccgagtgtggc

SEQ ID NO: 9653 - DNA, 122 bp, Homo sapiens
  misc_feature (61)..(62): /note="This region represents a CpG dinucleotide"
  misc_feature (61)..(61): /note="Nucleotide may be methylated to form 5-methylcytosine"
aatatcgttgctttttatcttgttacctattcctatccatcttggaacaccctttcaaatcgtagactagagcaattgactgtcaagataggatcagtttgtctgaaaacactactttgggg

SEQ ID NO: 9654 - DNA, 122 bp, Homo sapiens
  misc_feature (61)..(62): /note="This region represents a CpG dinucleotide"
  misc_feature (61)..(61): /note="Nucleotide may be methylated to form 5-methylcytosine"
attgagattttcccccactagagggcgataaaaactaacaacaagctatctgtgaaaacgcgttgtgatggaaagcattttccacgctccactatggaaaagtatggagattcctcaaagaa

SEQ ID NO: 9655 - DNA, 122 bp, Homo sapiens
  misc_feature (61)..(62): /note="This region represents a CpG dinucleotide"
  misc_feature (61)..(61): /note="Nucleotide may be methylated to form 5-methylcytosine"
taggaaggagggaacagaaatcctccaccattcttctcaactgtgtagccaacagagaagcggagactgtacagaaagggtatgttaagtagctcagccagcagctcaccacagggattaac

SEQ ID NO: 9656 - DNA, 122 bp, Homo sapiens
  misc_feature (61)..(62): /note="This region represents a CpG dinucleotide"
  misc_feature (61)..(61): /note="Nucleotide may be methylated to form 5-methylcytosine"
tgtgggcctccatcctcctgtgaggcagtggaagaccactccttgttctccggctgactccgtttcttgtgcagttcttgctggatgccttctttaatcacctctcaggacagagagtttct

SEQ ID NO: 9657 - DNA, 122 bp, Homo sapiens
  misc_feature (61)..(62): /note="This region represents a CpG dinucleotide"
  misc_feature (61)..(61): /note="Nucleotide may be methylated to form 5-methylcytosine"
tcagagtaagtggtcctctgtcatgatgggcacatagcttgtcttgctagtgaaggatctcgtcaaaaagttagtttagagagctttctctgggacatggtaaaagacaacctggaatgaag

SEQ ID NO: 9658 - DNA, 122 bp, Homo sapiens
  misc_feature (61)..(62): /note="This region represents a CpG dinucleotide"
  misc_feature (61)..(61): /note="Nucleotide may be methylated to form 5-methylcytosine"
ctaggcacagactcaacagaaatgcctgcatatagtcaccaaaaggcatgttcatagtagcgttattcatggtagtcaaaaactgaaaacaacccgaatgtccattaaaaaaggatggatga

SEQ ID NO: 9659 - DNA, 122 bp, Homo sapiens
  misc_feature (61)..(62): /note="This region represents a CpG dinucleotide"
  misc_feature (61)..(61): /note="Nucleotide may be methylated to form 5-methylcytosine"
gagatggtgacaaggccactcaacctgcctcagaggagtcatgagaatcaaacaagatcacggatgctgaaatgtgtcatgaactacagggtgatgcatacacatgagccgtgactgtcact

SEQ ID NO: 9660 - DNA, 122 bp, Homo sapiens
  misc_feature (61)..(62): /note="This region represents a CpG dinucleotide"
  misc_feature (61)..(61): /note="Nucleotide may be methylated to form 5-methylcytosine"
cccctgtggtaacataaatctctatggtaataataaagctctatgagccattgagttacacgtggtttatttagctagctgccaagctagactgatgaacagatcatgttttcctatgaaca

SEQ ID NO: 9661 - DNA, 122 bp, Homo sapiens
  misc_feature (61)..(62): /note="This region represents a CpG dinucleotide"
  misc_feature (61)..(61): /note="Nucleotide may be methylated to form 5-methylcytosine"
catctgcccaatatccttccttatgctgattctattttgttttagcaacccacttcctcccgtcacttcatttaaaaggatgctgccatagtctaaccctactgaacactctagcattctgt

SEQ ID NO: 9662 - DNA, 122 bp, Homo sapiens
  misc_feature (61)..(62): /note="This region represents a CpG dinucleotide"
  misc_feature (61)..(61): /note="Nucleotide may be methylated to form 5-methylcytosine"
cagatgcgggctaggttgcagagaaaaaggaatgcttatatgttgtgggaatcaggaggccggagagatcactgggtgcaacaggaaggttttatttaggtggccactggcccagcggatta

SEQ ID NO: 9663 - DNA, 122 bp, Homo sapiens
  misc_feature (61)..(62): /note="This region represents a CpG dinucleotide"
  misc_feature (61)..(61): /note="Nucleotide may be methylated to form 5-methylcytosine"
ggactatgcccccaccccactttttgtgggcatttcccattttgtctatgtatagaacttcggtactagcaaggatgtgggactgcttgtaaacctagtctttcaatttcccagtgcagtgc

SEQ ID NO: 9664 - DNA, 122 bp, Homo sapiens
  misc_feature (61)..(62): /note="This region represents a CpG dinucleotide"
  misc_feature (61)..(61): /note="Nucleotide may be methylated to form 5-methylcytosine"
gctggaacttattatttggctagactctcaattcccataaaattacatagggcaaagatacgaaccatcattacagttatcaccctcagagggtttgttgagactttctccactgttgtttg

SEQ ID NO: 9665 - DNA, 122 bp, Homo sapiens
  misc_feature (61)..(62): /note="This region represents a CpG dinucleotide"
  misc_feature (61)..(61): /note="Nucleotide may be methylated to form 5-methylcytosine"
cgagggccgaggagcagcgaggtgcaggggctgcgagggccgagccgggcgctgagggtccggcagggggcgtggagggggcggggcccggagggggcggggccgtaggaaacttgagcgcc

SEQ ID NO: 9666 - DNA, 122 bp, Homo sapiens
  misc_feature (61)..(62): /note="This region represents a CpG dinucleotide"
  misc_feature (61)..(61): /note="Nucleotide may be methylated to form 5-methylcytosine"
tcttcctaaccagtcttatttttccactgctcataagccactagttctgcttttcacttgcgtaaggtcttaagcaactttccagctcagaaactaccattgcttcccagagcacaaacatg

SEQ ID NO: 9667 - DNA, 122 bp, Homo sapiens
  misc_feature (61)..(62): /note="This region represents a CpG dinucleotide"
  misc_feature (61)..(61): /note="Nucleotide may be methylated to form 5-methylcytosine"
gtgttactacttaacactctatagagaaacagccacataactctggcatgagctgggtcacggggtgttgtcacacacccactcgcctatacttttcttgatgtgaatatttcttggatgaa

SEQ ID NO: 9668 - DNA, 122 bp, Homo sapiens
  misc_feature (61)..(62): /note="This region represents a CpG dinucleotide"
  misc_feature (61)..(61): /note="Nucleotide may be methylated to form 5-methylcytosine"
aaaaaaaagtagtgaaaatgtatggtttattaatgtaatcagcttgttattattagcatgcgtacttaatagccacaaaataaagcttaccagagatggtgtatttcggtccttgtgaaata

SEQ ID NO: 9669 - DNA, 122 bp, Homo sapiens
  misc_feature (61)..(62): /note="This region represents a CpG dinucleotide"
  misc_feature (61)..(61): /note="Nucleotide may be methylated to form 5-methylcytosine"
cttctcaggaaatgaaattgctctgtgcaacaatgagagagccactttttaaactttttgcgtgagtgtgcattcaattgctcacattgttttggctccaggggaaatctgacctcggaaaa

SEQ ID NO: 9670 - DNA, 122 bp, Homo sapiens
  misc_feature (61)..(62): /note="This region represents a CpG dinucleotide"
  misc_feature (61)..(61): /note="Nucleotide may be methylated to form 5-methylcytosine"
ggcagggaaggaagaaaagctattgacgttaataagcaggttaccactgggcaacttaggcgccatctccctgaggactctctgaggcaccatgtggaacatcctgggaatactcttaaaag

SEQ ID NO: 9671 - DNA, 122 bp, Homo sapiens
  misc_feature (61)..(62): /note="This region represents a CpG dinucleotide"
  misc_feature (61)..(61): /note="Nucleotide may be methylated to form 5-methylcytosine"
tagctggtcatgatacttgcatcagattctcagaaggttgggcaacttcaaaaacaaagtcggagcctgggcaatatcctgagtcctcatctctacaaaaaatgtttaaaaagttatttggg

SEQ ID NO: 9672 - DNA, 122 bp, Homo sapiens
  misc_feature (61)..(62): /note="This region represents a CpG dinucleotide"
  misc_feature (61)..(61): /note="Nucleotide may be methylated to form 5-methylcytosine"
gagatagtttcccagagccaggtactgacctcagagtcccaactcctggccacatgaaaacgtgtgtgtgagctatgctttctttttgtcctggagttataaaggttctgttgttcacaata

SEQ ID NO: 9673 - DNA, 122 bp, Homo sapiens
  misc_feature (61)..(62): /note="This region represents a CpG dinucleotide"
  misc_feature (61)..(61): /note="Nucleotide may be methylated to form 5-methylcytosine"
ttcagctcctggcaacttggaggaaacaggttcctatagggctgagtcagggtctatgatcgcacagtatggatgactcactggggctattcctatggatcatttggaatttcactggtagt

SEQ ID NO: 9674 - DNA, 122 bp, Homo sapiens
  misc_feature (61)..(62): /note="This region represents a CpG dinucleotide"
  misc_feature (61)..(61): /note="Nucleotide may be methylated to form 5-methylcytosine"
atgatcaaaataagtctaactcgtgtttttcctagtgtttcataattttagttacagaaacgatgcagataaaattaatctaacatgcgtcttcctgactctagtacgttgaatctggccag

SEQ ID NO: 9675 - DNA, 122 bp, Homo sapiens
  misc_feature (61)..(62): /note="This region represents a CpG dinucleotide"
  misc_feature (61)..(61): /note="Nucleotide may be methylated to form 5-methylcytosine"
ctggttggaggagtttttggccagctctgacccccttgcctctggaaaggcagagtcctccgagtcccccatggcttccgctctcctggccaggacaaggacaggcctggccggatcctgtg

SEQ ID NO: 9676 - DNA, 122 bp, Homo sapiens
  misc_feature (61)..(62): /note="This region represents a CpG dinucleotide"
  misc_feature (61)..(61): /note="Nucleotide may be methylated to form 5-methylcytosine"
tgaccatcctcttcagtctgaggccattttgcttatgagaaaggcacacacaagaaatgccgtggcatcctgcccagccggtccgtgtctcattagacactgtggcttatttctggccacca

SEQ ID NO: 9677 - DNA, 122 bp, Homo sapiens
  misc_feature (61)..(62): /note="This region represents a CpG dinucleotide"
  misc_feature (61)..(61): /note="Nucleotide may be methylated to form 5-methylcytosine"
gttatgtacttgtgggtcatgatgttaaatgtgcttttccaagaatagccaagataaatccgaaaaagaaaaacaagcagggacgacttgccctaccagagttcagaacttgtcatgaaact

SEQ ID NO: 9678 - DNA, 122 bp, Homo sapiens
  misc_feature (61)..(62): /note="This region represents a CpG dinucleotide"
  misc_feature (61)..(61): /note="Nucleotide may be methylated to form 5-methylcytosine"
tacccaacagaccatttctcctgccatctcattctttagtcatcactaggggaaatcctccgtaaaggaaaggcagtcttagtaaagaaccattaaggaactgagatcaactctttacctga

SEQ ID NO: 9679 - DNA, 122 bp, Homo sapiens
  misc_feature (61)..(62): /note="This region represents a CpG dinucleotide"
  misc_feature (61)..(61): /note="Nucleotide may be methylated to form 5-methylcytosine"
caaataataactcacttaatctttataaccacccttggaggtaggtactgttattatccccgcaggtgacaacacaagcccatggtataacaaatttttccaaggtctcacacctagtaagt

SEQ ID NO: 9680 - DNA, 122 bp, Homo sapiens
  misc_feature (61)..(62): /note="This region represents a CpG dinucleotide"
  misc_feature (61)..(61): /note="Nucleotide may be methylated to form 5-methylcytosine"
ttcataggacactgaggaatgaggaagaaaaataggtgtgaaggtactttttgaaaagcacgaagttctagcaggtatcaggggtaatatttaccggaagaacattatggtgccttgctcat

SEQ ID NO: 9681 - DNA, 122 bp, Homo sapiens
  misc_feature (61)..(62): /note="This region represents a CpG dinucleotide"
  misc_feature (61)..(61): /note="Nucleotide may be methylated to form 5-methylcytosine"
tgccctctctgaggacttcctgtgttcacagtcatctagcagacaccaggcagtggctgccgctgcttggaaatacagcagacagcaatgtgtccctgagataaccctatccactcagggct

SEQ ID NO: 9682 - DNA, 122 bp, Homo sapiens
  misc_feature (61)..(62): /note="This region represents a CpG dinucleotide"
  misc_feature (61)..(61): /note="Nucleotide may be methylated to form 5-methylcytosine"
gtgggaccttgggcgagtcgtcaaggctctctgaatattagtttcatcctttaaaaacctcggattatcacacctacttgataggctgacgtgagtgccacatgaggtcattcccacatagg

SEQ ID NO: 9683 - DNA, 122 bp, Homo sapiens
  misc_feature (61)..(62): /note="This region represents a CpG dinucleotide"
  misc_feature (61)..(61): /note="Nucleotide may be methylated to form 5-methylcytosine"
ggcagcctgcagaggctctccccttctagaaggcccagcaagcgccccgtttcccacagacggttcccacctggggatgttgaaccagtctcaccagatctgcttacacggaggagctgcac

SEQ ID NO: 9684 - DNA, 122 bp, Homo sapiens
  misc_feature (61)..(62): /note="This region represents a CpG dinucleotide"
  misc_feature (61)..(61): /note="Nucleotide may be methylated to form 5-methylcytosine"
cgcccccaggaacgctctcctcgagccctcccccaaacagactcgctagcactcaagacccggttattcgcccacccgagtacctccagtcacactccccgcggttcatacgcatcccatct

SEQ ID NO: 9685 - DNA, 122 bp, Homo sapiens
  misc_feature (61)..(62): /note="This region represents a CpG dinucleotide"
  misc_feature (61)..(61): /note="Nucleotide may be methylated to form 5-methylcytosine"
gcatgaccaaaaaaaacaaatccagttatctaatatgttgaaaaatctgccatcttaagccggggtcagctgtgtgatctcctgagtacagatgaggtgttcacttgcaagggctgaggagg

SEQ ID NO: 9686 - DNA, 122 bp, Homo sapiens
  misc_feature (61)..(62): /note="This region represents a CpG dinucleotide"
  misc_feature (61)..(61): /note="Nucleotide may be methylated to form 5-methylcytosine"
gtctatatggcttattttctggagcagacaggaacagtgtaatgaaagagatcagacttgcgtttaaatcccatccggccatggatgtcctgtgtgatcttgggcatgtcattcgaactcct

SEQ ID NO: 9687 - DNA, 122 bp, Homo sapiens
  misc_feature (61)..(62): /note="This region represents a CpG dinucleotide"
  misc_feature (61)..(61): /note="Nucleotide may be methylated to form 5-methylcytosine"
ctgaggttctgccccctgcagtgatgtcttccaggcaagcttattcttatataaagtgaacggccaggcatggtggctcatgcctgtagtcctagcactttgggaggatgaggcaggtggat

SEQ ID NO: 9688 - DNA, 122 bp, Homo sapiens
  misc_feature (61)..(62): /note="This region represents a CpG dinucleotide"
  misc_feature (61)..(61): /note="Nucleotide may be methylated to form 5-methylcytosine"
ctacaaaacccgaggtcatttggttaattccactgccgagctccccacggcgcatacccccggatgcttcggcccagccaggttccttgctaagggcaagttttacgaccttgggaacattg

SEQ ID NO: 9689 - DNA, 122 bp, Homo sapiens
  misc_feature (61)..(62): /note="This region represents a CpG dinucleotide"
  misc_feature (61)..(61): /note="Nucleotide may be methylated to form 5-methylcytosine"
agatgccagtgagttcccagaaagcaagcttagtgagtattcccagaggtgatcacatgtcgcaaatccttcactttaggcattatgtaatttaaccactagatgctgtctatcctaccttc

SEQ ID NO: 9690 - DNA, 122 bp, Homo sapiens
  misc_feature (61)..(62): /note="This region represents a CpG dinucleotide"
  misc_feature (61)..(61): /note="Nucleotide may be methylated to form 5-methylcytosine"
actgtccagatttgatagctggatgaaatctgtgaggcctctctccccagcaactgcagtcgctgtgctcagtttttcttccttgttttcatttatgcctgacttccttctagctgtcaccc

SEQ ID NO: 9691 - DNA, 122 bp, Homo sapiens
  misc_feature (61)..(62): /note="This region represents a CpG dinucleotide"
  misc_feature (61)..(61): /note="Nucleotide may be methylated to form 5-methylcytosine"
gatggggaagcgcactgccgtcatttcctagtgtcaacgtgtctgaggaaggcccggcctcgccgagtatgctctccagcagcgtgaagacaaggggccctatcaacagctcaagccgaatt

SEQ ID NO: 9692 - DNA, 122 bp, Homo sapiens
  misc_feature (61)..(62): /note="This region represents a CpG dinucleotide"
  misc_feature (61)..(61): /note="Nucleotide may be methylated to form 5-methylcytosine"
atttaacaaggttcactttcctgttgttctaaggagcagagaatgatcaactgcgtcaaacgctgcttttagggaaaataagatgaggcccacgaattgaccagtaagtgctcaaataggtt

SEQ ID NO: 9693 - DNA, 122 bp, Homo sapiens
  misc_feature (61)..(62): /note="This region represents a CpG dinucleotide"
  misc_feature (61)..(61): /note="Nucleotide may be methylated to form 5-methylcytosine"
cttttgctcttgcaacgttctctacagtcctgttaatttccaggccagctcttcccccaccggccccgcaagccttcagggtgcctcccgctccgtggcccaccccgctgcctgcctccttc

SEQ ID NO: 9694 - DNA, 122 bp, Homo sapiens
  misc_feature (61)..(62): /note="This region represents a CpG dinucleotide"
  misc_feature (61)..(61): /note="Nucleotide may be methylated to form 5-methylcytosine"
caaactggaaagtcggcctaggtttccgaggataatgaaaggcacagcgttttttgacctcgacttcaggcctgaccccccactctctcggtcccgtacctcttctgcgggatgtaactctg

SEQ ID NO: 9695 - DNA, 122 bp, Homo sapiens
  misc_feature (61)..(62): /note="This region represents a CpG dinucleotide"
  misc_feature (61)..(61): /note="Nucleotide may be methylated to form 5-methylcytosine"
gcagcatccctcatgctaaatggtgacacttctcagtgacaatcagcctgaaggaggtgacgcccagcttgccggccgtgggtgtgcccctaggctgtgccacgaggcaccctgaaaagcag

SEQ ID NO: 9696 - DNA, 122 bp, Homo sapiens
  misc_feature (61)..(62): /note="This region represents a CpG dinucleotide"
  misc_feature (61)..(61): /note="Nucleotide may be methylated to form 5-methylcytosine"
gatgcgaattgccgcctggaccaaattgcagagaaagctaagaatagtaggtaggacccacgaaggcttccaagcctttaaatggaccatctgggtgagatgacagctcaaaatgggatcaa

SEQ ID NO: 9697 - DNA, 122 bp, Homo sapiens
  misc_feature (61)..(62): /note="This region represents a CpG dinucleotide"
  misc_feature (61)..(61): /note="Nucleotide may be methylated to form 5-methylcytosine"
agaaaccagaaacaggacttgaatcatcatcataaaggaaagtgttaattcatcactcaacgaacaatgggccttccgctccatcacgtcttctgtccagggttcccagagccccctttact

SEQ ID NO: 9698 - DNA, 122 bp, Homo sapiens
  misc_feature (61)..(62): /note="This region represents a CpG dinucleotide"
  misc_feature (61)..(61): /note="Nucleotide may be methylated to form 5-methylcytosine"
ctacatgaaaggttgaggtggggtggcatcttcctggcggggctgcccaaggacgctgcccgtggattctggccctggtgtcttgcaggtcacctctctcttcctgcagggccagggcaggt

SEQ ID NO: 9699 - DNA, 122 bp, Homo sapiens
  misc_feature (61)..(62): /note="This region represents a CpG dinucleotide"
  misc_feature (61)..(61): /note="Nucleotide may be methylated to form 5-methylcytosine"
gaagcaaactagctgatgatgctgtgccacgagaaccaaaaggaacatacaaatcagaaacgtctgttatccaaacccaactgagaaggctctgtctcaggaagggacctccccatttacat

SEQ ID NO: 9700 - DNA, 122 bp, Homo sapiens
  misc_feature (61)..(62): /note="This region represents a CpG dinucleotide"
  misc_feature (61)..(61): /note="Nucleotide may be methylated to form 5-methylcytosine"
ctctctttacaagatatttttgtataacgtaaatgcttttttcccctgtccatgtggaagcgctgtcgtttgttcaataaatatttgctgagtgctacaatcatacggagaacaaaacagat

SEQ ID NO: 9701 - DNA, 122 bp, Homo sapiens
  misc_feature (61)..(62): /note="This region represents a CpG dinucleotide"
  misc_feature (61)..(61): /note="Nucleotide may be methylated to form 5-methylcytosine"
tgggaagtaaacataagtgcttctgcagcttaacaaagtatactggttttcatgaggaaacgtacataagtatttgaattacaaatgtgtgcttttttcatggaacactattttttcttgaa

SEQ ID NO: 9702 - DNA, 122 bp, Homo sapiens
  misc_feature (61)..(62): /note="This region represents a CpG dinucleotide"
  misc_feature (61)..(61): /note="Nucleotide may be methylated to form 5-methylcytosine"
taataaacataaaagatctagtcaacctctctttgagtcacaaagagaaactacttagcccgtggctattgccattgctaatggcgtaagccagaattggtgaaaatgtaaagaaataagcc

SEQ ID NO: 9703 - DNA, 122 bp, Homo sapiens
  misc_feature (61)..(62): /note="This region represents a CpG dinucleotide"
  misc_feature (61)..(61): /note="Nucleotide may be methylated to form 5-methylcytosine"
caattctgtggcagttaaaaaatttctaaagtgccaggtttaatagatgttcagatgttacggtttagcacctaaggtcctgaaagcatgccagaataccagatagtgtgacattcatgtga

SEQ ID NO: 9704 - DNA, 122 bp, Homo sapiens
  misc_feature (61)..(62): /note="This region represents a CpG dinucleotide"
  misc_feature (61)..(61): /note="Nucleotide may be methylated to form 5-methylcytosine"
attaagactttcactaaccagtggaaattaggtaagcaccaatacaatagagactacacacggagagctagaatcaccactctgactcagcaataatgaggagccactcctgctacttgagt

SEQ ID NO: 9705 - DNA, 122 bp, Homo sapiens
  misc_feature (61)..(62): /note="This region represents a CpG dinucleotide"
  misc_feature (61)..(61): /note="Nucleotide may be methylated to form 5-methylcytosine"
gcaaatctcattaaatctgattaaaatctttcagtgactctaactgcccaagataagtttcgaactctataagcatactttacaaagtccttcaaaaggaccccgcttctatcttttagact

SEQ ID NO: 9706 - DNA, 122 bp, Homo sapiens
  misc_feature (61)..(62): /note="This region represents a CpG dinucleotide"
  misc_feature (61)..(61): /note="Nucleotide may be methylated to form 5-methylcytosine"
cagagtttccagagtttcctccagggatgaatcacacaggacacaatgtctgcaaggagacgctcaagccatgagccatgagccatgagtgagacctgaacctagctcacccgctatcctca

SEQ ID NO: 9707 - DNA, 122 bp, Homo sapiens
  misc_feature (61)..(62): /note="This region represents a CpG dinucleotide"
  misc_feature (61)..(61): /note="Nucleotide may be methylated to form 5-methylcytosine"
cccacccgacctcgccctcctccctggccggccttcccacccggaggggctcctcagccacgcactgcgtccagcaaaaccactaagtcagggaggccagggcgggcagcccattcatcgtc

SEQ ID NO: 9708 - DNA, 122 bp, Homo sapiens
  misc_feature (61)..(62): /note="This region represents a CpG dinucleotide"
  misc_feature (61)..(61): /note="Nucleotide may be methylated to form 5-methylcytosine"
ataatgtggggaaaaacacaacaaaataaaattcttttaaagatccattcctgactccagcgactttattctgctcctgtggcttctggttggagacttattggccagtatccagggaatca

SEQ ID NO: 9709 - DNA, 122 bp, Homo sapiens
  misc_feature (61)..(62): /note="This region represents a CpG dinucleotide"
  misc_feature (61)..(61): /note="Nucleotide may be methylated to form 5-methylcytosine"
tgctgtgactttttatctctctcttttccttctagaatatccaagatgtgtatgctggtccggttgatagtataccacaggttccttagtactttgtttactttttaaatttctgttcttca

SEQ ID NO: 9710 - DNA, 122 bp, Homo sapiens
  misc_feature (61)..(62): /note="This region represents a CpG dinucleotide"
  misc_feature (61)..(61): /note="Nucleotide may be methylated to form 5-methylcytosine"
ggtgaatcagacacttgaacatctgtccacttcatggaagacgtttcatctcagaatacacgtactaataaacaacagttggagacaattgtctctgacattcaacataatgctgagctgag

SEQ ID NO: 9711 - DNA, 122 bp, Homo sapiens
  misc_feature (61)..(62): /note="This region represents a CpG dinucleotide"
  misc_feature (61)..(61): /note="Nucleotide may be methylated to form 5-methylcytosine"
catcagcagaaagcagaaattatttagaagctcctcacctgtccccctgagttaaatcaacgttgcacttgcttgttatttccatgtatttcaatagctcccagaggagtagttccaagaat

SEQ ID NO: 9712 - DNA, 122 bp, Homo sapiens
  misc_feature (61)..(62): /note="This region represents a CpG dinucleotide"
  misc_feature (61)..(61): /note="Nucleotide may be methylated to form 5-methylcytosine"
ctgccaagtaaaccttacacatggtagagtttaaatctcttgcctttaaagggatctccacgtccagccaatctgaattaaagatgagtacccattagtattatgcagacggttcagcttct

SEQ ID NO: 9713 - DNA, 122 bp, Homo sapiens
  misc_feature (61)..(62): /note="This region represents a CpG dinucleotide"
  misc_feature (61)..(61): /note="Nucleotide may be methylated to form 5-methylcytosine"
cagtgacagacatcactaatcaatcttgacattctttcaggctgagtctgtcatagcctccgaatccttttcaatgaaatactgcagggagccaccacgatcaattggagttggtgcctgaa

SEQ ID NO: 9714 - DNA, 122 bp, Homo sapiens
  misc_feature (61)..(62): /note="This region represents a CpG dinucleotide"
  misc_feature (61)..(61): /note="Nucleotide may be methylated to form 5-methylcytosine"
cgtgtgaataattaattggctgaataacagtcacaattgaatggatgaaagagtacatgacggacaatgtatgagtggctaaactgttgaccgacagactgagtcaatgaataggtgaatga

SEQ ID NO: 9715 - DNA, 122 bp, Homo sapiens
  misc_feature (61)..(62): /note="This region represents a CpG dinucleotide"
  misc_feature (61)..(61): /note="Nucleotide may be methylated to form 5-methylcytosine"
aagagaggaaggcttcccagatgcaggggaaaaagctctaagcctggctggagatgaatgcgttttgccaattcctggaaacaagaggcctgacatcatgagtaagacagaaactgtgtagg

SEQ ID NO: 9716 - DNA, 122 bp, Homo sapiens
  misc_feature (61)..(62): /note="This region represents a CpG dinucleotide"
  misc_feature (61)..(61): /note="Nucleotide may be methylated to form 5-methylcytosine"
aaataactattgaccagttgtcttctaactctattaagtataggaaaaaatgaaccataacggtgaagaaacatatcagcagatatctgtataaccctggatgtctttaaaagcaggacagg

SEQ ID NO: 9717 - DNA, 122 bp, Homo sapiens
  misc_feature (61)..(62): /note="This region represents a CpG dinucleotide"
  misc_feature (61)..(61): /note="Nucleotide may be methylated to form 5-methylcytosine"
ttgactcatgcaacatggatggatcataaatatattttgctaagagaaagaaattattctcgaaagataacatactatagtaataggtgtggagagggtgtgactataaagggcagaatttt

SEQ ID NO: 9718 - DNA, 122 bp, Homo sapiens
  misc_feature (61)..(62): /note="This region represents a CpG dinucleotide"
  misc_feature (61)..(61): /note="Nucleotide may be methylated to form 5-methylcytosine"
gttcttcgcagggcagacctggaggttgttcctctctaccacagttgccttgggggtacacgtaaaggtggtgtagtttttttcctggttagccttacttttacctaccttttgagaggaag

SEQ ID NO: 9719 - DNA, 122 bp, Homo sapiens
  misc_feature (61)..(62): /note="This region represents a CpG dinucleotide"
  misc_feature (61)..(61): /note="Nucleotide may be methylated to form 5-methylcytosine"
aagtagccgggcgtggtggcgcatgcctgcatttccagctactccctgaggtgggaggatcgcttgaacccaggtggcagaggttgcggtgaactgagattgcgccattgcactccagcctg

SEQ ID NO: 9720 - DNA, 122 bp, Homo sapiens
  misc_feature (61)..(62): /note="This region represents a CpG dinucleotide"
  misc_feature (61)..(61): /note="Nucleotide may be methylated to form 5-methylcytosine"
gaaaggacacaaaacctcagtgattccaaagagtagatctaatatagatgacttcttggtcgggcatggtggctcagacctgtaatcccagaactttgggaggccgaggcggttggatcact

SEQ ID NO: 9721 - DNA, 122 bp, Homo sapiens
  misc_feature (61)..(62): /note="This region represents a CpG dinucleotide"
  misc_feature (61)..(61): /note="Nucleotide may be methylated to form 5-methylcytosine"
atctgattgcacacaggccactgactcacactgtgatcttcggtaagtaggtttaccactcggtgtcctgtttttccatctgtgagatgggaatgataacatggggctgctgggtcaagcca

SEQ ID NO: 9722 - DNA, 122 bp, Homo sapiens
  misc_feature (61)..(62): /note="This region represents a CpG dinucleotide"
  misc_feature (61)..(61): /note="Nucleotide may be methylated to form 5-methylcytosine"
ctacagacatacgcgtggattaaggcagagtccgactccaggcaggcaagaagtgtcgtgcgcacagaccacccctggagatggggagctggcacatctcaacatccagccgattctgcggg

SEQ ID NO: 9723 - DNA, 122 bp, Homo sapiens
  misc_feature (61)..(62): /note="This region represents a CpG dinucleotide"
  misc_feature (61)..(61): /note="Nucleotide may be methylated to form 5-methylcytosine"
ccttctcacccttcacgtgagggagccccccacaggtgcataaatgtgcgcatttgtagacgtgcagcagcttattgttaagctttactgaggtaaggcatgtgtagcacatgatttacaaa

SEQ ID NO: 9724 - DNA, 122 bp, Homo sapiens
  misc_feature (61)..(62): /note="This region represents a CpG dinucleotide"
  misc_feature (61)..(61): /note="Nucleotide may be methylated to form 5-methylcytosine"
tccaggctttcatttttcattctggcttcatttttatgtctgtgtctgattctccagatccgagtttaactactaaacctatgtttagataaaaggcggataatgccatattgtatttgctt

SEQ ID NO: 9725 - DNA, 122 bp, Homo sapiens
  misc_feature (61)..(62): /note="This region represents a CpG dinucleotide"
  misc_feature (61)..(61): /note="Nucleotide may be methylated to form 5-methylcytosine"
tggtattttggtcagtgcagacagctgctgggggtgacgtcagtgcagtgggcctctgcacgctcagccccggatgtcgggagggggaggagggaggggagagctactggatgcaaagctct

SEQ ID NO: 9726 - DNA, 122 bp, Homo sapiens
  misc_feature (61)..(62): /note="This region represents a CpG dinucleotide"
  misc_feature (61)..(61): /note="Nucleotide may be methylated to form 5-methylcytosine"
acgctgggattggtgaggtcctctggccccgccccgccagggaggatttccaggccggcccgaccagctcgccctgcatacacttcttggctgtgtgcgctcagcaggacgtgggaggctcc

SEQ ID NO: 9727 - DNA, 122 bp, Homo sapiens
  misc_feature (61)..(62): /note="This region represents a CpG dinucleotide"
  misc_feature (61)..(61): /note="Nucleotide may be methylated to form 5-methylcytosine"
acaagaaaagccacaaagcccagctgcacttagtttctgttcacttagtgcagcttatgacgtaggctcgttgtattttgaatttgcacattaaaaacattcattcagagaggaaactgcct

SEQ ID NO: 9728 - DNA, 122 bp, Homo sapiens
  misc_feature (61)..(62): /note="This region represents a CpG dinucleotide"
  misc_feature (61)..(61): /note="Nucleotide may be methylated to form 5-methylcytosine"
ttccttatgaatcaactggggacagtaatacctcacagggttgtgaaagtaaatgagtaacgcaaattaatgcacctaccacagcacctggcacaggatgaatcataaatgaaaaactttaa

SEQ ID NO: 9729 - DNA, 122 bp, Homo sapiens
  misc_feature (61)..(62): /note="This region represents a CpG dinucleotide"
  misc_feature (61)..(61): /note="Nucleotide may be methylated to form 5-methylcytosine"
cgagggcgagggcgagggagagcctggtttctcacttctgcttcctccttgtggctcccacgctgtgccgagccattcagcctgcacaatccagacaatggatttgcctctgaagtaggggc

SEQ ID NO: 9730 - DNA, 122 bp, Homo sapiens
  misc_feature (61)..(62): /note="This region represents a CpG dinucleotide"
  misc_feature (61)..(61): /note="Nucleotide may be methylated to form 5-methylcytosine"
caagtaatcctcccacctcggcctaacaaagtgttgggactacaggcgtaagccaccgtgcgtggccctcattagggttttgggactagagctacaaagccactgaagtaaggtggcatgac

SEQ ID NO: 9731 - DNA, 122 bp, Homo sapiens
  misc_feature (61)..(62): /note="This region represents a CpG dinucleotide"
  misc_feature (61)..(61): /note="Nucleotide may be methylated to form 5-methylcytosine"
ggttccaaatcccagccagtcctcccagaagccaaagagaagccagcctctaagaaggaacggatagctgatgtgaagaaggtatctactttgccctgcagtacaaatgtgctgctagccta

SEQ ID NO: 9732 - DNA, 122 bp, Homo sapiens
  misc_feature (61)..(62): /note="This region represents a CpG dinucleotide"
  misc_feature (61)..(61): /note="Nucleotide may be methylated to form 5-methylcytosine"
cttaggctcagggaattgaccagggaactccaggatcagaatgcacaaggcactgtccaacgtccagcagcagggcatatgtgggtccttggggccatattcctttaacctgtggacacttc

SEQ ID NO: 9733 - DNA, 122 bp, Homo sapiens
  misc_feature (61)..(62): /note="This region represents a CpG dinucleotide"
  misc_feature (61)..(61): /note="Nucleotide may be methylated to form 5-methylcytosine"
tttccaaaccattcttgaatgtgcatttcatccatatttataagaatgcaagcctgcacacgctttccaccctgtgtcaccccatcatgggcagggacttggtttacagacttttatatttg

SEQ ID NO: 9734 - DNA, 122 bp, Homo sapiens
  misc_feature (61)..(62): /note="This region represents a CpG dinucleotide"
  misc_feature (61)..(61): /note="Nucleotide may be methylated to form 5-methylcytosine"
gtgcaggcacctgctgcccacaggcctttgggtggtgtgagaacaccagaatcaggttaccgtcactgagttgccaaaccacattctgattctaatgctggccagctgtgtgcccttgggtc

SEQ ID NO: 9735 - DNA, 122 bp, Homo sapiens
  misc_feature (61)..(62): /note="This region represents a CpG dinucleotide"
  misc_feature (61)..(61): /note="Nucleotide may be methylated to form 5-methylcytosine"
agcatattttaagtgactgttatagagaagtattttctcttttggagatctaaagatgtacgttctcttagtacatataagagtaagaatgaagagatttaacaaggtactttccttccact

SEQ ID NO: 9736 - DNA, 122 bp, Homo sapiens
  misc_feature (61)..(62): /note="This region represents a CpG dinucleotide"
  misc_feature (61)..(61): /note="Nucleotide may be methylated to form 5-methylcytosine"
cactttttgtaaagagccagagagctggtatttcaggctttcagttccgtaaggtccctccgctgcttggctctgcggctgtagcgtgaaggcagacaccgacgatgcctccaggaaggacg

SEQ ID NO: 9737 - DNA, 122 bp, Homo sapiens
  misc_feature (61)..(62): /note="This region represents a CpG dinucleotide"
  misc_feature (61)..(61): /note="Nucleotide may be methylated to form 5-methylcytosine"
tgggaatgcatgccgtttctgctgcctgccctgaacacagtccatcaaccacagccccagcgcccccaccacccagggtaggggatacagacaaacctgcttggagctcagggtctcactcc

SEQ ID NO: 9738 - DNA, 122 bp, Homo sapiens
  misc_feature (61)..(62): /note="This region represents a CpG dinucleotide"
  misc_feature (61)..(61): /note="Nucleotide may be methylated to form 5-methylcytosine"
ccctttataaattacccaggctcagatagttctctgtagcaatatgagagcggatgaatacgtgccaaaactatttgttgggttgtgataaaaagggagcatgcctcttttcccttttttat

SEQ ID NO: 9739 - DNA, 122 bp, Homo sapiens
  misc_feature (61)..(62): /note="This region represents a CpG dinucleotide"
  misc_feature (61)..(61): /note="Nucleotide may be methylated to form 5-methylcytosine"
tatgtttgaggattatacagtaacaaggtgggagaaactagatctcatgcagtcaaaatacgtgaagaacagttctccattggactaggtaattcattattctactaattttgccttgtgta

SEQ ID NO: 9740 - DNA, 122 bp, Homo sapiens
  misc_feature (61)..(62): /note="This region represents a CpG dinucleotide"
  misc_feature (61)..(61): /note="Nucleotide may be methylated to form 5-methylcytosine"
cattccatggctgattcacgtggagttcctgcataacaaaattcgggtagaaatgatctacgagaagtaagtaccaacacctcctattggagatgtgaaattgagcaagccgttcttacctg

SEQ ID NO: 9741 - DNA, 122 bp, Homo sapiens
  misc_feature (61)..(62): /note="This region represents a CpG dinucleotide"
  misc_feature (61)..(61): /note="Nucleotide may be methylated to form 5-methylcytosine"
agagcacagctgtcccagggaaatttccatatcccttaagaaaagcaggatgtcagttagcgttcagggatccagcctatagaaaaaagtgggagaaatctccctgaggaatgaaagcaaga

SEQ ID NO: 9742 - DNA, 122 bp, Homo sapiens
  misc_feature (61)..(62): /note="This region represents a CpG dinucleotide"
  misc_feature (61)..(61): /note="Nucleotide may be methylated to form 5-methylcytosine"
tagcagacatcaagattctggtggcacagttcctgctgaggacaaggtccagggtgtgcccgcaccaggaagtgggtggcatggggcacagtgcaggcgaaggtcagtgaagcagaggaagt

SEQ ID NO: 9743 - DNA, 122 bp, Homo sapiens
  misc_feature (61)..(62): /note="This region represents a CpG dinucleotide"
  misc_feature (61)..(61): /note="Nucleotide may be methylated to form 5-methylcytosine"
acgctgcggcgggtgtgggagcccttccttcctgaggtgactccctctgtgcggaatcaccgtgctgtccgttccttcctccggcggtggacacggagctgctgcttccacatggccgctga

SEQ ID NO: 9744 - DNA, 122 bp, Homo sapiens
  misc_feature (61)..(62): /note="This region represents a CpG dinucleotide"
  misc_feature (61)..(61): /note="Nucleotide may be methylated to form 5-methylcytosine"
tacagacactgcccctttttatataagggacttgagcatttgtggagtttggtgtctgcacggggtcctggaacccctcctcacacataccggggatgactgtacttctcctcatgctcgca

SEQ ID NO: 9745 - DNA, 122 bp, Homo sapiens
  misc_feature (61)..(62): /note="This region represents a CpG dinucleotide"
  misc_feature (61)..(61): /note="Nucleotide may be methylated to form 5-methylcytosine"
attcatcataaaattgaacccattcaaaatgtcctaacctaaagcactttgttagttatccgccttaaaaggcattgattcatctctgcatgtgttggagtataaatggcaagcctcagaga

SEQ ID NO: 9746 - DNA, 122 bp, Homo sapiens
  misc_feature (61)..(62): /note="This region represents a CpG dinucleotide"
  misc_feature (61)..(61): /note="Nucleotide may be methylated to form 5-methylcytosine"
tcccttcccatgctcattactcagcagccttctaaagtaaataatcatgggcttttactgcgtaatcagattagcacagtaaatggtggaaaaataacattattgattgaaaagttggttaa

SEQ ID NO: 9747 - DNA, 122 bp, Homo sapiens
  misc_feature (61)..(62): /note="This region represents a CpG dinucleotide"
  misc_feature (61)..(61): /note="Nucleotide may be methylated to form 5-methylcytosine"
ctggatgtggactcactcagaaccccacacttctttccaattgcagtctgagcagagggacgctgggacagagccctggactttcctaaaaccgggaaatcccaggacaggactagaccaga

SEQ ID NO: 9748 - DNA, 122 bp, Homo sapiens
  misc_feature (61)..(62): /note="This region represents a CpG dinucleotide"
  misc_feature (61)..(61): /note="Nucleotide may be methylated to form 5-methylcytosine"
tgtgccaactaatgatgtgcctgtgacaaactgagtcatgctgaccgtgggactgcagaccgcagaggagagtgctctcatgaccccttggataaagcagtgaagctttgcatcacctgagg

SEQ ID NO: 9749 - DNA, 122 bp, Homo sapiens
  misc_feature (61)..(62): /note="This region represents a CpG dinucleotide"
  misc_feature (61)..(61): /note="Nucleotide may be methylated to form 5-methylcytosine"
gaaaatatgggggcaacatgagagggaaacagaagctgttacaataagagacaagaaaagcgagatttagggaaaggggaatgagaaaacagaagataaataatagaaattattttcttaga

SEQ ID NO: 9750 - DNA, 122 bp, Homo sapiens
  misc_feature (61)..(62): /note="This region represents a CpG dinucleotide"
  misc_feature (61)..(61): /note="Nucleotide may be methylated to form 5-methylcytosine"
tggcaggttcctgcccttccttgttgtcccggttcatcttctgctccttgagcagggagccgggcaggttggaggcgtacttaaagccagggccacgcttttgcttgtaggccaaaaagaga

SEQ ID NO: 9751 - DNA, 122 bp, Homo sapiens
  misc_feature (61)..(62): /note="This region represents a CpG dinucleotide"
  misc_feature (61)..(61): /note="Nucleotide may be methylated to form 5-methylcytosine"
ggagccaggcttatgtgtgaccaagcttcttagcagagcatttgggcaaggcctttacaccgcatgggagtctggagttttcagtaacttgccacacaggaaggccacacagctggtaggca

SEQ ID NO: 9752 - DNA, 122 bp, Homo sapiens
  misc_feature (61)..(62): /note="This region represents a CpG dinucleotide"
  misc_feature (61)..(61): /note="Nucleotide may be methylated to form 5-methylcytosine"
gcatcctcttcaggacaactggcttagactctaaaaagtctaaacaaacaaaacaaaccacgggaactggtccaccttaaaagagatgaaagggagagaacaaaatgcaatgagtaaacttg

SEQ ID NO: 9753 - DNA, 122 bp, Homo sapiens
  misc_feature (61)..(62): /note="This region represents a CpG dinucleotide"
  misc_feature (61)..(61): /note="Nucleotide may be methylated to form 5-methylcytosine"
aatcaattctgcaactgtatcatgaaagcagctatagattatatataaacaaatgaatgtcgttatgttccaatgaaactttgtttacagaaacagtgggctggccaggcacagtggctcaa

SEQ ID NO: 9754 - DNA, 122 bp, Homo sapiens
  misc_feature (61)..(62): /note="This region represents a CpG dinucleotide"
  misc_feature (61)..(61): /note="Nucleotide may be methylated to form 5-methylcytosine"
gtgggctgtggtgcggtatttggtttcacagggcaggtggtgctgatttaggccagtgaccgaaaaaaaaaaaaaaaaaactcccgaggtgcctgggacattgcccacctgaaatcccaaaa

SEQ ID NO: 9755 - DNA, 122 bp, Homo sapiens
  misc_feature (61)..(62): /note="This region represents a CpG dinucleotide"
  misc_feature (61)..(61): /note="Nucleotide may be methylated to form 5-methylcytosine"
agagcatgagtaaatccggggctcaggccagggctcagtagatctgacacctgcatccaacgcaagaaacactgaatgctgaggggaggttcctgggacaaggaccaaaacaccacccctta

SEQ ID NO: 9756 - DNA, 122 bp, Homo sapiens
  misc_feature (61)..(62): /note="This region represents a CpG dinucleotide"
  misc_feature (61)..(61): /note="Nucleotide may be methylated to form 5-methylcytosine"
tgggcacgtaactaatctgtattaagagtaagatgtcatttttatgtaacatcttaactacggtgacttattaaatatgatcaagaaaatcatgttctaccaacaggactgaacttgagaat

SEQ ID NO: 9757 - DNA, 122 bp, Homo sapiens
  misc_feature (61)..(62): /note="This region represents a CpG dinucleotide"
  misc_feature (61)..(61): /note="Nucleotide may be methylated to form 5-methylcytosine"
cgcgtcccggattcggtacccggaaccgtgcagacgtggtctatggagcccgggccatctcgcccccgcggctcccgaagccgaagaacttcttggtggtggtgacttctcagacccccaac

SEQ ID NO: 9758 - DNA, 122 bp, Homo sapiens
  misc_feature (61)..(62): /note="This region represents a CpG dinucleotide"
  misc_feature (61)..(61): /note="Nucleotide may be methylated to form 5-methylcytosine"
tgaaatgctctttgcagaaagtttcagccgtaacaaatgagcacgcaccgcgcaccagatcgcggactccgggatggtgcctggaggtgagcagatcttccttcgccgcacaagctggaaca

SEQ ID NO: 9759 - DNA, 122 bp, Homo sapiens
  misc_feature (61)..(62): /note="This region represents a CpG dinucleotide"
  misc_feature (61)..(61): /note="Nucleotide may be methylated to form 5-methylcytosine"
ctggctgggtgtgaactcagcctttaggcttttggtgtctggcaatagtgttcgtaaatacgtactgaagtacaaaagtttgccaagttacatagtttaaacaaaacaaaacaaaacaaaac

SEQ ID NO: 9760 - DNA, 122 bp, Homo sapiens
  misc_feature (61)..(62): /note="This region represents a CpG dinucleotide"
  misc_feature (61)..(61): /note="Nucleotide may be methylated to form 5-methylcytosine"
gtacaacaggcacttcttttaactggaagaaggaagaggagccttttgccctgtcagagccgcacaggacacttaaaaacccaggctggccacggtcacatggcagtaacttctagattgtt

SEQ ID NO: 9761 - DNA, 122 bp, Homo sapiens
  misc_feature (61)..(62): /note="This region represents a CpG dinucleotide"
  misc_feature (61)..(61): /note="Nucleotide may be methylated to form 5-methylcytosine"
agcccttgatggctgcactgtatgatccacatataatgaaacttacactatgccaagacgcggcctgccattttgagatttaagagtagacaaaagtgagtggctgtaactcactaaggaaa

SEQ ID NO: 9762 - DNA, 122 bp, Homo sapiens
  misc_feature (61)..(62): /note="This region represents a CpG dinucleotide"
  misc_feature (61)..(61): /note="Nucleotide may be methylated to form 5-methylcytosine"
gccttaagtaatctgcctgcctccacctcccaaagtgctgggataacaggcctgagtcaccgcacccagcctcaccactggcttttgagcaggagagtatcttggtagtgagcttcaggatc

SEQ ID NO: 9763 - DNA, 122 bp, Homo sapiens
  misc_feature (61)..(62): /note="This region represents a CpG dinucleotide"
  misc_feature (61)..(61): /note="Nucleotide may be methylated to form 5-methylcytosine"
gacctttatgtattttgtctggatttcctacatcccttcatttgtaatacttagaatcagcgttgaggttcagaaagcccctggagctgaacaattagctatagaatgctagagatcctatg

SEQ ID NO: 9764 - DNA, 122 bp, Homo sapiens
  misc_feature (61)..(62): /note="This region represents a CpG dinucleotide"
  misc_feature (61)..(61): /note="Nucleotide may be methylated to form 5-methylcytosine"
cagtgtggtttgcaaggatattttaaaaaagattgtccaatgagaaacaagccgccccctcgcccatgtccattatgcctatgcaatcattgccccagaggacaaaggttctctgtgtcaga

SEQ ID NO: 9765 - DNA, 122 bp, Homo sapiens
  misc_feature (61)..(62): /note="This region represents a CpG dinucleotide"
  misc_feature (61)..(61): /note="Nucleotide may be methylated to form 5-methylcytosine"
gcagccgcagacaccacccaactggcagaaatttcaaacaaggggttctgccttgcactccggtgcaagggttgggcacgtggactcacatgtgaccaatcacattgtctttcctgagatcc

SEQ ID NO: 9766 - DNA, 122 bp, Homo sapiens
  misc_feature (61)..(62): /note="This region represents a CpG dinucleotide"
  misc_feature (61)..(61): /note="Nucleotide may be methylated to form 5-methylcytosine"
cagctacaagcaggatcttcatctccttttcagctgtggataacaacggaagcagtcagccgtctaataaatcaagtttaattttaacagcatgaagtattgcccgctttgtaattatactt

SEQ ID NO: 9767 - DNA, 122 bp, Homo sapiens
  misc_feature (61)..(62): /note="This region represents a CpG dinucleotide"
  misc_feature (61)..(61): /note="Nucleotide may be methylated to form 5-methylcytosine"
tcaactcctgacctcgtgatccacctgtcttggccctgggattacaggtgtgagccaccacgcctggccaggagtttcttaactgttctatacatgacacatgctcctgaggaagtgaggta

SEQ ID NO: 9768 - DNA, 122 bp, Homo sapiens
  misc_feature (61)..(62): /note="This region represents a CpG dinucleotide"
  misc_feature (61)..(61): /note="Nucleotide may be methylated to form 5-methylcytosine"
acttttctgacaagggacaacggttcctgcgcagatctgcagtttctaaagttgatcgcgcgattggatttgctccccttagaagaaattagtgtctccctcattgcagatgcaaatgcgct

SEQ ID NO: 9769 - DNA, 122 bp, Homo sapiens
  misc_feature (61)..(62): /note="This region represents a CpG dinucleotide"
  misc_feature (61)..(61): /note="Nucleotide may be methylated to form 5-methylcytosine"
tctgaggttagctatggtggtggccgcacaacatggcgagtgtatacgaaacctctggaccgtgtgggctgcacactctcaatgggtgagttctaaggtctgtgaactccatcccgacaaaa

SEQ ID NO: 9770 - DNA, 122 bp, Homo sapiens
  misc_feature (61)..(62): /note="This region represents a CpG dinucleotide"
  misc_feature (61)..(61): /note="Nucleotide may be methylated to form 5-methylcytosine"
ttaggtgataaaagtatgtttaattttgcaggaaattgctgaactgtcttctagaacaaccgtaccgtcttgcattcctgtcagcaatcagtgagaattcctgttgctccgcatcctcacca

SEQ ID NO: 9771 - DNA, 122 bp, Homo sapiens
  misc_feature (61)..(62): /note="This region represents a CpG dinucleotide"
  misc_feature (61)..(61): /note="Nucleotide may be methylated to form 5-methylcytosine"
ttgatatgtctactacccaccttctttatcaaattttaacaattaaaattaagggccgggcgtggtagctcacgcctgtaatcgcagcactttgggaggccaaggcggacggatcatgaggt

SEQ ID NO: 9772 - DNA, 122 bp, Homo sapiens
  misc_feature (61)..(62): /note="This region represents a CpG dinucleotide"
  misc_feature (61)..(61): /note="Nucleotide may be methylated to form 5-methylcytosine"
ctaaacttttaggatataaacaccatgagaaaaagactttgttttgtttattgtactatccggatacacaaagtgtgtctggtatgtgtaggtactcagtaaatatttgctgtgaatgagta

SEQ ID NO: 9773 - DNA, 122 bp, Homo sapiens
  misc_feature (61)..(62): /note="This region represents a CpG dinucleotide"
  misc_feature (61)..(61): /note="Nucleotide may be methylated to form 5-methylcytosine"
tgtgcagtctcattcaccgtgggtggaggtgtgaattgattgaactttgctggagggcaacgtgacagcatccggagccctgatggtttccacccaccgacttcccactgaagaatttatcc

SEQ ID NO: 9774 - DNA, 122 bp, Homo sapiens
  misc_feature (61)..(62): /note="This region represents a CpG dinucleotide"
  misc_feature (61)..(61): /note="Nucleotide may be methylated to form 5-methylcytosine"
caggagtgcggtgcagccacacatccaaggctgacagggcgggcactctgccaagtcctgcgcgctgctcgccttccacaacaccttcctcagcttcgtctgtatttgaagagcttagtaaa

SEQ ID NO: 9775 - DNA, 122 bp, Homo sapiens
  misc_feature (61)..(62): /note="This region represents a CpG dinucleotide"
  misc_feature (61)..(61): /note="Nucleotide may be methylated to form 5-methylcytosine"
ccacggccaccgcccgcgccctcccggggactccggcgccccgtccgcccctcggcctcgcgcacctggagggagcacgtggccgcctctgggacaaacctcaccaggccgggggcccagga

SEQ ID NO: 9776 - DNA, 122 bp, Homo sapiens
  misc_feature (61)..(62): /note="This region represents a CpG dinucleotide"
  misc_feature (61)..(61): /note="Nucleotide may be methylated to form 5-methylcytosine"
caatataatcccttttaccatctctttgagccccttttacagagtacaaagagttatgtgcgactcccacatgaggcttcttagagggaagactgttcttcagcagagattcagaactactt

SEQ ID NO: 9777 - DNA, 122 bp, Homo sapiens
  misc_feature (61)..(62): /note="This region represents a CpG dinucleotide"
  misc_feature (61)..(61): /note="Nucleotide may be methylated to form 5-methylcytosine"
aggatgttaaagaatgaggatgaacactcgagatcacgtgaggaggcttctatgaggagacgcaaatcctgctaagcccatggctgcagatattttttcccccaagtcctcagattagcggt

SEQ ID NO: 9778 - DNA, 122 bp, Homo sapiens
  misc_feature (61)..(62): /note="This region represents a CpG dinucleotide"
  misc_feature (61)..(61): /note="Nucleotide may be methylated to form 5-methylcytosine"
gcacagggctggaaagagtcttgttctgtcatcatcccctgaaccagtccccaagagtcacgcaccaaccgtgctctacaaacacacggagagaagaggagaaagcagcaagagggagtgca

SEQ ID NO: 9779 - DNA, 122 bp, Homo sapiens
  misc_feature (61)..(62): /note="This region represents a CpG dinucleotide"
  misc_feature (61)..(61): /note="Nucleotide may be methylated to form 5-methylcytosine"
gttgcttcccaggttgctggaaaaatcaacgtaggatagcatcggtagaggacgctaccgcggcgcaggtgaaagatgtaaacagtgcaatctaaatcttcaatgggatgcaagtcagactt

SEQ ID NO: 9780 - DNA, 122 bp, Homo sapiens
  misc_feature (61)..(62): /note="This region represents a CpG dinucleotide"
  misc_feature (61)..(61): /note="Nucleotide may be methylated to form 5-methylcytosine"
tgcgggcccctttgtcagcacagggcaggtgctgaagaacttgtgctcatctggcccaagcgcctcctccatgttttcatccttgacaagcccagaccaggaactcagtgtcccctcacaag

SEQ ID NO: 9781 - DNA, 122 bp, Homo sapiens
  misc_feature (61)..(62): /note="This region represents a CpG dinucleotide"
  misc_feature (61)..(61): /note="Nucleotide may be methylated to form 5-methylcytosine"
ctgtggtatcatcttcctgcccgcggttttgtcctggccgtggcaggttctgccagggagcgggaggctgtcagctgggtggaggggggctgtgggagtgatagcctggggtgggggcatac

SEQ ID NO: 9782 - DNA, 122 bp, Homo sapiens
  misc_feature (61)..(62): /note="This region represents a CpG dinucleotide"
  misc_feature (61)..(61): /note="Nucleotide may be methylated to form 5-methylcytosine"
gccatgggtcatgcctgtgtaatcacagatcatgtgatcctgccactgtactccagcctgcgtgacagagcaagaccctgtctccaaaaaaaaaaaaaaaaaaaaaaaaaaaggactgcgtg

SEQ ID NO: 9783 - DNA, 122 bp, Homo sapiens
  misc_feature (61)..(62): /note="This region represents a CpG dinucleotide"
  misc_feature (61)..(61): /note="Nucleotide may be methylated to form 5-methylcytosine"
tgcctcatacaaaatggaaattcaaatagtgtttattgatagggttattatggtgcttcacggagattttgcaagtaaagcacatagcataaggcctgatgcagcataagtgctcaataaat

SEQ ID NO: 9784 - DNA, 122 bp, Homo sapiens
  misc_feature (61)..(62): /note="This region represents a CpG dinucleotide"
  misc_feature (61)..(61): /note="Nucleotide may be methylated to form 5-methylcytosine"
tcttgatttggtcactctccaaaagtggttagaggtcgaaatgcacattatgacttagaacgcagcagttctagccaaggagggctctgctatttgcatgaagatgactcactactctatct

SEQ ID NO: 9785 - DNA, 122 bp, Homo sapiens
  misc_feature (61)..(62): /note="This region represents a CpG dinucleotide"
  misc_feature (61)..(61): /note="Nucleotide may be methylated to form 5-methylcytosine"
tctgtggagcagtagttctcacccctggttatacacacatctggggagcgttgaaaaacacgttcttagaccctatcccaaaaccattagattaaaatatttaaggaaatttatcattagta

SEQ ID NO: 9786 - DNA, 122 bp, Homo sapiens
  misc_feature (61)..(62): /note="This region represents a CpG dinucleotide"
  misc_feature (61)..(61): /note="Nucleotide may be methylated to form 5-methylcytosine"
ctttgtattgcactctagtgaaaaccagccggaccagcagggggtggcacagaaaagaggcgagaatgtgagattaatagagtgctagcaagacaacagaaaatcccaggcagcagtttcac

SEQ ID NO: 9787 - DNA, 122 bp, Homo sapiens
  misc_feature (61)..(62): /note="This region represents a CpG dinucleotide"
  misc_feature (61)..(61): /note="Nucleotide may be methylated to form 5-methylcytosine"
gtatttttcaatgcttcttacctgttatttgtgttttaatttattgctctatttttccatcgatgccactgtttttaattttgttccctataggtcaggttcatctgctcacttctgatgta

SEQ ID NO: 9788 - DNA, 122 bp, Homo sapiens
  misc_feature (61)..(62): /note="This region represents a CpG dinucleotide"
  misc_feature (61)..(61): /note="Nucleotide may be methylated to form 5-methylcytosine"
gccagccaggcccaggcaaggcgctctgtgccacctcgcccttccagggcagttaggcttcgcagagcatgcttccggtcctctctcccctgctctccaccccagctccctgtcatgcattc

SEQ ID NO: 9789 - DNA, 122 bp, Homo sapiens
  misc_feature (61)..(62): /note="This region represents a CpG dinucleotide"
  misc_feature (61)..(61): /note="Nucleotide may be methylated to form 5-methylcytosine"
tgcaactcaggcccaggatgacaaatggtgtcttaggccattgttaacacagggaggtagcgaccagttgacgtgtgatttttaaatgctcagtgcagaataaatgaaatgatgccattgtc

SEQ ID NO: 9790 - DNA, 122 bp, Homo sapiens
  misc_feature (61)..(62): /note="This region represents a CpG dinucleotide"
  misc_feature (61)..(61): /note="Nucleotide may be methylated to form 5-methylcytosine"
ccttatgtggattcaaaatttatactcgcaaaacaaaattatatgagtgtattccaccaacgtcaagacatgggaagtaatatcttgggacccgggactgttttcttttactcctgcacctg

SEQ ID NO: 9791 - DNA, 122 bp, Homo sapiens
  misc_feature (61)..(62): /note="This region represents a CpG dinucleotide"
  misc_feature (61)..(61): /note="Nucleotide may be methylated to form 5-methylcytosine"
ggcagaggaagctaacacccacagagagagctgagggtgatagccttgtatctagagcaacgcccaaacagcagtgcaaatcgatgattactgagggcatccttgaggcattagtgggaccg

SEQ ID NO: 9792 - DNA, 122 bp, Homo sapiens
  misc_feature (61)..(62): /note="This region represents a CpG dinucleotide"
  misc_feature (61)..(61): /note="Nucleotide may be methylated to form 5-methylcytosine"
accatgtgagtaagccatcttggaagcaaatccttcagccccagccaagccttcagataacggcagctccagccagccgtttgactggaacccacctgggccactcttggattcctgagaaa

SEQ ID NO: 9793 - DNA, 122 bp, Homo sapiens
  misc_feature (61)..(62): /note="This region represents a CpG dinucleotide"
  misc_feature (61)..(61): /note="Nucleotide may be methylated to form 5-methylcytosine"
cactgagacctaataaaaacaaccaaaaggaactgcccagcagagaggaagagactcagacgcagcagttttggccgcgtaactgattgactaagcaacctgaagcctgtcatgaatcggtg

SEQ ID NO: 9794 - DNA, 122 bp, Homo sapiens
  misc_feature (61)..(62): /note="This region represents a CpG dinucleotide"
  misc_feature (61)..(61): /note="Nucleotide may be methylated to form 5-methylcytosine"
gtcttcagacttgagacctcactgctgacagtgggtgacaaaggatcaggaagaagaatacgctagatacactgcaggaagcctaagaggcaagccagagtgaaaatcaggatgacagccta

SEQ ID NO: 9795 - DNA, 122 bp, Homo sapiens
  misc_feature (61)..(62): /note="This region represents a CpG dinucleotide"
  misc_feature (61)..(61): /note="Nucleotide may be methylated to form 5-methylcytosine"
taaagatacgtagatttaaaagccactttagagataaggaaaccaagtttaaaagagatacgcagtgactcatgcctgtgtaatcccaacactttgaaaggccagggcaggaggatcatttg

SEQ ID NO: 9796 - DNA, 122 bp, Homo sapiens
  misc_feature (61)..(62): /note="This region represents a CpG dinucleotide"
  misc_feature (61)..(61): /note="Nucleotide may be methylated to form 5-methylcytosine"
gctgaccgctgagctcacttgcaggtcaatgtgtcctggggcttgcttgttgaacactaacgtgtgtgcaggttgcaggggtaagggtggggggcgggtgcacctcactctgagcccgcttc

SEQ ID NO: 9797 - DNA, 122 bp, Homo sapiens
  misc_feature (61)..(62): /note="This region represents a CpG dinucleotide"
  misc_feature (61)..(61): /note="Nucleotide may be methylated to form 5-methylcytosine"
acctaccgagagtggggttcgaacccacgcgggcaccagcccattggatcttaagtccaacgccttaaccactcggccatcccggtgactggggcaagtttcaaggcaatcatttttttata

SEQ ID NO: 9798 - DNA, 122 bp, Homo sapiens
  misc_feature (61)..(62): /note="This region represents a CpG dinucleotide"
  misc_feature (61)..(61): /note="Nucleotide may be methylated to form 5-methylcytosine"
ttccctcccagtgacctttgaagtaaggcgaattgaagtccgctggtctccagacaggcacggtaacgtgcacgcatcggatgtggttcccggggaatggtgggtgattgtccatcttccta

SEQ ID NO: 9799 - DNA, 122 bp, Homo sapiens
  misc_feature (61)..(62): /note="This region represents a CpG dinucleotide"
  misc_feature (61)..(61): /note="Nucleotide may be methylated to form 5-methylcytosine"
gctcagattcaagggagggtatagacctcacgtctcaaagggaggggtataatttaagggcgacgttgttaaaactgtcatagccaagagaacatgggaagtctattagggggatttctggg

SEQ ID NO: 9800 - DNA, 122 bp, Homo sapiens
  misc_feature (61)..(62): /note="This region represents a CpG dinucleotide"
  misc_feature (61)..(61): /note="Nucleotide may be methylated to form 5-methylcytosine"
gccaagccgaagtcaccgagcaggcacgggtagagatgggatgcccaggctcccggctgccgcccagccccaccctgcgccgaaggagactgagagccgagctgcgccggcggagactcaaa

SEQ ID NO: 9801 - DNA, 122 bp, Homo sapiens
  misc_feature (61)..(62): /note="This region represents a CpG dinucleotide"
  misc_feature (61)..(61): /note="Nucleotide may be methylated to form 5-methylcytosine"
ttcagagacactgttctgatcttgagtggcaaaatttcagcaatctgcatgtcatgaattcgtgtcctgtggtcttatgtcatccgtccttggctaaaaggggaaaccaagaggaagggatc

SEQ ID NO: 9802 - DNA, 122 bp, Homo sapiens
  misc_feature (61)..(62): /note="This region represents a CpG dinucleotide"
  misc_feature (61)..(61): /note="Nucleotide may be methylated to form 5-methylcytosine"
tttgttaaaactgtctccaaagttttcactgaaacattttgaatcacatcaatactgtgacgtgtactgtgaatagaagagacggccaggttttggccagcactgaaagttgacacgggggg

SEQ ID NO: 9803 - DNA, 122 bp, Homo sapiens
  misc_feature (61)..(62): /note="This region represents a CpG dinucleotide"
  misc_feature (61)..(61): /note="Nucleotide may be methylated to form 5-methylcytosine"
tgagaaggaagggtggagactgtgtcaaacactctgcaggttgtctcctgaagacagttacggaatcctgaacccaagctgagaaggagcctctcaaaacagtgaaagggtttaggaaacag

SEQ ID NO: 9804 - DNA, 122 bp, Homo sapiens
  misc_feature (61)..(62): /note="This region represents a CpG dinucleotide"
  misc_feature (61)..(61): /note="Nucleotide may be methylated to form 5-methylcytosine"
atgcatgtatggaactgttaccctgtaggtaacaacttcatcaactatgattcaatgctgcgtccagttttttgcttttagtgtgacagactccacttgttcccaaagttcctttagtcagc

SEQ ID NO: 9805 - DNA, 122 bp, Homo sapiens
  misc_feature (61)..(62): /note="This region represents a CpG dinucleotide"
  misc_feature (61)..(61): /note="Nucleotide may be methylated to form 5-methylcytosine"
aaatcatcttccaccacatgggtgcactggagtctctgagcctattctggctcaggaggccgcctgattcacgaatcattttttgctcaaagtcttttaaatttaatttggctaaagttttt

SEQ ID NO: 9806 - DNA, 122 bp, Homo sapiens
  misc_feature (61)..(62): /note="This region represents a CpG dinucleotide"
  misc_feature (61)..(61): /note="Nucleotide may be methylated to form 5-methylcytosine"
aggtgagcgggcgtctcagtgccactgtcgttggggaccaggggcctcatgctgtggggacgggctcacagggtgcggaaggtggcgctgagcatggcactggctgtctgccaggcagcgcc

SEQ ID NO: 9807 - DNA, 122 bp, Homo sapiens
  misc_feature (61)..(62): /note="This region represents a CpG dinucleotide"
  misc_feature (61)..(61): /note="Nucleotide may be methylated to form 5-methylcytosine"
ggaattgaatttcatttgtaggttgagtaattcacatctgtacaatattgtgtaatcccacgtaaggaaaaagtatatctttccatttgcctaagtaatttatctccctttgtagagtttga

SEQ ID NO: 9808 - DNA, 122 bp, Homo sapiens
  misc_feature (61)..(62): /note="This region represents a CpG dinucleotide"
  misc_feature (61)..(61): /note="Nucleotide may be methylated to form 5-methylcytosine"
gtgagtgtgataaggaaaatgaaaataaaatagaccaacagttaagatgaaggaaaagcacgggaaagataaaggagaaacaggaaatggaagtaacataatcaggtaaattatgccaacta

SEQ ID NO: 9809 - DNA, 122 bp, Homo sapiens
  misc_feature (61)..(62): /note="This region represents a CpG dinucleotide"
  misc_feature (61)..(61): /note="Nucleotide may be methylated to form 5-methylcytosine"
ccgtgcttggccctgggagcacaagatgacccacctgcgtagttctttttcctgaggagtcggggagcgtgtctgtgtgcggagcaggctcagagcaggtgttccctgcagcgctcagaact

SEQ ID NO: 9810 - DNA, 122 bp, Homo sapiens
  misc_feature (61)..(62): /note="This region represents a CpG dinucleotide"
  misc_feature (61)..(61): /note="Nucleotide may be methylated to form 5-methylcytosine"
ttgttctttttatttttttctattcagggcaagttgctatgcaaaacacagtatgtctcacgactgcatcatctacactaaattcttcaagtccctctcatcagcttgggcctgttttccat

SEQ ID NO: 9811 - DNA, 122 bp, Homo sapiens
  misc_feature (61)..(62): /note="This region represents a CpG dinucleotide"
  misc_feature (61)..(61): /note="Nucleotide may be methylated to form 5-methylcytosine"
gggattcaatattataggaggtcgaccaaatcaggtaaaacaccttgttaatgcattactcgttacttataaaataagcattaataagcattactcattgcttataaaataatagaggactt

SEQ ID NO: 9812 - DNA, 122 bp, Homo sapiens
  misc_feature (61)..(62): /note="This region represents a CpG dinucleotide"
  misc_feature (61)..(61): /note="Nucleotide may be methylated to form 5-methylcytosine"
tgagagcacactgtgctctctcgtatgttgtgttttgtccactctgtacctttgtccttacgttccctgaaccagcagacccttccttagcctgtggccccttgaaattctgcagccctgag

SEQ ID NO: 9813 - DNA, 122 bp, Homo sapiens
  misc_feature (61)..(62): /note="This region represents a CpG dinucleotide"
  misc_feature (61)..(61): /note="Nucleotide may be methylated to form 5-methylcytosine"
gatgtccgctttctatctgcagctttaatgtttcacttaatatcctctttggctactgagcgcactcctctcccgcagccggcagcgcttggctgctcgacaacttccttcatttctggcca

SEQ ID NO: 9814 - DNA, 122 bp, Homo sapiens
  misc_feature (61)..(62): /note="This region represents a CpG dinucleotide"
  misc_feature (61)..(61): /note="Nucleotide may be methylated to form 5-methylcytosine"
tacacatgtttgtacaaatcaatcaacattcccatctctactgactcacatggcctggaacgcaagttcacataccaaagagaactgagaagggggatgggggaaataactctccaatttat

SEQ ID NO: 9815 - DNA, 122 bp, Homo sapiens
  misc_feature (61)..(62): /note="This region represents a CpG dinucleotide"
  misc_feature (61)..(61): /note="Nucleotide may be methylated to form 5-methylcytosine"
gcccagctccttctgtgtcctctcttgcctctggcctttctctggggcacaggcctcttacggctgctgctgggaactgggagtttggcttctagcccagattctgccatgtgacctagggc

SEQ ID NO: 9816 - DNA, 122 bp, Homo sapiens
  misc_feature (61)..(62): /note="This region represents a CpG dinucleotide"
  misc_feature (61)..(61): /note="Nucleotide may be methylated to form 5-methylcytosine"
ccaggtgtctgagcagccacctagtgcagtgacccatcggggcttcccttgtggcctccgcggtccagaacctctcccaggtgtgatggatcctccaagccgctctttgagccgctgtccag

SEQ ID NO: 9817 - DNA, 122 bp, Homo sapiens
  misc_feature (61)..(62): /note="This region represents a CpG dinucleotide"
  misc_feature (61)..(61): /note="Nucleotide may be methylated to form 5-methylcytosine"
ttgcagttttttgttttgctcttttctttaactggagctatatgatttcccgtttcgtttcgtactgaagtgtttgaggctttttcctcccccgcccaaacacagaagcaaggagatcaagc

SEQ ID NO: 9818 - DNA, 122 bp, Homo sapiens
  misc_feature (61)..(62): /note="This region represents a CpG dinucleotide"
  misc_feature (61)..(61): /note="Nucleotide may be methylated to form 5-methylcytosine"
gcgtgttcgctccctctgcccctcagcttcaggcccgtttctgagaagcaataggaaactcgcaggccataaaaaacgcacaggcccgtcccgagcccttcctgtgtcctaaaaatacagcg

SEQ ID NO: 9819 - DNA, 122 bp, Homo sapiens
  misc_feature (61)..(62): /note="This region represents a CpG dinucleotide"
  misc_feature (61)..(61): /note="Nucleotide may be methylated to form 5-methylcytosine"
tagaagtagactttatggtactctgctcagctatgttctcatttgattccaaccactacacggcagaaaaggtaaccaatattcaagaaagatttgattggaaacggtttaggcctaaagac

SEQ ID NO: 9820 - DNA, 122 bp, Homo sapiens
  misc_feature (61)..(62): /note="This region represents a CpG dinucleotide"
  misc_feature (61)..(61): /note="Nucleotide may be methylated to form 5-methylcytosine"
acaaccggcctaatttaacctaaatccagaaataatcccttaaattttgtagctcacaaacgcatcctccctctttccccacaacattccatcagactcagggaacgtcatcacacatcaac

SEQ ID NO: 9821 - DNA, 122 bp, Homo sapiens
  misc_feature (61)..(62): /note="This region represents a CpG dinucleotide"
  misc_feature (61)..(61): /note="Nucleotide may be methylated to form 5-methylcytosine"
atttggtcatgatgtattatcttgttgcagtgtctatcaatggagtgtctatcttgaggtcgcagtaaagatattggctaggattgaagttatctgaagctttgtctggttgaaactttctg

SEQ ID NO: 9822 - DNA, 122 bp, Homo sapiens
  misc_feature (61)..(62): /note="This region represents a CpG dinucleotide"
  misc_feature (61)..(61): /note="Nucleotide may be methylated to form 5-methylcytosine"
gatcattgtttacaacaactcagctctaatagatcagggcctcttttttccttctagcttcgttcatttatctcattagttttctctttttttttcttcctccctcccttctcacctgcttt

SEQ ID NO: 9823 - DNA, 122 bp, Homo sapiens
  misc_feature (61)..(62): /note="This region represents a CpG dinucleotide"
  misc_feature (61)..(61): /note="Nucleotide may be methylated to form 5-methylcytosine"
ttcttctatagctctatgggacttctgtcagcaggttttatattaggctgtgcagtttgacgtaccatccagtagatggtgcttatgagtaagagccggctgtagccaacaaggcttggtat

SEQ ID NO: 9824 - DNA, 122 bp, Homo sapiens
  misc_feature (61)..(62): /note="This region represents a CpG dinucleotide"
  misc_feature (61)..(61): /note="Nucleotide may be methylated to form 5-methylcytosine"
ccaagggccagccttctgcgtgattgccagtgtctctatgtttttatagaggagaggtcacgatgctgccccctggagttcatttgaatctgacacgcagctgtacactggccaagatacca

SEQ ID NO: 9825 - DNA, 122 bp, Homo sapiens
  misc_feature (61)..(62): /note="This region represents a CpG dinucleotide"
  misc_feature (61)..(61): /note="Nucleotide may be methylated to form 5-methylcytosine"
agataagcttttgtatcttttcagtatcattgagggagagctaagggggactccagggggcggacagggcttacaaagtcgaatgtgatcattaagagagccagctctggaagcaaacacca

SEQ ID NO: 9826 - DNA, 122 bp, Homo sapiens
  misc_feature (61)..(62): /note="This region represents a CpG dinucleotide"
  misc_feature (61)..(61): /note="Nucleotide may be methylated to form 5-methylcytosine"
cattacagagagagcttgttctgccgaggtcaccccaaagtggggatgaaggcactggggcgggggctcggttgagagagcagagccattattcccaagtgtgtctgcctgcctgctgatcc

SEQ ID NO: 9827 - DNA, 122 bp, Homo sapiens
  misc_feature (61)..(62): /note="This region represents a CpG dinucleotide"
  misc_feature (61)..(61): /note="Nucleotide may be methylated to form 5-methylcytosine"
cgcaggggcagatgggactcggccactttcggcacgctgggctgaaagtgggcgcgtctgcgactgggagggggtcggagagaagccacaaagcccgggctgcagaggcggttctgcagggt

SEQ ID NO: 9828 - DNA, 122 bp, Homo sapiens
  misc_feature (61)..(62): /note="This region represents a CpG dinucleotide"
  misc_feature (61)..(61): /note="Nucleotide may be methylated to form 5-methylcytosine"
aagatattatttattatatatttaaatttgtatgaggaaaaaatcttaaagacacagtttcgagacaacttggagtttggtatgacaaatatttgtaagacattaagaattaaatattttca

SEQ ID NO: 9829 - DNA, 122 bp, Homo sapiens
  misc_feature (61)..(62): /note="This region represents a CpG dinucleotide"
  misc_feature (61)..(61): /note="Nucleotide may be methylated to form 5-methylcytosine"
agaaggtgtgacaggggatacctgcaggctccacggaatgggttggaaaccccaccctcccggccctccccgcaggcaacaggatccaggcctctctacactccactccctcaaggctgaga

SEQ ID NO: 9830 - DNA, 122 bp, Homo sapiens
  misc_feature (61)..(62): /note="This region represents a CpG dinucleotide"
  misc_feature (61)..(61): /note="Nucleotide may be methylated to form 5-methylcytosine"
gtccgtgaatgctggaagtctctttcagtctgatttagttgtctgaaggtgccattctgtcgcaggcttctgttttgattgtttcctgatccctttggatgaggaaaacaggtttttcctta

SEQ ID NO: 9831 - DNA, 122 bp, Homo sapiens
  misc_feature (61)..(62): /note="This region represents a CpG dinucleotide"
  misc_feature (61)..(61): /note="Nucleotide may be methylated to form 5-methylcytosine"
catgtctgtgcaatgggtccatctgcagccagggccagggcccagcagaggccagaactgcgactgtctgaatcaaagccagtccacggccagggtcagaggtcagtcaaagatcagggtca

SEQ ID NO: 9832 - DNA, 122 bp, Homo sapiens
  misc_feature (61)..(62): /note="This region represents a CpG dinucleotide"
  misc_feature (61)..(61): /note="Nucleotide may be methylated to form 5-methylcytosine"
gtcaaattgacataaaagtttctgaaagttgagttttcaatgcatttacttgcccagtcacgaactgaaaacagagtgtgcagatggcactggtctcaggtctctcaatacaactttaaaaa

SEQ ID NO: 9833 - DNA, 122 bp, Homo sapiens
  misc_feature (61)..(62): /note="This region represents a CpG dinucleotide"
  misc_feature (61)..(61): /note="Nucleotide may be methylated to form 5-methylcytosine"
caaaaaatgtatttttttgagacagggcctcccttagtcacccaggccagagtgcactggcgccatcctagctcactgcagccttgacctctcctgggctctagtgatcctcctgccccagt

SEQ ID NO: 9834 - DNA, 122 bp, Homo sapiens
  misc_feature (61)..(62): /note="This region represents a CpG dinucleotide"
  misc_feature (61)..(61): /note="Nucleotide may be methylated to form 5-methylcytosine"
taaggagaatgaagccatttatttttatttcctttcagccaaattccactttaagtttgtcgaattcagaaattgtatagaccttaaaaatattttactctgttaacatatgctttcttatg

SEQ ID NO: 9835 - DNA, 122 bp, Homo sapiens
  misc_feature (61)..(62): /note="This region represents a CpG dinucleotide"
  misc_feature (61)..(61): /note="Nucleotide may be methylated to form 5-methylcytosine"
atgtgctggtctaaagagggaagcactaaggtcagttaggaagcagaagtgggagaaggacgagaatgactgagaccctttgatggggttttcacgagaaggaatggaaggggcagggtagg

SEQ ID NO: 9836 - DNA, 122 bp, Homo sapiens
  misc_feature (61)..(62): /note="This region represents a CpG dinucleotide"
  misc_feature (61)..(61): /note="Nucleotide may be methylated to form 5-methylcytosine"
tgtgttttttaaaaggatatgtatagatagatccactgatatactatacatctctatgtacgtgtgtgtgtgtatatgtatatataaatgcaaacccacacatagagtgaatagaatagatt

SEQ ID NO: 9837 - DNA, 122 bp, Homo sapiens
  misc_feature (61)..(62): /note="This region represents a CpG dinucleotide"
  misc_feature (61)..(61): /note="Nucleotide may be methylated to form 5-methylcytosine"
gacagatagcacggtagcatctcaagatacagaccatgcagctgtactgacatcaaaaaacggcctgagtgtgacatctaatctcaagacaaacctgtcttttttcagttcctattttaagc

SEQ ID NO: 9838 - DNA, 122 bp, Homo sapiens
  misc_feature (61)..(62): /note="This region represents a CpG dinucleotide"
  misc_feature (61)..(61): /note="Nucleotide may be methylated to form 5-methylcytosine"
ttccctcccttctactactcctcagatcccatgactgttccttccttccttccacaattacgtgtcaggcatggttctaaggaacaataatgggtaagagcaactatggacggtcccgccca

SEQ ID NO: 9839 - DNA, 122 bp, Homo sapiens
  misc_feature (61)..(62): /note="This region represents a CpG dinucleotide"
  misc_feature (61)..(61): /note="Nucleotide may be methylated to form 5-methylcytosine"
actgcatttctgacatattaatgtactaaatggctccctcgtgatctgaaaatgttaacacggtcacagcctgagcgcctgacttcacatagaaatgactcaggctcagggataattggggc

SEQ ID NO: 9840 - DNA, 122 bp, Homo sapiens
  misc_feature (61)..(62): /note="This region represents a CpG dinucleotide"
  misc_feature (61)..(61): /note="Nucleotide may be methylated to form 5-methylcytosine"
ccttccttctatgacttatctcagaatgacgttacaattgttattgtgtttgagtgccgacgctgaggcattggctagaaacttctataattaggtgttttctgacactagacaaaattatt

SEQ ID NO: 9841 - DNA, 122 bp, Homo sapiens
  misc_feature (61)..(62): /note="This region represents a CpG dinucleotide"
  misc_feature (61)..(61): /note="Nucleotide may be methylated to form 5-methylcytosine"
ggcgcggggggttgagtggggcgcgccggctgcagctgccgaggcggggctggttggggtcgtcgcctccgcgcctagccgcgaccaagccgcgaaaggggctggagacaaaaggtccacgg

SEQ ID NO: 9842 - DNA, 122 bp, Homo sapiens
  misc_feature (61)..(62): /note="This region represents a CpG dinucleotide"
  misc_feature (61)..(61): /note="Nucleotide may be methylated to form 5-methylcytosine"
tctgaagaagataaaacagtggacagcccagtcaaaagatttagacatccatccccccaccgacgagagactgtaagaaagaagttgctccatcctctatcgggtaggaacctgggccttcc

SEQ ID NO: 9843 - DNA, 122 bp, Homo sapiens
  misc_feature (61)..(62): /note="This region represents a CpG dinucleotide"
  misc_feature (61)..(61): /note="Nucleotide may be methylated to form 5-methylcytosine"
gcatttgtaaaaatgtgaaagtgccagttcagaggtgttgtagcttgccaccttggaaggcgtgtgtgtggccgtagctctgtgaacacacgtgtgaacccggcgttaggacacccgggccc

SEQ ID NO: 9844 - DNA, 122 bp, Homo sapiens
  misc_feature (61)..(62): /note="This region represents a CpG dinucleotide"
  misc_feature (61)..(61): /note="Nucleotide may be methylated to form 5-methylcytosine"
ttcctcagctaacttttttcattcatttatgcaacaagtgtttattcagcccacactaaacgtttggctttttcctaggcactgacatacaatggtatacaagacagttatagtcactttct

SEQ ID NO: 9845 - DNA, 122 bp, Homo sapiens
  misc_feature (61)..(62): /note="This region represents a CpG dinucleotide"
  misc_feature (61)..(61): /note="Nucleotide may be methylated to form 5-methylcytosine"
ggctactccgcggggccggctcagctgccgctgcagcgctacgcacgcctccctcagacgcgggctcagctcgcacctgcagaggaggccaggagagactcaggatggatcggggacagcgc

SEQ ID NO: 9846 - DNA, 122 bp, Homo sapiens
  misc_feature (61)..(62): /note="This region represents a CpG dinucleotide"
  misc_feature (61)..(61): /note="Nucleotide may be methylated to form 5-methylcytosine"
ccagggacgggccacaggctccctgcctggggtccaagcctagatcgctcgctccccacccgcaccaaagcccaggcaaagggtgcttcagccacttcctgttgcaggctcagaccaagtcc

SEQ ID NO: 9847 - DNA, 122 bp, Homo sapiens
  misc_feature (61)..(62): /note="This region represents a CpG dinucleotide"
  misc_feature (61)..(61): /note="Nucleotide may be methylated to form 5-methylcytosine"
tccaagaccctgattgcccccagcacggtcactaccttcctccggccttgagcaagcagccgccactgcacttcacctctcggccaccaggggtcagaacgactgcatccacagccacgtca

SEQ ID NO: 9848 - DNA, 122 bp, Homo sapiens
  misc_feature (61)..(62): /note="This region represents a CpG dinucleotide"
  misc_feature (61)..(61): /note="Nucleotide may be methylated to form 5-methylcytosine"
ccccatctaggctactgcccagaagctgaaacataactcaagagagtcatgaccgtgttacgggaaaacccgttctggagctgggacctactcctccttaatggctgcctccagaaacagga

SEQ ID NO: 9849 - DNA, 122 bp, Homo sapiens
  misc_feature (61)..(62): /note="This region represents a CpG dinucleotide"
  misc_feature (61)..(61): /note="Nucleotide may be methylated to form 5-methylcytosine"
aggataactgtcgggatgtttctgccaatcacagtggtccagcaccatccagttaaaacacgttcactcccacaggcctcagctcaattatcccaggaaattctgtcgaactgctaaaagga

SEQ ID NO: 9850 - DNA, 122 bp, Homo sapiens
  misc_feature (61)..(62): /note="This region represents a CpG dinucleotide"
  misc_feature (61)..(61): /note="Nucleotide may be methylated to form 5-methylcytosine"
gacatggaaagaattttgatgacatcactgagccactgatcttaccatgcctggaacctacgctggactacttagttatgtgaaaaaaagtaaatttcttcccttaccatttcagtctgttt

SEQ ID NO: 9851 - DNA, 122 bp, Homo sapiens
  misc_feature (61)..(62): /note="This region represents a CpG dinucleotide"
  misc_feature (61)..(61): /note="Nucleotide may be methylated to form 5-methylcytosine"
atgatttcctctgaatctctagattttaaattgacatttctatggcatgctgaatcattgcgggtcgagttttaattagtctcaggcctttggaaaccaattcggcagaatacacaagagtc

SEQ ID NO: 9852 - DNA, 122 bp, Homo sapiens
  misc_feature (61)..(62): /note="This region represents a CpG dinucleotide"
  misc_feature (61)..(61): /note="Nucleotide may be methylated to form 5-methylcytosine"
caataatattacctgtcttgtcacctgcagattgttttgcagatcggaacagataatatgcgcagtgtcacaaaaatataaggaatgagtgtttctattgcaccaaaggaaattactcatta

SEQ ID NO: 9853 - DNA, 122 bp, Homo sapiens
  misc_feature (61)..(62): /note="This region represents a CpG dinucleotide"
  misc_feature (61)..(61): /note="Nucleotide may be methylated to form 5-methylcytosine"
tggaattagttaaggatctgcagatgagattctcctggatcaggctgggccccaatccaacgaagagtgccctcgtgaggcagaagaggagagagacacgtgccggagaaggccacatgagg

SEQ ID NO: 9854 - DNA, 122 bp, Homo sapiens
  misc_feature (61)..(62): /note="This region represents a CpG dinucleotide"
  misc_feature (61)..(61): /note="Nucleotide may be methylated to form 5-methylcytosine"
ggcttgaagttgctagaacagaatctttcaaagactcatttagaagtccttgaaattcgccgccttcatgtaatattctagaaaaatgggacctagccgcgtgagggataagagctatttag

SEQ ID NO: 9855 - DNA, 122 bp, Homo sapiens
  misc_feature (61)..(62): /note="This region represents a CpG dinucleotide"
  misc_feature (61)..(61): /note="Nucleotide may be methylated to form 5-methylcytosine"
gctggtgatctaatattgctagttccttggtgagggttgtggtactttcactaccacatccgtctgtttagtagttcagtgattacacgaggtaagaaaatgaaatcatcttaaactcagac

SEQ ID NO: 9856 - DNA, 122 bp, Homo sapiens
  misc_feature (61)..(62): /note="This region represents a CpG dinucleotide"
  misc_feature (61)..(61): /note="Nucleotide may be methylated to form 5-methylcytosine"
aaagctttgtctttcctttcacagactctcctcttttagataaaactaacaaccctcccacgaccgccaccaaaaaagtgatgcagaggctctgtggttttgaatttctggagtacatcatt

SEQ ID NO: 9857 - DNA, 122 bp, Homo sapiens
  misc_feature (61)..(62): /note="This region represents a CpG dinucleotide"
  misc_feature (61)..(61): /note="Nucleotide may be methylated to form 5-methylcytosine"
agcctactgctttcagaaaggaagttcagaacattgatttctgatagactcatcttcctgcgttaagggtctataactgtgggaagtaggttgttactgcctgcatcacgtgttttttgttt

SEQ ID NO: 9858 - DNA, 122 bp, Homo sapiens
  misc_feature (61)..(62): /note="This region represents a CpG dinucleotide"
  misc_feature (61)..(61): /note="Nucleotide may be methylated to form 5-methylcytosine"
acgtatgtatttcccaaacgtgagttgagtaactggctccagttgttactgatggcatgccgtgcttgtgccatatctgtgttctctgataactgctaaatcaactgctgcctaaagtagtg

SEQ ID NO: 9859 - DNA, 122 bp, Homo sapiens
  misc_feature (61)..(62): /note="This region represents a CpG dinucleotide"
  misc_feature (61)..(61): /note="Nucleotide may be methylated to form 5-methylcytosine"
ctctgcatttgtgcagtgctcccgtgccgggaacacaacccaggaacaaggacttccgtgcgacggtgccccggccaccaccacgcctcccgcagcagccaggcccgggccttgaggtcagc

SEQ ID NO: 9860 - DNA, 122 bp, Homo sapiens
  misc_feature (61)..(62): /note="This region represents a CpG dinucleotide"
  misc_feature (61)..(61): /note="Nucleotide may be methylated to form 5-methylcytosine"
ttcctgtgaaatggcacaggcatcatttcagcgttgactcattctgctcaaacctgtcaccgctcacacgggagtggtcgttggaataagggacttctcctcaggtgaatgacaaagaaaca

SEQ ID NO: 9861 - DNA, 122 bp, Homo sapiens
  misc_feature (61)..(62): /note="This region represents a CpG dinucleotide"
  misc_feature (61)..(61): /note="Nucleotide may be methylated to form 5-methylcytosine"
cagggtgaggccacccacagagccatttaattatccctgagtgcaaggccatgccgcaggcgcatgaaacaggaaggaaaaacaagacctgcagctgcactatgatgtcagcgatggggcag

SEQ ID NO: 9862 - DNA, 122 bp, Homo sapiens
  misc_feature (61)..(62): /note="This region represents a CpG dinucleotide"
  misc_feature (61)..(61): /note="Nucleotide may be methylated to form 5-methylcytosine"
gcctaccctctgctctggatatcattcaaatccattgctttttctagtcactttgtatatcggggccaacaggatttccaaatatggcatatgtgtcctagaatccaaacaactctttgaga

SEQ ID NO: 9863 - DNA, 122 bp, Homo sapiens
  misc_feature (61)..(62): /note="This region represents a CpG dinucleotide"
  misc_feature (61)..(61): /note="Nucleotide may be methylated to form 5-methylcytosine"
agagcagatgagctaggctgtctacaaatgtgtcggatccagctcccgccatccttccttcgcaaagcagagcttgccaagcctgcgcacccacgggctgcctctcttcaaagggcggagcc

SEQ ID NO: 9864 - DNA, 122 bp, Homo sapiens
  misc_feature (61)..(62): /note="This region represents a CpG dinucleotide"
  misc_feature (61)..(61): /note="Nucleotide may be methylated to form 5-methylcytosine"
gggaagggggcggaggccgaccgaaggcggctagggactggctgaagagggttagcgaaacgttagcggtcgggtctgggcagggggtggagctggttgaaggaacggggcagtcccctgag

SEQ ID NO: 9865 - DNA, 122 bp, Homo sapiens
  misc_feature (61)..(62): /note="This region represents a CpG dinucleotide"
  misc_feature (61)..(61): /note="Nucleotide may be methylated to form 5-methylcytosine"
gaacatctcagaagagctgaaaataccagtttggaacttggtagagacgtcagagccaagcgtagatttgggagtttgatttatgtctgcagtaggcattcctttcatgcctatcatgtgcc

SEQ ID NO: 9866 - DNA, 122 bp, Homo sapiens
  misc_feature (61)..(62): /note="This region represents a CpG dinucleotide"
  misc_feature (61)..(61): /note="Nucleotide may be methylated to form 5-methylcytosine"
cctgtttttctcagaaacatgaacatcttcactgaaaagccgtagttaggttcctgtacacgtcacgttgtattgacacaggaggatgtgtaaacctagcccaaagctttaggaagaagcag

SEQ ID NO: 9867 - DNA, 122 bp, Homo sapiens
  misc_feature (61)..(62): /note="This region represents a CpG dinucleotide"
  misc_feature (61)..(61): /note="Nucleotide may be methylated to form 5-methylcytosine"
gaccaagacaggaagtccagccaggaggtctgagtcacagacgccgagtggagagccaggcgcaggggcccggcggccacgggagtgggtgcttggggccccgctgggctaatcctcctctg

SEQ ID NO: 9868 - DNA, 122 bp, Homo sapiens
  misc_feature (61)..(62): /note="This region represents a CpG dinucleotide"
  misc_feature (61)..(61): /note="Nucleotide may be methylated to form 5-methylcytosine"
gagttcagggctgcactgacttaggaagggagcccgcagagtgcagcggccaccaggggacgctcccagcgtccagcaccccgcccccagccagcctgctctgtccccgccgcccggcccag

SEQ ID NO: 9869 - DNA, 122 bp, Homo sapiens
  misc_feature (61)..(62): /note="This region represents a CpG dinucleotide"
  misc_feature (61)..(61): /note="Nucleotide may be methylated to form 5-methylcytosine"
ctgaaaagtaaaagaacaaaactgtgctctctccaaaaagcattagtgacagttagaaggcggaaggggagagatctgctgacttgacaaaccatgattactttttacagctcatgaaactg

SEQ ID NO: 9870 - DNA, 122 bp, Homo sapiens
  misc_feature (61)..(62): /note="This region represents a CpG dinucleotide"
  misc_feature (61)..(61): /note="Nucleotide may be methylated to form 5-methylcytosine"
tcacatgttttctccttctctttcacagtcacacactacgaccattataaggtcttgtctcgatgcattacaaaaactgcattaaggctggccactgaagggcctcaggtttccaaacttga

SEQ ID NO: 9871 - DNA, 122 bp, Homo sapiens
  misc_feature (61)..(62): /note="This region represents a CpG dinucleotide"
  misc_feature (61)..(61): /note="Nucleotide may be methylated to form 5-methylcytosine"
tactgagcctggcctatttgacctattttggtttggctgtccctcccaggtgcaatcagtcgtggccaggaggggtcatgtccctgctgctcactcagctcgggacaggatagtccctctga

SEQ ID NO: 9872 - DNA, 122 bp, Homo sapiens
  misc_feature (61)..(62): /note="This region represents a CpG dinucleotide"
  misc_feature (61)..(61): /note="Nucleotide may be methylated to form 5-methylcytosine"
acagggctgtagtattttgatgctgtagtccaataactgtattttctgtccatattaggccgagagtaggggcgtcctccagggttgtataaaccatcagtagccaattcatttgcacctgc

SEQ ID NO: 9873 - DNA, 122 bp, Homo sapiens
  misc_feature (61)..(62): /note="This region represents a CpG dinucleotide"
  misc_feature (61)..(61): /note="Nucleotide may be methylated to form 5-methylcytosine"
atccgaacatcagaaggaacagactctggacgcgcggccgttaagaactgtaacactcaccggacccgccccctttaagaactgtaacacaccgcgagggtctggggcttcattcttgaagt

SEQ ID NO: 9874 - DNA, 122 bp, Homo sapiens
  misc_feature (61)..(62): /note="This region represents a CpG dinucleotide"
  misc_feature (61)..(61): /note="Nucleotide may be methylated to form 5-methylcytosine"
aatttaaagcctgggtttaaggtctgtagaagctgcacaggtacactaattttagtaagacgggcgccaggaaaaagaacaaaatagtaggggagaaatattcaggcatcctaaaaaatatt

SEQ ID NO: 9875 - DNA, 122 bp, Homo sapiens
  misc_feature (61)..(62): /note="This region represents a CpG dinucleotide"
  misc_feature (61)..(61): /note="Nucleotide may be methylated to form 5-methylcytosine"
agctctgcatccgactggagactttacacctgcttcctacgaagagggagctcttgccagcgagcccatgcttacccataatctacgaagagatcttttcatctcctctccgtgaacacttg

SEQ ID NO: 9876 - DNA, 122 bp, Homo sapiens
  misc_feature (61)..(62): /note="This region represents a CpG dinucleotide"
  misc_feature (61)..(61): /note="Nucleotide may be methylated to form 5-methylcytosine"
aaatcctacaaatatgaagaatgtgacaaagcttttaaccacttctcaaccctgcctacacgtaagataattcatactggaaggaaaccctacaaatatgaggaatgtctcaaagcttttta

SEQ ID NO: 9877 - DNA, 122 bp, Homo sapiens
  misc_feature (61)..(62): /note="This region represents a CpG dinucleotide"
  misc_feature (61)..(61): /note="Nucleotide may be methylated to form 5-methylcytosine"
gctcccctacggggagcctgccctgtggcctcggtggcctgtgccagacagcgtgaccgtcgcccacagggaacactcagcacagcagagcaggctcggggaaggacagaaagtgacctcta

SEQ ID NO: 9878 - DNA, 122 bp, Homo sapiens
  misc_feature (61)..(62): /note="This region represents a CpG dinucleotide"
  misc_feature (61)..(61): /note="Nucleotide may be methylated to form 5-methylcytosine"
gtgctccgcggttgctgagcaaacacgcagtttcaatgcaggatagtgagtccaaaagttcgtaacagggaaaaaacaggggcctatgagaatttacagagaaactctgaactcctctctac

SEQ ID NO: 9879 - DNA, 122 bp, Homo sapiens
  misc_feature (61)..(62): /note="This region represents a CpG dinucleotide"
  misc_feature (61)..(61): /note="Nucleotide may be methylated to form 5-methylcytosine"
ttctatacaaattagtgtttcacctttcaaaacatctttaaacccagtaataatctcaatcgtgtatgctctatgtatttcctctgtcaaagaatacttcctcttatttctacaactcaaca

SEQ ID NO: 9880 - DNA, 122 bp, Homo sapiens
  misc_feature (61)..(62): /note="This region represents a CpG dinucleotide"
  misc_feature (61)..(61): /note="Nucleotide may be methylated to form 5-methylcytosine"
tatttctgtcacttgccagcattatccatatgattcaagagagagcctttattactcatccgaccaagcttgcagtgaaactttttgtaagaaaaggaatggtgtgttgagaattaaaatta

SEQ ID NO: 9881 - DNA, 122 bp, Homo sapiens
  misc_feature (61)..(62): /note="This region represents a CpG dinucleotide"
  misc_feature (61)..(61): /note="Nucleotide may be methylated to form 5-methylcytosine"
ttcactcacacttgacattgtcgcgtttttttcatttcagccacactgatgaatgtgtaacggcttctcatgttttaatttgcatttccctgatgactaatgatagtgactgttcctgcatc

SEQ ID NO: 9882 - DNA, 122 bp, Homo sapiens
  misc_feature (61)..(62): /note="This region represents a CpG dinucleotide"
  misc_feature (61)..(61): /note="Nucleotide may be methylated to form 5-methylcytosine"
tttctaattacagtcactataacagatctgctaaaggtagtttcatgattaatggctgcccgaagttaccatcctcaaactattaagccattggaaaatgctagaggcttaatactcgtgta

SEQ ID NO: 9883 - DNA, 122 bp, Homo sapiens
  misc_feature (61)..(62): /note="This region represents a CpG dinucleotide"
  misc_feature (61)..(61): /note="Nucleotide may be methylated to form 5-methylcytosine"
aaatatctccctctctctctttttttttttgctcagaacttccctcctcaagttttcaaccgttggtgactatacttctctctttcaccagtctttaatttgcaaaaaggattattaatatc

SEQ ID NO: 9884 - DNA, 122 bp, Homo sapiens
  misc_feature (61)..(62): /note="This region represents a CpG dinucleotide"
  misc_feature (61)..(61): /note="Nucleotide may be methylated to form 5-methylcytosine"
gtcccctggtccatatgggcccccccgcccatggggttgggctggtccttatagtgcctacgttagtctgtgtggagcccctggccagcgggggagaaaaaggtggcttctggtccgtctgt

SEQ ID NO: 9885 - DNA, 122 bp, Homo sapiens
  misc_feature (61)..(62): /note="This region represents a CpG dinucleotide"
  misc_feature (61)..(61): /note="Nucleotide may be methylated to form 5-methylcytosine"
aacttgttgaagtcacaaagagagttagtaagacttaggctatggcttaactcaggtctgcggagctacaaaggccactttctgcttactgagttatctgctgatgaatcagagaaaaaatg

SEQ ID NO: 9886 - DNA, 122 bp, Homo sapiens
  misc_feature (61)..(62): /note="This region represents a CpG dinucleotide"
  misc_feature (61)..(61): /note="Nucleotide may be methylated to form 5-methylcytosine"
atgactgggaaggttggctactccaaactgggcatctagatgtctctgggcaggtgacatcgtagcagggcctttaacaagaaggaaccagccacgcagaggtctggggagggagttcctca

SEQ ID NO: 9887 - DNA, 122 bp, Homo sapiens
  misc_feature (61)..(62): /note="This region represents a CpG dinucleotide"
  misc_feature (61)..(61): /note="Nucleotide may be methylated to form 5-methylcytosine"
cttgccccacctatagaaaaaaaaggaaaaaacaaacaaaaaactaaaataagttgaccacgaggacaacttagtgcattttacaatggaagaaacagtgattttggaactattctgacatg

SEQ ID NO: 9888 - DNA, 122 bp, Homo sapiens
  misc_feature (61)..(62): /note="This region represents a CpG dinucleotide"
  misc_feature (61)..(61): /note="Nucleotide may be methylated to form 5-methylcytosine"
acaaccttgacagatgggtttcctgggcaactgtaggcaccttgagtattttcttcagtgcggttacctctgtacctgacactcagtcaatgttgcttgagtggacaagtgaatgactgtcc

SEQ ID NO: 9889 - DNA, 122 bp, Homo sapiens
  misc_feature (61)..(62): /note="This region represents a CpG dinucleotide"
  misc_feature (61)..(61): /note="Nucleotide may be methylated to form 5-methylcytosine"
gattatagcaaactttaatgcactctcatcggctgactacaggcaagtaatcagtaacaacgcaactcactgcttctaacagttttccatagattaatataggatgtctctacctcacaggg

SEQ ID NO: 9890 - DNA, 122 bp, Homo sapiens
  misc_feature (61)..(62): /note="This region represents a CpG dinucleotide"
  misc_feature (61)..(61): /note="Nucleotide may be methylated to form 5-methylcytosine"
taattgtacccagtaatattttctggtccttttgcataatttccatttggttaaaagacacgggttccaatgaactaatatattttatagcaaattggagaagagagggtttccttcacaca

SEQ ID NO: 9891 - DNA, 122 bp, Homo sapiens
  misc_feature (61)..(62): /note="This region represents a CpG dinucleotide"
  misc_feature (61)..(61): /note="Nucleotide may be methylated to form 5-methylcytosine"
tttacctctccctcacaactctctggatccacagccaacctgggagcccagccctggaggcgggagggcagagcacatctatctgactccaaaaccagcgctcttgccctttgtccaccgtg

SEQ ID NO: 9892 - DNA, 122 bp, Homo sapiens
  misc_feature (61)..(62): /note="This region represents a CpG dinucleotide"
  misc_feature (61)..(61): /note="Nucleotide may be methylated to form 5-methylcytosine"
tgagttcagatgcattttaactagaagatagaggtacattatttcaaaaaacaattaattcgctttaaaaacctaaaacactggagatgatacaaacctgagctggcacagtgtatgggttt

SEQ ID NO: 9893 - DNA, 122 bp, Homo sapiens
  misc_feature (61)..(62): /note="This region represents a CpG dinucleotide"
  misc_feature (61)..(61): /note="Nucleotide may be methylated to form 5-methylcytosine"
aaagagtctcaaccagggacaatagattccataattttttcactggtctccaggttttcccgactccaaattatcctatccaccatcaccaaagagagtgccccaaacctagatctgctcac

SEQ ID NO: 9894 - DNA, 122 bp, Homo sapiens
  misc_feature (61)..(62): /note="This region represents a CpG dinucleotide"
  misc_feature (61)..(61): /note="Nucleotide may be methylated to form 5-methylcytosine"
gaaagaacaggaggttaaaaatagacaaccccattgagtttatcgtgagagagaaaggagcgaacgagagagaattgccacgcccctagtatggtgacactaagtgcctgttatttttgctg

SEQ ID NO: 9895 - DNA, 122 bp, Homo sapiens
  misc_feature (61)..(62): /note="This region represents a CpG dinucleotide"
  misc_feature (61)..(61): /note="Nucleotide may be methylated to form 5-methylcytosine"
agaacagaattcctctctttttaatctcctcaattcttcttgtttttggagacagggtctcgctctgttgcccaggctggactgcagtgatgcaatctcggctcactgcaacctccacctcc

SEQ ID NO: 9896 - DNA, 122 bp, Homo sapiens
  misc_feature (61)..(62): /note="This region represents a CpG dinucleotide"
  misc_feature (61)..(61): /note="Nucleotide may be methylated to form 5-methylcytosine"
aggagggacaggggtcttccagcgcggttccaaggtgcactggagtacatgtttggtctacgtaagaattgggctgcagggggcgccatttacataaaatacttcgggattggagctacctg

SEQ ID NO: 9897 - DNA, 122 bp, Homo sapiens
  misc_feature (61)..(62): /note="This region represents a CpG dinucleotide"
  misc_feature (61)..(61): /note="Nucleotide may be methylated to form 5-methylcytosine"
tgcatagcgccattcacacctaggagatggcttgaccttcttctcagctgggtagggtgccgcttctgccccccataataatcaggccccggaggctaccacctggggctgctgggggtgac

SEQ ID NO: 9898 - DNA, 122 bp, Homo sapiens
  misc_feature (61)..(62): /note="This region represents a CpG dinucleotide"
  misc_feature (61)..(61): /note="Nucleotide may be methylated to form 5-methylcytosine"
gacagcctgatttaagccctagcaaaacctcctaccttgagcatgtctgctatattgattcgcctatggaagagttgccacgtttcaccctctacctcctaaggtggttctgccttccttaa

SEQ ID NO: 9899 - DNA, 122 bp, Homo sapiens
  misc_feature (61)..(62): /note="This region represents a CpG dinucleotide"
  misc_feature (61)..(61): /note="Nucleotide may be methylated to form 5-methylcytosine"
ccaggcatcaaactagaatagctgtctctcccagcccagcggtgtggtgtgaggaccaggcgagtcaaaacatgtgggcagcatttgcaagctgtgttgttgttgctcacacttatatttct

SEQ ID NO: 9900 - DNA, 122 bp, Homo sapiens
  misc_feature (61)..(62): /note="This region represents a CpG dinucleotide"
  misc_feature (61)..(61): /note="Nucleotide may be methylated to form 5-methylcytosine"
tcagcttgctgggggtacagaagagttgtcgggagctggagggggtggaagagcatagagcgtaccaattaagagggcagcatgtgagctggagctgaaaagtgtggcaagttcctcaaggg

SEQ ID NO: 9901 - DNA, 122 bp, Homo sapiens
  misc_feature (61)..(62): /note="This region represents a CpG dinucleotide"
  misc_feature (61)..(61): /note="Nucleotide may be methylated to form 5-methylcytosine"
tgtcattcctattctccctttcacctctaccgttttccaacagatgagcaaatacggtaacgatagcattttggtctagttcctgcacaaactcattcctctgcataaaaggcagacctttg

SEQ ID NO: 9902 - DNA, 122 bp, Homo sapiens
  misc_feature (61)..(62): /note="This region represents a CpG dinucleotide"
  misc_feature (61)..(61): /note="Nucleotide may be methylated to form 5-methylcytosine"
cattcccctctgtatttctttctagtggccacattattctagtttctgcatccatcttcacgttgcacctccttttctgtgtatcttttataaagacacttgtcattggatttagggcctac

SEQ ID NO: 9903 - DNA, 122 bp, Homo sapiens
  misc_feature (61)..(62): /note="This region represents a CpG dinucleotide"
  misc_feature (61)..(61): /note="Nucleotide may be methylated to form 5-methylcytosine"
atgtggttggcctttgcccctggttcctaggacagaggctttaaatcctggaatttcttccgtgataggagtgtctttatttttgacactaggcccctcagatcatactttatagtttttgc

SEQ ID NO: 9904 - DNA, 122 bp, Homo sapiens
  misc_feature (61)..(62): /note="This region represents a CpG dinucleotide"
  misc_feature (61)..(61): /note="Nucleotide may be methylated to form 5-methylcytosine"
cactgcatgtataaagatgaataaggcatggcccttgctctcaggaagctcacaaaatagcgggaatgacagacatatatgttaatgatattgcatagtgggatagagttataaccaagcta

SEQ ID NO: 9905 - DNA, 122 bp, Homo sapiens
  misc_feature (61)..(62): /note="This region represents a CpG dinucleotide"
  misc_feature (61)..(61): /note="Nucleotide may be methylated to form 5-methylcytosine"
taagcaacagctccggcttctgggcattttgtcgtgtttgctgaggagcccttacatcatcgcattccgtgttcacattccatgcagtgagtggaagtactgtttctcatgctgttgctgtg

SEQ ID NO: 9906 - DNA, 122 bp, Homo sapiens
  misc_feature (61)..(62): /note="This region represents a CpG dinucleotide"
  misc_feature (61)..(61): /note="Nucleotide may be methylated to form 5-methylcytosine"
caggtgtattaaggacttacaatgtgaaagaaagggtgatgccttgcttatggttgtcagcgcagggtttctcagctgcagcctgattgccatttgaggccagataattctctgtatggggc

SEQ ID NO: 9907 - DNA, 122 bp, Homo sapiens
  misc_feature (61)..(62): /note="This region represents a CpG dinucleotide"
  misc_feature (61)..(61): /note="Nucleotide may be methylated to form 5-methylcytosine"
gcaccgcctgccgctccagctccgccagcacgtgctgctctgagggcggggcgacggagacgcgggtgagggcccaagggcaccgcccctgagaaccacccccaacgcgaggccacccgctt

SEQ ID NO: 9908 - DNA, 122 bp, Homo sapiens
  misc_feature (61)..(62): /note="This region represents a CpG dinucleotide"
  misc_feature (61)..(61): /note="Nucleotide may be methylated to form 5-methylcytosine"
gcaataaccacttcacttggttgtgtaatcctccagggcacaataatcattttatgtgatcgtataaaatgctccactgtgaatacaccatttgctcattttccttcctgtcagtggatatt

SEQ ID NO: 9909 - DNA, 122 bp, Homo sapiens
  misc_feature (61)..(62): /note="This region represents a CpG dinucleotide"
  misc_feature (61)..(61): /note="Nucleotide may be methylated to form 5-methylcytosine"
tgtggcagatgaactgataaaatgcaatgaaagacaagaagccagtgtcagcacgtaacacgcatctttgatgtatgatcaggaacaaaatcatgggcagcccaagtggctgttttaactca

SEQ ID NO: 9910 - DNA, 122 bp, Homo sapiens
  misc_feature (61)..(62): /note="This region represents a CpG dinucleotide"
  misc_feature (61)..(61): /note="Nucleotide may be methylated to form 5-methylcytosine"
cgaaaagatttctgattagcaggtcacataagttacatctgacaagtcttgtcagaactccgtcagtaccagtgacacacactagaccataccacaggccacattttatccctggaacacag

SEQ ID NO: 9911 - DNA, 122 bp, Homo sapiens
  misc_feature (61)..(62): /note="This region represents a CpG dinucleotide"
  misc_feature (61)..(61): /note="Nucleotide may be methylated to form 5-methylcytosine"
tagcaaagagatcctagaaatgagagcactgcagaaagcctagataagaccccaggcagacggggatgggatgctacacacatgctcatgggacacccagaagggcccagttgaaagtaaaa

SEQ ID NO: 9912 - DNA, 122 bp, Homo sapiens
  misc_feature (61)..(62): /note="This region represents a CpG dinucleotide"
  misc_feature (61)..(61): /note="Nucleotide may be methylated to form 5-methylcytosine"
gtgttttgtgttttgtagggtgacctctgttgtagttctatttccagatgatttccctttcgcagattgtcagctgtgcagatcagacctttttgcttaagtccttttgtttgatacgctaa

SEQ ID NO: 9913 - DNA, 122 bp, Homo sapiens
  misc_feature (61)..(62): /note="This region represents a CpG dinucleotide"
  misc_feature (61)..(61): /note="Nucleotide may be methylated to form 5-methylcytosine"
aactgttaaagtcactcctgtttctgatggcagtgtgagttctcaatctacacaggatgacgtgaaagaaaagatcaagaactactgcttggcagccacacttcttgaacaaggagctccat

SEQ ID NO: 9914 - DNA, 122 bp, Homo sapiens
  misc_feature (61)..(62): /note="This region represents a CpG dinucleotide"
  misc_feature (61)..(61): /note="Nucleotide may be methylated to form 5-methylcytosine"
gggcagtgtattcctggctgagtctgcccacatgcacagtgaggaccggagagaacacaacgtggtacatcccaacactggaatactattggctgagtctgcccacatgcacagtgaggacc

SEQ ID NO: 9915 - DNA, 122 bp, Homo sapiens
  misc_feature (61)..(62): /note="This region represents a CpG dinucleotide"
  misc_feature (61)..(61): /note="Nucleotide may be methylated to form 5-methylcytosine"
aaaaccacctttgtgatcatggtatttcctctgccagctaagtatcaaaccatacatgagcgggataggcagcaattaacaggcagtatactttaactggaaataaaagattaagaaaatca

SEQ ID NO: 9916 - DNA, 122 bp, Homo sapiens
  misc_feature (61)..(62): /note="This region represents a CpG dinucleotide"
  misc_feature (61)..(61): /note="Nucleotide may be methylated to form 5-methylcytosine"
aggtatgagcaggtaggacacctgcaggggaggctccctaggaagaaacaactgggccttcgattacatcccttgggagacccaagggttggtcttagagcttggagtcactgacctgagtc

SEQ ID NO: 9917 - DNA, 122 bp, Homo sapiens
  misc_feature (61)..(62): /note="This region represents a CpG dinucleotide"
  misc_feature (61)..(61): /note="Nucleotide may be methylated to form 5-methylcytosine"
cgggatcccctggtccccttcctcaaatgagatgtctctggcataggttccatctactcccgttcaaaggcaataattcactagtggagccatttggacacatggctactttacaatcactt

SEQ ID NO: 9918 - DNA, 122 bp, Homo sapiens
  misc_feature (61)..(62): /note="This region represents a CpG dinucleotide"
  misc_feature (61)..(61): /note="Nucleotide may be methylated to form 5-methylcytosine"
tttttaaagactggccaagtgacttgcataatttaagatcctttctagcactgatcagcccgctctggccaagcagtttgctgattaattattaatcagactgagtttaggatgagtaatca

SEQ ID NO: 9919 - DNA, 122 bp, Homo sapiens
  misc_feature (61)..(62): /note="This region represents a CpG dinucleotide"
  misc_feature (61)..(61): /note="Nucleotide may be methylated to form 5-methylcytosine"
caccaggagcaaacctgtggtccacaaaatcgggtgtactgacccactgcaatgagggagcgcctcccaagaacgaagggaaaggcagagtttgaaggggttgagggaaggcagagtttagg

SEQ ID NO: 9920 - DNA, 122 bp, Homo sapiens
  misc_feature (61)..(62): /note="This region represents a CpG dinucleotide"
  misc_feature (61)..(61): /note="Nucleotide may be methylated to form 5-methylcytosine"
tgaagcaattttaaagttagagtgttactcattaacccaggtatgactgccagtgattaacgacacacagaaatagctaaagcttgatggtttcaaaaatatgattccactactcacatctt

SEQ ID NO: 9921 - DNA, 122 bp, Homo sapiens
  misc_feature (61)..(62): /note="This region represents a CpG dinucleotide"
  misc_feature (61)..(61): /note="Nucleotide may be methylated to form 5-methylcytosine"
tcttttctcttaccagatgtcttgttaaccttctcagaggtatttagttttcctgaggggcgcagctgtttcccattgttctgtgggccagatgcttctggcactcccttcgaatcatttcc

SEQ ID NO: 9922 - DNA, 122 bp, Homo sapiens
  misc_feature (61)..(62): /note="This region represents a CpG dinucleotide"
  misc_feature (61)..(61): /note="Nucleotide may be methylated to form 5-methylcytosine"
caaagtttgtaaaaattctatgctcttaaaaatggcttttattttaaaacttcccaaatacgttgtcttgaagttgttaatttctcaatcaagacgcagggtggcgctgcaggctaagttgt

SEQ ID NO: 9923 - DNA, 122 bp, Homo sapiens
  misc_feature (61)..(62): /note="This region represents a CpG dinucleotide"
  misc_feature (61)..(61): /note="Nucleotide may be methylated to form 5-methylcytosine"
tcacttattatggagtccaacacaaacacctttgttcattttgttcacttgcttgctgaccgctgaatcatttccttttccttagcttagttgcttaaggcaattttaaaaaacattgggtt

SEQ ID NO: 9924 - DNA, 122 bp, Homo sapiens
  misc_feature (61)..(62): /note="This region represents a CpG dinucleotide"
  misc_feature (61)..(61): /note="Nucleotide may be methylated to form 5-methylcytosine"
gcaggcaacaaaaccagtatgttagctatgtctgtgactctgtcaccaatgtgggttagccgtatctctgaccctgtcaccaattgcaattacagatgtctccacatcacattagtgttgtt

SEQ ID NO: 9925 - DNA, 122 bp, Homo sapiens
  misc_feature (61)..(62): /note="This region represents a CpG dinucleotide"
  misc_feature (61)..(61): /note="Nucleotide may be methylated to form 5-methylcytosine"
gaagtcaagcacgaatctaagacatagattatttttatatagctaatgaagagtatgttacgaaattgttgggtttttggggtattgagggtggcaaattttgtgaatcatgcatgcttcac

SEQ ID NO: 9926 - DNA, 122 bp, Homo sapiens
  misc_feature (61)..(62): /note="This region represents a CpG dinucleotide"
  misc_feature (61)..(61): /note="Nucleotide may be methylated to form 5-methylcytosine"
cgtctgcgccgcccgagccgctgtgctgcgcgtactcctcgaagggagggaacttgggctcgatgtagttggagtttatcaaaaacgagctcatggtcattaatttgtgaagtgcaaaaata

SEQ ID NO: 9927 - DNA, 122 bp, Homo sapiens
  misc_feature (61)..(62): /note="This region represents a CpG dinucleotide"
  misc_feature (61)..(61): /note="Nucleotide may be methylated to form 5-methylcytosine"
atccttgttaattctctgagtcacatcttaagaagtacagtgtatcctgccttctagtgacgggtgtgctttgttgtaggagaaagtatgggcacaacagactgtagagggcagacgtctca

SEQ ID NO: 9928 - DNA, 122 bp, Homo sapiens
  misc_feature (61)..(62): /note="This region represents a CpG dinucleotide"
  misc_feature (61)..(61): /note="Nucleotide may be methylated to form 5-methylcytosine"
agctgcatttagcaatatatgagcaactctactagtaataaggagaggaagaagagaaggcgtatgtgtggatttatcttcctagggctgtgtggctcaggttaatatttaaaatggtcttg

SEQ ID NO: 9929 - DNA, 122 bp, Homo sapiens
  misc_feature (61)..(62): /note="This region represents a CpG dinucleotide"
  misc_feature (61)..(61): /note="Nucleotide may be methylated to form 5-methylcytosine"
ctgatcctaatggcaacctgatggcctgagaccagctgcctcgctccggaacaggcacagcgatgccctgtgcaggaagaagggcggagcagggtgaccagattcctgccaggcaaaaacct

SEQ ID NO: 9930 - DNA, 122 bp, Homo sapiens
  misc_feature (61)..(62): /note="This region represents a CpG dinucleotide"
  misc_feature (61)..(61): /note="Nucleotide may be methylated to form 5-methylcytosine"
ttctccttcattcctggatttagtcagtcaccagcttctgtcaactgattgtaccttcatcgtacagaaatccagtactttatcagagaagtcatttttgtggggaaaatttatcaaaggtt

SEQ ID NO: 9931 - DNA, 122 bp, Homo sapiens
  misc_feature (61)..(62): /note="This region represents a CpG dinucleotide"
  misc_feature (61)..(61): /note="Nucleotide may be methylated to form 5-methylcytosine"
acctaagtgccacaaggataggtttttaaaaatacacagttggcggggcgtggtggctcacgcctgtaaccccagcactttgggaggcagaggcgggtgggttacctgaggtcaagagttca

SEQ ID NO: 9932 - DNA, 122 bp, Homo sapiens
  misc_feature (61)..(62): /note="This region represents a CpG dinucleotide"
  misc_feature (61)..(61): /note="Nucleotide may be methylated to form 5-methylcytosine"
ggttaaatgtcttttagtcttccagctttaaaaaaaaaaccagtatagatgcatatttgccgtaagtgaatgtttacaaataatagagggatacagaagtcagtaactggatgtcactcttg

SEQ ID NO: 9933 - DNA, 122 bp, Homo sapiens
  misc_feature (61)..(62): /note="This region represents a CpG dinucleotide"
  misc_feature (61)..(61): /note="Nucleotide may be methylated to form 5-methylcytosine"
ttgtgacaagctggggacggaccaagaaggtggtgctgaggcagcactaatatgaattagcgttacaacaatgtcccagcccaagaagagagtgaatttacctttccttcacatttttgttc

SEQ ID NO: 9934 - DNA, 122 bp, Homo sapiens
  misc_feature (61)..(62): /note="This region represents a CpG dinucleotide"
  misc_feature (61)..(61): /note="Nucleotide may be methylated to form 5-methylcytosine"
aaaaaaaacctgcattctcctagtgtcaatctagaaaacacaaccagctaaaggggtttacgcagccttttaaaaaggcttatcttgattcagattacttaattacaaattaaatataagga

SEQ ID NO: 9935 - DNA, 122 bp, Homo sapiens
  misc_feature (61)..(62): /note="This region represents a CpG dinucleotide"
  misc_feature (61)..(61): /note="Nucleotide may be methylated to form 5-methylcytosine"
tcgggttcagagcagatccttaaagccttccagtccagctccctggttaggctcatgagacggccacgatgtgtctgcccagtgacaaccagcacaaaccggaaggtccacccctctctgcc

SEQ ID NO: 9936 - DNA, 122 bp, Homo sapiens
  misc_feature (61)..(62): /note="This region represents a CpG dinucleotide"
  misc_feature (61)..(61): /note="Nucleotide may be methylated to form 5-methylcytosine"
agtcgctggcgttcctctcaccgagggtccaggctgagggtgaaaccgcttctctgttgacgccgcccggcctgccgaaccgagtcagccgcctctggacctaggctcggtgacacctgcac

SEQ ID NO: 9937 - DNA, 122 bp, Homo sapiens
  misc_feature (61)..(62): /note="This region represents a CpG dinucleotide"
  misc_feature (61)..(61): /note="Nucleotide may be methylated to form 5-methylcytosine"
gcagattaactcaggaaaattatatggggagctcttatgctactctgaagatctgagactcgttggagaatttacaatcccaaattaactcagggagaattccaactagactctgaaatgaa

SEQ ID NO: 9938 - DNA, 122 bp, Homo sapiens
  misc_feature (61)..(62): /note="This region represents a CpG dinucleotide"
  misc_feature (61)..(61): /note="Nucleotide may be methylated to form 5-methylcytosine"
tttaccattgcttaaccaaataccaagtcacggggaacccacagggggcgtgtggctactcgctcaccaagtataggggaaagagatagactgtttacaaaggaaacaaaagtctcagggct

SEQ ID NO: 9939 - DNA, 122 bp, Homo sapiens
  misc_feature (61)..(62): /note="This region represents a CpG dinucleotide"
  misc_feature (61)..(61): /note="Nucleotide may be methylated to form 5-methylcytosine"
gcatttctttaaagcatcggaaatgaatgcgtttgagtaggctccacacacaccgctccacgggcaccaacacacacatcattacactggtggggaagcaagacaggagcacactcttgcca

SEQ ID NO: 9940 - DNA, 122 bp, Homo sapiens
  misc_feature (61)..(62): /note="This region represents a CpG dinucleotide"
  misc_feature (61)..(61): /note="Nucleotide may be methylated to form 5-methylcytosine"
tcatggtgactgttaccgttcttaaaggcggcatgtctggagtttgttctttttgatgttcggatgtgttcggaatttcttccctctggtggggttcgtggtctcactggctcaggagtgaa

SEQ ID NO: 9941 - DNA, 122 bp, Homo sapiens
  misc_feature (61)..(62): /note="This region represents a CpG dinucleotide"
  misc_feature (61)..(61): /note="Nucleotide may be methylated to form 5-methylcytosine"
tggcttgggggtgcttgtgtaagttcttggttatgtgccctcagccaccaggatatgaaccgtgtctgcagagcttcactttagtgagcttacaagtttttaaatttttacttctagttaca

SEQ ID NO: 9942 - DNA, 122 bp, Homo sapiens
  misc_feature (61)..(62): /note="This region represents a CpG dinucleotide"
  misc_feature (61)..(61): /note="Nucleotide may be methylated to form 5-methylcytosine"
caggaaacaaaatgcactcattcaatttcttcaagttgagtggagacctcctggatgccacgtgtcagctttacctgctagaaacacacgctcacctcgctgtccaagaccctggaaagggg

SEQ ID NO: 9943 - DNA, 122 bp, Homo sapiens
  misc_feature (61)..(62): /note="This region represents a CpG dinucleotide"
  misc_feature (61)..(61): /note="Nucleotide may be methylated to form 5-methylcytosine"
accaacactgatttgacttccaccagcaggctcagcagcacagcctctagatgttttgctcgtttcatcgccaggcggtactctttcccacggtactataaagcaattcctgtttttcactt

SEQ ID NO: 9944 - DNA, 122 bp, Homo sapiens
  misc_feature (61)..(62): /note="This region represents a CpG dinucleotide"
  misc_feature (61)..(61): /note="Nucleotide may be methylated to form 5-methylcytosine"
cattggggctcacagagagatctggaatgtgaggctgtgataggccacccgaggcagagccgggcagttggtggctttgattgtgtgtgtgaaagggtgtctagaatgatgcccaggtgggc

SEQ ID NO: 9945 - DNA, 122 bp, Homo sapiens
  misc_feature (61)..(62): /note="This region represents a CpG dinucleotide"
  misc_feature (61)..(61): /note="Nucleotide may be methylated to form 5-methylcytosine"
acaaacggtagactgcgagcaggcggtgtgtgtcctgactacatgcccagctaagcaggacgccccttcctgccttgcacgcatcttctctgttgcaaaaggcagcgatcctgcggggttct

SEQ ID NO: 9946 - DNA, 122 bp, Homo sapiens
  misc_feature (61)..(62): /note="This region represents a CpG dinucleotide"
  misc_feature (61)..(61): /note="Nucleotide may be methylated to form 5-methylcytosine"
gaagtttttaattaattaattaaagcccagccttttctgccatctggaaaagcatatatacgtatataccctcaagcacatgcatgctgaagccaacttttattacccactgaagaaagagt

SEQ ID NO: 9947 - DNA, 122 bp, Homo sapiens
  misc_feature (61)..(62): /note="This region represents a CpG dinucleotide"
  misc_feature (61)..(61): /note="Nucleotide may be methylated to form 5-methylcytosine"
tgattcacattcgtactgtgtctggattgactcaaaaattcatcattaatgagcaagaagcgatacagtacagtggagtaatacacttgaaatgaaaccagtcatctttccctgctgttctt

SEQ ID NO: 9948 - DNA, 122 bp, Homo sapiens
  misc_feature (61)..(62): /note="This region represents a CpG dinucleotide"
  misc_feature (61)..(61): /note="Nucleotide may be methylated to form 5-methylcytosine"
actgtctcaaaaaaacaaaaccaaaaaaaaagataaatagattgactccggaaactgaggcgccgagaggtgaggtgccttgcccaatatcacacagcacttactaagtggcacagctggag

SEQ ID NO: 9949 - DNA, 122 bp, Homo sapiens
  misc_feature (61)..(62): /note="This region represents a CpG dinucleotide"
  misc_feature (61)..(61): /note="Nucleotide may be methylated to form 5-methylcytosine"
aacagaaaataagctgcttgacaatagagacttggcctattttgttaaaagctatatcctcgggctgggcgtgatggatcatgcctataatcctagaactttgggagggcgaggcaggggga

SEQ ID NO: 9950 - DNA, 122 bp, Homo sapiens
  misc_feature (61)..(62): /note="This region represents a CpG dinucleotide"
  misc_feature (61)..(61): /note="Nucleotide may be methylated to form 5-methylcytosine"
ctaacttgcaggagctgtgcagctttggctttgcaggttttagaagctctccctacgccacgtctttaaatatatgtatgttcaatcagcaggaggaagggactaacaagagccttctgcgg

SEQ ID NO: 9951 - DNA, 122 bp, Homo sapiens
  misc_feature (61)..(62): /note="This region represents a CpG dinucleotide"
  misc_feature (61)..(61): /note="Nucleotide may be methylated to form 5-methylcytosine"
aggcctgatttagcacctttgcaggttactcctggctcgcaatggttgtagttgtggggacgagtgggtcatgcatcatccttagcaggcagacacatagtctgtccccattgcagccaacc

SEQ ID NO: 9952 - DNA, 122 bp, Homo sapiens
  misc_feature (61)..(62): /note="This region represents a CpG dinucleotide"
  misc_feature (61)..(61): /note="Nucleotide may be methylated to form 5-methylcytosine"
ctgcctccttacatattttaagtttggcctaaaggtttctctgtacatcatgaactataacgtaaatggaatagtatacggactctagtctactcttgtgccagtcactgagtttggccaat

SEQ ID NO: 9953 - DNA, 122 bp, Homo sapiens
  misc_feature (61)..(62): /note="This region represents a CpG dinucleotide"
  misc_feature (61)..(61): /note="Nucleotide may be methylated to form 5-methylcytosine"
agtacacttggaccgggcttcccaaagggttcaagaactcccccaccatcttcggggaggcgtgggctcgagacatccagaagtttcccagcggagacataggctgcatgttgctccagtag

SEQ ID NO: 9954 - DNA, 122 bp, Homo sapiens
  misc_feature (61)..(62): /note="This region represents a CpG dinucleotide"
  misc_feature (61)..(61): /note="Nucleotide may be methylated to form 5-methylcytosine"
ggtttccatatgctgcttatgacacaccacagagctgactttcttggcattacaaaccttcgtggtatttccatttagctagacactcccttggcatctcaatttaccccaggtctaatcta

SEQ ID NO: 9955 - DNA, 122 bp, Homo sapiens
  misc_feature (61)..(62): /note="This region represents a CpG dinucleotide"
  misc_feature (61)..(61): /note="Nucleotide may be methylated to form 5-methylcytosine"
aaggggaagtttggacacagacacacagggagaacgccttgagcatgaaggcagagattgcgatgatgtgtctgtctacaagccaaggaatgccaaagatcaccagcagagagaggcatgga

SEQ ID NO: 9956 - DNA, 122 bp, Homo sapiens
  misc_feature (61)..(62): /note="This region represents a CpG dinucleotide"
  misc_feature (61)..(61): /note="Nucleotide may be methylated to form 5-methylcytosine"
aacctgtcatcatggggcagccaagccaatggccctaattaaagtctcctgagacacaggcgtggctatctccttccagcgaggcccgtctctagataaatgctcctctaccacagtgccag

SEQ ID NO: 9957 - DNA, 122 bp, Homo sapiens
  misc_feature (61)..(62): /note="This region represents a CpG dinucleotide"
  misc_feature (61)..(61): /note="Nucleotide may be methylated to form 5-methylcytosine"
ctttgataggttaaattccttgcattagtgaaatacacgtttgtctgataaatccactctcgtgtatcttatacaataatttaggttttcatatatgagatccaggtatgaaacagattgtt

SEQ ID NO: 9958 - DNA, 122 bp, Homo sapiens
  misc_feature (61)..(62): /note="This region represents a CpG dinucleotide"
  misc_feature (61)..(61): /note="Nucleotide may be methylated to form 5-methylcytosine"
tgggacactgacgtgatgctgatctgtaaggcagctctctctgtggaatcaccaccacctcgcatccagggagaattaattcagggcacaatggagacagagacccagccgagatgacaatt

SEQ ID NO: 9959 - DNA, 122 bp, Homo sapiens
  misc_feature (61)..(62): /note="This region represents a CpG dinucleotide"
  misc_feature (61)..(61): /note="Nucleotide may be methylated to form 5-methylcytosine"
gggtcaggatctgccattctttacaagtttccttaacgtattgcgtcaaagcgagacaaccgagtcttactcaaacttgttttaaccggagatggagggttgctgctgtgtcaccgcctgca

SEQ ID NO: 9960 - DNA, 122 bp, Homo sapiens
  misc_feature (61)..(62): /note="This region represents a CpG dinucleotide"
  misc_feature (61)..(61): /note="Nucleotide may be methylated to form 5-methylcytosine"
taaggcaggaacagaaaataaaatactgcatgttctcccttatatgtgggagctaaacagcgggttactcatggccataaagatggcaacaggccaggtgcaatggctcacgcctgtaatcc

SEQ ID NO: 9961 - DNA, 122 bp, Homo sapiens
  misc_feature (61)..(62): /note="This region represents a CpG dinucleotide"
  misc_feature (61)..(61): /note="Nucleotide may be methylated to form 5-methylcytosine"
tccaggccaaggtgaactttcatcctctcaagcccaatgaaccgtagacaggagagggaacgtgaaggcactggggcagaagaaacatctcggaaacccctaaactgcctcagcttaattta

SEQ ID NO: 9962 - DNA, 122 bp, Homo sapiens
  misc_feature (61)..(62): /note="This region represents a CpG dinucleotide"
  misc_feature (61)..(61): /note="Nucleotide may be methylated to form 5-methylcytosine"
gtggctcggggcatttgggaaatcgcaaaagaccttcccagcctggacagtctggggctgcgtgctctagaccgggggctccctaagggcaaatacctgaccctgtgagtcctgccaggtac

SEQ ID NO: 9963 - DNA, 122 bp, Homo sapiens
  misc_feature (61)..(62): /note="This region represents a CpG dinucleotide"
  misc_feature (61)..(61): /note="Nucleotide may be methylated to form 5-methylcytosine"
ctttcattttatctatcatctatctatctgaaggttttttcccaagttcatgtgaactgacgttggaaaacaagaaaacagattctgtcttgatattttccagtcctagactttgagaattc

SEQ ID NO: 9964 - DNA, 122 bp, Homo sapiens
  misc_feature (61)..(62): /note="This region represents a CpG dinucleotide"
  misc_feature (61)..(61): /note="Nucleotide may be methylated to form 5-methylcytosine"
gggaggcatctgttttgctgctgcaagcagaggatggaatagtaaccttggtttcccatgcgctgtggaacatgatgaggagttcttaggagaccacggttaccgtctttagcacaatctgc

SEQ ID NO: 9965 - DNA, 122 bp, Homo sapiens
  misc_feature (61)..(62): /note="This region represents a CpG dinucleotide"
  misc_feature (61)..(61): /note="Nucleotide may be methylated to form 5-methylcytosine"
gaagcaaaagcagaaacccttgataaacccatcagaccttgtgagacttactcactatcacgagaacagcacaggaaagaccagcacaggaaagaccggcccccatgattcaattacctccc

SEQ ID NO: 9966 - DNA, 122 bp, Homo sapiens
  misc_feature (61)..(62): /note="This region represents a CpG dinucleotide"
  misc_feature (61)..(61): /note="Nucleotide may be methylated to form 5-methylcytosine"
tttaatagatgcagaaactgaggcacagagaggttaagcaagtgatcaaggtcacacagccggtaagggccggtgaaggaattgaaaataggccagtgaccactgtaaccagtaaactatct

SEQ ID NO: 9967 - DNA, 122 bp, Homo sapiens
  misc_feature (61)..(62): /note="This region represents a CpG dinucleotide"
  misc_feature (61)..(61): /note="Nucleotide may be methylated to form 5-methylcytosine"
agttaacgtagcagaggaatggacctgctggctgccacacgggaagttctcagaggcgtccgtggcgaagcctctgtgtcctggagctatcatggttacttccttgctgcttacttcttaaa

SEQ ID NO: 9968 - DNA, 122 bp, Homo sapiens
  misc_feature (61)..(62): /note="This region represents a CpG dinucleotide"
  misc_feature (61)..(61): /note="Nucleotide may be methylated to form 5-methylcytosine"
tgagcggagcactgggcacctcctatccttacatccacagcaacctgacaacctcccaggcgggcgtggagtttgaccagttccaccaccggcgtctatctgggttctctacgtgccgggcc

SEQ ID NO: 9969 - DNA, 122 bp, Homo sapiens
  misc_feature (61)..(62): /note="This region represents a CpG dinucleotide"
  misc_feature (61)..(61): /note="Nucleotide may be methylated to form 5-methylcytosine"
gttttctcggcgcaccacggcgcctgcagttagtaggcaatccatccccccgagctgcagcgagttaagctgcaggccttttgtaacggcctcaggtgtgagctgccgcaagccccccccac

SEQ ID NO: 9970 - DNA, 122 bp, Homo sapiens
  misc_feature (61)..(62): /note="This region represents a CpG dinucleotide"
  misc_feature (61)..(61): /note="Nucleotide may be methylated to form 5-methylcytosine"
cctgacacaggtgcaagccctctaagtcatccttccttgtaccatcttactgagatgccccgcggttcccacggtgctcgttttcagtctctgccacaagaaccaggtgtggctggagggca

SEQ ID NO: 9971 - DNA, 122 bp, Homo sapiens
  misc_feature (61)..(62): /note="This region represents a CpG dinucleotide"
  misc_feature (61)..(61): /note="Nucleotide may be methylated to form 5-methylcytosine"
tttgacttcttgcagcatagtttgcttttcctcttttcttctctgtgcctttgcacgtgccgtgttctttgctttgtcatcccccacccccaaatacttaactcctacttagccttcaagtc

SEQ ID NO: 9972 - DNA, 122 bp, Homo sapiens
  misc_feature (61)..(62): /note="This region represents a CpG dinucleotide"
  misc_feature (61)..(61): /note="Nucleotide may be methylated to form 5-methylcytosine"
tttcctgcatattctgggcaagacttgactttgtggtcatcatctccaaaacacagtaaccgccctcccttgagagcatcagtggaagccaggattcatgggtggcagcagggatgacacaa

SEQ ID NO: 9973 - DNA, 122 bp, Homo sapiens
  misc_feature (61)..(62): /note="This region represents a CpG dinucleotide"
  misc_feature (61)..(61): /note="Nucleotide may be methylated to form 5-methylcytosine"
ccaaggtgagcttagcaacaaaagatacagggcccaccgcccctgcaatcccacgctaagcggctgctgaacctccagtccctggtccacactgaagcttgccgtctgcaaccacagaatcc

SEQ ID NO: 9974 - DNA, 122 bp, Homo sapiens
  misc_feature (61)..(62): /note="This region represents a CpG dinucleotide"
  misc_feature (61)..(61): /note="Nucleotide may be methylated to form 5-methylcytosine"
gacgggagtcagtgggccgcgccttcccactgcgactccccgtgggtccgcaaaccgacacgtcactcctcggccctcaaccaaactgcttggggcacgttctttccgcgctcttgactcct

SEQ ID NO: 9975 - DNA, 122 bp, Homo sapiens
  misc_feature (61)..(62): /note="This region represents a CpG dinucleotide"
  misc_feature (61)..(61): /note="Nucleotide may be methylated to form 5-methylcytosine"
tcccgcccgccaagttcctgcgccacccaatcccctcgcggcccagactccctcggggcccgccccttcgcgcgtcattagcaattccgccatcttgaagtgactctgtcggggactacaaa

SEQ ID NO: 9976 - DNA, 122 bp, Homo sapiens
  misc_feature (61)..(62): /note="This region represents a CpG dinucleotide"
  misc_feature (61)..(61): /note="Nucleotide may be methylated to form 5-methylcytosine"
ttctttgtagtttctccaaattctttgtaaaaattatgaaagtaatttgcgaaaaataagcgaattgacatggaatataaggtgaataatacatttttaaaatgtagttgtgtataatggaa

SEQ ID NO: 9977 - DNA, 122 bp, Homo sapiens
  misc_feature (61)..(62): /note="This region represents a CpG dinucleotide"
  misc_feature (61)..(61): /note="Nucleotide may be methylated to form 5-methylcytosine"
cactttttaaagtgaccctttgagccttgcttcctctgtgcatgtcaggattggctttcacggccacagaatctggactgtgattagtcttcctgtttcatctgtggttttgctcattgatt

SEQ ID NO: 9978 - DNA, 122 bp, Homo sapiens
  misc_feature (61)..(62): /note="This region represents a CpG dinucleotide"
  misc_feature (61)..(61): /note="Nucleotide may be methylated to form 5-methylcytosine"
ctgcgctatttcctctgagtcatattgtctgtttattttggtccctatctttcatggagacgatccttcaagtatctgatctttagctgtcttttcagtttagtgaggagctaaacaaacta

SEQ ID NO: 9979 - DNA, 122 bp, Homo sapiens
  misc_feature (61)..(62): /note="This region represents a CpG dinucleotide"
  misc_feature (61)..(61): /note="Nucleotide may be methylated to form 5-methylcytosine"
tcttcccaaatacctgaggcttttcacctttcatggggatctggctaatgcacagctgttcgtttggaagagggtattgcaatgactgaactccagggcttaatctccacacttgcctaagt

SEQ ID NO: 9980 - DNA, 122 bp, Homo sapiens
  misc_feature (61)..(62): /note="This region represents a CpG dinucleotide"
  misc_feature (61)..(61): /note="Nucleotide may be methylated to form 5-methylcytosine"
caaagtagataaatgtcaattatgaagagacatttattgtaatggaaataatggattcttcggtctagattttcatttactgacctagttcagggaagcttgtacttttagtggataataat

SEQ ID NO: 9981 - DNA, 122 bp, Homo sapiens
  misc_feature (61)..(62): /note="This region represents a CpG dinucleotide"
  misc_feature (61)..(61): /note="Nucleotide may be methylated to form 5-methylcytosine"
tatgtctgtggcaatcttccttcaatgttctgggcactgtggggtaatctggggctgacacgtctgccattgcccccaagaatttgtaacattcctgagtccatcggagcagttagcagcta

SEQ ID NO: 9982 - DNA, 122 bp, Homo sapiens
  misc_feature (61)..(62): /note="This region represents a CpG dinucleotide"
  misc_feature (61)..(61): /note="Nucleotide may be methylated to form 5-methylcytosine"
cactgtttcctccctccaaccctgagtggctggagtgccactgttctcagcgctgggatgcgtcggcccccgccgcacccactgccaggctgcaacatgagatctgatccccaatgtgacct

SEQ ID NO: 9983 - DNA, 122 bp, Homo sapiens
  misc_feature (61)..(62): /note="This region represents a CpG dinucleotide"
  misc_feature (61)..(61): /note="Nucleotide may be methylated to form 5-methylcytosine"
tggtcctcttccctccccactggcctcctcctttctccagagggcaccacctttgccctgcgccagacagccaggcccttgccaggccaagagttgagtcagacttcagttcaccaacatgc

SEQ ID NO: 9984 - DNA, 122 bp, Homo sapiens
  misc_feature (61)..(62): /note="This region represents a CpG dinucleotide"
  misc_feature (61)..(61): /note="Nucleotide may be methylated to form 5-methylcytosine"
ggcaacattcaaaagcccaggctgccgtgtgaaatctcctggctcctcctttgtgattttcgggctaaaaataaaatccccgggaccccggtggctgccattgttgctgctattgaaacgtg

SEQ ID NO: 9985 - DNA, 122 bp, Homo sapiens
  misc_feature (61)..(62): /note="This region represents a CpG dinucleotide"
  misc_feature (61)..(61): /note="Nucleotide may be methylated to form 5-methylcytosine"
attcctgaattcattccattacaccatattgctgtgcgtgtgtgtgcacgtgtgtgcttgcgcccgcatgtatgttgaatgggagtgtgggcaggtcagctagaacatcagctgcaattcac

SEQ ID NO: 9986 - DNA, 122 bp, Homo sapiens
  misc_feature (61)..(62): /note="This region represents a CpG dinucleotide"
  misc_feature (61)..(61): /note="Nucleotide may be methylated to form 5-methylcytosine"
gttgcatgtatagaaacataaacctagacacatagcattaaacacatttgagaggcagtacggtggggataacagctcagactctgcacactgactggatctcacagctccaccacttaatc

SEQ ID NO: 9987 - DNA, 122 bp, Homo sapiens
  misc_feature (61)..(62): /note="This region represents a CpG dinucleotide"
  misc_feature (61)..(61): /note="Nucleotide may be methylated to form 5-methylcytosine"
gttcctttacagtgctcacccattgtagcaaatggggaagtcaatcacgtttcaaaatcacgtggatatgagtcagcatgctggttcctgacttactagatcttgcacaatatatcagtaat

SEQ ID NO: 9988 - DNA, 122 bp, Homo sapiens
  misc_feature (61)..(62): /note="This region represents a CpG dinucleotide"
  misc_feature (61)..(61): /note="Nucleotide may be methylated to form 5-methylcytosine"
ttccttcagcactatttcctggactgttctgtgattgtttctcttgcttcacaaacctgccgtataaaggatgtggtaatccctggaggtgaacttgcaaaatagactccagggctgccaga

SEQ ID NO: 9989 - DNA, 122 bp, Homo sapiens
  misc_feature (61)..(62): /note="This region represents a CpG dinucleotide"
  misc_feature (61)..(61): /note="Nucleotide may be methylated to form 5-methylcytosine"
ggattggtgtagttgtttgatactggtgctgaatctagtttgaatgtctgcatgcagactcgtttcctctgggtttgggctggggtgggttgggctgagctgggctgagctgggccaggcct

SEQ ID NO: 9990 - DNA, 122 bp, Homo sapiens
  misc_feature (61)..(62): /note="This region represents a CpG dinucleotide"
  misc_feature (61)..(61): /note="Nucleotide may be methylated to form 5-methylcytosine"
gatgcatggcctattacatttgagaaacaccatactctgtatcacctcttggagcctgaccgtatatatcagggctctgaaaagtcctgcagttaataaacttcttatctttaacccagaat

SEQ ID NO: 9991 - DNA, 122 bp, Homo sapiens
  misc_feature (61)..(62): /note="This region represents a CpG dinucleotide"
  misc_feature (61)..(61): /note="Nucleotide may be methylated to form 5-methylcytosine"
tcacagaatgggatgccattgaatttttggacaacttgtaagacttaggtccaaaaatatcgctctaataagcagtctattaacttagggttgaagatttttcataaacctattgttaaaaa

SEQ ID NO: 9992 - DNA, 122 bp, Homo sapiens
  misc_feature (61)..(62): /note="This region represents a CpG dinucleotide"
  misc_feature (61)..(61): /note="Nucleotide may be methylated to form 5-methylcytosine"
aggcaacatcagtttgtctctgaacaaactgcattcttcacttttactccagtagacagtcgaggtcagcagtttttcagccgtgttgagccctaagaattccctccgaggggtttcagggg

SEQ ID NO: 9993 - DNA, 122 bp, Homo sapiens
  misc_feature (61)..(62): /note="This region represents a CpG dinucleotide"
  misc_feature (61)..(61): /note="Nucleotide may be methylated to form 5-methylcytosine"
caccgcattctggtacagaacccaggagtctgggaattctaaattcgagcctggccttttcgtagcattcatatttgtcaagggaggaggagagaatgtatttaacagtttgtcagcttgag

SEQ ID NO: 9994 - DNA, 122 bp, Homo sapiens
  misc_feature (61)..(62): /note="This region represents a CpG dinucleotide"
  misc_feature (61)..(61): /note="Nucleotide may be methylated to form 5-methylcytosine"
ccaaaagaatgtggcagaagtgggcatcatgccagttgacagcttccaattttacctcttcgagctcactcttgggatgctctctctcagaatccagctaccatgttctgagaagcccaagc

SEQ ID NO: 9995 - DNA, 122 bp, Homo sapiens
  misc_feature (61)..(62): /note="This region represents a CpG dinucleotide"
  misc_feature (61)..(61): /note="Nucleotide may be methylated to form 5-methylcytosine"
ctgggattataggtgtgagccaccatacccagcctattttaactttttaagaaactgccacgctgttttccaaagtgattgtaccattttacattctcattattagtagtgagagtatcagt

SEQ ID NO: 9996 - DNA, 122 bp, Homo sapiens
  misc_feature (61)..(62): /note="This region represents a CpG dinucleotide"
  misc_feature (61)..(61): /note="Nucleotide may be methylated to form 5-methylcytosine"
cctacttgtgggaaactcaatgccactgtgtgattcatgggtcagagttcctagtagatgcgaatgattagtgggtgtgatataatcaaagaggaatacaataaggccacagtaactaagct

SEQ ID NO: 9997 - DNA, 122 bp, Homo sapiens
  misc_feature (61)..(62): /note="This region represents a CpG dinucleotide"
  misc_feature (61)..(61): /note="Nucleotide may be methylated to form 5-methylcytosine"
agaagtcctcgatgagccgccgcaatgtgaccttaggccagtcacttgagctccaaggcacggcccacaggggtacccctgctccccaacccgcaaatgggtggtgagacctgagggactct

SEQ ID NO: 9998 - DNA, 122 bp, Homo sapiens
  misc_feature (61)..(62): /note="This region represents a CpG dinucleotide"
  misc_feature (61)..(61): /note="Nucleotide may be methylated to form 5-methylcytosine"
ctactgaatcaagcagaccttcatttccaactttgtagaccattgtgccctgtgggtcggcgtcttttctaggcagggacttgtgatcacatagacgtgtgtctgataagaggggagcggga

SEQ ID NO: 9999 - DNA, 122 bp, Homo sapiens
  misc_feature (61)..(62): /note="This region represents a CpG dinucleotide"
  misc_feature (61)..(61): /note="Nucleotide may be methylated to form 5-methylcytosine"
acgctgcttttcagctcacccatgcatttatccacaagaacacatcatgagctttctttgcgccaggtccaacccactgtccccagtgaactccactgggccacaggtgctgtcacattcct

SEQ ID NO: 10000 - DNA, 122 bp, Homo sapiens
  misc_feature (61)..(62): /note="This region represents a CpG dinucleotide"
  misc_feature (61)..(61): /note="Nucleotide may be methylated to form 5-methylcytosine"
caggctgcctgaggcagccgaagcaggcactgctttaggaatgcttcaccccctggcctacgcaggggatgcaacaactggccagccttggcccagcctccatgctgattggggaccacgtg

SEQ ID NO: 10001 - DNA, 122 bp, Homo sapiens
  misc_feature (61)..(62): /note="This region represents a CpG dinucleotide"
  misc_feature (61)..(61): /note="Nucleotide may be methylated to form 5-methylcytosine"
ccgggagacagttttggacatagcttttctcacagtggtagtagctcccactatacccaccgtgactcggggctgttcagaatccacccaggcgccctgagctctggggcctcctgggtagg

SEQ ID NO: 10002 - DNA, 122 bp, Homo sapiens
  misc_feature (61)..(62): /note="This region represents a CpG dinucleotide"
  misc_feature (61)..(61): /note="Nucleotide may be methylated to form 5-methylcytosine"
cccacagatccctgagtcatgcctggaagctttgtcccctgcttcagatgtggagccaggcgtgttcatatctactctttacccttgagccctccccaggaatttgggaccctgctttagag

SEQ ID NO: 10003 - DNA, 122 bp, Homo sapiens
  misc_feature (61)..(62): /note="This region represents a CpG dinucleotide"
  misc_feature (61)..(61): /note="Nucleotide may be methylated to form 5-methylcytosine"
agcaagtgggaaagacctgagcaagaagagctgcatccttgatacattgaagagcagccacgactctttcagctgcttgagagaatgctgtgagatgaatctgaggaattaggcagagcctt

SEQ ID NO: 10004 - DNA, 122 bp, Homo sapiens
  misc_feature (61)..(62): /note="This region represents a CpG dinucleotide"
  misc_feature (61)..(61): /note="Nucleotide may be methylated to form 5-methylcytosine"
gcaagaaaaattaaattacttaaggacacattcttgcacattccatgtgcataataggtgcggaatgagtgaatgcccttgaattatttatattttgaaagaaagcaggcacatgcagatca

SEQ ID NO: 10005 - DNA, 122 bp, Homo sapiens
  misc_feature (61)..(62): /note="This region represents a CpG dinucleotide"
  misc_feature (61)..(61): /note="Nucleotide may be methylated to form 5-methylcytosine"
gctgaatcacaaggaggcgggggcggcggctcggtcccagggccatctcagggaccgtgtcggggggtgctgactctgcccatcaaggggagccggacatttatccgccaaagcccgtccct

SEQ ID NO: 10006 - DNA, 122 bp, Homo sapiens
  misc_feature (61)..(62): /note="This region represents a CpG dinucleotide"
  misc_feature (61)..(61): /note="Nucleotide may be methylated to form 5-methylcytosine"
ggctgctccgcgctgcggggcgctgcaccgtgcacagtcaggccgggccatacctccagacgctgtatgccgccgactccccgcctagccgccgctccggctcataaactagtagacgataa

SEQ ID NO: 10007 - DNA, 122 bp, Homo sapiens
  misc_feature (61)..(62): /note="This region represents a CpG dinucleotide"
  misc_feature (61)..(61): /note="Nucleotide may be methylated to form 5-methylcytosine"
gaaatgctgagtcacagtggattcatgttctcaccctcctagacattgccagacttcgcccgctggttttgctaacactcactcccaccagcagagtttgagagctggccttgccctgtatc

SEQ ID NO: 10008 - DNA, 122 bp, Homo sapiens
  misc_feature (61)..(62): /note="This region represents a CpG dinucleotide"
  misc_feature (61)..(61): /note="Nucleotide may be methylated to form 5-methylcytosine"
aacaagactgttttacagataatactaaagataatgttgatggaactgttcttccccactcgtgatgtttccttccaagtggcaggaactgtactattgcagcactcctgtctgctttctca

SEQ ID NO: 10009 - DNA, 122 bp, Homo sapiens
  misc_feature (61)..(62): /note="This region represents a CpG dinucleotide"
  misc_feature (61)..(61): /note="Nucleotide may be methylated to form 5-methylcytosine"
tgtttcccttttattttccttgttatttggtccttagacttttcagcgatcccttgtattcgtctttttacataagcagaaacttttttttttcctccttagagagatactgtgggaggtat

SEQ ID NO: 10010 - DNA, 122 bp, Homo sapiens
  misc_feature (61)..(62): /note="This region represents a CpG dinucleotide"
  misc_feature (61)..(61): /note="Nucleotide may be methylated to form 5-methylcytosine"
gtctctacactcagtacccctgggctgggctgggcagctgtagatcgcaacacattttcacgccttcctcttgagcctttccgtgggttgtttgcatgctcagagtgtgtgtgggctgtgga

SEQ ID NO: 10011 - DNA, 122 bp, Homo sapiens
  misc_feature (61)..(62): /note="This region represents a CpG dinucleotide"
  misc_feature (61)..(61): /note="Nucleotide may be methylated to form 5-methylcytosine"
aacaaggactattgattgaacaggcggtatttaccctcatgtactctctcagctacattgcgttatcctcagcatacacataacgaagtgggggctaagaaagttcggtgcttgtggtcatg

SEQ ID NO: 10012 - DNA, 122 bp, Homo sapiens
  misc_feature (61)..(62): /note="This region represents a CpG dinucleotide"
  misc_feature (61)..(61): /note="Nucleotide may be methylated to form 5-methylcytosine"
gcaaagttgaggaagtaaaactgggcctggaatccactcgtctgatcccctggcacatgacgcaaggcttgaccttagagggactcgtttccagacagagctctggcaaaggagtgtcttgg

SEQ ID NO: 10013 - DNA, 122 bp, Homo sapiens
  misc_feature (61)..(62): /note="This region represents a CpG dinucleotide"
  misc_feature (61)..(61): /note="Nucleotide may be methylated to form 5-methylcytosine"
gattgcccttggtaacattataaagaagatgacaggtggctctgcaaagaactgtccagacgggggagctggactgagccacagttaagagactgttgcagtagactagactaggaggagga

SEQ ID NO: 10014 - DNA, 122 bp, Homo sapiens
  misc_feature (61)..(62): /note="This region represents a CpG dinucleotide"
  misc_feature (61)..(61): /note="Nucleotide may be methylated to form 5-methylcytosine"
gatcttttactccacggggtatatcctttggtgcccctaaggtacttcttctaaaaatcacgtcaatatgcttgtcttggaggaccacagccttgtgacctgggtagcccaatctgtccagg

SEQ ID NO: 10015 - DNA, 122 bp, Homo sapiens
  misc_feature (61)..(62): /note="This region represents a CpG dinucleotide"
  misc_feature (61)..(61): /note="Nucleotide may be methylated to form 5-methylcytosine"
tggaagaggaggctgtcagtgctgattaactcattctgatcatgcacctttctagatcatcgtaggtcctgaaccaggaagtggggagaagtaagatcaaatcaggggtaggtaaactacag

SEQ ID NO: 10016 - DNA, 122 bp, Homo sapiens
  misc_feature (61)..(62): /note="This region represents a CpG dinucleotide"
  misc_feature (61)..(61): /note="Nucleotide may be methylated to form 5-methylcytosine"
aggcaaaggcaagttttcatacccaaagtcactccactgaacaatgtgctcatttaccctcgccaatttaaaattcaatgggttcttatcagttctgcctggtaaaccagaaaatgtagtta

SEQ ID NO: 10017 - DNA, 122 bp, Homo sapiens
  misc_feature (61)..(62): /note="This region represents a CpG dinucleotide"
  misc_feature (61)..(61): /note="Nucleotide may be methylated to form 5-methylcytosine"
cctgtttttcctaggtcctccatccagcttattactagtcgtctttcagaatacatctgtcgtaggtcatctcttatgagaaaccacactggaccctgcctagtttgaggagggctctgctg

SEQ ID NO: 10018 - DNA, 122 bp, Homo sapiens
  misc_feature (61)..(62): /note="This region represents a CpG dinucleotide"
  misc_feature (61)..(61): /note="Nucleotide may be methylated to form 5-methylcytosine"
cattacctgcagcaagggcctgtgtaaatgcatgtgatttacagagcattttatgtactgcgtgtcattcatgcttccggtgagccctaagtctaagatagggcagatagcatcaggtccat

SEQ ID NO: 10019 - DNA, 122 bp, Homo sapiens
  misc_feature (61)..(62): /note="This region represents a CpG dinucleotide"
  misc_feature (61)..(61): /note="Nucleotide may be methylated to form 5-methylcytosine"
cctccccttccctaatcacacctcattcccacccccagccctgaggcccagcccacagtccggcccacagcccacgctaaccctggtggtcccagttagagaagtgggaggccaggtccctt

SEQ ID NO: 10020 - DNA, 122 bp, Homo sapiens
  misc_feature (61)..(62): /note="This region represents a CpG dinucleotide"
  misc_feature (61)..(61): /note="Nucleotide may be methylated to form 5-methylcytosine"
atatccgtgtttaaaacataaaatgcaatgtttatagtgtctacatgtcccagccatgggcggatggggtggcaaatggtcctggccaagttttcagggtcttccctatcattcttctgcgg

SEQ ID NO: 10021 - DNA, 122 bp, Homo sapiens
  misc_feature (61)..(62): /note="This region represents a CpG dinucleotide"
  misc_feature (61)..(61): /note="Nucleotide may be methylated to form 5-methylcytosine"
aagatgacacgtatttctgcactcagtagcaggcacaaacgtatagtacacatcctgaggcggagatattaggaacaaagctaaaaccctggcaggaaggaagtactccctggacgattttt

SEQ ID NO: 10022 - DNA, 122 bp, Homo sapiens
  misc_feature (61)..(62): /note="This region represents a CpG dinucleotide"
  misc_feature (61)..(61): /note="Nucleotide may be methylated to form 5-methylcytosine"
attacaattaactcatctattacatctaaaatcaacatagaacctgggtgcagtggctcacgcctgtaatcccagcactttgggaagctgaggcgggtggatcgcctgaggtcaggagttca

SEQ ID NO: 10023 - DNA, 122 bp, Homo sapiens
  misc_feature (61)..(62): /note="This region represents a CpG dinucleotide"
  misc_feature (61)..(61): /note="Nucleotide may be methylated to form 5-methylcytosine"
tgcactgccccaggcggggctcagcatggggcaggctgagccggggtatatttaacatcccgttaattgggaatggcatgtatcacgcggccccaggcctaggagctgcagaaccaggttgc

SEQ ID NO: 10024 - DNA, 122 bp, Homo sapiens
  misc_feature (61)..(62): /note="This region represents a CpG dinucleotide"
  misc_feature (61)..(61): /note="Nucleotide may be methylated to form 5-methylcytosine"
ttttacaagggaactaggttccttttgaactttgctatcacagtattggataattgactgcgcaagtctctcctcaaattcccaactcatgcatgactttttattacgttgtagcaataaaa

SEQ ID NO: 10025 - DNA, 122 bp, Homo sapiens
  misc_feature (61)..(62): /note="This region represents a CpG dinucleotide"
  misc_feature (61)..(61): /note="Nucleotide may be methylated to form 5-methylcytosine"
taacacaactgcacttgtacccctaagtccccccaaataaaacaatttttgtggcgggtccggaaccctttctagaccaacagacctcctcccgggctcggcggcggtctgctcgcacttac

SEQ ID NO: 10026 - DNA, 122 bp, Homo sapiens
  misc_feature (61)..(62): /note="This region represents a CpG dinucleotide"
  misc_feature (61)..(61): /note="Nucleotide may be methylated to form 5-methylcytosine"
tttttataagagaaattgcttttattccaggtactattgttgcataaccaccaccctgaacgtagtggtgtaaacaacagccgcttgactgtgctcagggattctttggaccttggacgggg

SEQ ID NO: 10027 - DNA, 122 bp, Homo sapiens
  misc_feature (61)..(62): /note="This region represents a CpG dinucleotide"
  misc_feature (61)..(61): /note="Nucleotide may be methylated to form 5-methylcytosine"
attattctaagatataaacacttaattttattcatgctcttgaattactttcctttctaccgcatgtttgtgtagctgttatatgagtcctttctactgatgtagctgtcattccttcaact

SEQ ID NO: 10028 - DNA, 122 bp, Homo sapiens
  misc_feature (61)..(62): /note="This region represents a CpG dinucleotide"
  misc_feature (61)..(61): /note="Nucleotide may be methylated to form 5-methylcytosine"
ttccttcctttgttacagcaaacatcctgtaaacaattaatgttccactcttttaactgacggcttttgtttactgacaggaaaggaaaccacaaattcttcaagtagcaatagggactgca

SEQ ID NO: 10029 - DNA, 122 bp, Homo sapiens
  misc_feature (61)..(62): /note="This region represents a CpG dinucleotide"
  misc_feature (61)..(61): /note="Nucleotide may be methylated to form 5-methylcytosine"
ttctcggtcttagttctactccatataaaacagtagtgcctacctcatgagatttcaatgcgcttgtgtgtgtaaagtttactgcctgcctggaacatagtaaatgctatataaatatttga

SEQ ID NO: 10030 - DNA, 122 bp, Homo sapiens
  misc_feature (61)..(62): /note="This region represents a CpG dinucleotide"
  misc_feature (61)..(61): /note="Nucleotide may be methylated to form 5-methylcytosine"
tctatctttggtcaacatctatctgactaaaagctagttctgaagtatgtaaacatcagccgtctctgcttctgaactgggcagctgaagcctgctggaaaaaaaaatgtagatagattgtt

SEQ ID NO: 10031 - DNA, 122 bp, Homo sapiens
  misc_feature (61)..(62): /note="This region represents a CpG dinucleotide"
  misc_feature (61)..(61): /note="Nucleotide may be methylated to form 5-methylcytosine"
tggtaggccttgggctatgtacctgggatacgatcaatcatgacctaaagtcatggtccccgtcctcttgggactcacagtctagcaggagggacagacaggaatcagatcacaggcagcta

SEQ ID NO: 10032 - DNA, 122 bp, Homo sapiens
  misc_feature (61)..(62): /note="This region represents a CpG dinucleotide"
  misc_feature (61)..(61): /note="Nucleotide may be methylated to form 5-methylcytosine"
gagctgggcatggggactgaccagtcccctattatgggctggggacctgtttgcagccttcgtatcttgccaatctacatgtgcaggcaagaggtggttttggagttgcgcgacctccagcg

SEQ ID NO: 10033 - DNA, 122 bp, Homo sapiens
  misc_feature (61)..(62): /note="This region represents a CpG dinucleotide"
  misc_feature (61)..(61): /note="Nucleotide may be methylated to form 5-methylcytosine"
ctgcagcttcactcctgagccagcgagaccacgaacccaccagaaggaagaaactccgaacgcatctgaacctcagaaggaaccagttcccgacacgccacctttcagaactgtaacactca

SEQ ID NO: 10034 - DNA, 122 bp, Homo sapiens
  misc_feature (61)..(62): /note="This region represents a CpG dinucleotide"
  misc_feature (61)..(61): /note="Nucleotide may be methylated to form 5-methylcytosine"
cttccagctgaaggacatgtgtaacagcaggagatacctttctctggggtcccaggctcccgtcctggaccttggcaccccgccccccgtgcattgtcgtcttctgagtctggctttgtctg

SEQ ID NO: 10035 - DNA, 122 bp, Homo sapiens
  misc_feature (61)..(62): /note="This region represents a CpG dinucleotide"
  misc_feature (61)..(61): /note="Nucleotide may be methylated to form 5-methylcytosine"
ttgtattttaattatatatacacatttaaaatgcagtagtcacttttgtcactgtttaaacgtttggtgtttgtgtcaccgtgccccatgcttgccctccagtgctctccattggttctcca

SEQ ID NO: 10036 - DNA, 122 bp, Homo sapiens
  misc_feature (61)..(62): /note="This region represents a CpG dinucleotide"
  misc_feature (61)..(61): /note="Nucleotide may be methylated to form 5-methylcytosine"
cacaggtggatgttcccgctgtgaccacctcaccttctgaagtcggggtgtggagactatcggggagctcccagagcgcccacctcctcctgcgtacggcgtctgtgccagcaggaaagccg

SEQ ID NO: 10037 - DNA, 122 bp, Homo sapiens
  misc_feature (61)..(62): /note="This region represents a CpG dinucleotide"
  misc_feature (61)..(61): /note="Nucleotide may be methylated to form 5-methylcytosine"
attccagagctaacagacacaacatcagaggaataaacagaagaagacatgagggagatgcgttcttccccaaccagtgccagacaataggaagaagacatagaagaagcagagccaagaaa

SEQ ID NO: 10038 - DNA, 122 bp, Homo sapiens
  misc_feature (61)..(62): /note="This region represents a CpG dinucleotide"
  misc_feature (61)..(61): /note="Nucleotide may be methylated to form 5-methylcytosine"
gtggcactccctctggcctctggaatggtaaatctgcaccattgctagcttggctgtttgcgtttgggggctgactagaatccactgtcatacactacttgttcagttcaatatttcttgtg

SEQ ID NO: 10039 - DNA, 122 bp, Homo sapiens
  misc_feature (61)..(62): /note="This region represents a CpG dinucleotide"
  misc_feature (61)..(61): /note="Nucleotide may be methylated to form 5-methylcytosine"
gcaaggatggactgtgggccaagacagacttcagggaataagccagctatcacatgtagccgaggattgaaaatctgcacatttcttgtttaattatatttagagacagatggaaattatgc

SEQ ID NO: 10040 - DNA, 122 bp, Homo sapiens
  misc_feature (61)..(62): /note="This region represents a CpG dinucleotide"
  misc_feature (61)..(61): /note="Nucleotide may be methylated to form 5-methylcytosine"
atcatttggaatggatttgaggtaatccataccaaatgtcctctgactctcatttccctacgtttttatgagtggggaaagaaggggtctgcccgtgcaagacagctgctcatgtgaatgtc

SEQ ID NO: 10041 - DNA, 122 bp, Homo sapiens
  misc_feature (61)..(62): /note="This region represents a CpG dinucleotide"
  misc_feature (61)..(61): /note="Nucleotide may be methylated to form 5-methylcytosine"
caaagaggaaatagcttcagtggctggggtaagatccagacggattccttccctgggtctcgtctcacctgccatatcacaaggccccaggcagacctgtggccaccctccctggcactcag

SEQ ID NO: 10042 - DNA, 122 bp, Homo sapiens
  misc_feature (61)..(62): /note="This region represents a CpG dinucleotide"
  misc_feature (61)..(61): /note="Nucleotide may be methylated to form 5-methylcytosine"
gataaaggtgggactgttagctttacaagaagaggaagagaaacctgagcttagtgccctcgacatgtgatgccctacacagccttgggactctgcagtctccaccagcaagaagggcctca

SEQ ID NO: 10043 - DNA, 122 bp, Homo sapiens
  misc_feature (61)..(62): /note="This region represents a CpG dinucleotide"
  misc_feature (61)..(61): /note="Nucleotide may be methylated to form 5-methylcytosine"
aaaaaattaatgagtatgtagaatgtgcgaggtgatggacacacaggcagctccttgccccgtaaagcttccattcttttgcttctgttgtgtgttttttcttttgttttttttttgttttg

SEQ ID NO: 10044 - DNA, 122 bp, Homo sapiens
  misc_feature (61)..(62): /note="This region represents a CpG dinucleotide"
  misc_feature (61)..(61): /note="Nucleotide may be methylated to form 5-methylcytosine"
tgtctttttcttctaccaagattcctcacccctaggagacgttggttaatataggcatttcggtttggttaatctgatcatgagtgcccgtgagcatggcatgaggcatgattgaagcagtt

SEQ ID NO: 10045 - DNA, 122 bp, Homo sapiens
  misc_feature (61)..(62): /note="This region represents a CpG dinucleotide"
  misc_feature (61)..(61): /note="Nucleotide may be methylated to form 5-methylcytosine"
gagggggagagcctaaacagatgtgtttttgtatcatgcagtcgacttctgcatctgaaacgtaactcagcgaaacagaaacccagccatgtgactccttttctgtagagaatagagttgaa

SEQ ID NO: 10046 - DNA, 122 bp, Homo sapiens
  misc_feature (61)..(62): /note="This region represents a CpG dinucleotide"
  misc_feature (61)..(61): /note="Nucleotide may be methylated to form 5-methylcytosine"
aacctctctaatttccttgatgctaagacccttaacatccaaacttctaatcctggtgttcgaggctccccacagttgatcgataacaccacatttggtggtcccctcccctctgcctcttc

SEQ ID NO: 10047 - DNA, 122 bp, Homo sapiens
  misc_feature (61)..(62): /note="This region represents a CpG dinucleotide"
  misc_feature (61)..(61): /note="Nucleotide may be methylated to form 5-methylcytosine"
cagcatgcacttcccataattctttccttcacttcggagtcttaataccaaaggaagacacgccattttgagcagcctattaatttgaaagtgtcaagtgtaactagggaataaatgagact

SEQ ID NO: 10048 - DNA, 122 bp, Homo sapiens
  misc_feature (61)..(62): /note="This region represents a CpG dinucleotide"
  misc_feature (61)..(61): /note="Nucleotide may be methylated to form 5-methylcytosine"
aggctgcttaaggttgagggcaaacctcaaagactcggtaaacaatgtaggctttctcttcggcaattaaaaacttcctggtattgtccgggcacagtggctcacgcctgtaatcccagcac

SEQ ID NO: 10049 - DNA, 122 bp, Homo sapiens
  misc_feature (61)..(62): /note="This region represents a CpG dinucleotide"
  misc_feature (61)..(61): /note="Nucleotide may be methylated to form 5-methylcytosine"
tttggtaaaagtatccagcaccagccccactgggacccgcctgtggttcatgccacagggcgtctgtgtcctcagcacccaggacagtgcctgcctcgtaggtccttcctggttgagaggag

SEQ ID NO: 10050 - DNA, 122 bp, Homo sapiens
  misc_feature (61)..(62): /note="This region represents a CpG dinucleotide"
  misc_feature (61)..(61): /note="Nucleotide may be methylated to form 5-methylcytosine"
gcgcagagaggcctgacagcctctgcatcagtgaccgggcgaagagtggggcagctcggacggtggttggggaacgttagggagattggcgcgcggaccactgggtgagcgcccaggaacgc

SEQ ID NO: 10051 - DNA, 122 bp, Homo sapiens
  misc_feature (61)..(62): /note="This region represents a CpG dinucleotide"
  misc_feature (61)..(61): /note="Nucleotide may be methylated to form 5-methylcytosine"
actttcactggattgagggaatgtctaatattttgccagaaaagcatatacctagttcttcggacaccatcttgaattggagacaaggggggctaccagaaaaatgactgaaacataagagt

SEQ ID NO: 10052 - DNA, 122 bp, Homo sapiens
  misc_feature (61)..(62): /note="This region represents a CpG dinucleotide"
  misc_feature (61)..(61): /note="Nucleotide may be methylated to form 5-methylcytosine"
ttgtcctgtacagcctgtctgtagatgcttcacatgactaagcaacagtctgtgtttgctcgtgcagctgtggacagcttagtgaccaacttacatttgttttttcctccttatgtaccata

SEQ ID NO: 10053 - DNA, 122 bp, Homo sapiens
  misc_feature (61)..(62): /note="This region represents a CpG dinucleotide"
  misc_feature (61)..(61): /note="Nucleotide may be methylated to form 5-methylcytosine"
cttctctcaaggatcatagtcaggggcaatctattgttcaataactaaaaaagtgcctcacgcatgttgtaacagttttatatttgtttatggcaggaaggctagtccagtaatagttgctt

SEQ ID NO: 10054 - DNA, 122 bp, Homo sapiens
  misc_feature (61)..(62): /note="This region represents a CpG dinucleotide"
  misc_feature (61)..(61): /note="Nucleotide may be methylated to form 5-methylcytosine"
agaaaacttaaacacagagcagttaagtaacttgcttaataaagaggaaaggtgacaagacgactgctactgaaatataataaaggggaaatgtgacaagacgattggtactgaaagtgtct

SEQ ID NO: 10055 - DNA, 122 bp, Homo sapiens
  misc_feature (61)..(62): /note="This region represents a CpG dinucleotide"
  misc_feature (61)..(61): /note="Nucleotide may be methylated to form 5-methylcytosine"
atagtcatttagacatgctgattgactacagatcctccctgcttctgttttttttttccacgcaagagaagacaggctgttttcgcaataacttttctcacttctgcccacactggtgactc

SEQ ID NO: 10056 - DNA, 122 bp, Homo sapiens
  misc_feature (61)..(62): /note="This region represents a CpG dinucleotide"
  misc_feature (61)..(61): /note="Nucleotide may be methylated to form 5-methylcytosine"
aagtaatatctatgggaccacacacaagggaagtgaaacagacactaggcttgccctctacgaatcaatgagtatactcctgtccagggcactatgatgcaaatggttttattggcatcacc

SEQ ID NO: 10057 - DNA, 122 bp, Homo sapiens
  misc_feature (61)..(62): /note="This region represents a CpG dinucleotide"
  misc_feature (61)..(61): /note="Nucleotide may be methylated to form 5-methylcytosine"
ccatatggattaaatgtccctgacgttacgtatggttttaaaaattagaaggaaatgtaccgggaatatacacatgtataaaatatgtaaagccaggccacatttttagctttgtggacatg

SEQ ID NO: 10058 - DNA, 122 bp, Homo sapiens
  misc_feature (61)..(62): /note="This region represents a CpG dinucleotide"
  misc_feature (61)..(61): /note="Nucleotide may be methylated to form 5-methylcytosine"
tgaatcttaagcacattatgctaagtaaaatgaggcagtcacaaaaggacaaatactatacggtctcactcagacgaggcacttatggtagtcaaattcagagacagaaagtagaatgggat

SEQ ID NO: 10059 - DNA, 122 bp, Homo sapiens
  misc_feature (61)..(62): /note="This region represents a CpG dinucleotide"
  misc_feature (61)..(61): /note="Nucleotide may be methylated to form 5-methylcytosine"
tgggggtggggtggggcctcccagcctgctaggagctgtcaactgagcagggcctgggagcgggagacaaattctaactcgtggttttaatcagcctgagcttgtccagccttacaaataag

SEQ ID NO: 10060 - DNA, 122 bp, Homo sapiens
  misc_feature (61)..(62): /note="This region represents a CpG dinucleotide"
  misc_feature (61)..(61): /note="Nucleotide may be methylated to form 5-methylcytosine"
ggcgtgaaccacctcaccaggcctggtgtatagattctaaagtcagtttagccacagccacgtggaaccaaccttcagctgcctccccatccagtcaaatgatgcaatcccaacagaacact

SEQ ID NO: 10061 - DNA, 122 bp, Homo sapiens
  misc_feature (61)..(62): /note="This region represents a CpG dinucleotide"
  misc_feature (61)..(61): /note="Nucleotide may be methylated to form 5-methylcytosine"
cagtaaaaataagtgaatggtcctgaatagaagcctactgagaagtgagttcaacattaacgtgtgtgtatgcggatgagtcatctggaaatttaaacttgccattcaaagaaggcctccta

SEQ ID NO: 10062 - DNA, 122 bp, Homo sapiens
  misc_feature (61)..(62): /note="This region represents a CpG dinucleotide"
  misc_feature (61)..(61): /note="Nucleotide may be methylated to form 5-methylcytosine"
atttgacttcaagcaggcatatagtggaaagtcaatagtatgtttttagggaggaagtgacgaataagagtctatttttaatcttgctagtgatagattcctggctaagttgaacagggtgt

SEQ ID NO: 10063 - DNA, 122 bp, Homo sapiens
  misc_feature (61)..(62): /note="This region represents a CpG dinucleotide"
  misc_feature (61)..(61): /note="Nucleotide may be methylated to form 5-methylcytosine"
acctttgaccttctgctgatcttccagctgagcttcagactcatatgcactcctaggctacgtgctctcttggtgcccaacaggtctcaaacttgacatgtctaaaacagaagacttgcctg

SEQ ID NO: 10064 - DNA, 122 bp, Homo sapiens
  misc_feature (61)..(62): /note="This region represents a CpG dinucleotide"
  misc_feature (61)..(61): /note="Nucleotide may be methylated to form 5-methylcytosine"
cagtgataatctcaatagaagaatctaagagctagaagactcagttggaaacagcagaatcgggccaaataggaacagctccagtctactgctcccggcgtgagcgacacagaagacgaatg

SEQ ID NO: 10065 - DNA, 122 bp, Homo sapiens
  misc_feature (61)..(62): /note="This region represents a CpG dinucleotide"
  misc_feature (61)..(61): /note="Nucleotide may be methylated to form 5-methylcytosine"
tgattcctcatggttatataggtcctccaacctatctgctgataagtacactgtacacttcgtgggcctagctgtaggtctaagaggagttgattttgcacatactatacttattgcattta

SEQ ID NO: 10066 - DNA, 122 bp, Homo sapiens
  misc_feature (61)..(62): /note="This region represents a CpG dinucleotide"
  misc_feature (61)..(61): /note="Nucleotide may be methylated to form 5-methylcytosine"
aactgtgattctcaacatttgactcttctggctgatatggcatatttgtttagcttctctcgaacagagctaccaacagatcagtcactcatggtgactcggggagcatcagttgtccacca

SEQ ID NO: 10067 - DNA, 122 bp, Homo sapiens
  misc_feature (61)..(62): /note="This region represents a CpG dinucleotide"
  misc_feature (61)..(61): /note="Nucleotide may be methylated to form 5-methylcytosine"
ctgggatcaaaagaggtcacaggatattcagtggacacattctgaaaaacacttgtcagacgaggtaattatatttcagataataacgtgagcagggaaatgccaatgcctgaaattcccta

SEQ ID NO: 10068 - DNA, 122 bp, Homo sapiens
  misc_feature (61)..(62): /note="This region represents a CpG dinucleotide"
  misc_feature (61)..(61): /note="Nucleotide may be methylated to form 5-methylcytosine"
ctgttaatgccataaaaacctgctgactccagtcagtcactggctgcctaggggaaataacgggcaccagaacagctgagcatttgaacaagaggcagcaaaatgtcttttatgaggatatt

SEQ ID NO: 10069 - DNA, 122 bp, Homo sapiens
  misc_feature (61)..(62): /note="This region represents a CpG dinucleotide"
  misc_feature (61)..(61): /note="Nucleotide may be methylated to form 5-methylcytosine"
aggaaacaaagacttcttgttatccttgctgcaggacttatcagagtcttgaatcagagccgtcatcaggattgagctgatcacgataagggagctagcgactcgtgtttccccacacttat

SEQ ID NO: 10070 - DNA, 122 bp, Homo sapiens
  misc_feature (61)..(62): /note="This region represents a CpG dinucleotide"
  misc_feature (61)..(61): /note="Nucleotide may be methylated to form 5-methylcytosine"
gaatcctgtctcaggattgtggtgatgaccgaccgagccattacatgtaagtacttagaacgctgctaataggagtaggaatcctgtctcaggattgtgatgaccaaccgagccattacgtg

SEQ ID NO: 10071 - DNA, 122 bp, Homo sapiens
  misc_feature (61)..(62): /note="This region represents a CpG dinucleotide"
  misc_feature (61)..(61): /note="Nucleotide may be methylated to form 5-methylcytosine"
accagttgcagactcattaccctgcattccagtttgtgctgatgaaaatcagtttcagtccgtggcctggaattcatgtacagcacttcctgtagcctcttatataaacacatcaaaaaaat

SEQ ID NO: 10072 - DNA, 122 bp, Homo sapiens
  misc_feature (61)..(62): /note="This region represents a CpG dinucleotide"
  misc_feature (61)..(61): /note="Nucleotide may be methylated to form 5-methylcytosine"
ggtgaccttggtgagccactaaacccaacctgagtcaccctcttcctgcctttctgttaccgagacaatgggtgtccaggctgttgaagcccttttgagtttagttctgcttcttgcaccca

SEQ ID NO: 10073 - DNA, 122 bp, Homo sapiens
  misc_feature (61)..(62): /note="This region represents a CpG dinucleotide"
  misc_feature (61)..(61): /note="Nucleotide may be methylated to form 5-methylcytosine"
cagcttggccaacatggcaaaaccctgtctttactaaaactacaaaaattagccagtcgtcgtggtgcatgtctgtagtcccagctacttgggaggctgaggcacaagaatctcttgaaccc

SEQ ID NO: 10074 - DNA, 122 bp, Homo sapiens
  misc_feature (61)..(62): /note="This region represents a CpG dinucleotide"
  misc_feature (61)..(61): /note="Nucleotide may be methylated to form 5-methylcytosine"
cagtgatgtttgcacaaggccacaaacgcttctggcagttcagtgaaatgaaccaaggggcggatccctgggagaacagcaaatataaaggctgagagaaagcaggcccttttgagttaaat

SEQ ID NO: 10075 - DNA, 122 bp, Homo sapiens
  misc_feature (61)..(62): /note="This region represents a CpG dinucleotide"
  misc_feature (61)..(61): /note="Nucleotide may be methylated to form 5-methylcytosine"
gcactatttttaaaggaggtcattagtgagtcatgtttaagctcaatgcttagccatcatcgccatttgggtgcttgttgggaaggtcctaaattgagcggcctttgggcacagatctctgt

SEQ ID NO: 10076 - DNA, 122 bp, Homo sapiens
  misc_feature (61)..(62): /note="This region represents a CpG dinucleotide"
  misc_feature (61)..(61): /note="Nucleotide may be methylated to form 5-methylcytosine"
ttggcttctaagatgcagccctgaccggctgactcaaaggaagttggctggcaggttctgcgatccctggagatgggcagggctggggtcagactccggtgacagcagcagtggacacaatc

SEQ ID NO: 10077 - DNA, 122 bp, Homo sapiens
  misc_feature (61)..(62): /note="This region represents a CpG dinucleotide"
  misc_feature (61)..(61): /note="Nucleotide may be methylated to form 5-methylcytosine"
tcaagttgcattagtctctaaagtgggaaataaaaaaagtagattgtttttctatatatgcgtcttcttaaatatctggggtttatgacacattctttgagtatcaaatgtgttatgtcact

SEQ ID NO: 10078 - DNA, 122 bp, Homo sapiens
  misc_feature (61)..(62): /note="This region represents a CpG dinucleotide"
  misc_feature (61)..(61): /note="Nucleotide may be methylated to form 5-methylcytosine"
tttgacccaggaattgcaacaacaccaaacgccgcttttaactggaatacctttcttcaacgctctggtgagacatgagatcttcttagaggattttgatgaagtgcatcttgtcagttact

SEQ ID NO: 10079 - DNA, 122 bp, Homo sapiens
  misc_feature (61)..(62): /note="This region represents a CpG dinucleotide"
  misc_feature (61)..(61): /note="Nucleotide may be methylated to form 5-methylcytosine"
tcaatagtaggaagtgagtagataccatctaaaacaagcaaatcaagcaacagcaatattcgcatgctgtttagaaatagaaggttaacacaaaaataaatagctaaagttgctgaaaatag

SEQ ID NO: 10080 - DNA, 122 bp, Homo sapiens
  misc_feature (61)..(62): /note="This region represents a CpG dinucleotide"
  misc_feature (61)..(61): /note="Nucleotide may be methylated to form 5-methylcytosine"
gtaagaaaaagataacccggtagaaaaatgggccgaagatacttcgcaaaagaggaaacacgcaggtccaatttacaatgaaagtgctatgagttactagaggcttacgttaaagaaaagat

SEQ ID NO: 10081 - DNA, 122 bp, Homo sapiens
  misc_feature (61)..(62): /note="This region represents a CpG dinucleotide"
  misc_feature (61)..(61): /note="Nucleotide may be methylated to form 5-methylcytosine"
acaccaaggattgttgggagctgtcacatgcagttagctgagaaatacaactcatcctgacgagtcaggtaatgacatgaagcacaggcagccactcactctgaccagacacctgaagccat

SEQ ID NO: 10082 - DNA, 122 bp, Homo sapiens
  misc_feature (61)..(62): /note="This region represents a CpG dinucleotide"
  misc_feature (61)..(61): /note="Nucleotide may be methylated to form 5-methylcytosine"
aatatgcaaagtgaaataggatcatactgtgtaaataggggagtcaccacttacaaatggcggttaagtcccaaagctggtgaagaggcacaaatcatgtatagtccacatcattccctaaa

SEQ ID NO: 10083 - DNA, 122 bp, Homo sapiens
  misc_feature (61)..(62): /note="This region represents a CpG dinucleotide"
  misc_feature (61)..(61): /note="Nucleotide may be methylated to form 5-methylcytosine"
tagttataatggtataataacaatagctaatatttattaggcactctgtgtcatgaagtacgcaaagtgtttacatgaattaagccatttaaactcttaatgactcagtgaggcaggttctg

SEQ ID NO: 10084 - DNA, 122 bp, Homo sapiens
  misc_feature (61)..(62): /note="This region represents a CpG dinucleotide"
  misc_feature (61)..(61): /note="Nucleotide may be methylated to form 5-methylcytosine"
cctggcctgcctgctgtttcaggctctggtgggtgccctctcaatcagcatctagattctcgttgacaattagaggactgtgtcaggcagtgtctcggcattatctgtaggctcaatctttt

SEQ ID NO: 10085 - DNA, 122 bp, Homo sapiens
  misc_feature (61)..(62): /note="This region represents a CpG dinucleotide"
  misc_feature (61)..(61): /note="Nucleotide may be methylated to form 5-methylcytosine"
gtctgattcaggttgaatacgaaggcttaaagcatgagattaagcgatttgaggaggagacggtactgctgaacagccagctggaagatgccatccgattgaaagagattgctgagcaccaa

SEQ ID NO: 10086 - DNA, 122 bp, Homo sapiens
  misc_feature (61)..(62): /note="This region represents a CpG dinucleotide"
  misc_feature (61)..(61): /note="Nucleotide may be methylated to form 5-methylcytosine"
ggccccagccacctccggcgccatggaaggaggccgagggggtctggctgaagctgtgtccggagttcatggtcccatctgtgtttgggacggggctgagctctgctccactccctggcacc

SEQ ID NO: 10087 - DNA, 122 bp, Homo sapiens
  misc_feature (61)..(62): /note="This region represents a CpG dinucleotide"
  misc_feature (61)..(61): /note="Nucleotide may be methylated to form 5-methylcytosine"
ccaagggaagctcaggacatgaggcacaggcagcagagaagggcttggaagtttcacaaacgtgtgtggatttttaaaatcttagcctctgacattcagagcttgtctttctattttttaaa

SEQ ID NO: 10088 - DNA, 122 bp, Homo sapiens
  misc_feature (61)..(62): /note="This region represents a CpG dinucleotide"
  misc_feature (61)..(61): /note="Nucleotide may be methylated to form 5-methylcytosine"
aactgatcctaaaaggtcacattcttcctctggttcttatgaacaagttacacatatatccgttgatttccagcttgatgcatgactaagtgccactttctaggaacctactaagtgagtta

SEQ ID NO: 10089 - DNA, 122 bp, Homo sapiens
  misc_feature (61)..(62): /note="This region represents a CpG dinucleotide"
  misc_feature (61)..(61): /note="Nucleotide may be methylated to form 5-methylcytosine"
gggacagtggtcacatgtacaagctggctctggcttcagtcccagctgtaccaatgccagcgcctggcccccagggtgagtgatttaacctctaagcctcagccaacttgtctgaaaaatgg

SEQ ID NO: 10090 - DNA, 122 bp, Homo sapiens
  misc_feature (61)..(62): /note="This region represents a CpG dinucleotide"
  misc_feature (61)..(61): /note="Nucleotide may be methylated to form 5-methylcytosine"
tacagggtttcatgagatctacacctgggctgggcacgcctgttggttttttactgacaacgcataatttttcgaggagtggtaatcagaggcaaccgttctagtgacagtgattcaggcgt

SEQ ID NO: 10091 - DNA, 122 bp, Homo sapiens
  misc_feature (61)..(62): /note="This region represents a CpG dinucleotide"
  misc_feature (61)..(61): /note="Nucleotide may be methylated to form 5-methylcytosine"
gcttagcgagcatgcatgtgtgtacgtgcacgtgtgtacatgtctgcatgtgtgggaatccgggggctggcaggtggagcatcacggagcaggctgaggggagccggagttgggctgggagc

SEQ ID NO: 10092 - DNA, 122 bp, Homo sapiens
  misc_feature (61)..(62): /note="This region represents a CpG dinucleotide"
  misc_feature (61)..(61): /note="Nucleotide may be methylated to form 5-methylcytosine"
gaatctgcacatatttgcctactttgactggacgctggtagatttcctgcaactgatacgcgtgtgtgtgtgtgtgtgtgtgtgtgtgtgtgtgtaaaagacagagagagacagagagagag

SEQ ID NO: 10093 - DNA, 122 bp, Homo sapiens
  misc_feature (61)..(62): /note="This region represents a CpG dinucleotide"
  misc_feature (61)..(61): /note="Nucleotide may be methylated to form 5-methylcytosine"
gaagtgcgccccgttccgatcagtggggtccagggggtcgggccccgtggggagtcccaccgactccccttccgagaggccgttgtaaagctttagcatcctgtgcgccttccgccgacact

SEQ ID NO: 10094 - DNA, 122 bp, Homo sapiens
  misc_feature (61)..(62): /note="This region represents a CpG dinucleotide"
  misc_feature (61)..(61): /note="Nucleotide may be methylated to form 5-methylcytosine"
atacatctaggacacaaactgaaacctgctcatctgactcatcacagagcctgatgagtacgtaagaggtacataagtctttgttaaattaatttgatgagccataacaaaatcaataaagt

SEQ ID NO: 10095 - DNA, 122 bp, Homo sapiens
  misc_feature (61)..(62): /note="This region represents a CpG dinucleotide"
  misc_feature (61)..(61): /note="Nucleotide may be methylated to form 5-methylcytosine"
ctgcctgaaaaccccattcttaatgagttttgaagtttcatttgaaaagtcataatgctacgtgttcaaatactactagtataccaacattccgacatacaatgcccctgagagtcagcttt

SEQ ID NO: 10096 - DNA, 122 bp, Homo sapiens
  misc_feature (61)..(62): /note="This region represents a CpG dinucleotide"
  misc_feature (61)..(61): /note="Nucleotide may be methylated to form 5-methylcytosine"
acaaaagtcccaaaatttcacataggctatagagtcttggcctctacagtcactggttaccgacttcctctaaggaattaagtgcatgtcctatgggcagccctgtggttttaattatcttg

SEQ ID NO: 10097 - DNA, 122 bp, Homo sapiens
  misc_feature (61)..(62): /note="This region represents a CpG dinucleotide"
  misc_feature (61)..(61): /note="Nucleotide may be methylated to form 5-methylcytosine"
aaactaatatttttaagtcatgtaatcatttatttcactagtcatttgacataagcaggccgaatcagaggagtgttctcttaattgttcggtgttcggactttcaaagtaaacacatgcat

SEQ ID NO: 10098 - DNA, 122 bp, Homo sapiens
  misc_feature (61)..(62): /note="This region represents a CpG dinucleotide"
  misc_feature (61)..(61): /note="Nucleotide may be methylated to form 5-methylcytosine"
tccccagtttcccgcgggcctggaggtgacagatgaggtactggagaaggcagctgggaccgatgtcaacaacatgtgagtcactctgcatggctacatagccagttcccctcggcttcccc

SEQ ID NO: 10099 - DNA, 122 bp, Homo sapiens
  misc_feature (61)..(62): /note="This region represents a CpG dinucleotide"
  misc_feature (61)..(61): /note="Nucleotide may be methylated to form 5-methylcytosine"
cttcctttgaagcccatagcgcctcgtggggccgctagaagtttgtgttgcaggaggaaccgatgcaccttcctttccttttggctttgtagtgctttcctcgttcattcatgagccccaag

SEQ ID NO: 10100 - DNA, 122 bp, Homo sapiens
  misc_feature (61)..(62): /note="This region represents a CpG dinucleotide"
  misc_feature (61)..(61): /note="Nucleotide may be methylated to form 5-methylcytosine"
acgtcatggggctctgacccaggccacagcatgggtgagccctaaggacgtcacgctcagcgcgagaagccggacacaaaaggccaaacagggtgtgatcccatttctatgaaatgtccagg

SEQ ID NO: 10101 - DNA, 122 bp, Homo sapiens
  misc_feature (61)..(62): /note="This region represents a CpG dinucleotide"
  misc_feature (61)..(61): /note="Nucleotide may be methylated to form 5-methylcytosine"
agctgtgaataattagatcccttactttaaattaataaaagaagtcgggataacactgaccgtgcaaattacaaacgtgaggagggtttactataaaagtagagaaaagaagatactgtttt

SEQ ID NO: 10102 - DNA, 122 bp, Homo sapiens
  misc_feature (61)..(62): /note="This region represents a CpG dinucleotide"
  misc_feature (61)..(61): /note="Nucleotide may be methylated to form 5-methylcytosine"
tctcacaagcctagagctctgcctcaaagaaactagagagttggaagatactttagaatgcgtctagtctagctgcctcattttataagtgggaaaattgagacccagagaagctaagagat

SEQ ID NO: 10103 - DNA, 122 bp, Homo sapiens
  misc_feature (61)..(62): /note="This region represents a CpG dinucleotide"
  misc_feature (61)..(61): /note="Nucleotide may be methylated to form 5-methylcytosine"
tgcggtgaaaaaacttgctctagatcagtggctctcaaactttagtacagtcatgcatggcgtaataggattatgttctgaagaatgtgttgttaggcaatttcattgtcatgtgaacatca

SEQ ID NO: 10104 - DNA, 122 bp, Homo sapiens
  misc_feature (61)..(62): /note="This region represents a CpG dinucleotide"
  misc_feature (61)..(61): /note="Nucleotide may be methylated to form 5-methylcytosine"
ttatcaaagttgtcttgctggcagaagtttttctccagattcagtgtgataactacactccgttgatttaattattatcattttggtatgaatctcctgtcatgtttatgctgtgaattttc

SEQ ID NO: 10105 - DNA, 122 bp, Homo sapiens
  misc_feature (61)..(62): /note="This region represents a CpG dinucleotide"
  misc_feature (61)..(61): /note="Nucleotide may be methylated to form 5-methylcytosine"
cctgagagtgttggataaattaggctttcctgtagatacagctgagccatgtgattatgccggaggcaactgtactaaattattcaaattaatcattttttgttcatttgctaagtagttat

SEQ ID NO: 10106 - DNA, 122 bp, Homo sapiens
  misc_feature (61)..(62): /note="This region represents a CpG dinucleotide"
  misc_feature (61)..(61): /note="Nucleotide may be methylated to form 5-methylcytosine"
ccccgatcctgggtttcctggcctcctgggctgtggacacaggtgtttcaggaaatgaaccgtgtccttatttgaactgtgaccatttgttccaccctcctggggtgctgggcactgcctgg

SEQ ID NO: 10107 - DNA, 122 bp, Homo sapiens
  misc_feature (61)..(62): /note="This region represents a CpG dinucleotide"
  misc_feature (61)..(61): /note="Nucleotide may be methylated to form 5-methylcytosine"
ttttttcttaaaattgctttggctattctggctctttgggttccacatgaattttagaatcgcttttttctaatcttgtgaaaaatgatatttctacgttgatagggattatgttcagtatg

SEQ ID NO: 10108 - DNA, 122 bp, Homo sapiens
  misc_feature (61)..(62): /note="This region represents a CpG dinucleotide"
  misc_feature (61)..(61): /note="Nucleotide may be methylated to form 5-methylcytosine"
atttaaaaacctcaaaagaaataaaaatacgttgaacagaatgaaaatgaaaatacaacacgtcaaattggtggaacatagccaaaacagtgctgagagggaaacttacagcttattttaag

SEQ ID NO: 10109 - DNA, 122 bp, Homo sapiens
  misc_feature (61)..(62): /note="This region represents a CpG dinucleotide"
  misc_feature (61)..(61): /note="Nucleotide may be methylated to form 5-methylcytosine"
atattcatttatgatccatattttttccttggaaataattattttcattttgctggaccacgttttagagagcctcacttctgttgatttgattctgagcaatgtttctgagctggactgac

SEQ ID NO: 10110 - DNA, 122 bp, Homo sapiens
  misc_feature (61)..(62): /note="This region represents a CpG dinucleotide"
  misc_feature (61)..(61): /note="Nucleotide may be methylated to form 5-methylcytosine"
agcctcctgagactgtagtctgagtgtttttaccaggccatatgtgtctcatgacccgaccgcaaaaggccatctggtggacattttggtttaacaaaccctttcgagaaacacttggcgga

SEQ ID NO: 10111 - DNA, 122 bp, Homo sapiens
  misc_feature (61)..(62): /note="This region represents a CpG dinucleotide"
  misc_feature (61)..(61): /note="Nucleotide may be methylated to form 5-methylcytosine"
catagctttactcagcagtaaaaatttaaatttgattttatcttgtgttggcagagtatacgaaaacacacttacatattgttggtgggagtttaaattggtgaaagttttttgttgggaag

SEQ ID NO: 10112 - DNA, 122 bp, Homo sapiens
  misc_feature (61)..(62): /note="This region represents a CpG dinucleotide"
  misc_feature (61)..(61): /note="Nucleotide may be methylated to form 5-methylcytosine"
gaacagctgtggggaagtggaggcagaaggcttggtgacaggttggatgtaagcactgtccgggatggaggagacttacactggctcttttttgaacagtggtgagatcccagccttttcat

SEQ ID NO: 10113 - DNA, 122 bp, Homo sapiens
  misc_feature (61)..(62): /note="This region represents a CpG dinucleotide"
  misc_feature (61)..(61): /note="Nucleotide may be methylated to form 5-methylcytosine"
atgaaaacttctctgggggtatgaattgacacagaatattgagtgccagtgagttctccacgcccggtgcaagttacagctgcagacattttcaaaccaaccagctggggtcctcagggact

SEQ ID NO: 10114 - DNA, 122 bp, Homo sapiens
  misc_feature (61)..(62): /note="This region represents a CpG dinucleotide"
  misc_feature (61)..(61): /note="Nucleotide may be methylated to form 5-methylcytosine"
gagaagcactgggttgaggagggtgctgggtgaggctggggcttctctggctgcaaatgacgtgagcactgtcatgtcaggagacctgagacagcagcaaactgtgagaggggctgggctca

SEQ ID NO: 10115 - DNA, 122 bp, Homo sapiens
  misc_feature (61)..(62): /note="This region represents a CpG dinucleotide"
  misc_feature (61)..(61): /note="Nucleotide may be methylated to form 5-methylcytosine"
ctacctgtcatatgagaaggaacctgtttgagtctctctcacagcaggctggtgtctgcacggaggctctgaggagctcatggtcatgaaatctgagtgccccaaacccacagacggagaca

SEQ ID NO: 10116 - DNA, 122 bp, Homo sapiens
  misc_feature (61)..(62): /note="This region represents a CpG dinucleotide"
  misc_feature (61)..(61): /note="Nucleotide may be methylated to form 5-methylcytosine"
gtgatgtctcccatctgtaatatggggtcagtgatgctcagccctcctgtgtcttgagcccggatgaacttcagaggcaaagtaaacaccttaagtgcagcatattaaaacagcacttacca

SEQ ID NO: 10117 - DNA, 122 bp, Homo sapiens
  misc_feature (61)..(62): /note="This region represents a CpG dinucleotide"
  misc_feature (61)..(61): /note="Nucleotide may be methylated to form 5-methylcytosine"
agctgtagatgatgtgggtacagaggaagcggtcaagggcatctgggaagcagctcccatcgccttcccggtactgggaccagctggtgtagtagcagaccagtttgtatgcagagcctgaa

SEQ ID NO: 10118 - DNA, 122 bp, Homo sapiens
  misc_feature (61)..(62): /note="This region represents a CpG dinucleotide"
  misc_feature (61)..(61): /note="Nucleotide may be methylated to form 5-methylcytosine"
gttgaaaaaaagttgagaaatactgggctagaccaaacatgatccattgcctgaagcttacgtattatctattactgatgacaaagagaggcacaggtatggagtggcaaactaacaatgcg

SEQ ID NO: 10119 - DNA, 122 bp, Homo sapiens
  misc_feature (61)..(62): /note="This region represents a CpG dinucleotide"
  misc_feature (61)..(61): /note="Nucleotide may be methylated to form 5-methylcytosine"
ggcacgagaactgctgaccacttcctgcaggcctccgacccggcggcccagccacccatccggctggggtggccatcagtcatctggaaagcctatgagccccgtgtcctcgttttgcaaag

SEQ ID NO: 10120 - DNA, 122 bp, Homo sapiens
  misc_feature (61)..(62): /note="This region represents a CpG dinucleotide"
  misc_feature (61)..(61): /note="Nucleotide may be methylated to form 5-methylcytosine"
tcttgaattcttttctgtgcaaagccaagaaacctcccaggctaagcaaatcttgggtctcgcataccctgcatcattgctagagaacagaggtcttatatctcatctccaggcataagacc

SEQ ID NO: 10121 - DNA, 122 bp, Homo sapiens
  misc_feature (61)..(62): /note="This region represents a CpG dinucleotide"
  misc_feature (61)..(61): /note="Nucleotide may be methylated to form 5-methylcytosine"
tgggaggtcacaacacatagagaccagcttttctatcactgcatattaaactcttgattgcgttccccagcagcagcctaagtgatgctaatagagttcccagtttataattaagtaggcaa

SEQ ID NO: 10122 - DNA, 122 bp, Homo sapiens
  misc_feature (61)..(62): /note="This region represents a CpG dinucleotide"
  misc_feature (61)..(61): /note="Nucleotide may be methylated to form 5-methylcytosine"
ccaagcaacgtaattcctgttttcatgggtcctgtagatgtttgagtcaggaaggtaaggcggggagtgactgaataaactctgccttttaaattgagcatctgggccgggcatggtggctc

SEQ ID NO: 10123 - DNA, 122 bp, Homo sapiens
  misc_feature (61)..(62): /note="This region represents a CpG dinucleotide"
  misc_feature (61)..(61): /note="Nucleotide may be methylated to form 5-methylcytosine"
atctttaacccagaatttcaaaacttaagtgatcacaaaatccaactgttacctaacacccgtcttatcttgaaggacaaggaaacattggtctttagaattttaagggggaaatattctga

SEQ ID NO: 10124 - DNA, 122 bp, Homo sapiens
  misc_feature (61)..(62): /note="This region represents a CpG dinucleotide"
  misc_feature (61)..(61): /note="Nucleotide may be methylated to form 5-methylcytosine"
gaatgagctttacagtaacttggatctctacacgaaggtgtaaattcagagcaacttacccgattctctgcaacaaagatggcaaagtttgcaaggagtgaaaatcatgtaatacttcgggg

SEQ ID NO: 10125 - DNA, 122 bp, Homo sapiens
  misc_feature (61)..(62): /note="This region represents a CpG dinucleotide"
  misc_feature (61)..(61): /note="Nucleotide may be methylated to form 5-methylcytosine"
tgtagaacaaaaaggtacttagaactttcataaaacatctcctaacattccccttccccccgccaacccctccatcccccgcccaaaaaagatccatctttagaaaacagaggatgtcaaag

SEQ ID NO: 10126 - DNA, 122 bp, Homo sapiens
  misc_feature (61)..(62): /note="This region represents a CpG dinucleotide"
  misc_feature (61)..(61): /note="Nucleotide may be methylated to form 5-methylcytosine"
atcatcggtcttcagtggctacctgggaaacaccccttggcttagtcggcagattctctccggtgaggttctgttgcacctgccactcctagggcagcaagcagcagtcttacttgctggca

SEQ ID NO: 10127 - DNA, 122 bp, Homo sapiens
  misc_feature (61)..(62): /note="This region represents a CpG dinucleotide"
  misc_feature (61)..(61): /note="Nucleotide may be methylated to form 5-methylcytosine"
tttgcataaaaactggcctgtgggctctgtgtgcagccaagtagccttcttatcctgcttcgtgcccatgaaaggttaggggatcagggcaggaactggaaagcttttcttgtaaattaagg

SEQ ID NO: 10128 - DNA, 122 bp, Homo sapiens
  misc_feature (61)..(62): /note="This region represents a CpG dinucleotide"
  misc_feature (61)..(61): /note="Nucleotide may be methylated to form 5-methylcytosine"
tccctgaccttagctgtcctcaggataaaacttcccacaagatcaacttcagaagctgtacgtgttttgtgtggcttatacaacatggttaaaaaaaatctgagcccagatttaataatggt

SEQ ID NO: 10129 - DNA, 122 bp, Homo sapiens
  misc_feature (61)..(62): /note="This region represents a CpG dinucleotide"
  misc_feature (61)..(61): /note="Nucleotide may be methylated to form 5-methylcytosine"
acttggcccaggactatccagagtctcatgtttagtcacaagaggggctggggcaatccacgagctccacttcaagttgtcaaaggaagtttcttggaaatcacagattattagtcatccaa

SEQ ID NO: 10130 - DNA, 122 bp, Homo sapiens
  misc_feature (61)..(62): /note="This region represents a CpG dinucleotide"
  misc_feature (61)..(61): /note="Nucleotide may be methylated to form 5-methylcytosine"
actcaaggggataaacttacacaaaggtatgagtcagttaagccttctggcatggagccacgacaatgaagattcgtggccccttcagaataagcaggcggtcagccatcagaaaagatgga

SEQ ID NO: 10131 - DNA, 122 bp, Homo sapiens
  misc_feature (61)..(62): /note="This region represents a CpG dinucleotide"
  misc_feature (61)..(61): /note="Nucleotide may be methylated to form 5-methylcytosine"
ctccaagttccgggatcctgaggccaccctcacttctgatcagctgattacaaatttgggcgtatttgctatcctactcatgtttaataattgactagaacaactcacagaactcagaaatg

SEQ ID NO: 10132 - DNA, 122 bp, Homo sapiens
  misc_feature (61)..(62): /note="This region represents a CpG dinucleotide"
  misc_feature (61)..(61): /note="Nucleotide may be methylated to form 5-methylcytosine"
aacacaccctcaaactttgccactttcagcctgtggtttctagccacaagcacttaaacacgcagttcccaaaggcaactgtaaattagtattcattcattcaaagaatgtcgatggaaggt

SEQ ID NO: 10133 - DNA, 122 bp, Homo sapiens
  misc_feature (61)..(62): /note="This region represents a CpG dinucleotide"
  misc_feature (61)..(61): /note="Nucleotide may be methylated to form 5-methylcytosine"
cttgcaccgtgcatcgctctgagtgaggcgacttaaatgcgcgatgttaccgttttcagccgtgaccgtagcactcggtctttgactgtagactgttgtgtctacatagtgctagtttgtat

SEQ ID NO: 10134 - DNA, 122 bp, Homo sapiens
  misc_feature (61)..(62): /note="This region represents a CpG dinucleotide"
  misc_feature (61)..(61): /note="Nucleotide may be methylated to form 5-methylcytosine"
agtattactcatctgacgtccatcactgtagacaaaggttgtggagcatcgcgcggtgcccgctgctgcatttggaaaggctccctcacctctcaccatcctgagtttcactccttagccag

SEQ ID NO: 10135 - DNA, 122 bp, Homo sapiens
  misc_feature (61)..(62): /note="This region represents a CpG dinucleotide"
  misc_feature (61)..(61): /note="Nucleotide may be methylated to form 5-methylcytosine"
gtggtatttgatgacaaattgtttaaagtcaccagtgggtcagagtacaaaccacgcccacgtgaaagtctccctggacgctaccagggtctacccattctcccctctctgtaagccagctt

SEQ ID NO: 10136 - DNA, 122 bp, Homo sapiens
  misc_feature (61)..(62): /note="This region represents a CpG dinucleotide"
  misc_feature (61)..(61): /note="Nucleotide may be methylated to form 5-methylcytosine"
tttttcttcgctctctaaccaaattccttttttcttgctgtagtctaagaaatctctattcgtttccaatagaggtggaaagcagcccatgccacccattatttagccctttcttttttttt

SEQ ID NO: 10137 - DNA, 122 bp, Homo sapiens
  misc_feature (61)..(62): /note="This region represents a CpG dinucleotide"
  misc_feature (61)..(61): /note="Nucleotide may be methylated to form 5-methylcytosine"
agagacctgaactacaatatgtaaagcatataggatggatttctctatcagttgtctagacgatattagtaaatcgtaaaaagtattgaccctaagcaatttatgctcttttacttaactgt

SEQ ID NO: 10138 - DNA, 122 bp, Homo sapiens
  misc_feature (61)..(62): /note="This region represents a CpG dinucleotide"
  misc_feature (61)..(61): /note="Nucleotide may be methylated to form 5-methylcytosine"
acagcagaaagattggtgcctctgctatttccagcagactggacagcctacacagagaatcgtcagaatgggcaaccgtacatagcccaaatgtaacgttcatatccgcagtacattttccc

SEQ ID NO: 10139 - DNA, 122 bp, Homo sapiens
  misc_feature (61)..(62): /note="This region represents a CpG dinucleotide"
  misc_feature (61)..(61): /note="Nucleotide may be methylated to form 5-methylcytosine"
tgcaacaaccacataatctgcaaagcctaaaacattaactatctggctctttccagaaaacgtacgcctgcctggcctacagcagtagttcttaaatcaccagggaactttgtaaaaatgca

SEQ ID NO: 10140 - DNA, 122 bp, Homo sapiens
  misc_feature (61)..(62): /note="This region represents a CpG dinucleotide"
  misc_feature (61)..(61): /note="Nucleotide may be methylated to form 5-methylcytosine"
ctgcgaggctgagattcaggaacaacacttgcaggaatatgccctggagggactgacactcgagaagaatttttgttttggaattgtgagaaactgaaaatgcccatctgcaaggaaagtga

SEQ ID NO: 10141 - DNA, 122 bp, Homo sapiens
  misc_feature (61)..(62): /note="This region represents a CpG dinucleotide"
  misc_feature (61)..(61): /note="Nucleotide may be methylated to form 5-methylcytosine"
cacctgctgggaatgtagtcagcagccttcagatgccagtcttttcagggacagcctcaacgggagatggacagcctcaacaggagatggccaccctgaccttcccaagggtggccttccca

SEQ ID NO: 10142 - DNA, 122 bp, Homo sapiens
  misc_feature (61)..(62): /note="This region represents a CpG dinucleotide"
  misc_feature (61)..(61): /note="Nucleotide may be methylated to form 5-methylcytosine"
tttctcagggactaatcccaagttttagggaatcactattaaccttaacactcagcataccggggcaaaaaggcctaacaagaagtatccagacatctctgcatagagggctctttagaatt

SEQ ID NO: 10143 - DNA, 122 bp, Homo sapiens
  misc_feature (61)..(62): /note="This region represents a CpG dinucleotide"
  misc_feature (61)..(61): /note="Nucleotide may be methylated to form 5-methylcytosine"
ttcagctccatgacattgggtgagttgtctaaatgctctgtgctttggtgtccttgtctgcgtgtgacatgaagccgcagatctcaaagatctctttcattccgtgaaagcgctctcaatgt

SEQ ID NO: 10144 - DNA, 122 bp, Homo sapiens
  misc_feature (61)..(62): /note="This region represents a CpG dinucleotide"
  misc_feature (61)..(61): /note="Nucleotide may be methylated to form 5-methylcytosine"
gcacaggtgtgaccagaatggactaatcacccagaatgcagcttgttaaggggcttagcacgcaggcctggtcacacttggttcattccagggccttactcatcagggaggaacctggggga

SEQ ID NO: 10145 - DNA, 122 bp, Homo sapiens
  misc_feature (61)..(62): /note="This region represents a CpG dinucleotide"
  misc_feature (61)..(61): /note="Nucleotide may be methylated to form 5-methylcytosine"
cccctccctagacctggtgactgggagactcggctgggcccagcagcccatgcctaaccacgcctccaggggcttctaatgccagcccagaacactaggctgtggtcatcctcagttgagcc

SEQ ID NO: 10146 - DNA, 122 bp, Homo sapiens
  misc_feature (61)..(62): /note="This region represents a CpG dinucleotide"
  misc_feature (61)..(61): /note="Nucleotide may be methylated to form 5-methylcytosine"
agtgagctcaatatctgtctatatctatcttcgactgaaaagtgtgttgaagttgagtgccgacatgtaagacattcaatttaaagctttgttacttgaaatcatttgaactcctcttgagc

SEQ ID NO: 10147 - DNA, 122 bp, Homo sapiens
  misc_feature (61)..(62): /note="This region represents a CpG dinucleotide"
  misc_feature (61)..(61): /note="Nucleotide may be methylated to form 5-methylcytosine"
aactttgggagcttgagctttgggagtttgatccccttggccaagtacagccctagggagcgttgacgctcttgaagaatcatttttaatgctgcacaggaatctgtactaattcttgtttg

SEQ ID NO: 10148 - DNA, 122 bp, Homo sapiens
  misc_feature (61)..(62): /note="This region represents a CpG dinucleotide"
  misc_feature (61)..(61): /note="Nucleotide may be methylated to form 5-methylcytosine"
tgagccagattttgaatattttaattacttaactgcttgtctgtctggcaatgagataagcgcagtagccagtgattaccaacagttaaacagaagaacaagtcacataaacaacacttata

SEQ ID NO: 10149 - DNA, 122 bp, Homo sapiens
  misc_feature (61)..(62): /note="This region represents a CpG dinucleotide"
  misc_feature (61)..(61): /note="Nucleotide may be methylated to form 5-methylcytosine"
taagaatccagtatagctttctctatatttcctcttagaattaatgcttgagagaaacaacgggtgcctgacatactggaacctgcccattgctattttctgatgctcttctccgtccaata

SEQ ID NO: 10150 - DNA, 122 bp, Homo sapiens
  misc_feature (61)..(62): /note="This region represents a CpG dinucleotide"
  misc_feature (61)..(61): /note="Nucleotide may be methylated to form 5-methylcytosine"
tatggttacgttaggtgcaccaatgacttcaaattcttctcatgtttccttgccagcttacggttggtttgcaggagggaggctttttctcagtggttatcctccatccataccctcagttt

SEQ ID NO: 10151 - DNA, 122 bp, Homo sapiens
  misc_feature (61)..(62): /note="This region represents a CpG dinucleotide"
  misc_feature (61)..(61): /note="Nucleotide may be methylated to form 5-methylcytosine"
gggctgatgctggacatgacaacaaagagtctttctctgctgcatccagatgttacgaggcgattaaacttgggtttaactgacccaggagaatcaactggctgctagagcagccctgcttc

SEQ ID NO: 10152 - DNA, 122 bp, Homo sapiens
  misc_feature (61)..(62): /note="This region represents a CpG dinucleotide"
  misc_feature (61)..(61): /note="Nucleotide may be methylated to form 5-methylcytosine"
gagggacattactcattattatgaggcttaaggaaaggaaccatctcccatgttgttatacggaggggcattactcattattatgagacttaaggacaggaaccatctcccatgctgttatg

SEQ ID NO: 10153 - DNA, 122 bp, Homo sapiens
  misc_feature (61)..(62): /note="This region represents a CpG dinucleotide"
  misc_feature (61)..(61): /note="Nucleotide may be methylated to form 5-methylcytosine"
aagacagaaggatctcttatgcagatcaccaggctcctcctcctttttccctgctctaagcggctgtctgatcaggaaatgtgggcttcctgtgttgcttgcacacacaggacctgctctga

SEQ ID NO: 10154 - DNA, 122 bp, Homo sapiens
  misc_feature (61)..(62): /note="This region represents a CpG dinucleotide"
  misc_feature (61)..(61): /note="Nucleotide may be methylated to form 5-methylcytosine"
tcaagcaggttggcagctttccccagccctcccccagtgtccctgccaggcacggaaggacgggtcacagggctgaccctggctggcatttcagacagctttataattacaccatctatttt

SEQ ID NO: 10155 - DNA, 122 bp, Homo sapiens
  misc_feature (61)..(62): /note="This region represents a CpG dinucleotide"
  misc_feature (61)..(61): /note="Nucleotide may be methylated to form 5-methylcytosine"
tgcaatactcatctgtctaaggcccagctagtgtttcagatttcatcttactttaaaaagcggcagcaagattatatagttacctagtgctaatcccataagaattaaatacatagagcctc

SEQ ID NO: 10156 - DNA, 122 bp, Homo sapiens
  misc_feature (61)..(62): /note="This region represents a CpG dinucleotide"
  misc_feature (61)..(61): /note="Nucleotide may be methylated to form 5-methylcytosine"
tccgagtgtagagggcatgctgccctcctctctccacctaactgcccgccagcaagggagcggtgccagccgccacacgctgacggtggagacgctactacacagccagctccctccctgtg

SEQ ID NO: 10157 - DNA, 122 bp, Homo sapiens
  misc_feature (61)..(62): /note="This region represents a CpG dinucleotide"
  misc_feature (61)..(61): /note="Nucleotide may be methylated to form 5-methylcytosine"
cgcggtacccgcccatcttccggccaggatgtgtggtcctggtgagcgattgtcctgtggcgtccgggaccgagtttgtggcccagggttatgtgtgcacttcacacctctgacttttttca

SEQ ID NO: 10158 - DNA, 122 bp, Homo sapiens
  misc_feature (61)..(62): /note="This region represents a CpG dinucleotide"
  misc_feature (61)..(61): /note="Nucleotide may be methylated to form 5-methylcytosine"
attatgtctgttttatttgcctttatattcctagcacctcatatagtggctactagtagacgtttagtatttgttgaagaaatggatatatctgaataattttttaaccactcagattttat

SEQ ID NO: 10159 - DNA, 122 bp, Homo sapiens
  misc_feature (61)..(62): /note="This region represents a CpG dinucleotide"
  misc_feature (61)..(61): /note="Nucleotide may be methylated to form 5-methylcytosine"
catggagaagagattaaattatgtttaataaatgttcattttatgttcattctttgaaaacgggcactcattgagtgacagatcttttaccacacacaaacactaacagatacgcgtaactg

SEQ ID NO: 10160 - DNA, 122 bp, Homo sapiens
  misc_feature (61)..(62): /note="This region represents a CpG dinucleotide"
  misc_feature (61)..(61): /note="Nucleotide may be methylated to form 5-methylcytosine"
tttctgaggtatgaggaatttttgtgtttggagccattataagaaatgtgtgaataaaagcgttttcatcagtcaatcagggtatgcacattttatatctaaaggtgaataggttaccttgc

SEQ ID NO: 10161 - DNA, 122 bp, Homo sapiens
  misc_feature (61)..(62): /note="This region represents a CpG dinucleotide"
  misc_feature (61)..(61): /note="Nucleotide may be methylated to form 5-methylcytosine"
caaacttcctgtacactcaatccctgataatctaataaaaattcagtgttatttctaaaacgtatgcacagacccggagattagagcatatgtggtaaactttgtgatgttacatatgaaaa

SEQ ID NO: 10162 - DNA, 122 bp, Homo sapiens
  misc_feature (61)..(62): /note="This region represents a CpG dinucleotide"
  misc_feature (61)..(61): /note="Nucleotide may be methylated to form 5-methylcytosine"
atttgtataacttttaacatttgttctaccctctgaaaaccgtgagtgcagaagctatgtcgcattcactatgtctctgtagtgtttatatgcagtactttagttattttccataaattttt

SEQ ID NO: 10163 - DNA, 122 bp, Homo sapiens
  misc_feature (61)..(62): /note="This region represents a CpG dinucleotide"
  misc_feature (61)..(61): /note="Nucleotide may be methylated to form 5-methylcytosine"
tgttaataacttagcccgctactaatacaaaaataaaacagcttattctgatgcatatgacgtaaattctgtgatgcattttctggaagtacatattagaatgtaaataaaactaaacaagg

SEQ ID NO: 10164 - DNA, 122 bp, Homo sapiens
  misc_feature (61)..(62): /note="This region represents a CpG dinucleotide"
  misc_feature (61)..(61): /note="Nucleotide may be methylated to form 5-methylcytosine"
cgtctgagatcggaatgccctttacaacaaacagcatctcgggttgggcaatgctgtgaccgcacctgcctcccacggccactgggagggtttcaggggagaacggaaggaaagcacctcag

SEQ ID NO: 10165 - DNA, 122 bp, Homo sapiens
  misc_feature (61)..(62): /note="This region represents a CpG dinucleotide"
  misc_feature (61)..(61): /note="Nucleotide may be methylated to form 5-methylcytosine"
acccgggaggtggaggttgcagtgagtcgacatcgcaccactgcactccagcctgggtgacggtgagactgtctccaagaaaaaagaaagaaaagcatgtagttaacctgcaacgacatcaa

SEQ ID NO: 10166 - DNA, 122 bp, Homo sapiens
  misc_feature (61)..(62): /note="This region represents a CpG dinucleotide"
  misc_feature (61)..(61): /note="Nucleotide may be methylated to form 5-methylcytosine"
gccgctgccttcactcacccctccccacaccagtctggagtgataggctgcgtctgcacgcggctggctctgcctaggtgcccaggagtgactggcacaagtgtgtgctctatgtgcttaat

SEQ ID NO: 10167 - DNA, 122 bp, Homo sapiens
  misc_feature (61)..(62): /note="This region represents a CpG dinucleotide"
  misc_feature (61)..(61): /note="Nucleotide may be methylated to form 5-methylcytosine"
ggtttctcttccttttagaccttatagggtaacttctggatgttgtgtaaacagtcatgacgttggtgggagtattgtttagcaggccaatacattataattggcatataatgaacattgag

SEQ ID NO: 10168 - DNA, 122 bp, Homo sapiens
  misc_feature (61)..(62): /note="This region represents a CpG dinucleotide"
  misc_feature (61)..(61): /note="Nucleotide may be methylated to form 5-methylcytosine"
aggttgagatctcctcattcttatcttctgagtcaggcagcacaagatggtataaacactcgttcaaaatgcacttgaatattccatcccttgtccttgcatttacactgttttcttgcagc

SEQ ID NO: 10169 - DNA, 122 bp, Homo sapiens
  misc_feature (61)..(62): /note="This region represents a CpG dinucleotide"
  misc_feature (61)..(61): /note="Nucleotide may be methylated to form 5-methylcytosine"
gcccatgcagctgacaggctctgcacaatcctgtaaactattgacaaatttcacctgttacgtaactaggagcactttatcagactatcttccatgtatctgatataaaaaccacagtcaag

SEQ ID NO: 10170 - DNA, 122 bp, Homo sapiens
  misc_feature (61)..(62): /note="This region represents a CpG dinucleotide"
  misc_feature (61)..(61): /note="Nucleotide may be methylated to form 5-methylcytosine"
aggcagagccccatatgatgctgcttcacacatctgtgccctgctttcaaggctcgaagacggtcctgacaggcaccctgtgaagccagcactgttgtgtcatccagctaaggaaacacgag

SEQ ID NO: 10171 - DNA, 122 bp, Homo sapiens
  misc_feature (61)..(62): /note="This region represents a CpG dinucleotide"
  misc_feature (61)..(61): /note="Nucleotide may be methylated to form 5-methylcytosine"
caattaaagttttaaaattaacaaagtaatctctaattgaaggtgtgaaaagactgagaacgtctgttgcagcacggcatagatgagtgcttgaaagatagaaacttaagttcattctacac

SEQ ID NO: 10172 - DNA, 122 bp, Homo sapiens
  misc_feature (61)..(62): /note="This region represents a CpG dinucleotide"
  misc_feature (61)..(61): /note="Nucleotide may be methylated to form 5-methylcytosine"
gtactgaccttaaatgcttccttaaaacatgactgtgaggattaactaagataaggactacgaatgcattttgtcacaaatgaattcatttttgtggttgctgctcacgctgatggttctct

SEQ ID NO: 10173 - DNA, 122 bp, Homo sapiens
  misc_feature (61)..(62): /note="This region represents a CpG dinucleotide"
  misc_feature (61)..(61): /note="Nucleotide may be methylated to form 5-methylcytosine"
gaagtccctgtatggctttccagagtcccggaagcgccgagaggcggagtcctggaactccgtctcagagggaaagcagcctagattctcccaccggattccgctgctgatctttgatcagg

SEQ ID NO: 10174 - DNA, 122 bp, Homo sapiens
  misc_feature (61)..(62): /note="This region represents a CpG dinucleotide"
  misc_feature (61)..(61): /note="Nucleotide may be methylated to form 5-methylcytosine"
actgtcctctggacctagagccccacgagtggtgccacgagagcagcacctggggccccacgacctggaagtgtaattagtttcagactcagatagagaaatggaaagtcctgatattgatt

SEQ ID NO: 10175 - DNA, 122 bp, Homo sapiens
  misc_feature (61)..(62): /note="This region represents a CpG dinucleotide"
  misc_feature (61)..(61): /note="Nucleotide may be methylated to form 5-methylcytosine"
catttcatctgcacaataactatctgaagtaagggcttgagtagccccattctgccaacgcgactcacaagagttgagtaactcaccgagtggcacccagctagttggtggcagagcctgga

SEQ ID NO: 10176 - DNA, 122 bp, Homo sapiens
  misc_feature (61)..(62): /note="This region represents a CpG dinucleotide"
  misc_feature (61)..(61): /note="Nucleotide may be methylated to form 5-methylcytosine"
acgtgtggtgttttcgtcaccattactattgtgggaaagaagacaactcaggcatcgtttcgtattcactcatctgtgtgggtgacatgtgggttttggctcatttctgcatatttgtgtgc

SEQ ID NO: 10177 - DNA, 122 bp, Homo sapiens
  misc_feature (61)..(62): /note="This region represents a CpG dinucleotide"
  misc_feature (61)..(61): /note="Nucleotide may be methylated to form 5-methylcytosine"
acaagcaggaataaaaggccaccagagtcacagagacgaagctgcggcgttaccgaggtgcgaatcactgtgattcctaggtgcgaatcatcaccagcaatcacttctctcaggactccttg

SEQ ID NO: 10178 - DNA, 122 bp, Homo sapiens
  misc_feature (61)..(62): /note="This region represents a CpG dinucleotide"
  misc_feature (61)..(61): /note="Nucleotide may be methylated to form 5-methylcytosine"
cccttggcatgctgttgctgtcagattaacccctttcagtaagaagaggtcagagcaatacgatttaacctgaagttggttcctgtggtggtgccaaaccatgatttcccaaatctagcatt

SEQ ID NO: 10179 - DNA, 122 bp, Homo sapiens
  misc_feature (61)..(62): /note="This region represents a CpG dinucleotide"
  misc_feature (61)..(61): /note="Nucleotide may be methylated to form 5-methylcytosine"
ttttatctttgccgtgtacttgtggtggcagttgttctgtcactctttaagtagcccctgcgtgaggtaaaaattcacatgtgcagatgggtgcttgatgaaaggactctccttgccccatc

SEQ ID NO: 10180 - DNA, 122 bp, Homo sapiens
  misc_feature (61)..(62): /note="This region represents a CpG dinucleotide"
  misc_feature (61)..(61): /note="Nucleotide may be methylated to form 5-methylcytosine"
taccgcgcatgctggaggctggagcctacagtggctcacctcgctgctgcggttggtggccgcgagggtgactacagcgcagccagaatggtgaaaaggtggcagaataggttcgttatccc

SEQ ID NO: 10181 - DNA, 122 bp, Homo sapiens
  misc_feature (61)..(62): /note="This region represents a CpG dinucleotide"
  misc_feature (61)..(61): /note="Nucleotide may be methylated to form 5-methylcytosine"
ggatttatcttagcaccgattaaggcttacccacaaggcaaggctctttctgtgtcctcacgctgtcactcctaaaactttccagaactacaagtgacccagctctcagtcaggaagggctc

SEQ ID NO: 10182 - DNA, 122 bp, Homo sapiens
  misc_feature (61)..(62): /note="This region represents a CpG dinucleotide"
  misc_feature (61)..(61): /note="Nucleotide may be methylated to form 5-methylcytosine"
aaactttctcttcatgtcttcccagtatcagtcaatcataacttgagctttaccaatatgcggtatttgccttcttacaactatataaatactcttcacagagaagtcatttggtatgcaat

SEQ ID NO: 10183 - DNA, 122 bp, Homo sapiens
  misc_feature (61)..(62): /note="This region represents a CpG dinucleotide"
  misc_feature (61)..(61): /note="Nucleotide may be methylated to form 5-methylcytosine"
catctcatttattgaatactgaaagtgaaaaactggttgtatatgggcactcaccattaacgtacacagctgaaagcacactgggccaaagaatgtttgaaacatctagaattgctggatga

SEQ ID NO: 10184 - DNA, 122 bp, Homo sapiens
  misc_feature (61)..(62): /note="This region represents a CpG dinucleotide"
  misc_feature (61)..(61): /note="Nucleotide may be methylated to form 5-methylcytosine"
ctcaagtgatcctctcacctcggcctcccaaagtgctgggattgcaggcataagctaccgcgcagggcagcattagcactcttaaatagtattctgaccctcaaaagtgttgatttaatgaa

SEQ ID NO: 10185 - DNA, 122 bp, Homo sapiens
  misc_feature (61)..(62): /note="This region represents a CpG dinucleotide"
  misc_feature (61)..(61): /note="Nucleotide may be methylated to form 5-methylcytosine"
aaaaaacccttggaggtgaacttgttcatttcctcccctgaaagtgtgaattttttcagccgtatccccataaggtgctacccagcccttttccccacattgatggtgatgacacatacttg

SEQ ID NO: 10186 - DNA, 122 bp, Homo sapiens
  misc_feature (61)..(62): /note="This region represents a CpG dinucleotide"
  misc_feature (61)..(61): /note="Nucleotide may be methylated to form 5-methylcytosine"
aaggattaaaacatatgtaattccttgacacagacacttcctttactgtcatttagagaacggtttcagaagacagcctcttggagaatcttagtttgatggtccagattttgtagtttctt

SEQ ID NO: 10187 - DNA, 122 bp, Homo sapiens
  misc_feature (61)..(62): /note="This region represents a CpG dinucleotide"
  misc_feature (61)..(61): /note="Nucleotide may be methylated to form 5-methylcytosine"
atgccccagccttgaccttccagcttcccatctgccagacttgctcaagagagtggctcacggctaaggagtggaaactgacacccagagaaggatctagaacctcgtactcttccatgctc

SEQ ID NO: 10188 - DNA, 122 bp, Homo sapiens
  misc_feature (61)..(62): /note="This region represents a CpG dinucleotide"
  misc_feature (61)..(61): /note="Nucleotide may be methylated to form 5-methylcytosine"
gtgcattgagtcctaaaccaggtggcaggtgctctgatacacagaaccaccatgagactacggaaagataaaggcaggagcccagacacaatcaaggcaatgccacaccatctgcaaataaa

SEQ ID NO: 10189 - DNA, 122 bp, Homo sapiens
  misc_feature (61)..(62): /note="This region represents a CpG dinucleotide"
  misc_feature (61)..(61): /note="Nucleotide may be methylated to form 5-methylcytosine"
gatctcaaacaagttccttaccctctctgaacctaggctgtgagaaagtaaaaatgagctcggttgataatcagactgtgatatctgaaagatagaagaccaacaggtaaaaagtttttcct

SEQ ID NO: 10190 - DNA, 122 bp, Homo sapiens
  misc_feature (61)..(62): /note="This region represents a CpG dinucleotide"
  misc_feature (61)..(61): /note="Nucleotide may be methylated to form 5-methylcytosine"
gatgagcgctcaggaatcatgggctatcaaaggtaggtgctgagggaatgaaatctgggacgatagactacgaagcattggagaaaagacctatggacatttggaagataatgtgtggagtg

SEQ ID NO: 10191 - DNA, 122 bp, Homo sapiens
  misc_feature (61)..(62): /note="This region represents a CpG dinucleotide"
  misc_feature (61)..(61): /note="Nucleotide may be methylated to form 5-methylcytosine"
ttcaaagggaaatcaggctgcatctgctgagggaacgaggagacaagggagcctcttgcacgcttgtaatgtctgagccagatcttagattcacctgcagcaggcccagcccttttccccag

SEQ ID NO: 10192 - DNA, 122 bp, Homo sapiens
  misc_feature (61)..(62): /note="This region represents a CpG dinucleotide"
  misc_feature (61)..(61): /note="Nucleotide may be methylated to form 5-methylcytosine"
cttgcaatagaaggctgctccaaacttttcttctgcaacttcctcacctctctcagtcttcgtggaactgaggtgagttaaggccttgctctgcactaggctttggcttaatgaaatgttgt

SEQ ID NO: 10193 - DNA, 122 bp, Homo sapiens
  misc_feature (61)..(62): /note="This region represents a CpG dinucleotide"
  misc_feature (61)..(61): /note="Nucleotide may be methylated to form 5-methylcytosine"
gcagcagccagacacctcccaggaacccaatgtaagccctgtatcgatggcagcttcctgcgaagccactgtgagcgtgtgaaaaatccccaccgtaggaacaaaagtttttgtatctaaaa

SEQ ID NO: 10194 - DNA, 122 bp, Homo sapiens
  misc_feature (61)..(62): /note="This region represents a CpG dinucleotide"
  misc_feature (61)..(61): /note="Nucleotide may be methylated to form 5-methylcytosine"
gacagccgctgtcaacacaattgtatagacaatattattcttcagtaaataaaaacacaccgtcacaaaatatcaccacacattttcccctgaacattagtaaacatggcagtttgctctgc

SEQ ID NO: 10195 - DNA, 122 bp, Homo sapiens
  misc_feature (61)..(62): /note="This region represents a CpG dinucleotide"
  misc_feature (61)..(61): /note="Nucleotide may be methylated to form 5-methylcytosine"
gctagacctggtttccacttgatccttttcttcaagataactcacctgcccagtgataaacgtatggcccagcgtccaccctctcaaaagcaatttgtctctggaatcctctcttccaagct

SEQ ID NO: 10196 - DNA, 122 bp, Homo sapiens
  misc_feature (61)..(62): /note="This region represents a CpG dinucleotide"
  misc_feature (61)..(61): /note="Nucleotide may be methylated to form 5-methylcytosine"
atccacaggccagtcatgcccctccactgccgctgctccagctgagcacaaggaagtggacgcaaagaatctgacgactctggtgatgacatggctttggactttttgacccgacctgtttt

SEQ ID NO: 10197 - DNA, 122 bp, Homo sapiens
  misc_feature (61)..(62): /note="This region represents a CpG dinucleotide"
  misc_feature (61)..(61): /note="Nucleotide may be methylated to form 5-methylcytosine"
tttcccccacggtgaagaaattcaactttttacttagtattaccatcatgcccaagtcaccgcaaagttaaactaacccaaataagactttaaacctgaagtcacccattcgagatctgtca

SEQ ID NO: 10198 - DNA, 122 bp, Homo sapiens
  misc_feature (61)..(62): /note="This region represents a CpG dinucleotide"
  misc_feature (61)..(61): /note="Nucleotide may be methylated to form 5-methylcytosine"
ccacctggagagccgcaggctccaaagtcttccccattctcggggaccaggttccggggtcgcgctgagggcccctgaaccctcttggactgcctggcagcggcttcttcctaccaccacgg

SEQ ID NO: 10199 - DNA, 122 bp, Homo sapiens
  misc_feature (61)..(62): /note="This region represents a CpG dinucleotide"
  misc_feature (61)..(61): /note="Nucleotide may be methylated to form 5-methylcytosine"
ccagggccccaccccctaacgtggggtgcagtgcctctcacgtggtgagggtcagaggtgcgtgcccagcccagaggatctccccacgcagccctcccagtctgcagaggggtctccacaca

SEQ ID NO: 10200 - DNA, 122 bp, Homo sapiens
  misc_feature (61)..(62): /note="This region represents a CpG dinucleotide"
  misc_feature (61)..(61): /note="Nucleotide may be methylated to form 5-methylcytosine"
gaggaatgggcaaccctgatgggaaaggaggacttacacctaaaaagggaagtagtcacacgcagtgttcagagagttgaccacatggtattttatgtccttagctggagtcttagatcatt

SEQ ID NO: 10201 - DNA, 122 bp, Homo sapiens
  misc_feature (61)..(62): /note="This region represents a CpG dinucleotide"
  misc_feature (61)..(61): /note="Nucleotide may be methylated to form 5-methylcytosine"
gcagtatttggatatccggtttcctcacgctatttattgaagcgactgtcctttccccatcgtgtattcttgacacaagattagttgacttgcctaagattagttgactgtatatgcatggg

SEQ ID NO: 10202 - DNA, 122 bp, Homo sapiens
  misc_feature (61)..(62): /note="This region represents a CpG dinucleotide"
  misc_feature (61)..(61): /note="Nucleotide may be methylated to form 5-methylcytosine"
ttcccaaaggaaccttacaggaatgcttttactactagaaaacatacagcagcagctgggcgcagtggctcacgcctgtaatcccagcactttgtgaggccgaggcagttggatcatgaggt

SEQ ID NO: 10203 - DNA, 122 bp, Homo sapiens
  misc_feature (61)..(62): /note="This region represents a CpG dinucleotide"
  misc_feature (61)..(61): /note="Nucleotide may be methylated to form 5-methylcytosine"
ctttcctgtgcttcagctccctggaaactggcactgcagaaggaggcaagggtgttaaaacgaggaggcagtgtcaggacaaaatcccaggatctggaaccccaaatacttggctcgcggga

SEQ ID NO: 10204 - DNA, 122 bp, Homo sapiens
  misc_feature (61)..(62): /note="This region represents a CpG dinucleotide"
  misc_feature (61)..(61): /note="Nucleotide may be methylated to form 5-methylcytosine"
caagtctcatagcttatgcccacagaattcatgtgctaggaaataaaacacccaatcacacggtgtattcaacggtcctagatggaagaactattcccagccttgcctttaactcactctgt

SEQ ID NO: 10205 - DNA, 122 bp, Homo sapiens
  misc_feature (61)..(62): /note="This region represents a CpG dinucleotide"
  misc_feature (61)..(61): /note="Nucleotide may be methylated to form 5-methylcytosine"
cagtactagtgaggtcctaagtcttggcagtgggtctcctgcagagcctggtgctgtcaccgcatcaatcagccctggagcatgctgttattatcacaaccagtcattccacactgcaatca

SEQ ID NO: 10206 - DNA, 122 bp, Homo sapiens
  misc_feature (61)..(62): /note="This region represents a CpG dinucleotide"
  misc_feature (61)..(61): /note="Nucleotide may be methylated to form 5-methylcytosine"
atggagctactaattttgtaaatactttcatgcagttaaaaactcatttaattttccttccgtttacttcttaacagattgctaccactggtcagaaaccaacttcctagaacctcctgata

SEQ ID NO: 10207 - DNA, 122 bp, Homo sapiens
  misc_feature (61)..(62): /note="This region represents a CpG dinucleotide"
  misc_feature (61)..(61): /note="Nucleotide may be methylated to form 5-methylcytosine"
caaatacacctctttgcatccacaaatcctgctcaccgagtcgagattctcccgtgatgacgctccaatcatccccgcacacgctggggaagacgcgtggctgtgggagccgagtggcacag

SEQ ID NO: 10208 - DNA, 122 bp, Homo sapiens
  misc_feature (61)..(62): /note="This region represents a CpG dinucleotide"
  misc_feature (61)..(61): /note="Nucleotide may be methylated to form 5-methylcytosine"
ctgatgaaggtgataccagaaatgaaatcagatcccctgatttattgcagggggtgggggcgtttgctgtgaataccagcagcggttacagaattgtgacacgtccaaattacagacaaatg

SEQ ID NO: 10209 - DNA, 122 bp, Homo sapiens
  misc_feature (61)..(62): /note="This region represents a CpG dinucleotide"
  misc_feature (61)..(61): /note="Nucleotide may be methylated to form 5-methylcytosine"
ttcaggattaattcagtttcactgggctaaagttccttccggaggctctagagcagtatccgtttcctggccttcttcagcctctagagcttcattccttgcattccttggctcatggcccc

SEQ ID NO: 10210 - DNA, 122 bp, Homo sapiens
  misc_feature (61)..(62): /note="This region represents a CpG dinucleotide"
  misc_feature (61)..(61): /note="Nucleotide may be methylated to form 5-methylcytosine"
gtgctctaaccacaaaaagaaacaaacaaagggaatgagaggaaatattaggaggtgatgcgtaagtaagtttatggcattgatagtgatgatggttttaaaggtatatagttatctccaaa

SEQ ID NO: 10211 - DNA, 122 bp, Homo sapiens
  misc_feature (61)..(62): /note="This region represents a CpG dinucleotide"
  misc_feature (61)..(61): /note="Nucleotide may be methylated to form 5-methylcytosine"
ttcacaaataggcattaaattccccaaacattaagtggactctttataaacttttattgacgctcataattattttactcttctacagtttaaagatactgatcacccagcaataaaaaagg

SEQ ID NO: 10212 - DNA, 122 bp, Homo sapiens
  misc_feature (61)..(62): /note="This region represents a CpG dinucleotide"
  misc_feature (61)..(61): /note="Nucleotide may be methylated to form 5-methylcytosine"
tctaatttccaattttttttttcaaataggggaaaatcatatatagatatttttctttggcgtgattggttcttttaaaaagaggaagtggcaaaaatgagcagccacagccagatgatgac

SEQ ID NO: 10213 - DNA, 122 bp, Homo sapiens
  misc_feature (61)..(62): /note="This region represents a CpG dinucleotide"
  misc_feature (61)..(61): /note="Nucleotide may be methylated to form 5-methylcytosine"
caaatgatgacatagaattcttcccaggcctagatatgcaaacagaagcagtgcaagggccgtgtacacaatgacagtgtgggtgcagataagacagtaatttcccggagagctttggttga

SEQ ID NO: 10214 - DNA, 122 bp, Homo sapiens
  misc_feature (61)..(62): /note="This region represents a CpG dinucleotide"
  misc_feature (61)..(61): /note="Nucleotide may be methylated to form 5-methylcytosine"
gtaactgagaactgttgatagttacttggttatatgtagtctatgaccaaaagaaacatccgaggctttatgatcttcaaatagtttgaatacttggccacaccacagtgatagggcttttt

SEQ ID NO: 10215 - DNA, 122 bp, Homo sapiens
  misc_feature (61)..(62): /note="This region represents a CpG dinucleotide"
  misc_feature (61)..(61): /note="Nucleotide may be methylated to form 5-methylcytosine"
ttttaggtggtatttactctgttgatatcttcctttcattgtttctctgcactctttgtgcgtagtttctgtgtttaagctagcaatttcaaacattttgaaagtaaacacttaatctcctc

SEQ ID NO: 10216 - DNA, 122 bp, Homo sapiens
  misc_feature (61)..(62): /note="This region represents a CpG dinucleotide"
  misc_feature (61)..(61): /note="Nucleotide may be methylated to form 5-methylcytosine"
gggagcaggggaagagacaccctcctgacctccagcctcctgcctgtacctcacatttgccggacacaaaaggaagctagaggcaaaggaagctggtgattcagctcctagcactcagcccc

SEQ ID NO: 10217 - DNA, 122 bp, Homo sapiens
  misc_feature (61)..(62): /note="This region represents a CpG dinucleotide"
  misc_feature (61)..(61): /note="Nucleotide may be methylated to form 5-methylcytosine"
agtcacggagataatgacaaagcccagaagtcaataatccattctgtaaacatcacctaccgtaggaagtggtgacctcacaggcgaaacaccacagtcattcattgtcaaggtctgtatgt

SEQ ID NO: 10218 - DNA, 122 bp, Homo sapiens
  misc_feature (61)..(62): /note="This region represents a CpG dinucleotide"
  misc_feature (61)..(61): /note="Nucleotide may be methylated to form 5-methylcytosine"
gcccttcatccaccagctcttccatggcctacagagaaaagtgtctgtgtggtgcagaaacgaacccagaaaggacaggatcagaagtgtcgtttgcaccagtttaacgggtcctgccctca

SEQ ID NO: 10219 - DNA, 122 bp, Homo sapiens
  misc_feature (61)..(62): /note="This region represents a CpG dinucleotide"
  misc_feature (61)..(61): /note="Nucleotide may be methylated to form 5-methylcytosine"
gccctaccagaaactggccacgtgcgatgcggacggaggcatattcgtgtggattcagtacgagggcaggtggtctgtggagctggtcaacgaccgcggggcgcaggtgagtggcaggcgca

SEQ ID NO: 10220 - DNA, 122 bp, Homo sapiens
  misc_feature (61)..(62): /note="This region represents a CpG dinucleotide"
  misc_feature (61)..(61): /note="Nucleotide may be methylated to form 5-methylcytosine"
atcgttactggcaaacacagaaaaagcaaatttaccccctaatgaggccctccaacagtacgcaaacaatgtgagtttcacagaatcaagcagccctggtcggtcaaaatcatttttagttt

SEQ ID NO: 10221 - DNA, 122 bp, Homo sapiens
  misc_feature (61)..(62): /note="This region represents a CpG dinucleotide"
  misc_feature (61)..(61): /note="Nucleotide may be methylated to form 5-methylcytosine"
atgttcctggggatccacccttatagaagttaccttttagagagaggagacagacaaatacgtgtaatgctcaagttgtgataagtacgatgaagaagtacaaagcagaagggagggcgcgg

SEQ ID NO: 10222 - DNA, 122 bp, Homo sapiens
  misc_feature (61)..(62): /note="This region represents a CpG dinucleotide"
  misc_feature (61)..(61): /note="Nucleotide may be methylated to form 5-methylcytosine"
ccagtaaacagtctttaaactgctggatcagtaagctgcttacagccttgcaagcgctgacgccacatctgctcggcaattcatgtgctctcaagccaaggatttagaatccatgtttgtca

SEQ ID NO: 10223 - DNA, 122 bp, Homo sapiens
  misc_feature (61)..(62): /note="This region represents a CpG dinucleotide"
  misc_feature (61)..(61): /note="Nucleotide may be methylated to form 5-methylcytosine"
atacaaaggagcattattcagccttcacaaagaaaggaaattctgacatatgctacaacacgggtgagccttgaggacataatgcaaggtgaaagaatccagtcacaaaaggacaaaaactt

SEQ ID NO: 10224 - DNA, 122 bp, Homo sapiens
  misc_feature (61)..(62): /note="This region represents a CpG dinucleotide"
  misc_feature (61)..(61): /note="Nucleotide may be methylated to form 5-methylcytosine"
ttttacagatgaggaaactatagcttagaagggttagggacttgctagagctcactaatacgtggtgaaatcaggcttcggcactacccaatactgcctcaacaggggactttgtataagtg

SEQ ID NO: 10225 - DNA, 122 bp, Homo sapiens
  misc_feature (61)..(62): /note="This region represents a CpG dinucleotide"
  misc_feature (61)..(61): /note="Nucleotide may be methylated to form 5-methylcytosine"
aagaaaataacagcatgtgcactattctatagcacattttcaatatgctatttccagccacgtgctcagcccagcaagctcttcctagcattgtttttctttgcttcatttcctcttaaatg

SEQ ID NO: 10226 - DNA, 122 bp, Homo sapiens
  misc_feature (61)..(62): /note="This region represents a CpG dinucleotide"
  misc_feature (61)..(61): /note="Nucleotide may be methylated to form 5-methylcytosine"
tccttaaggccttcattctttaaacaaacaggttgaaatggtatgttgtaaaagagaagacgggagagaggtatttagatgataagtgtacttcacaaaaatgccaaagtttgaaaaatagg

SEQ ID NO: 10227 - DNA, 122 bp, Homo sapiens
  misc_feature (61)..(62): /note="This region represents a CpG dinucleotide"
  misc_feature (61)..(61): /note="Nucleotide may be methylated to form 5-methylcytosine"
gcttactatgtgccaggcattatgctaagtggttgatgaccattatctcatttattcctccgtataccctacaggcagatgctgtcatcattctgaaattccagatacgtaactgaggttca

SEQ ID NO: 10228 - DNA, 122 bp, Homo sapiens
  misc_feature (61)..(62): /note="This region represents a CpG dinucleotide"
  misc_feature (61)..(61): /note="Nucleotide may be methylated to form 5-methylcytosine"
tgtcttatgaagcaaaatatttgctctctaaaattattttggatgacagaaaagtcatcacgtattgttaaaaataagtcagtcaaatctctaaaaacaggccaggcacggtggctcacgcc

SEQ ID NO: 10229 - DNA, 122 bp, Homo sapiens
  misc_feature (61)..(62): /note="This region represents a CpG dinucleotide"
  misc_feature (61)..(61): /note="Nucleotide may be methylated to form 5-methylcytosine"
tttccaggacaaaggtcattctttgctaagcccagaatgatccccaggatagttaatcaccgtaagaaggcacagataaaaacttttttctgtgagctactacttacatttcaccaaattca

SEQ ID NO: 10230 - DNA, 122 bp, Homo sapiens
  misc_feature (61)..(62): /note="This region represents a CpG dinucleotide"
  misc_feature (61)..(61): /note="Nucleotide may be methylated to form 5-methylcytosine"
acttccagatatttagcagaccaggctgagtcctgatgtctaaacacaggctgcaagtggcgttgcacagtcggggcgcagctatagttgctatggtagtggctggggccactggtccaagg

SEQ ID NO: 10231 - DNA, 122 bp, Homo sapiens
  misc_feature (61)..(62): /note="This region represents a CpG dinucleotide"
  misc_feature (61)..(61): /note="Nucleotide may be methylated to form 5-methylcytosine"
catgtgcaggtgtgccagctagaagctggcagtgagtgcctgcccaccccacttccaacacggagggacagacctccagagcctcaggaaagactgcaaaaataatcaaatcctcaccctgg

SEQ ID NO: 10232 - DNA, 122 bp, Homo sapiens
  misc_feature (61)..(62): /note="This region represents a CpG dinucleotide"
  misc_feature (61)..(61): /note="Nucleotide may be methylated to form 5-methylcytosine"
tcagccaggagttgccacatgactaagctctggccagaggaatgatgcaagcaaaagtgacgtgtgcagcttcttcaagaagaaattgtttgccttccataatttccatctttcttcctgga

SEQ ID NO: 10233 - DNA, 122 bp, Homo sapiens
  misc_feature (61)..(62): /note="This region represents a CpG dinucleotide"
  misc_feature (61)..(61): /note="Nucleotide may be methylated to form 5-methylcytosine"
tgaacctcttatggtggcttccactttaggagtggtaggtaaccaactgccaaccaacaacgtgccagactgcatcctaaggcctttagatgaattaactctccaaatcctcacgatagtcc

SEQ ID NO: 10234 - DNA, 122 bp, Homo sapiens
  misc_feature (61)..(62): /note="This region represents a CpG dinucleotide"
  misc_feature (61)..(61): /note="Nucleotide may be methylated to form 5-methylcytosine"
gctggtcaaggaagccctgcctctcagaggcggtgacatgtgatcagtgccagacagccacgtagctatctgagggggaaatggtcaaggctgagagaacttcaagaacagaaagcaagcca

SEQ ID NO: 10235 - DNA, 122 bp, Homo sapiens
  misc_feature (61)..(62): /note="This region represents a CpG dinucleotide"
  misc_feature (61)..(61): /note="Nucleotide may be methylated to form 5-methylcytosine"
aaacataatccattacaaataagggccttacctcctaggcacatggtttatcatataaaccgtgaggaattctgctcccaatctgtgtggtgcaggcttgggtcatgacctcaagttcaaag

SEQ ID NO: 10236 - DNA, 122 bp, Homo sapiens
  misc_feature (61)..(62): /note="This region represents a CpG dinucleotide"
  misc_feature (61)..(61): /note="Nucleotide may be methylated to form 5-methylcytosine"
ctgttatcctggtcacaatgaaagtgtattcattctgggaggtcagccaaccctgtcctacgcacagcacctactactcatgatacaaatgtggtattaggtcatcacgctttggaagctgt

SEQ ID NO: 10237 - DNA, 122 bp, Homo sapiens
  misc_feature (61)..(62): /note="This region represents a CpG dinucleotide"
  misc_feature (61)..(61): /note="Nucleotide may be methylated to form 5-methylcytosine"
ggcttgtagtggcatcactccaacctttgtctatatcttcagatggttttcttctctttgcgtgtctgtggctctgtggctccatgttttcctctcttttcccttacaaagatgccagtcat

SEQ ID NO: 10238 - DNA, 122 bp, Homo sapiens
  misc_feature (61)..(62): /note="This region represents a CpG dinucleotide"
  misc_feature (61)..(61): /note="Nucleotide may be methylated to form 5-methylcytosine"
ggagcctcatcctgatgtctgacaaaggcacctcacccatcagcaaatggcagtggggggcgtggccagggacaccccccagccccggtcctctttgtgttttctttccccacctcaagaat

SEQ ID NO: 10239 - DNA, 122 bp, Homo sapiens
  misc_feature (61)..(62): /note="This region represents a CpG dinucleotide"
  misc_feature (61)..(61): /note="Nucleotide may be methylated to form 5-methylcytosine"
tccaggtgggaaggatttctatggccatgctacttttgctgtctctgcttgacaaacactcgttgttcatttcagataatttatttctgccctgcattagaagatgggtgtctgctcaacct

SEQ ID NO: 10240 - DNA, 122 bp, Homo sapiens
  misc_feature (61)..(62): /note="This region represents a CpG dinucleotide"
  misc_feature (61)..(61): /note="Nucleotide may be methylated to form 5-methylcytosine"
ttgaacctgacaaacactgaccaaggaaattggaagggagaagagaaagtgagcatcactcgaagcccttaaatggtgatagcaacatttctcaaccgatttacccctcgcagcccttcagt

SEQ ID NO: 10241 - DNA, 122 bp, Homo sapiens
  misc_feature (61)..(62): /note="This region represents a CpG dinucleotide"
  misc_feature (61)..(61): /note="Nucleotide may be methylated to form 5-methylcytosine"
ttgtcccgggacacctaggctagggtggggagagacgggccctggtggtggctcgggaggcgaagcgttgtcctcagccccgcgtggaactcgtgtctggcacagcctggctgtggcctaac

SEQ ID NO: 10242 - DNA, 122 bp, Homo sapiens
  misc_feature (61)..(62): /note="This region represents a CpG dinucleotide"
  misc_feature (61)..(61): /note="Nucleotide may be methylated to form 5-methylcytosine"
aaatgcacagggatcctactacttcttaatcagaaagctaaaaatatgtgcattcagaaacgatgtttgctgaagtacttgcaagcctaagcctcttcattctaaaagggatatatccaagg

SEQ ID NO: 10243 - DNA, 122 bp, Homo sapiens
  misc_feature (61)..(62): /note="This region represents a CpG dinucleotide"
  misc_feature (61)..(61): /note="Nucleotide may be methylated to form 5-methylcytosine"
ccaggatacaatccagagacaatgacaaatgggggattcccgcttctgcagaaggtggggcgactggtgcccaggggcccccaggaagtgcccttacctgactcccaggatcctcctctgtg

SEQ ID NO: 10244 - DNA, 122 bp, Homo sapiens
  misc_feature (61)..(62): /note="This region represents a CpG dinucleotide"
  misc_feature (61)..(61): /note="Nucleotide may be methylated to form 5-methylcytosine"
tggaatgaaacagcaaagataccggggacaaatcattcttgttgcagaattccttcaatccgccatctttttgttctagtcttgataacgggaataacatccacaaaacgcaaggtggcgct

SEQ ID NO: 10245 - DNA, 122 bp, Homo sapiens
  misc_feature (61)..(62): /note="This region represents a CpG dinucleotide"
  misc_feature (61)..(61): /note="Nucleotide may be methylated to form 5-methylcytosine"
ttttttttttttttttaccttggagcaggaatcttaaaggcagccacatgcagtggctcacgcctgtaatcccagcactttgggaggccgaggcgggtggattgcctgagatcaggagtttg

SEQ ID NO: 10246 - DNA, 122 bp, Homo sapiens
  misc_feature (61)..(62): /note="This region represents a CpG dinucleotide"
  misc_feature (61)..(61): /note="Nucleotide may be methylated to form 5-methylcytosine"
acgcgagagggagggcagagctgggggcccggaggactggccaaccctggcccgggccagcgggcgcgccccgaccagaaatagccagattcctccagcttcctccgccgccgccacccacg

SEQ ID NO: 10247 - DNA, 122 bp, Homo sapiens
  misc_feature (61)..(62): /note="This region represents a CpG dinucleotide"
  misc_feature (61)..(61): /note="Nucleotide may be methylated to form 5-methylcytosine"
ctgggagcagctttctatgaatcagagaaaatgcaagttaaaaggagacaccatttcccacgcattagactggtaaatatcaggaaataccaagtcttgctgaggaggaggggcccagggag

SEQ ID NO: 10248 - DNA, 122 bp, Homo sapiens
  misc_feature (61)..(62): /note="This region represents a CpG dinucleotide"
  misc_feature (61)..(61): /note="Nucleotide may be methylated to form 5-methylcytosine"
gaaacagaggaagccagtgtttagagagactcgcaatgggcacacagagacaaacagaggcgggcttcagacaaactgaaagagcaacctcagcacaggacagtttggtttctgattctatt

SEQ ID NO: 10249 - DNA, 122 bp, Homo sapiens
  misc_feature (61)..(62): /note="This region represents a CpG dinucleotide"
  misc_feature (61)..(61): /note="Nucleotide may be methylated to form 5-methylcytosine"
agtcttgctctgtagcccaggctggagtgcagtggtgcaatctcggctcactacaacctccgtgtggctataacttttgcagtttgaggtgtgtcagcaagactaacatgaatttctttttc

SEQ ID NO: 10250 - DNA, 122 bp, Homo sapiens
  misc_feature (61)..(62): /note="This region represents a CpG dinucleotide"
  misc_feature (61)..(61): /note="Nucleotide may be methylated to form 5-methylcytosine"
tgtattaactcaattattcctcacaataaacctagcctctgtattttacaattagagaaacggaaccattgaggattacaataactcatccaaggccacacagttagtgaggggcagagcca

SEQ ID NO: 10251 - DNA, 122 bp, Homo sapiens
  misc_feature (61)..(62): /note="This region represents a CpG dinucleotide"
  misc_feature (61)..(61): /note="Nucleotide may be methylated to form 5-methylcytosine"
ggtgggctgcaccccaaagggagcaggttgatctgtcttataggggcctagctgctgtgacgtgcctgtcattgaatgtttaggagggatttctttggtgcctgcacagtggttcaacacgc

SEQ ID NO: 10252 - DNA, 122 bp, Homo sapiens
  misc_feature (61)..(62): /note="This region represents a CpG dinucleotide"
  misc_feature (61)..(61): /note="Nucleotide may be methylated to form 5-methylcytosine"
tcgtggaagttctctcggtcttcccctcatgtcagaagatagtatctcagttctaattatcgggtctcaacctgacaacttcctaagcacaaagaaactggctggggggcaaaagagcctac

SEQ ID NO: 10253 - DNA, 122 bp, Homo sapiens
  misc_feature (61)..(62): /note="This region represents a CpG dinucleotide"
  misc_feature (61)..(61): /note="Nucleotide may be methylated to form 5-methylcytosine"
ggtctagtcttccccgaagggagcttgccaggctctgcgacaggcttggaagttggagcccgggccctgggttctctcagcttccagctcaggaggcggagtgggaggagcgggcctggcgg

SEQ ID NO: 10254 - DNA, 122 bp, Homo sapiens
  misc_feature (61)..(62): /note="This region represents a CpG dinucleotide"
  misc_feature (61)..(61): /note="Nucleotide may be methylated to form 5-methylcytosine"
ccttgtcctgcactcagccccagacactgtcagacacaccgccctccccgccatgcctctcgcagaccctcccagaaaaccaagcatctcccaggagtctccagggatctccaggactctgg

SEQ ID NO: 10255 - DNA, 122 bp, Homo sapiens
  misc_feature (61)..(62): /note="This region represents a CpG dinucleotide"
  misc_feature (61)..(61): /note="Nucleotide may be methylated to form 5-methylcytosine"
gcagagctgcgtggaaaggcgcggggcgcctgcgtggcgaaggaactcagctgcctgacacgcccgcaagtaccacggacctgctccggcctcggcctctgcgggccaaacgcggagcgagg

SEQ ID NO: 10256 - DNA, 122 bp, Homo sapiens
  misc_feature (61)..(62): /note="This region represents a CpG dinucleotide"
  misc_feature (61)..(61): /note="Nucleotide may be methylated to form 5-methylcytosine"
gtttattgctgcacatggttaagcttccttttggctttggttggagagggtggagaaaagcgggaggggcatggcctgtgacctggtcacaaagtaccttccacagtcctttactttaaggt

SEQ ID NO: 10257 - DNA, 122 bp, Homo sapiens
  misc_feature (61)..(62): /note="This region represents a CpG dinucleotide"
  misc_feature (61)..(61): /note="Nucleotide may be methylated to form 5-methylcytosine"
cttcctatcttacttctccatcagctgctgaaatgcattttcccctctcctcacaaatgccgttgtcctggggcggccgtgcccataccttcattgcttcctgggcctgctctgtggctata

SEQ ID NO: 10258 - DNA, 122 bp, Homo sapiens
  misc_feature (61)..(62): /note="This region represents a CpG dinucleotide"
  misc_feature (61)..(61): /note="Nucleotide may be methylated to form 5-methylcytosine"
agaacaaagccgcctcttcctgggaactcttgggcaatgcctcactgcttatcaggtgctcgtcctgttggtgggtttgattcttttatttgtaaaatgcctcaggagcctccctcctgagg

SEQ ID NO: 10259 - DNA, 122 bp, Homo sapiens
  misc_feature (61)..(62): /note="This region represents a CpG dinucleotide"
  misc_feature (61)..(61): /note="Nucleotide may be methylated to form 5-methylcytosine"
aacaataatgctatttgcaaagtttaatccagtataagaacatttcttccttccctaacacgtaagtgctcagcaatgataaacacatggggatagagtagaaaacctcccccttttcatgc

SEQ ID NO: 10260 - DNA, 122 bp, Homo sapiens
  misc_feature (61)..(62): /note="This region represents a CpG dinucleotide"
  misc_feature (61)..(61): /note="Nucleotide may be methylated to form 5-methylcytosine"
gtgctggctactacagtgagactacttcccagggagtgtggtttatcagaagacacatgacgtctgtttttctttgagttgttaatattagcagatactataaagaaaaactttttctttct

SEQ ID NO: 10261 - DNA, 122 bp, Homo sapiens
  misc_feature (61)..(62): /note="This region represents a CpG dinucleotide"
  misc_feature (61)..(61): /note="Nucleotide may be methylated to form 5-methylcytosine"
ggcaccatggagtgcgcagccctggctgcactttgccctctgcagctggtgtcctcacagcggctgctccagactggccgctgctgccatcattgccagtaatcccagggattctggtgatt

SEQ ID NO: 10262 - DNA, 122 bp, Homo sapiens
  misc_feature (61)..(62): /note="This region represents a CpG dinucleotide"
  misc_feature (61)..(61): /note="Nucleotide may be methylated to form 5-methylcytosine"
ggagaaaaccggacagagcaatggacaccaaacacgcaacggacacacaacactgagctccgcgggtccggaaacaaacacccagccaggtggtggaaggccgccccttcctccgaggctgg

SEQ ID NO: 10263 - DNA, 122 bp, Homo sapiens
  misc_feature (61)..(62): /note="This region represents a CpG dinucleotide"
  misc_feature (61)..(61): /note="Nucleotide may be methylated to form 5-methylcytosine"
gtcgtagaccgcgtgtttgttttgaggctatatttagtttcctctttgctctctctgccacgcttgaacaacttgccaaggatgccatctctcttacgtccgccgtggtgctccggattctg

SEQ ID NO: 10264 - DNA, 122 bp, Homo sapiens
  misc_feature (61)..(62): /note="This region represents a CpG dinucleotide"
  misc_feature (61)..(61): /note="Nucleotide may be methylated to form 5-methylcytosine"
tgattttaaaaatatttacaattgagatgataaaacaactcatttgtcattggaaaattgcgctacaccacacaactttgtgcttcaggttttcggatggaggtggctgcagaccttaggta

SEQ ID NO: 10265 - DNA, 122 bp, Homo sapiens
  misc_feature (61)..(62): /note="This region represents a CpG dinucleotide"
  misc_feature (61)..(61): /note="Nucleotide may be methylated to form 5-methylcytosine"
tctcgagggtttataatggatacatgcatataggcacatgtatatattaatggttttatacgtatagctaagtcatctgtgctctgtggtttgattgcaaaagctgaaaaaataaataatat

SEQ ID NO: 10266 - DNA, 122 bp, Homo sapiens
  misc_feature (61)..(62): /note="This region represents a CpG dinucleotide"
  misc_feature (61)..(61): /note="Nucleotide may be methylated to form 5-methylcytosine"
ttctccacgcctcctgtgtctctgcatccctgataacaccctgcagactctgagcacctgcggccacgcctgcaggcagcagcctcacctgcgctcacgctgcgccctcaccggagcacctg

SEQ ID NO: 10267 - DNA, 122 bp, Homo sapiens
  misc_feature (61)..(62): /note="This region represents a CpG dinucleotide"
  misc_feature (61)..(61): /note="Nucleotide may be methylated to form 5-methylcytosine"
ttcccttggtcaagtcacttcccttcttggagattttagttttcctgtcgataaagtaggcgtgatgatatcttcctatcaggttgatgtgagatttcaatgaagctccgcatacaaaatgc

SEQ ID NO: 10268 - DNA, 122 bp, Homo sapiens
  misc_feature (61)..(62): /note="This region represents a CpG dinucleotide"
  misc_feature (61)..(61): /note="Nucleotide may be methylated to form 5-methylcytosine"
gccaggagaggtgtggctggctgtgtgaccctgggctggccacctttctgcaccaggcctcggtcctctcatctgcccaatgggaggctggcttctcctggggtcaggcacctaggcacccc

SEQ ID NO: 10269 - DNA, 122 bp, Homo sapiens
  misc_feature (61)..(62): /note="This region represents a CpG dinucleotide"
  misc_feature (61)..(61): /note="Nucleotide may be methylated to form 5-methylcytosine"
aggaggcattccatgtagcaaaaatggcattcagacacttcaagatccatgtgagaaaatcgttgacaccatcttatgtggggtcgaatgactttgagaatgctgtcttggattatgtcatt

SEQ ID NO: 10270 - DNA, 122 bp, Homo sapiens
  misc_feature (61)..(62): /note="This region represents a CpG dinucleotide"
  misc_feature (61)..(61): /note="Nucleotide may be methylated to form 5-methylcytosine"
gttgatgttctttagcttgccttgataagaagttctggtcacccaaaggtttttcccaaacgtggcttccttttgtgattgctgcttgctgtgctgagtggcagtccccggtgttccagttc

SEQ ID NO: 10271 - DNA, 122 bp, Homo sapiens
  misc_feature (61)..(62): /note="This region represents a CpG dinucleotide"
  misc_feature (61)..(61): /note="Nucleotide may be methylated to form 5-methylcytosine"
tcagctgtgattttgtttgattttagggattattctttttctgaatctgagcaatgttagcgtgtaaaatactcacgcccacagctttgactgggtgagaagttatcataaatcatattgag

SEQ ID NO: 10272 - DNA, 122 bp, Homo sapiens
  misc_feature (61)..(62): /note="This region represents a CpG dinucleotide"
  misc_feature (61)..(61): /note="Nucleotide may be methylated to form 5-methylcytosine"
aaagcacatatttttttctgtctgggaaagtcaggatattggggcttaaagtataagttgcggttcaccaggcagagagggacacaaaaaatattccaggaagacagaacagtatgttcaag

SEQ ID NO: 10273 - DNA, 122 bp, Homo sapiens
  misc_feature (61)..(62): /note="This region represents a CpG dinucleotide"
  misc_feature (61)..(61): /note="Nucleotide may be methylated to form 5-methylcytosine"
gagtgcagtggcatgaccacggctcagtgcaggcttgacttccagggctcaagcaatactcgcacctcaggttttccagtagctgggaaaacaggtgcgcaccacaatgccctgctaatttt

SEQ ID NO: 10274 - DNA, 122 bp, Homo sapiens
  misc_feature (61)..(62): /note="This region represents a CpG dinucleotide"
  misc_feature (61)..(61): /note="Nucleotide may be methylated to form 5-methylcytosine"
ggaaccaggaaactggatgacaaaaggatgacaaatgctgacaaacgctatcatgggaaacggacatgaacacagagcagagcccccacagccagtctatggagtaatccaggagggcttcc

SEQ ID NO: 10275 - DNA, 122 bp, Homo sapiens
  misc_feature (61)..(62): /note="This region represents a CpG dinucleotide"
  misc_feature (61)..(61): /note="Nucleotide may be methylated to form 5-methylcytosine"
acccaaacctctgtcatcgtcaagagatggaaagatgaggaaatcatgagcaagaacacacgtctttctagccagtcagatgcctggttctatcagtccctgtgtccttggctgtcagtccc

SEQ ID NO: 10276 - DNA, 122 bp, Homo sapiens
  misc_feature (61)..(62): /note="This region represents a CpG dinucleotide"
  misc_feature (61)..(61): /note="Nucleotide may be methylated to form 5-methylcytosine"
tgactctcttctcccatctcttttaaaactgagggtaccaccaacaccccaactggagcacgtacagtttctgctgacattcctaagccggtcagccaaaggactctgctgtttgtgagcag

SEQ ID NO: 10277 - DNA, 122 bp, Homo sapiens
  misc_feature (61)..(62): /note="This region represents a CpG dinucleotide"
  misc_feature (61)..(61): /note="Nucleotide may be methylated to form 5-methylcytosine"
atgtcattcagcaggaaggtgacatttggaggagaggctttgagcaccccaggatgtggtcgccagtcacagagcagaagaggcggaagctgctgagagctctgttggctcttggaaccaaa

SEQ ID NO: 10278 - DNA, 122 bp, Homo sapiens
  misc_feature (61)..(62): /note="This region represents a CpG dinucleotide"
  misc_feature (61)..(61): /note="Nucleotide may be methylated to form 5-methylcytosine"
agctttgacctagccttgctgcatttggtcaactaagtccctttctatcttctcctatcacggtgcttactgattacccaattacccaatatgtctacagaggcaatggaaacagagtagag

SEQ ID NO: 10279 - DNA, 122 bp, Homo sapiens
  misc_feature (61)..(62): /note="This region represents a CpG dinucleotide"
  misc_feature (61)..(61): /note="Nucleotide may be methylated to form 5-methylcytosine"
gccagctgggccctgccgtgcgcctggacccacagcacaaggagggctggccttgacctgcgacagctttgaggccaggcctgtcactcaccaaacacaggcttagcagcctgcatagctca

SEQ ID NO: 10280 - DNA, 122 bp, Homo sapiens
  misc_feature (61)..(62): /note="This region represents a CpG dinucleotide"
  misc_feature (61)..(61): /note="Nucleotide may be methylated to form 5-methylcytosine"
tatatttccttgtgaacagtctgtacttggcatgttgtcattataacactgccatcatgccgcctgtgatacactactaggtggagcacaggacagaggacccagaaaagaagaaacacaga

SEQ ID NO: 10281 - DNA, 122 bp, Homo sapiens
  misc_feature (61)..(62): /note="This region represents a CpG dinucleotide"
  misc_feature (61)..(61): /note="Nucleotide may be methylated to form 5-methylcytosine"
ccgccacctccaggggcagcctctgctgccggctcacatgtgaggagggagctgctgccccggcctctgagagaagcccagtctgttctggtcaagcaagaagcaagtggaccagggaggag

SEQ ID NO: 10282 - DNA, 122 bp, Homo sapiens
  misc_feature (61)..(62): /note="This region represents a CpG dinucleotide"
  misc_feature (61)..(61): /note="Nucleotide may be methylated to form 5-methylcytosine"
ccttccttccctccaagtagggataatgctatgggttagagacattcaacagaggcctgccgcaggtggctggagatggaaagaggaggaggttagggtccccctgggagacagaggggagg

SEQ ID NO: 10283 - DNA, 122 bp, Homo sapiens
  misc_feature (61)..(62): /note="This region represents a CpG dinucleotide"
  misc_feature (61)..(61): /note="Nucleotide may be methylated to form 5-methylcytosine"
agcaggagcctagagcacctcccgaggccccgggatacccttttccccagacagctatgccgcctgctgatttcccaggccagcctgcccatctgggctgacacaagagatgggctgagcca

SEQ ID NO: 10284 - DNA, 122 bp, Homo sapiens
  misc_feature (61)..(62): /note="This region represents a CpG dinucleotide"
  misc_feature (61)..(61): /note="Nucleotide may be methylated to form 5-methylcytosine"
ggtttgaaatatctgctgtgatttatagagacaagctttgacctggctaattaacaaaagcgcatactagggccaatcttacaaatgcttggacagtaaaattaactccgttttaaaaggtg

SEQ ID NO: 10285 - DNA, 122 bp, Homo sapiens
  misc_feature (61)..(62): /note="This region represents a CpG dinucleotide"
  misc_feature (61)..(61): /note="Nucleotide may be methylated to form 5-methylcytosine"
tgtgattcttcagttgcttcaggccatccggatacttacacgtgcaagcttgggctcagacgcctgacattgcccatggctggtttgaactcctgagatcaagcaatctaactgccttggcc

SEQ ID NO: 10286 - DNA, 122 bp, Homo sapiens
  misc_feature (61)..(62): /note="This region represents a CpG dinucleotide"
  misc_feature (61)..(61): /note="Nucleotide may be methylated to form 5-methylcytosine"
gagctccctctttagtcagctggtgtgatttcctcaacaggctttactagagccgtactccgttgagcaaccattaatggtattgaatgcatgacaactactatggccatttctttaaacat

SEQ ID NO: 10287 - DNA, 122 bp, Homo sapiens
  misc_feature (61)..(62): /note="This region represents a CpG dinucleotide"
  misc_feature (61)..(61): /note="Nucleotide may be methylated to form 5-methylcytosine"
tacacacaggcaaactagatcctgtgaggacaaattgcaacctgcatctgtatttccttgcgtccaacctcagtgatgtgagggacttataggattaggtagtacctttggcaacactgctg

SEQ ID NO: 10288 - DNA, 122 bp, Homo sapiens
  misc_feature (61)..(62): /note="This region represents a CpG dinucleotide"
  misc_feature (61)..(61): /note="Nucleotide may be methylated to form 5-methylcytosine"
ctctcttgtttacagaattcccaaggactcactctgttttatatctttactgccattcaacggcagtggacaaacagattagcagatctcagacatagaaatgatatctggactaaagtttc

SEQ ID NO: 10289 - DNA, 122 bp, Homo sapiens
  misc_feature (61)..(62): /note="This region represents a CpG dinucleotide"
  misc_feature (61)..(61): /note="Nucleotide may be methylated to form 5-methylcytosine"
cttgaatgcagaggagtacatttgttcatttttacaattattctattatttatactgaggcgtctttgagaggatgatatatatatggggagaagtagttaccccttggacaaaagagacaa

SEQ ID NO: 10290 - DNA, 122 bp, Homo sapiens
  misc_feature (61)..(62): /note="This region represents a CpG dinucleotide"
  misc_feature (61)..(61): /note="Nucleotide may be methylated to form 5-methylcytosine"
gcagaactattttaatagccttttttgcagtttcctcttccttcagctctattcaagccacgcttcctggtgactttatttacgttcttcaaatacagatatggttatttcttctccactca

SEQ ID NO: 10291 - DNA, 122 bp, Homo sapiens
  misc_feature (61)..(62): /note="This region represents a CpG dinucleotide"
  misc_feature (61)..(61): /note="Nucleotide may be methylated to form 5-methylcytosine"
gttgtttcagaaatcttgtgattttaaggtttctagaattttccttcgctacaagtctaacgctaatgcttgaaggttagagagaagtcataaaataataaagcaacagtatcattatataa

SEQ ID NO: 10292 - DNA, 122 bp, Homo sapiens
  misc_feature (61)..(62): /note="This region represents a CpG dinucleotide"
  misc_feature (61)..(61): /note="Nucleotide may be methylated to form 5-methylcytosine"
tttataccccagaatccagtacagtgtttagtagacagtgtgcactcaataaatgcttgccgaaagaaaaaaaatactaggcaatggaattgcatccaaatagagtaacaacaaaataacta

SEQ ID NO: 10293 - DNA, 122 bp, Homo sapiens
  misc_feature (61)..(62): /note="This region represents a CpG dinucleotide"
  misc_feature (61)..(61): /note="Nucleotide may be methylated to form 5-methylcytosine"
aattgaatatgttctcctagccactgctctaccccagctcccagctcttctgaagtgtcacggttcatttcaacagcacgagtaaggcagtttccaggccctgtgcataatgagccatgtgg

SEQ ID NO: 10294 - DNA, 122 bp, Homo sapiens
  misc_feature (61)..(62): /note="This region represents a CpG dinucleotide"
  misc_feature (61)..(61): /note="Nucleotide may be methylated to form 5-methylcytosine"
gcctgctggagatttgtggatggcagagcaatggtggcttggggacagatcaggtcagatcgtgtgggagatgtgggtgggggcgtggatggggaggggtgtgagaggagccatttctctct

SEQ ID NO: 10295 - DNA, 122 bp, Homo sapiens
  misc_feature (61)..(62): /note="This region represents a CpG dinucleotide"
  misc_feature (61)..(61): /note="Nucleotide may be methylated to form 5-methylcytosine"
tcccaggaggctttacagtcaccatttagagttctcctttggggttagtgacggcatgaacgcccacagctacgtaccaactgaagtcagagacgtggttttacagtggagccaactgacgt

SEQ ID NO: 10296 - DNA, 122 bp, Homo sapiens
  misc_feature (61)..(62): /note="This region represents a CpG dinucleotide"
  misc_feature (61)..(61): /note="Nucleotide may be methylated to form 5-methylcytosine"
gtgcttagcacagacctatcattgtgtagctgtcaatgccttagctttagaagaataaaacgcatatctccacctcctatgtcatttgacagcttattaataaaacttgataatcattatgc

SEQ ID NO: 10297 - DNA, 122 bp, Homo sapiens
  misc_feature (61)..(62): /note="This region represents a CpG dinucleotide"
  misc_feature (61)..(61): /note="Nucleotide may be methylated to form 5-methylcytosine"
ttgtagggtagggtgcatgtgactgccacactggcttcttggtgttcatcaccagacaaacgtctgttttcctgccatgatgctaaccatgtttagcatttgtgtccacttggtatgataac

SEQ ID NO: 10298 - DNA, 122 bp, Homo sapiens
  misc_feature (61)..(62): /note="This region represents a CpG dinucleotide"
  misc_feature (61)..(61): /note="Nucleotide may be methylated to form 5-methylcytosine"
gttttgatagttacctttgtcacactgtcttctgtattatgtttgccctcagcaacatgtcgtatctggcacagggctgacatcctgtttgtgctcagtcatttgtggaaggaagaagtcag

SEQ ID NO: 10299 - DNA, 122 bp, Homo sapiens
  misc_feature (61)..(62): /note="This region represents a CpG dinucleotide"
  misc_feature (61)..(61): /note="Nucleotide may be methylated to form 5-methylcytosine"
acatcagtttacaaaataaaagttcttacgtaagaaatgttagtcaccagtgtgatgaaacgtagaatgaaaccttaaactgtgttaatagaaatgtggtgtcagaatcatagatggtagtg

SEQ ID NO: 10300 - DNA, 122 bp, Homo sapiens
  misc_feature (61)..(62): /note="This region represents a CpG dinucleotide"
  misc_feature (61)..(61): /note="Nucleotide may be methylated to form 5-methylcytosine"
tcttttttggttccatatgaactttaaagtagtttttccagatggaggtggcgggcggcacggagcgggcgtgctgagccccggccgccggcccggcatgggcgtctcccgcgggccctccg

SEQ ID NO: 10301 - DNA, 122 bp, Homo sapiens
  misc_feature (61)..(62): /note="This region represents a CpG dinucleotide"
  misc_feature (61)..(61): /note="Nucleotide may be methylated to form 5-methylcytosine"
atagtttcaggtatatttttgctgcacagtcagtccgagtgtaccacgtagggcaaaccacgtaacttctcagggccttgactgtttcatttgtaaaccagagaaaaggacttgggtgacct

SEQ ID NO: 10302 - DNA, 122 bp, Homo sapiens
  misc_feature (61)..(62): /note="This region represents a CpG dinucleotide"
  misc_feature (61)..(61): /note="Nucleotide may be methylated to form 5-methylcytosine"
tcaccctgagagattctgatctcctgggtctgggcctgaagatggggctatttaaaagcccgctgggtaactgacatgcagccagggctgacttacaacagctttctgattatctccatttc

SEQ ID NO: 10303 - DNA, 122 bp, Homo sapiens
  misc_feature (61)..(62): /note="This region represents a CpG dinucleotide"
  misc_feature (61)..(61): /note="Nucleotide may be methylated to form 5-methylcytosine"
cctgtggcccatgttcctgagagcagctcagttcaggagggtctctcctcctagacaccacgcaaggcaccctgagggccagacacacccatgcataaatcccctttcatcctgagactttg

SEQ ID NO: 10304 - DNA, 122 bp, Homo sapiens
  misc_feature (61)..(62): /note="This region represents a CpG dinucleotide"
  misc_feature (61)..(61): /note="Nucleotide may be methylated to form 5-methylcytosine"
gagtgatacaaattgttgacgtactgattaatgtaagacctactgacaaagaacaaaggacgcagatttatttctgagtcatgaggttttactgattgtcacacaggtagacattttagcac

SEQ ID NO: 10305 - DNA, 122 bp, Homo sapiens
  misc_feature (61)..(62): /note="This region represents a CpG dinucleotide"
  misc_feature (61)..(61): /note="Nucleotide may be methylated to form 5-methylcytosine"
agagaagtaggttgggaatgttgggacatgggctattgcagcataagtgactggcggtggcggcctgccaacatttaaaaaaaattgtttggctgcacctgtctaggaatccttctttttaa

SEQ ID NO: 10306 - DNA, 122 bp, Homo sapiens
  misc_feature (61)..(62): /note="This region represents a CpG dinucleotide"
  misc_feature (61)..(61): /note="Nucleotide may be methylated to form 5-methylcytosine"
gtgcgtattgcctcagtggaggcgctccgctggtcctcctagagtttggtgccctgccgccgctgccccgccacgactgcggctgcggctgctccgggcagtgctgcggccgccgcgggccc

SEQ ID NO: 10307 - DNA, 122 bp, Homo sapiens
  misc_feature (61)..(62): /note="This region represents a CpG dinucleotide"
  misc_feature (61)..(61): /note="Nucleotide may be methylated to form 5-methylcytosine"
gaggtaacactgagtagcaggaaagatttgtgcctcaaatgcttctgtcctagacagtaacggtagaagttattagcacaatatgcaggtgccagcattataggtctggccagcttaggaaa

SEQ ID NO: 10308 - DNA, 122 bp, Homo sapiens
  misc_feature (61)..(62): /note="This region represents a CpG dinucleotide"
  misc_feature (61)..(61): /note="Nucleotide may be methylated to form 5-methylcytosine"
aaaacgattctcatttatttcccctgcatctgtactttcctcttaccatcccctccccttcgttaatgaaattcctgtctaagaggtgaaagattccccatgggcttgcgaataaaaagcca

SEQ ID NO: 10309 - DNA, 122 bp, Homo sapiens
  misc_feature (61)..(62): /note="This region represents a CpG dinucleotide"
  misc_feature (61)..(61): /note="Nucleotide may be methylated to form 5-methylcytosine"
ttccctctagtattgtgaagcagattattagatttgagaagatgtgttccacaaatgtctcgaaagagtccaggagtggaggctgctaaatggtttgcttaattctaatgctttatacagat

SEQ ID NO: 10310 - DNA, 122 bp, Homo sapiens
  misc_feature (61)..(62): /note="This region represents a CpG dinucleotide"
  misc_feature (61)..(61): /note="Nucleotide may be methylated to form 5-methylcytosine"
aggcggagcccccttggagtttggctccctcccagaagcagtcgaggggggtgaggatcacgcacggaaacagcttctcaatcatctgccagggataccccgggccacgtcagtcctgcccc

SEQ ID NO: 10311 - DNA, 122 bp, Homo sapiens
  misc_feature (61)..(62): /note="This region represents a CpG dinucleotide"
  misc_feature (61)..(61): /note="Nucleotide may be methylated to form 5-methylcytosine"
ggtctctgctccgcactgcgctggtaagagcctgggaagagatgctgtctgtggtgagcacgtgatagacattccacgacccgacctgtcggtgccctggttctcattgtttcttctcattt

SEQ ID NO: 10312 - DNA, 122 bp, Homo sapiens
  misc_feature (61)..(62): /note="This region represents a CpG dinucleotide"
  misc_feature (61)..(61): /note="Nucleotide may be methylated to form 5-methylcytosine"
cctcgtgtgttagggtgggtccttgctgcaataacaaacaaccccagatctcagtaactgcgtgcaatgaaacacctgcttctccctcacacgaagccgaatgtgatggtttctagttacat

SEQ ID NO: 10313 - DNA, 122 bp, Homo sapiens
  misc_feature (61)..(62): /note="This region represents a CpG dinucleotide"
  misc_feature (61)..(61): /note="Nucleotide may be methylated to form 5-methylcytosine"
atctgaggcatgtaccaatgacagccagttcactcattcatcccgtaattatgtattgaacgcctactatgtctgtcttgctcaccaatgcattcccagcccctatcacactacccgtcact

SEQ ID NO: 10314 - DNA, 122 bp, Homo sapiens
  misc_feature (61)..(62): /note="This region represents a CpG dinucleotide"
  misc_feature (61)..(61): /note="Nucleotide may be methylated to form 5-methylcytosine"
ctgactggggttacatcagccttgagtcagcctctgggtgggggggcaattttgggggtgcgctctgtcccttaccttgccagctccccagaacctctcctctttggtcacccatcgtcagg

SEQ ID NO: 10315 - DNA, 122 bp, Homo sapiens
  misc_feature (61)..(62): /note="This region represents a CpG dinucleotide"
  misc_feature (61)..(61): /note="Nucleotide may be methylated to form 5-methylcytosine"
tcactgccacgtgggcagccaacagccagtagctagagaccagcctcggtcttcggcctgcgggttctgcaaagtcaggctagctggctctccgcctgctccgcaccccggcgaggttccgg

SEQ ID NO: 10316 - DNA, 122 bp, Homo sapiens
  misc_feature (61)..(62): /note="This region represents a CpG dinucleotide"
  misc_feature (61)..(61): /note="Nucleotide may be methylated to form 5-methylcytosine"
ccagggacctcatttcaagggtccctccttctgtttctcacaggaagactaggaaatactcgtgctaacagattccattggctgccttaactgtcccaaaatcccagaatcagccccaatcc

SEQ ID NO: 10317 - DNA, 122 bp, Homo sapiens
  misc_feature (61)..(62): /note="This region represents a CpG dinucleotide"
  misc_feature (61)..(61): /note="Nucleotide may be methylated to form 5-methylcytosine"
cacttgcccttaaccagctgtacttgagctcaagtccagcttacttggactgagctgttacgttcatccctgattcattcattgaacaaatagttattgagtgcctgtcatgtgccagccct

SEQ ID NO: 10318 - DNA, 122 bp, Homo sapiens
  misc_feature (61)..(62): /note="This region represents a CpG dinucleotide"
  misc_feature (61)..(61): /note="Nucleotide may be methylated to form 5-methylcytosine"
cgaaagggcaggttggagcagagtggaggcaaagtgtttcctcatgagttaaggacaggacgtggattgctctggggaagctatgtcaaccaaacctaccatgtccagacagttcttatgta

SEQ ID NO: 10319 - DNA, 122 bp, Homo sapiens
  misc_feature (61)..(62): /note="This region represents a CpG dinucleotide"
  misc_feature (61)..(61): /note="Nucleotide may be methylated to form 5-methylcytosine"
gacagtcacctgatctccttcaaggaaacttaagttccttgttgatcagggccaatgtaccgccagtctcttcctccaaacagagcacacacagcccggcaaatccttgaagggaaggaatg

SEQ ID NO: 10320 - DNA, 122 bp, Homo sapiens
  misc_feature (61)..(62): /note="This region represents a CpG dinucleotide"
  misc_feature (61)..(61): /note="Nucleotide may be methylated to form 5-methylcytosine"
tgctccaaaatgtaatacattttgagcacccacatgatgtcgcaattagaaaatcccacacgtgacctcatatgctgggttgcagtcaaactgcagtcacacaacacagttcattcagcaac

SEQ ID NO: 10321 - DNA, 122 bp, Homo sapiens
  misc_feature (61)..(62): /note="This region represents a CpG dinucleotide"
  misc_feature (61)..(61): /note="Nucleotide may be methylated to form 5-methylcytosine"
catccaggttgtggtattttattagacactggggctgactgagacagctgggtcctccgccgagggtcccatcgggctgaaactgtccactggcagcatcctcactggggggctggactggg

SEQ ID NO: 10322 - DNA, 122 bp, Homo sapiens
  misc_feature (61)..(62): /note="This region represents a CpG dinucleotide"
  misc_feature (61)..(61): /note="Nucleotide may be methylated to form 5-methylcytosine"
aatgaaatccccggaagtgtgtctgccaacaatccttttattttggctttacctgctgttcgcctgatgcctgtaaacctttcccgagtgttgattttcggaagggtgctttgcagggtgga

SEQ ID NO: 10323 - DNA, 122 bp, Homo sapiens
  misc_feature (61)..(62): /note="This region represents a CpG dinucleotide"
  misc_feature (61)..(61): /note="Nucleotide may be methylated to form 5-methylcytosine"
ttatcctcaccagccagcttctggctgtccatccctctctccgactgggcagggccctctcggggagacctgttggtgccaagaaagagatctatatgcctactaagtcttcccaagaagca

SEQ ID NO: 10324 - DNA, 122 bp, Homo sapiens
  misc_feature (61)..(62): /note="This region represents a CpG dinucleotide"
  misc_feature (61)..(61): /note="Nucleotide may be methylated to form 5-methylcytosine"
gggggccccaaggaccgccctggcagcacgggcgttgcaccagcagagtaaattaaaacacggattagagcaagtatgattggggatgacaagcggggcgggtgtagccgcggaatgagccg

SEQ ID NO: 10325 - DNA, 122 bp, Homo sapiens
  misc_feature (61)..(62): /note="This region represents a CpG dinucleotide"
  misc_feature (61)..(61): /note="Nucleotide may be methylated to form 5-methylcytosine"
tccttgttctggccttgttctgagaagcggcgggcagggtggccgttgccatgtgacacacggcctgattctgagaagcggcgggcagggtggccgttgccatgtcatgcgacacacggcct

SEQ ID NO: 10326 - DNA, 122 bp, Homo sapiens
  misc_feature (61)..(62): /note="This region represents a CpG dinucleotide"
  misc_feature (61)..(61): /note="Nucleotide may be methylated to form 5-methylcytosine"
gaactatttaagtgagaaaactctgcctcttgcttttaaattagattgctctcacttactcgtaaacataggtattcttttatgggtgcttatcattccttctttcaataaatgtctgtttg

SEQ ID NO: 10327 - DNA, 122 bp, Homo sapiens
  misc_feature (61)..(62): /note="This region represents a CpG dinucleotide"
  misc_feature (61)..(61): /note="Nucleotide may be methylated to form 5-methylcytosine"
aataagaagagtgatggtcagaggaatacttaaaatcatggtcaacgcaagtaattctcacggtgttgtcctgggccaggagattcagcctcatctgataactgattggaaatctgattctc

SEQ ID NO: 10328 - DNA, 122 bp, Homo sapiens
  misc_feature (61)..(62): /note="This region represents a CpG dinucleotide"
  misc_feature (61)..(61): /note="Nucleotide may be methylated to form 5-methylcytosine"
tgaggaggctgaagtgagaggacagggagcttgtagttctcctgcaatgtatgaggtaaacgaaacagagaagcttgaaaaggggaagcagaaccctgtagaagcaccactcagggctagga

SEQ ID NO: 10329 - DNA, 122 bp, Homo sapiens
  misc_feature (61)..(62): /note="This region represents a CpG dinucleotide"
  misc_feature (61)..(61): /note="Nucleotide may be methylated to form 5-methylcytosine"
gcagacattttcgtgggctccagggacgacacttctaaaggagaggcgaggttcactggacgttttgggaaactgtaaggcaaaaataaaattctaagcctcccaaccgactgaatggacct

SEQ ID NO: 10330 - DNA, 122 bp, Homo sapiens
  misc_feature (61)..(62): /note="This region represents a CpG dinucleotide"
  misc_feature (61)..(61): /note="Nucleotide may be methylated to form 5-methylcytosine"
ctctgtctgctcattgggatcacctgagagctttgaaaaagtactactgttcaggttccacgtccagaatgttgatttaatcacgctgggtcagatctcaggtatgttgatctttacaaaac

SEQ ID NO: 10331 - DNA, 122 bp, Homo sapiens
  misc_feature (61)..(62): /note="This region represents a CpG dinucleotide"
  misc_feature (61)..(61): /note="Nucleotide may be methylated to form 5-methylcytosine"
aaagcaaaatctttgtaaatctcactctattcatttataacatagggattattattacatcgtgatgtgactaaatagtttaccttgcacaaagtttttagagcaggatctgaaacaaatta

SEQ ID NO: 10332 - DNA, 122 bp, Homo sapiens
  misc_feature (61)..(62): /note="This region represents a CpG dinucleotide"
  misc_feature (61)..(61): /note="Nucleotide may be methylated to form 5-methylcytosine"
gtttgcaggttcctgggggcctcctctgggccggcacacaagatgggctctcggcctccacgctcctgcaccttccacagaccagcgcttgttcctcgcccagggagctgccagccccaaag

SEQ ID NO: 10333 - DNA, 122 bp, Homo sapiens
  misc_feature (61)..(62): /note="This region represents a CpG dinucleotide"
  misc_feature (61)..(61): /note="Nucleotide may be methylated to form 5-methylcytosine"
tcaccacgcaggttccctgagctgggtcctcttcaccaacctccagctcccactgagcctcgaccctctccaaagtcccccggaagctgaggatgcatggcggcccccgttttccctccctc

SEQ ID NO: 10334 - DNA, 122 bp, Homo sapiens
  misc_feature (61)..(62): /note="This region represents a CpG dinucleotide"
  misc_feature (61)..(61): /note="Nucleotide may be methylated to form 5-methylcytosine"
ctggagtcatcctctgctggaccctgccccactgactcactcttgctcagagagtagcagcgatgcctctcaccactgggaaggcagcccactcctgtggatgggaaatttgttctctagtt

SEQ ID NO: 10335 - DNA, 122 bp, Homo sapiens
  misc_feature (61)..(62): /note="This region represents a CpG dinucleotide"
  misc_feature (61)..(61): /note="Nucleotide may be methylated to form 5-methylcytosine"
cattaaatgttggctgagttaaaaatgctcatttaactttctaagacccactgccgaaagcgccatctcctgaaagaatagagaactgtctccacgtctgtctgcgtgagaccaaggaaggc

SEQ ID NO: 10336 - DNA, 122 bp, Homo sapiens
  misc_feature (61)..(62): /note="This region represents a CpG dinucleotide"
  misc_feature (61)..(61): /note="Nucleotide may be methylated to form 5-methylcytosine"
tttgtgaagaggcaataaaatgctaagttaaagctcagttgattttctccagatacttgccgaattcttggcatcacattctaccatgtttccaggattcagagtgtctaagcagtgctagt

SEQ ID NO: 10337 - DNA, 122 bp, Homo sapiens
  misc_feature (61)..(62): /note="This region represents a CpG dinucleotide"
  misc_feature (61)..(61): /note="Nucleotide may be methylated to form 5-methylcytosine"
tctgcacaaatccacagcataatgcagcctctgctgggaagtgtaagagcaaatagctcacgcatatgtgtgaagtccaagtttagactatcttccaggaaaggtacaatggcaggcagagg

SEQ ID NO: 10338 - DNA, 122 bp, Homo sapiens
  misc_feature (61)..(62): /note="This region represents a CpG dinucleotide"
  misc_feature (61)..(61): /note="Nucleotide may be methylated to form 5-methylcytosine"
tagaacctcagtctaaaaagtggcttagttccccctttccccatcccaccccacacataacgagaagcctgaaggtaagtagctcagagaatgactcagtaactcaaaacctaaggctctag

SEQ ID NO: 10339 - DNA, 122 bp, Homo sapiens
  misc_feature (61)..(62): /note="This region represents a CpG dinucleotide"
  misc_feature (61)..(61): /note="Nucleotide may be methylated to form 5-methylcytosine"
tcaggcaagtgtggggcaacttctaggggccagcatatgtcactggtgtccccagcagggcgtctccaggggatcattagggtgtagtacttggctgaacacaaaagtagttgcatttgcca

SEQ ID NO: 10340 - DNA, 122 bp, Homo sapiens
  misc_feature (61)..(62): /note="This region represents a CpG dinucleotide"
  misc_feature (61)..(61): /note="Nucleotide may be methylated to form 5-methylcytosine"
tctgaagttttatcaccaacacagcagtaataagtgctggccagaaagacttctgctcttcggcaactcctgcagtttaagcctgtaaagttaggggtcattcagaggtcagtgccagctgg

SEQ ID NO: 10341 - DNA, 122 bp, Homo sapiens
  misc_feature (61)..(62): /note="This region represents a CpG dinucleotide"
  misc_feature (61)..(61): /note="Nucleotide may be methylated to form 5-methylcytosine"
tttcatcagcactccacctaagccagctgctctagccacggctgctaatgaccagctaagcgtgtccattgcttctggagcctgagaatttggtttttttgttttttttttaacaggggacc

SEQ ID NO: 10342 - DNA, 122 bp, Homo sapiens
  misc_feature (61)..(62): /note="This region represents a CpG dinucleotide"
  misc_feature (61)..(61): /note="Nucleotide may be methylated to form 5-methylcytosine"
aagccatcctcctgccttggcaccccaaagtgctgggattataggcgtgagccactgagccgagcacatatctactatattttgaatacttaaagcaggcaggcaaaataagtactctctga

SEQ ID NO: 10343 - DNA, 122 bp, Homo sapiens
  misc_feature (61)..(62): /note="This region represents a CpG dinucleotide"
  misc_feature (61)..(61): /note="Nucleotide may be methylated to form 5-methylcytosine"
tctatttacttaaagacggactgccagacttccataaacacttgtgagagaaagacagtccggttcgttgttctctgcccagccattatccacggtgtttcaagccttctgtattttggcct

SEQ ID NO: 10344 - DNA, 122 bp, Homo sapiens
  misc_feature (61)..(62): /note="This region represents a CpG dinucleotide"
  misc_feature (61)..(61): /note="Nucleotide may be methylated to form 5-methylcytosine"
aattatctaggaggtgacctgtagctcaactgagtcatgcttcctcctctctcagtcccccgaggcaggctctggacacctgctcatctcatggctgctcagccagaaaaatgtcctcctac

SEQ ID NO: 10345 - DNA, 122 bp, Homo sapiens
  misc_feature (61)..(62): /note="This region represents a CpG dinucleotide"
  misc_feature (61)..(61): /note="Nucleotide may be methylated to form 5-methylcytosine"
aggctcttctgccatgccttgggacttccctttctgtgtgagtgtgaggtaggtggattgcgcctactcagcatggattttgcacagaaagtcttgctcgcttttccttggtgtgattttta

SEQ ID NO: 10346 - DNA, 122 bp, Homo sapiens
  misc_feature (61)..(62): /note="This region represents a CpG dinucleotide"
  misc_feature (61)..(61): /note="Nucleotide may be methylated to form 5-methylcytosine"
aaaaaaattattctgagagattattatcaactgctgtgagtgcgacaagcactacatatacgaaaatagaaaatacaagagtgtaaatgtaagatggtgcgatacagtgtataatttgctaa

SEQ ID NO: 10347 - DNA, 122 bp, Homo sapiens
  misc_feature (61)..(62): /note="This region represents a CpG dinucleotide"
  misc_feature (61)..(61): /note="Nucleotide may be methylated to form 5-methylcytosine"
atcacttgcagaggcaactggtggcagcatctgactttcacttgcagtttgactacatcccgtggttggtgcttgtaaagcaatctgagaattatcaacatcctccttggtatgtgctgtag

SEQ ID NO: 10348 - DNA, 122 bp, Homo sapiens
  misc_feature (61)..(62): /note="This region represents a CpG dinucleotide"
  misc_feature (61)..(61): /note="Nucleotide may be methylated to form 5-methylcytosine"
tgagctggctgtgtgtattgagacagagagacaggaatgtggaaacagaggaatgaggtccgtgatctcctggtttttgggcacttatgcaatcgctcatccttggaggatagctatggaag

SEQ ID NO: 10349 - DNA, 122 bp, Homo sapiens
  misc_feature (61)..(62): /note="This region represents a CpG dinucleotide"
  misc_feature (61)..(61): /note="Nucleotide may be methylated to form 5-methylcytosine"
agctggtggaaagaaagcaattaatatacgaaaaatttcaaaagtgcttcagagagctgacgagagcccaagtcagttttataaaaaactttgtgaagcattccggccttacaccctatttg

SEQ ID NO: 10350 - DNA, 122 bp, Homo sapiens
  misc_feature (61)..(62): /note="This region represents a CpG dinucleotide"
  misc_feature (61)..(61): /note="Nucleotide may be methylated to form 5-methylcytosine"
cagctaagaatcaattcttctacactttacatagatacctagatgcaaatttttttcagccgaccacaaaattaggtccactctgagtggtgaaaaacaaaagattctaacattctagcaaa

SEQ ID NO: 10351 - DNA, 122 bp, Homo sapiens
  misc_feature (61)..(62): /note="This region represents a CpG dinucleotide"
  misc_feature (61)..(61): /note="Nucleotide may be methylated to form 5-methylcytosine"
gctcaaaaccggctccctctgcgagggtttcccaggttaagccatcaggaaacaggaagacgcctaagaacgatacactggactttggggactcggagggaagggtgggagggggacaagga

SEQ ID NO: 10352 - DNA, 122 bp, Homo sapiens
  misc_feature (61)..(62): /note="This region represents a CpG dinucleotide"
  misc_feature (61)..(61): /note="Nucleotide may be methylated to form 5-methylcytosine"
cttgtatccttcccttcaggatagtaagtcaccgcagttccctggcagttctagaggtgccgtcagggagctagcgattagagtcgaaagacttagaaagccacctggtgttctattgtact

SEQ ID NO: 10353 - DNA, 122 bp, Homo sapiens
  misc_feature (61)..(62): /note="This region represents a CpG dinucleotide"
  misc_feature (61)..(61): /note="Nucleotide may be methylated to form 5-methylcytosine"
attacctgtatttcatttgtaataactcttttcctttaagaaatggatttgctaaaaattcgaggtatccaacaaccaaacaggctactttgtgacctagtgagagccctgccttaggaggt

SEQ ID NO: 10354 - DNA, 122 bp, Homo sapiens
  misc_feature (61)..(62): /note="This region represents a CpG dinucleotide"
  misc_feature (61)..(61): /note="Nucleotide may be methylated to form 5-methylcytosine"
taaagattttttttcagatccctcagtcccagcattcctagtctggttaaactcgtccagcggtgcccagcactcataggacctgctttgcatcatagcctgcagacaggcttcccacacag

SEQ ID NO: 10355 - DNA, 122 bp, Homo sapiens
  misc_feature (61)..(62): /note="This region represents a CpG dinucleotide"
  misc_feature (61)..(61): /note="Nucleotide may be methylated to form 5-methylcytosine"
gtcctagataaaatatggccagcaattccattaacaaaacactgacaagacacctcagggcgagctgtacattgacaacagcatcgtcaagcagaatgcacttcagggaaaacataataagg

SEQ ID NO: 10356 - DNA, 122 bp, Homo sapiens
  misc_feature (61)..(62): /note="This region represents a CpG dinucleotide"
  misc_feature (61)..(61): /note="Nucleotide may be methylated to form 5-methylcytosine"
gcagaggctagcaggtctgtctgtccaggacaaaggtggtcctgctcgtggggcagggcccgaaccgaaggaagccctgaggtgggacgtgggaggtgggacgtgggaggtgagggagcaga

SEQ ID NO: 10357 - DNA, 122 bp, Homo sapiens
  misc_feature (61)..(62): /note="This region represents a CpG dinucleotide"
  misc_feature (61)..(61): /note="Nucleotide may be methylated to form 5-methylcytosine"
aacagctgaggccagtcttggagcagaatttgcaggcttttgtagagatctacagccgtccgtctctgggtacttgactcaaattcatagatgacttgaaggaagtcttcatacttgccagg

SEQ ID NO: 10358 - DNA, 122 bp, Homo sapiens
  misc_feature (61)..(62): /note="This region represents a CpG dinucleotide"
  misc_feature (61)..(61): /note="Nucleotide may be methylated to form 5-methylcytosine"
cagaagtacaggcactgaacaaatgcccactcgctaggcagaatgcagctgctgcccacacgttagtacccagtggtaaggtggatacaatgtgacctcagaggaccaagagttgaggtcac

SEQ ID NO: 10359 - DNA, 122 bp, Homo sapiens
  misc_feature (61)..(62): /note="This region represents a CpG dinucleotide"
  misc_feature (61)..(61): /note="Nucleotide may be methylated to form 5-methylcytosine"
caataatatttataattatttcctctgaatcacatgtagtcaggctttttcttatgctcccgtgagcttttcagtagcaaaactttgctgttgtaattgctaaggttcaatatgccatattt

SEQ ID NO: 10360 - DNA, 122 bp, Homo sapiens
  misc_feature (61)..(62): /note="This region represents a CpG dinucleotide"
  misc_feature (61)..(61): /note="Nucleotide may be methylated to form 5-methylcytosine"
ggcacagctcacgcactacgaggggaaacacactctgaagccaacacacgcaaaggcaaacgtcgacactcgcaccatcaggacagcagaaattggactagtaaaacactgagcctggcagc

SEQ ID NO: 10361 - DNA, 122 bp, Homo sapiens
  misc_feature (61)..(62): /note="This region represents a CpG dinucleotide"
  misc_feature (61)..(61): /note="Nucleotide may be methylated to form 5-methylcytosine"
ggcccaggaatgcaagtcaacagccttgagtcttactagaagaggggtgtggacaccgggcgcctttccagggtaacccaagtaggtggagtttgtggtaaggcagaaaaaggctaggactt

SEQ ID NO: 10362 - DNA, 122 bp, Homo sapiens
  misc_feature (61)..(62): /note="This region represents a CpG dinucleotide"
  misc_feature (61)..(61): /note="Nucleotide may be methylated to form 5-methylcytosine"
gctttctgcagccacacacacacaaaaagtgacacaaaagtattaggtcatacagtagcacgtaagttcagagtgcctcctagtggagtctagtgttgatcaagtaacattggaataatttt

SEQ ID NO: 10363 - DNA, 122 bp, Homo sapiens
  misc_feature (61)..(62): /note="This region represents a CpG dinucleotide"
  misc_feature (61)..(61): /note="Nucleotide may be methylated to form 5-methylcytosine"
tttcaaagtggaaactaccctatatagagtttctgaagcaccttcaaggatattatttcacgaagttgaatctaattttacagatgaggaaaccctttccagaaagataggtgggcttgcat

SEQ ID NO: 10364 - DNA, 122 bp, Homo sapiens
  misc_feature (61)..(62): /note="This region represents a CpG dinucleotide"
  misc_feature (61)..(61): /note="Nucleotide may be methylated to form 5-methylcytosine"
ggggtttacgcaaggtagtgatgaaaactaggagagaagtatctgcttccctttagtctgcgctgtggagttctgtgagtcatgttccatagacttacacatcactccagaaacatgcttca

SEQ ID NO: 10365 - DNA, 122 bp, Homo sapiens
  misc_feature (61)..(62): /note="This region represents a CpG dinucleotide"
  misc_feature (61)..(61): /note="Nucleotide may be methylated to form 5-methylcytosine"
ctcaggggagctttgctttttaattgagagatcgatgtcaggttctcatgacatcctgaacgtccattcagtgactgctgactaatggtgtgaaattggatattggagtatctgacatgtca

SEQ ID NO: 10366 - DNA, 122 bp, Homo sapiens
  misc_feature (61)..(62): /note="This region represents a CpG dinucleotide"
  misc_feature (61)..(61): /note="Nucleotide may be methylated to form 5-methylcytosine"
gtccgggggcggacccctcggcacggccgggcggggttaaagggttgggccgtgggacggcgcggtcagatcccaggtagtggcgccggtggatccggatcgagggcaggaggctgagaccc

SEQ ID NO: 10367 - DNA, 122 bp, Homo sapiens
  misc_feature (61)..(62): /note="This region represents a CpG dinucleotide"
  misc_feature (61)..(61): /note="Nucleotide may be methylated to form 5-methylcytosine"
aagtatagtgttttccctgcctacttcatgttttgttatgtttacaaaatggtactattccgctctatgtttaactcacaagcacgcagaagcggagcaggctgaagataggatgcctgtca

SEQ ID NO: 10368 - DNA, 122 bp, Homo sapiens
  misc_feature (61)..(62): /note="This region represents a CpG dinucleotide"
  misc_feature (61)..(61): /note="Nucleotide may be methylated to form 5-methylcytosine"
caaaatgtgggaagtgatgaggggtgcttgtgggaatgtctgggggtgggtggaccccatcgtgatgtgagtggcctacagggaacacccaacaaaatgagttttaaaaaggcttgtccagg

SEQ ID NO: 10369 - DNA, 122 bp, Homo sapiens
  misc_feature (61)..(62): /note="This region represents a CpG dinucleotide"
  misc_feature (61)..(61): /note="Nucleotide may be methylated to form 5-methylcytosine"
gattatttagttaatcctcataataactttgagcagtagatacagaaactgaaaagtaaacggcagaggcaggctaaaaagctaggtctgactcaaagggttttaatctcttaactaccaca

SEQ ID NO: 10370 - DNA, 122 bp, Homo sapiens
  misc_feature (61)..(62): /note="This region represents a CpG dinucleotide"
  misc_feature (61)..(61): /note="Nucleotide may be methylated to form 5-methylcytosine"
ccccaggtcccaccttggaggagggttcttggcatgaccatccctcgagcacaggtgtcccggaggccacgtgtgtggacccgttgcctgtcctcaggacttgcaggcccaggcacagggca

SEQ ID NO: 10371 - DNA, 122 bp, Homo sapiens
  misc_feature (61)..(62): /note="This region represents a CpG dinucleotide"
  misc_feature (61)..(61): /note="Nucleotide may be methylated to form 5-methylcytosine"
gttaggtacaggacaataaaggaggcaattaatctataaaaaagatcagtgactggaaggcgaataggtctggcctctggttgtttacagaacaagaacaatgaggaagagagctaatttat

SEQ ID NO: 10372 - DNA, 122 bp, Homo sapiens
  misc_feature (61)..(62): /note="This region represents a CpG dinucleotide"
  misc_feature (61)..(61): /note="Nucleotide may be methylated to form 5-methylcytosine"
acacttttctctctgcagcagatccagagccagagctctacctcgatcctttctgccctccgggtttctccagtcagaaattccccatgcagcatgtgctgtgtaatcatcccccctggatc

SEQ ID NO: 10373 - DNA, 122 bp, Homo sapiens
  misc_feature (61)..(62): /note="This region represents a CpG dinucleotide"
  misc_feature (61)..(61): /note="Nucleotide may be methylated to form 5-methylcytosine"
agaacagcacatgcacaagtgctgctgtatgatgaagtcattccaatcccagggcaccaacgtcctgccttacagcaattcaggtaaacacatcccagggttttggaaatgattagattaga

SEQ ID NO: 10374 - DNA, 122 bp, Homo sapiens
  misc_feature (61)..(62): /note="This region represents a CpG dinucleotide"
  misc_feature (61)..(61): /note="Nucleotide may be methylated to form 5-methylcytosine"
atgccctttaaaaatcagagttcctcagagagcttccggtgtggcagtcatgtctgtgcccgtctctcacttttcttactaattctggttatctcatcaaaagtgcatttttaagaaattcc

SEQ ID NO: 10375 - DNA, 122 bp, Homo sapiens
  misc_feature (61)..(62): /note="This region represents a CpG dinucleotide"
  misc_feature (61)..(61): /note="Nucleotide may be methylated to form 5-methylcytosine"
aatgaacagtatttatttcaacagttgtgctaaaatagatcaaccagcagaatgcaacgacggttaataagactatgtgaaaattctcaataagacacagaaaactctcaatatagctttat

SEQ ID NO: 10376 - DNA, 122 bp, Homo sapiens
  misc_feature (61)..(62): /note="This region represents a CpG dinucleotide"
  misc_feature (61)..(61): /note="Nucleotide may be methylated to form 5-methylcytosine"
ccggaacccaaggctccgccatccaggacaactgctctgccaacgaggtcccgcgagaatcgagagatctcgcgatacaaacccactcgcatctcgcgagcttccactagacccaacatggc

SEQ ID NO: 10377 - DNA, 122 bp, Homo sapiens
  misc_feature (61)..(62): /note="This region represents a CpG dinucleotide"
  misc_feature (61)..(61): /note="Nucleotide may be methylated to form 5-methylcytosine"
agcctgggagaggcttaatttatgttttatggagattagcttgcttctgagagggggttccgccatcaactcgatttctgcacacactcagagctcaggagattgcctgctctctgaaaaac

SEQ ID NO: 10378 - DNA, 122 bp, Homo sapiens
  misc_feature (61)..(62): /note="This region represents a CpG dinucleotide"
  misc_feature (61)..(61): /note="Nucleotide may be methylated to form 5-methylcytosine"
aggcatcatgattatccctgtcttaaggatggggaaaggagacccagggtgactgggtaacgtgcctactggaggaaaagagggaggaaataaaccccagcaacctgccttctgtgcctata

SEQ ID NO: 10379 - DNA, 122 bp, Homo sapiens
  misc_feature (61)..(62): /note="This region represents a CpG dinucleotide"
  misc_feature (61)..(61): /note="Nucleotide may be methylated to form 5-methylcytosine"
catgtacacaaacgtatggactccaggaggggccctgcagtgctggttctggcaggacttcggacacagtctgagcctcaaatactaaactggtgccaaagtaattgcagtttctgccattg

SEQ ID NO: 10380 - DNA, 122 bp, Homo sapiens
  misc_feature (61)..(62): /note="This region represents a CpG dinucleotide"
  misc_feature (61)..(61): /note="Nucleotide may be methylated to form 5-methylcytosine"
ttcagactctgctttgaatgtccccttctggtcctttaaatggtctatttccctaccttacgtaagtttccatgagctcatcttgttttcatagtgttcccttttattgttaagagaaacaa

SEQ ID NO: 10381 - DNA, 122 bp, Homo sapiens
  misc_feature (61)..(62): /note="This region represents a CpG dinucleotide"
  misc_feature (61)..(61): /note="Nucleotide may be methylated to form 5-methylcytosine"
caggggagggtccacagggctcctcttctgggactctcaggctgtcggcttctcctagagcgcaccctagtctcccttcccttgccagcttccctggtgaccagccaggacccaaatcacct

SEQ ID NO: 10382 - DNA, 122 bp, Homo sapiens
  misc_feature (61)..(62): /note="This region represents a CpG dinucleotide"
  misc_feature (61)..(61): /note="Nucleotide may be methylated to form 5-methylcytosine"
aaacactccttcatagcctgtctggaccttcaaagcccagtaacaggaaactattaatatcgtagctggaaggtggtcttcacatatggcaggattaaggaatcttgactcaaattccggtc

SEQ ID NO: 10383 - DNA, 122 bp, Homo sapiens
  misc_feature (61)..(62): /note="This region represents a CpG dinucleotide"
  misc_feature (61)..(61): /note="Nucleotide may be methylated to form 5-methylcytosine"
aaactaaatgacccaaataaggcagatactatggggctcagccaagtaaaccattctgtccgcactggtatcccagccatgtcttatttatttacctagctttactttagatttttatctta

SEQ ID NO: 10384 - DNA, 122 bp, Homo sapiens
  misc_feature (61)..(62): /note="This region represents a CpG dinucleotide"
  misc_feature (61)..(61): /note="Nucleotide may be methylated to form 5-methylcytosine"
cagcttgtgcctaatagaaggttgagaccagcagagactgctgtgagtttctcccggctccgaggctgaacggggactgtgagcgatccccctgctgcagggcgagtggcctgtccagaccc

SEQ ID NO: 10385 - DNA, 122 bp, Homo sapiens
  misc_feature (61)..(62): /note="This region represents a CpG dinucleotide"
  misc_feature (61)..(61): /note="Nucleotide may be methylated to form 5-methylcytosine"
caaaattgagcagtaatgcgaaagcacaaggcctggcccatgttggccataaggtggcaccgttagtccagtgtggcgggcaaacctcttgttggctggtaggtgcagtgagggcagaaccc

SEQ ID NO: 10386 - DNA, 122 bp, Homo sapiens
  misc_feature (61)..(62): /note="This region represents a CpG dinucleotide"
  misc_feature (61)..(61): /note="Nucleotide may be methylated to form 5-methylcytosine"
cgccacgatccaagagagtcttcttcccggctgggcgggggtctccatggaaacgggggtcggttgatcctgggggggaaaccataggaattaccccactcctcggaaagggaggtggaggc

SEQ ID NO: 10387 - DNA, 122 bp, Homo sapiens
  misc_feature (61)..(62): /note="This region represents a CpG dinucleotide"
  misc_feature (61)..(61): /note="Nucleotide may be methylated to form 5-methylcytosine"
ttgcaagcaggatttcttagccaccccgtgcagtagcacattcatgaactaatctggcttcgcgtgtaatgtgcttgtatgagagaggagaaaactcggcccacgtatgaatacctaaatac

SEQ ID NO: 10388 - DNA, 122 bp, Homo sapiens
  misc_feature (61)..(62): /note="This region represents a CpG dinucleotide"
  misc_feature (61)..(61): /note="Nucleotide may be methylated to form 5-methylcytosine"
ctccacctcataaaggctgaaaatctgtctattcttctgagtcaccccatcacatcctcccgacctcctatctcaggccagcttgagcagaggtactttgatctctgaatgggtggagggat

SEQ ID NO: 10389 - DNA, 122 bp, Homo sapiens
  misc_feature (61)..(62): /note="This region represents a CpG dinucleotide"
  misc_feature (61)..(61): /note="Nucleotide may be methylated to form 5-methylcytosine"
aaactgtcttctagtctatttgaggacagcaggactgatgcccagctggtatttccattacggccatacagggtatgaaaatgttgacacattactatcatgactggtcagtaggtaaatag

SEQ ID NO: 10390 - DNA, 122 bp, Homo sapiens
  misc_feature (61)..(62): /note="This region represents a CpG dinucleotide"
  misc_feature (61)..(61): /note="Nucleotide may be methylated to form 5-methylcytosine"
ggtatgtcccacaagtcaaagataaagttaccacaatcttaaagccaggttcaagcatggcgtaatgacaaatcacagtgatttgtggaatggaaaatgcttccatcggggagttgggctgc

SEQ ID NO: 10391 - DNA, 122 bp, Homo sapiens
  misc_feature (61)..(62): /note="This region represents a CpG dinucleotide"
  misc_feature (61)..(61): /note="Nucleotide may be methylated to form 5-methylcytosine"
cagatttctaggatagaaactcagtatccaagctcaggcttggcagactgaggtgggcaccgtccccaggattgcagtgtggattagaggtttcaaccccaatcatattcaacagctccctt

SEQ ID NO: 10392 - DNA, 122 bp, Homo sapiens
  misc_feature (61)..(62): /note="This region represents a CpG dinucleotide"
  misc_feature (61)..(61): /note="Nucleotide may be methylated to form 5-methylcytosine"
tcccacctgctatgaacatctatgtccatatttgtacatgtagacataagttgtcaattgcgaaatatggttaggtaatggttggactgcaattttcttaactgactggaacttgtaagtct

SEQ ID NO: 10393 - DNA, 122 bp, Homo sapiens
  misc_feature (61)..(62): /note="This region represents a CpG dinucleotide"
  misc_feature (61)..(61): /note="Nucleotide may be methylated to form 5-methylcytosine"
gatgacttaaaacaacaaaaatgtattttctcatagttctggaggccagaagtccaaaatcggtttcactggggaaaaacaagaaaatcaaagacatgttccagaggatctaggagagaatc

SEQ ID NO: 10394 - DNA, 122 bp, Homo sapiens
  misc_feature (61)..(62): /note="This region represents a CpG dinucleotide"
  misc_feature (61)..(61): /note="Nucleotide may be methylated to form 5-methylcytosine"
tttttaaatgatttaaaacctgtttctgtaccaagtggtacagaaataggggccagcccccggtccagcgccacgagctcctagggccagagtgcaagagaggcacagggcgagagggggac

SEQ ID NO: 10395 - DNA, 122 bp, Homo sapiens
  misc_feature (61)..(62): /note="This region represents a CpG dinucleotide"
  misc_feature (61)..(61): /note="Nucleotide may be methylated to form 5-methylcytosine"
tcttaccaagtttatgagtggaggaaataggaaggtgaggacagcagcaggatataactccgtattttaaagtaattactgactgggctgactgtaaattgtttaaaaatgaaatgcaaaac

SEQ ID NO: 10396 - DNA, 122 bp, Homo sapiens
  misc_feature (61)..(62): /note="This region represents a CpG dinucleotide"
  misc_feature (61)..(61): /note="Nucleotide may be methylated to form 5-methylcytosine"
ttaacaatctggatttctgcggtagcagggtggatcatataatgcttactcctgacaccacgcctgacacctattcagtttctcagctttactcaaagcctccatgacttagcaggttcagg

SEQ ID NO: 10397 - DNA, 122 bp, Homo sapiens
  misc_feature (61)..(62): /note="This region represents a CpG dinucleotide"
  misc_feature (61)..(61): /note="Nucleotide may be methylated to form 5-methylcytosine"
tacaaattcagagttaagagctggacaacgagttgggttatgagggcttccaccccagtccgtttctttcttgctcatggtaggaccctagacaattcttttccactctcagcctgcatttt

SEQ ID NO: 10398 - DNA, 122 bp, Homo sapiens
  misc_feature (61)..(62): /note="This region represents a CpG dinucleotide"
  misc_feature (61)..(61): /note="Nucleotide may be methylated to form 5-methylcytosine"
ctctgatgtctgtattagatcctacatggcagtaggctccatggtgccaaaagacctgagcgtctttctccttaaaggtgactgcagctgtgcctccaggaacacaaacatgctcaggagaa

SEQ ID NO: 10399 - DNA, 122 bp, Homo sapiens
  misc_feature (61)..(62): /note="This region represents a CpG dinucleotide"
  misc_feature (61)..(61): /note="Nucleotide may be methylated to form 5-methylcytosine"
tctctcctaagagacatatttgtacttttcttggtcttaagcctcatcaagaatatcccacgaagcacaagaggcacatcctttcttgaaaccagaaacaatgaaggaaatgactaacagcc

SEQ ID NO: 10400 - DNA, 122 bp, Homo sapiens
  misc_feature (61)..(62): /note="This region represents a CpG dinucleotide"
  misc_feature (61)..(61): /note="Nucleotide may be methylated to form 5-methylcytosine"
caaagcttcactttgcaataacttggggagttttttaattcttgtgttcttttgcagcaacgtgcatgcaggtggaagccattatcctaagcaaacgaattcaaggagagaaaaccaaatac

SEQ ID NO: 10401 - DNA, 122 bp, Homo sapiens
  misc_feature (61)..(62): /note="This region represents a CpG dinucleotide"
  misc_feature (61)..(61): /note="Nucleotide may be methylated to form 5-methylcytosine"
ttaggatgtgagagccgcttgcctttaaatatggaaccagctgctacgtgctcttgaccacggcaaagctggcaggacctcagatttccttatgcgcaaaatgtccccattttttgcagagt

SEQ ID NO: 10402 - DNA, 122 bp, Homo sapiens
  misc_feature (61)..(62): /note="This region represents a CpG dinucleotide"
  misc_feature (61)..(61): /note="Nucleotide may be methylated to form 5-methylcytosine"
acatcttattttttcttgcaaaagagaacaacttctgaacattcaaaaaagccaccatagcgatagcaatacacacacatgcacacacacatacatacaattattttatgtatctaaatgtt

SEQ ID NO: 10403 - DNA, 122 bp, Homo sapiens
  misc_feature (61)..(62): /note="This region represents a CpG dinucleotide"
  misc_feature (61)..(61): /note="Nucleotide may be methylated to form 5-methylcytosine"
tcctcccggcactggggtgaccgccgagctagacgcgcctgagggctgagccccagggctcgtgatctgctcccggaggcgccccccaggcagggccgtgagccgggcgagggagagtcctg

SEQ ID NO: 10404 - DNA, 122 bp, Homo sapiens
  misc_feature (61)..(62): /note="This region represents a CpG dinucleotide"
  misc_feature (61)..(61): /note="Nucleotide may be methylated to form 5-methylcytosine"
catctgtgttaaggccaaaccttttctgcacgtccaagaaaggcatggcgttctgatgctcgtgcccttgtctcttctctggccgctgcttcaggacgattctacttttcaaatttttatat

SEQ ID NO: 10405 - DNA, 122 bp, Homo sapiens
  misc_feature (61)..(62): /note="This region represents a CpG dinucleotide"
  misc_feature (61)..(61): /note="Nucleotide may be methylated to form 5-methylcytosine"
ggtgatccgcccaccttggcctctcaaagtgctgggattacaggcatgagccaccatgcccgaccagacctaggcttttgattccaaagtacagaaacttaatatttgaaggtgtggtcatg

SEQ ID NO: 10406 - DNA, 122 bp, Homo sapiens
  misc_feature (61)..(62): /note="This region represents a CpG dinucleotide"
  misc_feature (61)..(61): /note="Nucleotide may be methylated to form 5-methylcytosine"
agtcactgctcccagcccagaaattgatggtttctttagcaattttgtcacccatcaagtcgttagtcatattaatcctccataacttagtctttttgccccctgattatcttttgggtggg

SEQ ID NO: 10407 - DNA, 122 bp, Homo sapiens
  misc_feature (61)..(62): /note="This region represents a CpG dinucleotide"
  misc_feature (61)..(61): /note="Nucleotide may be methylated to form 5-methylcytosine"
agaactcacttcacatcgtcccaactacggaggaaagaagctggggtcgttatccttcaacgcccatctgacagttgactgaggactatttctggaggtgtaactccccagcacttctggcc

SEQ ID NO: 10408 - DNA, 122 bp, Homo sapiens
  misc_feature (61)..(62): /note="This region represents a CpG dinucleotide"
  misc_feature (61)..(61): /note="Nucleotide may be methylated to form 5-methylcytosine"
ccagaacattctggcacaggtgccagtccagcctcagtgctccagccctgctgcagccagcgaagccaagtacatatttcatggagaatagtcagtcataaacgctgtggaaaactgaatga

SEQ ID NO: 10409 - DNA, 122 bp, Homo sapiens
  misc_feature (61)..(62): /note="This region represents a CpG dinucleotide"
  misc_feature (61)..(61): /note="Nucleotide may be methylated to form 5-methylcytosine"
tggtgcccacacacatggctccaggcccacgcgggtacacacctccccagcctgcacacgcgtgtttcacatgagtcacacacctgccaggccgctcagggcatctggcttcaaagcggcat

SEQ ID NO: 10410 - DNA, 122 bp, Homo sapiens
  misc_feature (61)..(62): /note="This region represents a CpG dinucleotide"
  misc_feature (61)..(61): /note="Nucleotide may be methylated to form 5-methylcytosine"
tgaactcctgaccccaggtgatccgcccgccttggcctctcaaagtgctgggattacaggcgtgagccattgtgcccgagctgagggcagatttcaatcctgcacacattcctttcttccct

SEQ ID NO: 10411 - DNA, 122 bp, Homo sapiens
  misc_feature (61)..(62): /note="This region represents a CpG dinucleotide"
  misc_feature (61)..(61): /note="Nucleotide may be methylated to form 5-methylcytosine"
gctgtcggctggaggagggcgcgggtgcaggcggcggtgaagggctaggcagggctttggcggtgtgaggggaggaaaggtggtgagctccggaaaggctgctagagggaaagcaggatggg

SEQ ID NO: 10412 - DNA, 122 bp, Homo sapiens
  misc_feature (61)..(62): /note="This region represents a CpG dinucleotide"
  misc_feature (61)..(61): /note="Nucleotide may be methylated to form 5-methylcytosine"
actttgcatgtttacttgtatgatcccttctcagtgtgtttgtttatccacacatattttcgaaaaggtgctggtgatgaacaattttccaacaccaccatttgtcattttagagttgttat

SEQ ID NO: 10413 - DNA, 122 bp, Homo sapiens
  misc_feature (61)..(62): /note="This region represents a CpG dinucleotide"
  misc_feature (61)..(61): /note="Nucleotide may be methylated to form 5-methylcytosine"
taagctgacattggaacatgaacagtctgaaatcccatgagccccgctgccctgcacctgcgaccctcaggctagaccttggactgtctacaacacgagtcaggcccaacccgccctggaaa

SEQ ID NO: 10414 - DNA, 122 bp, Homo sapiens
  misc_feature (61)..(62): /note="This region represents a CpG dinucleotide"
  misc_feature (61)..(61): /note="Nucleotide may be methylated to form 5-methylcytosine"
caggatttgtttattgctttgataaagccacagcatttctcaagtgctctatgctgcaagcgtcaggaacacgctaggaaacccaaatgtttgctgacccactaactttttccaccaaagct

SEQ ID NO: 10415 - DNA, 122 bp, Homo sapiens
  misc_feature (61)..(62): /note="This region represents a CpG dinucleotide"
  misc_feature (61)..(61): /note="Nucleotide may be methylated to form 5-methylcytosine"
aaacctgccccagtggcctctttattcataggactggactccctgctgggtctgagagtccgtggaagcaggaaaaattctgactcatctcaatgcaagtatctgttcagagctggttcacc

SEQ ID NO: 10416 - DNA, 122 bp, Homo sapiens
  misc_feature (61)..(62): /note="This region represents a CpG dinucleotide"
  misc_feature (61)..(61): /note="Nucleotide may be methylated to form 5-methylcytosine"
tttctctctctcgtataatttacctgacttcataaacaggaaataatgttgagcaactaacgtgtcatacccatttccattcccacatccttgaagaagagtgatcctaagttacaataaaa

SEQ ID NO: 10417 - DNA, 122 bp, Homo sapiens
  misc_feature (61)..(62): /note="This region represents a CpG dinucleotide"
  misc_feature (61)..(61): /note="Nucleotide may be methylated to form 5-methylcytosine"
tacacatacttacatcactctgaatttgattgacattcctcgtatgctcaagactcatggcgtcaggtaggtatgtgtaatgatgcaatggctgtttgtagttgacattggtagcgacatcc

SEQ ID NO: 10418 - DNA, 122 bp, Homo sapiens
  misc_feature (61)..(62): /note="This region represents a CpG dinucleotide"
  misc_feature (61)..(61): /note="Nucleotide may be methylated to form 5-methylcytosine"
tggaaccaaggctaaccctgcctcaagcctatgaggacactgaagttttgatgaagaggacgttttcagatcaagaaaaaaatgtcccctgttcaatcttgctataactgcctgaggtttat

SEQ ID NO: 10419 - DNA, 122 bp, Homo sapiens
  misc_feature (61)..(62): /note="This region represents a CpG dinucleotide"
  misc_feature (61)..(61): /note="Nucleotide may be methylated to form 5-methylcytosine"
aactgggtctgtgatctcagcttcttccctaggccccaaggcatgcaaggtacaaggctgcgccccttcacccaggaattcaggcagacacagcagtaactcaaggataaaggagattgata

SEQ ID NO: 10420 - DNA, 122 bp, Homo sapiens
  misc_feature (61)..(62): /note="This region represents a CpG dinucleotide"
  misc_feature (61)..(61): /note="Nucleotide may be methylated to form 5-methylcytosine"
attttgcagtggtcctttatgattaaataagcaagtacacatgcacctgtctgattttcccgtttttaccaataggaggcattctaaacatactgttctgccttcttcactcttcacatcac

SEQ ID NO: 10421 - DNA, 122 bp, Homo sapiens
  misc_feature (61)..(62): /note="This region represents a CpG dinucleotide"
  misc_feature (61)..(61): /note="Nucleotide may be methylated to form 5-methylcytosine"
taagaaagaaaattccaggcagagatgagcatgagcaaaaaatttggcagcaatgatgcacggtgattcagagatcaaaaagttcagtgtggatgcctctagacattttcttatctgtgtct

SEQ ID NO: 10422 - DNA, 122 bp, Homo sapiens
  misc_feature (61)..(62): /note="This region represents a CpG dinucleotide"
  misc_feature (61)..(61): /note="Nucleotide may be methylated to form 5-methylcytosine"
aaaatcacacaatgtgaaacgacttcaaccctctcatttcacagataaagaaactgaggtcgagagggttaaacgacttgctggagcttaaatggcttagaagcagaaactgtgttccttgt

SEQ ID NO: 10423 - DNA, 122 bp, Homo sapiens
  misc_feature (61)..(62): /note="This region represents a CpG dinucleotide"
  misc_feature (61)..(61): /note="Nucleotide may be methylated to form 5-methylcytosine"
agaagttccaggaatcaagttttgaacgcattaatggacttgggaaatgatttgtcagcacgtggaaatgaggacttaggtttcttgtgtaacagcttggctaacaaagcaagtttgtgcct

SEQ ID NO: 10424 - DNA, 122 bp, Homo sapiens
  misc_feature (61)..(62): /note="This region represents a CpG dinucleotide"
  misc_feature (61)..(61): /note="Nucleotide may be methylated to form 5-methylcytosine"
agcaacattttaaaataggcaaatattgtgtttggtacccctctcctactctgtacctctcgtccgtccttctgggccaccaaatttccactgccttctcagacctccatcaccctcttctg

SEQ ID NO: 10425 - DNA, 122 bp, Homo sapiens
  misc_feature (61)..(62): /note="This region represents a CpG dinucleotide"
  misc_feature (61)..(61): /note="Nucleotide may be methylated to form 5-methylcytosine"
tcccctttaaagtcctgccatacaaaaattcttctcttctaagccccaagaaactgtcttcgattaatgtttttcttcatatctcctagaagaaagctacgaatacattctacatattgtta

SEQ ID NO: 10426 - DNA, 122 bp, Homo sapiens
  misc_feature (61)..(62): /note="This region represents a CpG dinucleotide"
  misc_feature (61)..(61): /note="Nucleotide may be methylated to form 5-methylcytosine"
gaagtaggtttgggaacacattctgtttgtcagacatggtttattatttgttccacgtaccgttcatagtgaaaatactattcagtggagcatttactaacaaaaatgacagaaactgacca

SEQ ID NO: 10427 - DNA, 122 bp, Homo sapiens
  misc_feature (61)..(62): /note="This region represents a CpG dinucleotide"
  misc_feature (61)..(61): /note="Nucleotide may be methylated to form 5-methylcytosine"
tgctgccacctccaagccccacccatcccctctgcccttggttccacacccccagctacacgctgacaaagatgctgggctagagacacccagctcgccagacacacccaggatgctctcac

SEQ ID NO: 10428 - DNA, 122 bp, Homo sapiens
  misc_feature (61)..(62): /note="This region represents a CpG dinucleotide"
  misc_feature (61)..(61): /note="Nucleotide may be methylated to form 5-methylcytosine"
cagttcacttcctcttcctcacgggggcattcctaacacctacaggggtgggatacacagcgttaaataaatcttctgcattttgatgcaagagtactactgtccttacttttaaaattaaa

SEQ ID NO: 10429 - DNA, 122 bp, Homo sapiens
  misc_feature (61)..(62): /note="This region represents a CpG dinucleotide"
  misc_feature (61)..(61): /note="Nucleotide may be methylated to form 5-methylcytosine"
ggaccatgaggacccaggacccagaaggcaggacagtttctcttccacatgtcgccacagcgggatgcaggcactgccatcaacgcctgtcacttggattgagcaagaacagcctctcccca

SEQ ID NO: 10430 - DNA, 122 bp, Homo sapiens
  misc_feature (61)..(62): /note="This region represents a CpG dinucleotide"
  misc_feature (61)..(61): /note="Nucleotide may be methylated to form 5-methylcytosine"
tctaacaaaaacaaatcagtcatcgtttcccttcttccaggagactgtgcctgaggaaagcggggggcgtggctgcagttctggacgggctggccgagctgcgcgggatccttgtgcaggga

SEQ ID NO: 10431 - DNA, 122 bp, Homo sapiens
  misc_feature (61)..(62): /note="This region represents a CpG dinucleotide"
  misc_feature (61)..(61): /note="Nucleotide may be methylated to form 5-methylcytosine"
agctctgcggcaggtgctggggccacaggaggaaccagcaaagtcctcgtcactggggatcgcgtcctacccgggggcacagaccataaaggaaaactgcagggaccagcatataaggtggt

SEQ ID NO: 10432 - DNA, 122 bp, Homo sapiens
  misc_feature (61)..(62): /note="This region represents a CpG dinucleotide"
  misc_feature (61)..(61): /note="Nucleotide may be methylated to form 5-methylcytosine"
tttctaaaaatgtatgtggtcactggatcttcaagacagtttcattttccccattgtcaacgaggaagccacagagaggttaggtaacctcaagttcactcagcaaattagaaaaataaata

SEQ ID NO: 10433 - DNA, 122 bp, Homo sapiens
  misc_feature (61)..(62): /note="This region represents a CpG dinucleotide"
  misc_feature (61)..(61): /note="Nucleotide may be methylated to form 5-methylcytosine"
attttaaagagagcaggggtataagccagagtggtggggtgagcagtttggagggaaagacggttacagaacaggtaactaaaggtgacttaaatcatagcaggtgaccaggggtgactcag

SEQ ID NO: 10434 - DNA, 122 bp, Homo sapiens
  misc_feature (61)..(62): /note="This region represents a CpG dinucleotide"
  misc_feature (61)..(61): /note="Nucleotide may be methylated to form 5-methylcytosine"
tgatagcatcaactcgccctttatctttcatgatgcattgagacttccattactttgtagcgcctgactgctagaattgttcccagagttcaggggcttccaaatgacaatgggctgtaccg

SEQ ID NO: 10435 - DNA, 122 bp, Homo sapiens
  misc_feature (61)..(62): /note="This region represents a CpG dinucleotide"
  misc_feature (61)..(61): /note="Nucleotide may be methylated to form 5-methylcytosine"
atgggtgccttaatattcctatgggataaatgctttatttggtcaaaaactggaagctgacgctccacttaagagtctaggtcacgcggcaagccagacacttgaaggagcttaaagctttc

SEQ ID NO: 10436 - DNA, 122 bp, Homo sapiens
  misc_feature (61)..(62): /note="This region represents a CpG dinucleotide"
  misc_feature (61)..(61): /note="Nucleotide may be methylated to form 5-methylcytosine"
ggggaattattgtttaatggatagtttcagtttttcaagatgaagagttaagaagttggacggtggtgatgactgcaaaaaactatgaatgtacttagtactactccattgtacacttaaga

SEQ ID NO: 10437 - DNA, 122 bp, Homo sapiens
  misc_feature (61)..(62): /note="This region represents a CpG dinucleotide"
  misc_feature (61)..(61): /note="Nucleotide may be methylated to form 5-methylcytosine"
atcttatatgacataagaattaatctgacctgctttctactgttatgccattaaaaacaccgctgaaagttatagcctacagtaatacgtcactctaaataaacaaggtaggaaatagctta

SEQ ID NO: 10438 - DNA, 122 bp, Homo sapiens
  misc_feature (61)..(62): /note="This region represents a CpG dinucleotide"
  misc_feature (61)..(61): /note="Nucleotide may be methylated to form 5-methylcytosine"
atgttcactttacccttttatattgaaaacatcattttttgacagaatatagaaacaaaacgggaggttttatgtaccatagtgttaccatgtgcatgctctagaatcacactgatcagatt

SEQ ID NO: 10439 - DNA, 122 bp, Homo sapiens
  misc_feature (61)..(62): /note="This region represents a CpG dinucleotide"
  misc_feature (61)..(61): /note="Nucleotide may be methylated to form 5-methylcytosine"
gaatcggaaggcattcacactggaggggatcaaggggagcttgtaggcttgccttgctggcgggcagctgcctacacccactcgtaccaatgtccccgctgcagagcccgggtgcttcccag

SEQ ID NO: 10440 - DNA, 122 bp, Homo sapiens
  misc_feature (61)..(62): /note="This region represents a CpG dinucleotide"
  misc_feature (61)..(61): /note="Nucleotide may be methylated to form 5-methylcytosine"
gaagcttgacaatgtcaaagagcttatatgcaattggcaagggaaccaaaatcagttgcacgatgtaaaggtttgagttgtagatacccacctgataccgtgtatatgtattgcaagataaa

SEQ ID NO: 10441 - DNA, 122 bp, Homo sapiens
  misc_feature (61)..(62): /note="This region represents a CpG dinucleotide"
  misc_feature (61)..(61): /note="Nucleotide may be methylated to form 5-methylcytosine"
gctttggtgaaagacatgattgagtgttgtctcttttagttggtggccagtagggccactcggtattgggagaaagtgaggcacctacaggctaaacctgtggccaaacagtttcagcagaa

SEQ ID NO: 10442 - DNA, 122 bp, Homo sapiens
  misc_feature (61)..(62): /note="This region represents a CpG dinucleotide"
  misc_feature (61)..(61): /note="Nucleotide may be methylated to form 5-methylcytosine"
agcgcctcatatttccactttccagtggtaactagcagaggtaagagaaaaacagccatgcgggtgagtcatcattcctcactccaggaaatggctcattttacaagcttttggaaggacct

SEQ ID NO: 10443 - DNA, 122 bp, Homo sapiens
  misc_feature (61)..(62): /note="This region represents a CpG dinucleotide"
  misc_feature (61)..(61): /note="Nucleotide may be methylated to form 5-methylcytosine"
ctctgtcatctgtttattgcatgagtacaaacatcctgcataccattagtgtttactgaacgaacctgcaaactagtcacttaagtcagcctgtcacgtagcagtggggtcaactggtaagc

SEQ ID NO: 10444 - DNA, 122 bp, Homo sapiens
  misc_feature (61)..(62): /note="This region represents a CpG dinucleotide"
  misc_feature (61)..(61): /note="Nucleotide may be methylated to form 5-methylcytosine"
aagtgacactcccggaagctaccgcctcttataagccacacatgggcggagttagccttccggcccgcagtcccactggctgacttcgctgcccgtcacgggaatgcgggagagggcggcgc

SEQ ID NO: 10445 - DNA, 122 bp, Homo sapiens
  misc_feature (61)..(62): /note="This region represents a CpG dinucleotide"
  misc_feature (61)..(61): /note="Nucleotide may be methylated to form 5-methylcytosine"
cgtctagcctgtcctccctgtgtcatgtggaactccttttcagagaggcagcagcccattcgacaccttccaattctattttccaagctgtgagcgcataaccaccagccactgtttgtctc

SEQ ID NO: 10446 - DNA, 122 bp, Homo sapiens
  misc_feature (61)..(62): /note="This region represents a CpG dinucleotide"
  misc_feature (61)..(61): /note="Nucleotide may be methylated to form 5-methylcytosine"
ctatgagaaaatgaatcagaagaaagaggcgaagggtgccacggcggcggcagcagcgcacgggctggaaacctgggttcagccctccagcgcagacacacatcacgagtcagttaaagaaa

SEQ ID NO: 10447 - DNA, 122 bp, Homo sapiens
  misc_feature (61)..(62): /note="This region represents a CpG dinucleotide"
  misc_feature (61)..(61): /note="Nucleotide may be methylated to form 5-methylcytosine"
atgaatgaggactggtaattacattaaatggagaacctagctcagcaaaaactaacaaaacggaaacagtaaaaaccctatttttggatgtccagttgtgcaactgagatctaatctatcct

SEQ ID NO: 10448 - DNA, 122 bp, Homo sapiens
  misc_feature (61)..(62): /note="This region represents a CpG dinucleotide"
  misc_feature (61)..(61): /note="Nucleotide may be methylated to form 5-methylcytosine"
ggagtggttgtggagggcagagagaatagcacatgaacttctaatgacttttcctcatcacgtgattcaatatttcaaggtaggataaggatgtgtgtaatgagagtacataaagtataaaa

SEQ ID NO: 10449 - DNA, 122 bp, Homo sapiens
  misc_feature (61)..(62): /note="This region represents a CpG dinucleotide"
  misc_feature (61)..(61): /note="Nucleotide may be methylated to form 5-methylcytosine"
tccatctcgaaaaaaaaaagtaatacctacgtaatagatctcatcctaccaaggaaaagtcgagtcccatttctgaagagctatccctgtttttcacttaagttgcatttctgcagtgtttg

SEQ ID NO: 10450 - DNA, 122 bp, Homo sapiens
  misc_feature (61)..(62): /note="This region represents a CpG dinucleotide"
  misc_feature (61)..(61): /note="Nucleotide may be methylated to form 5-methylcytosine"
agaccatgaatttgcaaatgctctgcctgaagtgtgtactgaagctctggagacctcacccggattcccagggccataattatcataataatgtacaaacgagaatctttctgtaaatttaa

SEQ ID NO: 10451 - DNA, 122 bp, Homo sapiens
  misc_feature (61)..(62): /note="This region represents a CpG dinucleotide"
  misc_feature (61)..(61): /note="Nucleotide may be methylated to form 5-methylcytosine"
gcattactaccttctcagctaaagatgatgtagggaggaaaaaagaagagaagaggaaaacgaaagaaaatgagtgtcattgtatgtaggaagtgtttgttctaagtgcatcgtgtggacat

SEQ ID NO: 10452 - DNA, 122 bp, Homo sapiens
  misc_feature (61)..(62): /note="This region represents a CpG dinucleotide"
  misc_feature (61)..(61): /note="Nucleotide may be methylated to form 5-methylcytosine"
aatacctggagaggtaatatgatttacaacttaatgagaaaaataaaataatttgctgagcgtgagtgaagctactttagagaatgagaacagtaaagattttactgtgttgataaagactg

SEQ ID NO: 10453 - DNA, 122 bp, Homo sapiens
  misc_feature (61)..(62): /note="This region represents a CpG dinucleotide"
  misc_feature (61)..(61): /note="Nucleotide may be methylated to form 5-methylcytosine"
gtgagtcagcacaaatttcaaccaagtgccttgacttcctagtagagtcacagcttccttcgtggaacagatatcatgcctttacaaaagcactgaaggaatatttgagggttcacaaagcc

SEQ ID NO: 10454 - DNA, 122 bp, Homo sapiens
  misc_feature (61)..(62): /note="This region represents a CpG dinucleotide"
  misc_feature (61)..(61): /note="Nucleotide may be methylated to form 5-methylcytosine"
ctctgatcttagctcctggagtgccccggagcaaacctgtccaccctgtcccctgcaggacggtctgttagcctcaattagcagaaagcttacagactctgggaaaaggtgtgcctggctgt

SEQ ID NO: 10455 - DNA, 122 bp, Homo sapiens
  misc_feature (61)..(62): /note="This region represents a CpG dinucleotide"
  misc_feature (61)..(61): /note="Nucleotide may be methylated to form 5-methylcytosine"
tcactgactcaatcacctctaggagccaagcatattttagaaatgaatcaaacagtaaggcgatatggacagattcagtaatgtgctggaatgattgttcatcgcttgcaagagctggtcat

SEQ ID NO: 10456 - DNA, 122 bp, Homo sapiens
  misc_feature (61)..(62): /note="This region represents a CpG dinucleotide"
  misc_feature (61)..(61): /note="Nucleotide may be methylated to form 5-methylcytosine"
ccccacaaagctggcgcatggcccaaaagggggtgaagaagcgatgtcctgagacagggacgcagctgtcatgcagggcctcagggctgagacaaagtctggatccatcctgaaaggagggg

SEQ ID NO: 10457 - DNA, 122 bp, Homo sapiens
  misc_feature (61)..(62): /note="This region represents a CpG dinucleotide"
  misc_feature (61)..(61): /note="Nucleotide may be methylated to form 5-methylcytosine"
aagcagatgtaggtgacaaagtaaggatttcaggaggcttattggagagtaagccgtgaacgtgaaagggtgaggaagcgggattggacaagggaatcctttatgccaaaaagcagatatga

SEQ ID NO: 10458 - DNA, 122 bp, Homo sapiens
  misc_feature (61)..(62): /note="This region represents a CpG dinucleotide"
  misc_feature (61)..(61): /note="Nucleotide may be methylated to form 5-methylcytosine"
tcacagaagtagctcataaataataaagtcccagcctagcaacacagcatgtgatggcagcgtgggtgtgttccagtattatctttcacgtaggccctgaaagcttgaattatctcagaaat

SEQ ID NO: 10459 - DNA, 122 bp, Homo sapiens
  misc_feature (61)..(62): /note="This region represents a CpG dinucleotide"
  misc_feature (61)..(61): /note="Nucleotide may be methylated to form 5-methylcytosine"
gagtcgtaaacatcacgagcggtgatgaacttgcctgtatgatcgctgctgtatctccaacgcctggcacatatagaagctcaatatatatttgagtgaatgtttgaagtttatctttgctt

SEQ ID NO: 10460 - DNA, 122 bp, Homo sapiens
  misc_feature (61)..(62): /note="This region represents a CpG dinucleotide"
  misc_feature (61)..(61): /note="Nucleotide may be methylated to form 5-methylcytosine"
ttcactgagaggtgagctttgctacccccagaatggcctccatctgcgttgctttgcattcgggcatgtggtgggagggggcagctcctcctattcacccacagcaaggcaaaacccggtcc

SEQ ID NO: 10461 - DNA, 122 bp, Homo sapiens
  misc_feature (61)..(62): /note="This region represents a CpG dinucleotide"
  misc_feature (61)..(61): /note="Nucleotide may be methylated to form 5-methylcytosine"
aagctttccagtccttttactttgtgccacctgagactttcctccctactctcttcacctcgctgtcttccacaaaaaaaaagaaaaagggcccagagggaccacatgtcttggaggggcac

SEQ ID NO: 10462 - DNA, 122 bp, Homo sapiens
  misc_feature (61)..(62): /note="This region represents a CpG dinucleotide"
  misc_feature (61)..(61): /note="Nucleotide may be methylated to form 5-methylcytosine"
gagcaggtttgggacacactgatccattatccctgtattttacagattaagaactggggccgagagtgtttatttaactagcttgcagacattggctctctttgccctgccatatagctgta

SEQ ID NO: 10463 - DNA, 122 bp, Homo sapiens
  misc_feature (61)..(62): /note="This region represents a CpG dinucleotide"
  misc_feature (61)..(61): /note="Nucleotide may be methylated to form 5-methylcytosine"
gcagggacgaggagcctgaggctcagagaggatgtcactcgctctgagtcacatgctgggcgtctcccctctacctggaggcatatacgcccaccagggatcatgggcagtggttgtcatgg

SEQ ID NO: 10464 - DNA, 122 bp, Homo sapiens
  misc_feature (61)..(62): /note="This region represents a CpG dinucleotide"
  misc_feature (61)..(61): /note="Nucleotide may be methylated to form 5-methylcytosine"
tatatttagtgtatttgcataatggcaaaagaggaagaggaagcggggaaacagccaccacgatgtggtagagacagcatttaattgtggggcattaacccctgtttcgttatccttaaaat

SEQ ID NO: 10465 - DNA, 122 bp, Homo sapiens
  misc_feature (61)..(62): /note="This region represents a CpG dinucleotide"
  misc_feature (61)..(61): /note="Nucleotide may be methylated to form 5-methylcytosine"
tagtttccagttgcaagatgcttaaatctgaacaagctgttccactgtcctgcacccccacggcatgggtcatgatgaaccacctacaaagagagcaacgatagtaatggcaaaacaatatt

SEQ ID NO: 10466 - DNA, 122 bp, Homo sapiens
  misc_feature (61)..(62): /note="This region represents a CpG dinucleotide"
  misc_feature (61)..(61): /note="Nucleotide may be methylated to form 5-methylcytosine"
tgggggagcgtggccaaagctaaagcagtggctggcagctggtggcgctgtggttccagacgaggcttggaaggaggctgtggggtgggcggggaggacccgttatggggcctcaggatcca

SEQ ID NO: 10467 - DNA, 122 bp, Homo sapiens
  misc_feature (61)..(62): /note="This region represents a CpG dinucleotide"
  misc_feature (61)..(61): /note="Nucleotide may be methylated to form 5-methylcytosine"
ctgttaaacatacatcagcacaccctagaggccacattcccatttctattcctacagatacgaaagtaaagaacagaacacattttgtgaaataaaagaaagcatatgaggtaaatccccat

SEQ ID NO: 10468 - DNA, 122 bp, Homo sapiens
  misc_feature (61)..(62): /note="This region represents a CpG dinucleotide"
  misc_feature (61)..(61): /note="Nucleotide may be methylated to form 5-methylcytosine"
ttctgctgacacctcgattttaggccagtgagacctgcttcagacttctgacctacagaacggtaagaaaataaatttgtgttgcttatagccatgctgtgtgtggtagtttgttacagcag

SEQ ID NO: 10469 - DNA, 122 bp, Homo sapiens
  misc_feature (61)..(62): /note="This region represents a CpG dinucleotide"
  misc_feature (61)..(61): /note="Nucleotide may be methylated to form 5-methylcytosine"
gacttgtcctcctggctctgcttcaatgacaacaggccaagccctcatggtagaaggtgccgttcccaccaacctgggccttctgcccccgcaggccctctctgggcaaggtcagctggtgc

SEQ ID NO: 10470 - DNA, 122 bp, Homo sapiens
  misc_feature (61)..(62): /note="This region represents a CpG dinucleotide"
  misc_feature (61)..(61): /note="Nucleotide may be methylated to form 5-methylcytosine"
caggctgtagttcgttattaacttaattatgactcacaatgcagcttaccctacatgattcgtaattttatcgtagccaagagaaaatggagtttctttgaacagcatctgtctcccttcac

SEQ ID NO: 10471 - DNA, 122 bp, Homo sapiens
  misc_feature (61)..(62): /note="This region represents a CpG dinucleotide"
  misc_feature (61)..(61): /note="Nucleotide may be methylated to form 5-methylcytosine"
ggggaaggcctgcggcgctgtgaggcaggctgggcggggctgtgacgtcacacaaggcgccgtcccggagcgaccacccaggctggggcacgtggggcgtgggcgtttagtgctgtcgcagt

SEQ ID NO: 10472 - DNA, 122 bp, Homo sapiens
  misc_feature (61)..(62): /note="This region represents a CpG dinucleotide"
  misc_feature (61)..(61): /note="Nucleotide may be methylated to form 5-methylcytosine"
agttagcttttgatgcaataactaaccatcctgaaactttgtagcttaaaacaacagtcacgtattgttactcacaagtctgcaggtcaagtggctggttcttctgatctgggccaggcctg

SEQ ID NO: 10473 - DNA, 122 bp, Homo sapiens
  misc_feature (61)..(62): /note="This region represents a CpG dinucleotide"
  misc_feature (61)..(61): /note="Nucleotide may be methylated to form 5-methylcytosine"
caaaaatctccagatgtttgttttcccagcttcccttgcagcctgagtgtggtcaggtgacgtttgttctgccaatcagacattcccaatgcagactttgcaggggctgagagacagtatct

SEQ ID NO: 10474 - DNA, 122 bp, Homo sapiens
  misc_feature (61)..(62): /note="This region represents a CpG dinucleotide"
  misc_feature (61)..(61): /note="Nucleotide may be methylated to form 5-methylcytosine"
aagagaaggtgagagtacacctgtgtaaatggagcaggattaatagatcaaaattccaggcggaggttcagtggaagagaaccttttagtttcaccagagatgtaagtccaacagtcaggaa

SEQ ID NO: 10475 - DNA, 122 bp, Homo sapiens
  misc_feature (61)..(62): /note="This region represents a CpG dinucleotide"
  misc_feature (61)..(61): /note="Nucleotide may be methylated to form 5-methylcytosine"
ctgacctggtgaagttattaatattaacagctccaactaataaaagagtcaagcataggccgggcatggtggctcatacctgtaatcccagcacttttgggaggctgaggcgggcagataac

SEQ ID NO: 10476 - DNA, 122 bp, Homo sapiens
  misc_feature (61)..(62): /note="This region represents a CpG dinucleotide"
  misc_feature (61)..(61): /note="Nucleotide may be methylated to form 5-methylcytosine"
actcaacaggtgtaccaggtattagtgcattcagtttgcttgtccttgatgttggggtgccgttctaaagtacactaacctagcttgtctggtaattgaatgcagttttttcctcttctttt

SEQ ID NO: 10477 - DNA, 122 bp, Homo sapiens
  misc_feature (61)..(62): /note="This region represents a CpG dinucleotide"
  misc_feature (61)..(61): /note="Nucleotide may be methylated to form 5-methylcytosine"
cctctgtgcggatcttggcctagaggtcagtcatctgtccgttcctgactctgctggtgacgtgatcactgtagaatggtgtcatctcataccccaaaagcataagcacttctgacctttaa

SEQ ID NO: 10478 - DNA, 122 bp, Homo sapiens
  misc_feature (61)..(62): /note="This region represents a CpG dinucleotide"
  misc_feature (61)..(61): /note="Nucleotide may be methylated to form 5-methylcytosine"
gatttcaattaagataccatgagcacgggcatcaccgctgctccagggggtgggtggtggcgagggcatgccttggccctgccgccttgtccttatctttacccccagcttggggagcctga

SEQ ID NO: 10479 - DNA, 122 bp, Homo sapiens
  misc_feature (61)..(62): /note="This region represents a CpG dinucleotide"
  misc_feature (61)..(61): /note="Nucleotide may be methylated to form 5-methylcytosine"
cagtgactccatcttgggctattgactccatgctgagctgctgctaaactttgaggcccacgaagaaactgtgaaaaatatttccttcacaaacaactgttataaataaagttttggtgttg

SEQ ID NO: 10480 - DNA, 122 bp, Homo sapiens
  misc_feature (61)..(62): /note="This region represents a CpG dinucleotide"
  misc_feature (61)..(61): /note="Nucleotide may be methylated to form 5-methylcytosine"
ttgtgtcattctgcaaagagcactatgacttctgggtttccctgagtcaaactggatcatcgtggcctaattagtgtggtgccagcccattcccaaccatctgccagatgcctccaagcccc

SEQ ID NO: 10481 - DNA, 122 bp, Homo sapiens
  misc_feature (61)..(62): /note="This region represents a CpG dinucleotide"
  misc_feature (61)..(61): /note="Nucleotide may be methylated to form 5-methylcytosine"
cattggcaaataaagtactttgaattatgtttcgagtagtgtttcaaagtatattatacacgggtttcaaatagaaaaactaaaaggtggaataaaacaatttggaagagtttagtaaagcg

SEQ ID NO: 10482 - DNA, 122 bp, Homo sapiens
  misc_feature (61)..(62): /note="This region represents a CpG dinucleotide"
  misc_feature (61)..(61): /note="Nucleotide may be methylated to form 5-methylcytosine"
gctcgggtaggctggggtggtacaggtttgacttctgccgaggttataataatgatctaacgatgactggtgttcatggggtgctttctggctcagaaaacgccttcatatacgtctctcat

SEQ ID NO: 10483 - DNA, 122 bp, Homo sapiens
  misc_feature (61)..(62): /note="This region represents a CpG dinucleotide"
  misc_feature (61)..(61): /note="Nucleotide may be methylated to form 5-methylcytosine"
gaattcagtattcaaagccctccgtgaatgggcttggtccttcctccctggcctctcttgcgtggctccatgctctgagctgcctactcgctgactcattcatttaatgtttattctttggt

SEQ ID NO: 10484 - DNA, 122 bp, Homo sapiens
  misc_feature (61)..(62): /note="This region represents a CpG dinucleotide"
  misc_feature (61)..(61): /note="Nucleotide may be methylated to form 5-methylcytosine"
atattttgttgatttagacttaatttacaagtaaggctgacagcccacagagtgtgatcacgacagcattgttatggaaataaatgccagctcatgcatttgggatgtacaccatggatctg

SEQ ID NO: 10485 - DNA, 122 bp, Homo sapiens
  misc_feature (61)..(62): /note="This region represents a CpG dinucleotide"
  misc_feature (61)..(61): /note="Nucleotide may be methylated to form 5-methylcytosine"
taagtgactaatggcaggaggcatccacagcgtagagatgctggacaaagggatgattcacgtctgagcaggacagtgcaagatttcatcacactactgaggacagtacagaatttaattat

SEQ ID NO: 10486 - DNA, 122 bp, Homo sapiens
  misc_feature (61)..(62): /note="This region represents a CpG dinucleotide"
  misc_feature (61)..(61): /note="Nucleotide may be methylated to form 5-methylcytosine"
attactggaacaaggctgttgaatttatattaaaaagttcagacaccctcagacacatgacgccatctggtcgtgaaatgtactcttggcaaatggaggaaaaggaacaggggaagatcctc

SEQ ID NO: 10487 - DNA, 122 bp, Homo sapiens
  misc_feature (61)..(62): /note="This region represents a CpG dinucleotide"
  misc_feature (61)..(61): /note="Nucleotide may be methylated to form 5-methylcytosine"
tgtaaatatttgtgcgttcccaagttataaagtagagctcttggcttacaaaggtcaggacgacaaggaacaatttgcttagtgtttctttaggctgtgttgccaagacttcttgtcaactg

SEQ ID NO: 10488 - DNA, 122 bp, Homo sapiens
  misc_feature (61)..(62): /note="This region represents a CpG dinucleotide"
  misc_feature (61)..(61): /note="Nucleotide may be methylated to form 5-methylcytosine"
acattctgtactgactctgtaccacacattgttctaggcatttaaaatgcactaagtggccgggcgcggtggcttatgcctgtaatccagcactttaggacggtggcttacgcctgtaatcc

SEQ ID NO: 10489 - DNA, 122 bp, Homo sapiens
  misc_feature (61)..(62): /note="This region represents a CpG dinucleotide"
  misc_feature (61)..(61): /note="Nucleotide may be methylated to form 5-methylcytosine"
gcacacctcatgcctaagtcatgaccacacaactgtaagagtataacacattatccatcacgtctcctaaaaaattcaccctcagtattctgtaggatcctcttatcaatgggtttcacttt

SEQ ID NO: 10490 - DNA, 122 bp, Homo sapiens
  misc_feature (61)..(62): /note="This region represents a CpG dinucleotide"
  misc_feature (61)..(61): /note="Nucleotide may be methylated to form 5-methylcytosine"
atgtagccttattgcctacttcttttttctgagacagcagtgatgccttgtcacatttttcgtcctaatttttacatttgtagaccagagcgagatcagggcaatccattttgaagaaaact

SEQ ID NO: 10491 - DNA, 122 bp, Homo sapiens
  misc_feature (61)..(62): /note="This region represents a CpG dinucleotide"
  misc_feature (61)..(61): /note="Nucleotide may be methylated to form 5-methylcytosine"
tttattggttttcaactttcagatcctatcaatagaagctgtagacaaatatccattcttcgtctgaggacaaatgacagaggatttaaccattcagggaactgaaaagaacacggatggca

SEQ ID NO: 10492 - DNA, 122 bp, Homo sapiens
  misc_feature (61)..(62): /note="This region represents a CpG dinucleotide"
  misc_feature (61)..(61): /note="Nucleotide may be methylated to form 5-methylcytosine"
caggaactcatgtcttaaactgttgctggggctagaaaggggaggaaatggtggaaaacccggtcctttaggcaacaggagctatgagccaggcaaagcacactgcaggccttgaggtcaga

SEQ ID NO: 10493 - DNA, 122 bp, Homo sapiens
  misc_feature (61)..(62): /note="This region represents a CpG dinucleotide"
  misc_feature (61)..(61): /note="Nucleotide may be methylated to form 5-methylcytosine"
tgtttccagaactaactcttttaacctcattcaatgagctaatatgtgtaaaacacctggcgtataggatgcactcaataaatgctaattcttctcctcccccctctattaagagctgacaa

SEQ ID NO: 10494 - DNA, 122 bp, Homo sapiens
  misc_feature (61)..(62): /note="This region represents a CpG dinucleotide"
  misc_feature (61)..(61): /note="Nucleotide may be methylated to form 5-methylcytosine"
actaacccgagttttaaatagataccattgcatttaaggaatgaaaaatcagagcaccaacgggcttgtccagtcatattgcttatctgtgagccaggaggaatgtaattctgccttcacca

SEQ ID NO: 10495 - DNA, 122 bp, Homo sapiens
  misc_feature (61)..(62): /note="This region represents a CpG dinucleotide"
  misc_feature (61)..(61): /note="Nucleotide may be methylated to form 5-methylcytosine"
cccaatactttgatgtctagaaatggatctcagtcagttgttgttgaagtcctcctaaaacggcatttgatttaattcaacacatactgagaccacagtcagccttctcacaggcgaggagg

SEQ ID NO: 10496 - DNA, 122 bp, Homo sapiens
  misc_feature (61)..(62): /note="This region represents a CpG dinucleotide"
  misc_feature (61)..(61): /note="Nucleotide may be methylated to form 5-methylcytosine"
tccatgcagaagttatgtttactgtgaacataggccgcaggaggccttggggagcttctgcgggtggtaggagacacactttgctaggtctgcaatttcccttctggccaacaagggctgca

SEQ ID NO: 10497 - DNA, 122 bp, Homo sapiens
  misc_feature (61)..(62): /note="This region represents a CpG dinucleotide"
  misc_feature (61)..(61): /note="Nucleotide may be methylated to form 5-methylcytosine"
cccgtgttctctgcagggcacttagaggactcctgtgctgacctctcaggcagccttctacgaagggacgcggagaataacaggaaggatttccatttcctttttctaggaaaaaaacaaaa

SEQ ID NO: 10498 - DNA, 122 bp, Homo sapiens
  misc_feature (61)..(62): /note="This region represents a CpG dinucleotide"
  misc_feature (61)..(61): /note="Nucleotide may be methylated to form 5-methylcytosine"
attgcccatggaacacataactctgcagtggtttcccctacaaaatgtcagccactcttacgatggaatgtgcccttgcctgctgtgggcaccgctcaaatctaacccatcatttttctttt

SEQ ID NO: 10499 - DNA, 122 bp, Homo sapiens
  misc_feature (61)..(62): /note="This region represents a CpG dinucleotide"
  misc_feature (61)..(61): /note="Nucleotide may be methylated to form 5-methylcytosine"
aacactaactcaggcttctagtggtctgatgagcttaaaaatcaattaataagccgggcgcggtggctcaaacctgtaatcccagcactttgggaggccgaggcgggcggatcacgaggtca

SEQ ID NO: 10500 - DNA, 122 bp, Homo sapiens
  misc_feature (61)..(62): /note="This region represents a CpG dinucleotide"
  misc_feature (61)..(61): /note="Nucleotide may be methylated to form 5-methylcytosine"
tatttatctttgcagaaggcagtatcttaaccaccacatagtagcattaatctgtcacatcgtcccgaacatgcaagacactatttgttattgaagaggagacttctttatggaaggatatt

SEQ ID NO: 10501 - DNA, 122 bp, Homo sapiens
  misc_feature (61)..(62): /note="This region represents a CpG dinucleotide"
  misc_feature (61)..(61): /note="Nucleotide may be methylated to form 5-methylcytosine"
aatcctggagggggcatgtttagggccaagaaaatgggccttggggctctggctgctcctcgttgcccacggtggttcagttctctctgtggggaggcagcgggagtgacagccaggacaga

SEQ ID NO: 10502 - DNA, 122 bp, Homo sapiens
  misc_feature (61)..(62): /note="This region represents a CpG dinucleotide"
  misc_feature (61)..(61): /note="Nucleotide may be methylated to form 5-methylcytosine"
cctatcactaatctggcccttgggaatagaagcatctattatgaatgggcccagaggaggcgtctcctaagtgaagctgccttcgacattctgctgagggttccaagtattcacacaagagc

SEQ ID NO: 10503 - DNA, 122 bp, Homo sapiens
  misc_feature (61)..(62): /note="This region represents a CpG dinucleotide"
  misc_feature (61)..(61): /note="Nucleotide may be methylated to form 5-methylcytosine"
tatttattttactaaaaagaacaaaaacaacagactgctgtcctttagacaataggatcacgtcatctgagccctctgtgccccaggtgacaagcccagccccaagttctctttcctcagcc

SEQ ID NO: 10504 - DNA, 122 bp, Homo sapiens
  misc_feature (61)..(62): /note="This region represents a CpG dinucleotide"
  misc_feature (61)..(61): /note="Nucleotide may be methylated to form 5-methylcytosine"
aaaagaaaaaggaaactgcccaactagctgcaaaattattatcaggtaaactcatcattacgaggcagagaatatttttcttcctttccattcaagaaacagaccactaaaaaaacctgtct

SEQ ID NO: 10505 - DNA, 122 bp, Homo sapiens
  misc_feature (61)..(62): /note="This region represents a CpG dinucleotide"
  misc_feature (61)..(61): /note="Nucleotide may be methylated to form 5-methylcytosine"
tgagccagtgctgctggccaagacgcgctcgtctgagtccatcccacacctgggcgcagacgccggcctgcatgctgcactgcacgccactgtggtccaggacctgggcctgcacgacggca

SEQ ID NO: 10506 - DNA, 122 bp, Homo sapiens
  misc_feature (61)..(62): /note="This region represents a CpG dinucleotide"
  misc_feature (61)..(61): /note="Nucleotide may be methylated to form 5-methylcytosine"
tttgcccttatagaacctgccttaacagtgaaatgccagattcaagtgatttcacaagcccgtggcagatggtgccggggaggctggacactgtcatcaggccacagatatccctcaccatg

SEQ ID NO: 10507 - DNA, 122 bp, Homo sapiens
  misc_feature (61)..(62): /note="This region represents a CpG dinucleotide"
  misc_feature (61)..(61): /note="Nucleotide may be methylated to form 5-methylcytosine"
aagtgactgtagttacccacaattcctggattataaccccagaattcccaatgagataatcgtcacagccacgccctcctgtagcggaagcccggccgcctacacagagctccaaggttact

SEQ ID NO: 10508 - DNA, 122 bp, Homo sapiens
  misc_feature (61)..(62): /note="This region represents a CpG dinucleotide"
  misc_feature (61)..(61): /note="Nucleotide may be methylated to form 5-methylcytosine"
ttatatatataaagggctcctgtaaatcaataagaaaaatgtcattaacttaatagttcacgttaacaaagaacatgaaccaacagcttacaagggggagagagccctagcagatggcttct

SEQ ID NO: 10509 - DNA, 122 bp, Homo sapiens
  misc_feature (61)..(62): /note="This region represents a CpG dinucleotide"
  misc_feature (61)..(61): /note="Nucleotide may be methylated to form 5-methylcytosine"
ataatgaaagtttttctgtagttattgcctcttagaagtgtgtaagtcttcagctgggcacggtggctcacgccagtaatcccagcactttgggaggctgaggcatgtggatgatgaggtca

SEQ ID NO: 10510 - DNA, 122 bp, Homo sapiens
  misc_feature (61)..(62): /note="This region represents a CpG dinucleotide"
  misc_feature (61)..(61): /note="Nucleotide may be methylated to form 5-methylcytosine"
acctcttcaaaaagctatacctgactcaccctagagaatttggttcctctggcgtgtgctcgtgatacttcatttgctggatggaacatgagtgaatggagtggtggcattcctgtcggcct

SEQ ID NO: 10511 - DNA, 122 bp, Homo sapiens
  misc_feature (61)..(62): /note="This region represents a CpG dinucleotide"
  misc_feature (61)..(61): /note="Nucleotide may be methylated to form 5-methylcytosine"
tgaaacacacacacaaacaccccacaccttcaaagtgtccccagtgacaagttaagcagtcgtccgagattatgtaaaaaattcctgaatcctttaagtcctgtcctttattcctttctaag

SEQ ID NO: 10512 - DNA, 122 bp, Homo sapiens
  misc_feature (61)..(62): /note="This region represents a CpG dinucleotide"
  misc_feature (61)..(61): /note="Nucleotide may be methylated to form 5-methylcytosine"
aaaaaattgagattcaaatgatggcaagctgtttcatccaagaacatgcatgtcagattacgttttccaaagatgctgcaacaatatttcctatcccacaatgtggccttgatactcctctc

SEQ ID NO: 10513 - DNA, 122 bp, Homo sapiens
  misc_feature (61)..(62): /note="This region represents a CpG dinucleotide"
  misc_feature (61)..(61): /note="Nucleotide may be methylated to form 5-methylcytosine"
gcgacctcggagtataacctaacctccgagcaacatatgctgagactataccagtcaaggcgaatatccacatacaattgacccaataatttgaccaacggaacaagttaccctagtgataa

SEQ ID NO: 10514 - DNA, 122 bp, Homo sapiens
  misc_feature (61)..(62): /note="This region represents a CpG dinucleotide"
  misc_feature (61)..(61): /note="Nucleotide may be methylated to form 5-methylcytosine"
tatgtcaaagcttctccaattgtatactttaaccatgtgcaattcattatatggcaattacgcctcaataaagctggttttaagaagaaaaattatcagagggcttacactatttcaattgg

SEQ ID NO: 10515 - DNA, 122 bp, Homo sapiens
  misc_feature (61)..(62): /note="This region represents a CpG dinucleotide"
  misc_feature (61)..(61): /note="Nucleotide may be methylated to form 5-methylcytosine"
attaaagagacaactcatttctagtcacctctctgcaggtctccagcagctctgctatgacgtaggtgaatcatccttctccccaacttgttttattttccttagtatgtgctagtcatgtt

SEQ ID NO: 10516 - DNA, 122 bp, Homo sapiens
  misc_feature (61)..(62): /note="This region represents a CpG dinucleotide"
  misc_feature (61)..(61): /note="Nucleotide may be methylated to form 5-methylcytosine"
aagacagggaagaaaaagaatgtgctggcgtgttagacagtaatgcataccctggaacaccgagtgtgcagaaacgagaggacgcaggagtaagattgcacagatcttactcctgtgagata

SEQ ID NO: 10517 - DNA, 122 bp, Homo sapiens
  misc_feature (61)..(62): /note="This region represents a CpG dinucleotide"
  misc_feature (61)..(61): /note="Nucleotide may be methylated to form 5-methylcytosine"
ttttaaggtggttagtcatctgctaaattggctgaaatgcggattacccagttccttcgtcgtacagagttgcattctgaggagtggggctcggggatacagcccccagaaattctgaacct

SEQ ID NO: 10518 - DNA, 122 bp, Homo sapiens
  misc_feature (61)..(62): /note="This region represents a CpG dinucleotide"
  misc_feature (61)..(61): /note="Nucleotide may be methylated to form 5-methylcytosine"
attcagacctctgttctagttattccatctgggtaaatctaaggacataatgtgaaataccggcaacattatgcaaaagctgttttgagatctagaggtctagactcacaagaaataaggaa

SEQ ID NO: 10519 - DNA, 122 bp, Homo sapiens
  misc_feature (61)..(62): /note="This region represents a CpG dinucleotide"
  misc_feature (61)..(61): /note="Nucleotide may be methylated to form 5-methylcytosine"
gatgaggcctggaatcagtcccaggctagagggcagagtccaggagactgccacctgccacgctgtccgctatttgttcaaaggtttctcagcttagtgacaaaatgagcaaagaaagaagt

SEQ ID NO: 10520 - DNA, 122 bp, Homo sapiens
  misc_feature (61)..(62): /note="This region represents a CpG dinucleotide"
  misc_feature (61)..(61): /note="Nucleotide may be methylated to form 5-methylcytosine"
atctgtctgatcatatcttctttcaaaacaacttctagaaatgactcattgaatgaactacggacttccttagaacttaatattaaagtggttagattcgttggccttaattttggctaact

SEQ ID NO: 10521 - DNA, 122 bp, Homo sapiens
  misc_feature (61)..(62): /note="This region represents a CpG dinucleotide"
  misc_feature (61)..(61): /note="Nucleotide may be methylated to form 5-methylcytosine"
tttgtattcctagaacctagcacaatgcctgacacatagcaggtgttccataaatatctgcggactgactgtctatttcacttatccttgttccttgtactgcatttcagttctcgctactg

SEQ ID NO: 10522 - DNA, 122 bp, Homo sapiens
  misc_feature (61)..(62): /note="This region represents a CpG dinucleotide"
  misc_feature (61)..(61): /note="Nucleotide may be methylated to form 5-methylcytosine"
ggcccatgcggggaagtagcgtccttggtcccttgctgagggcctgtggctaggagctgtcgtcttctgggctggctcctgttttaagtgaggctgtgtctcacaaacagacaagcgcccct

SEQ ID NO: 10523 - DNA, 122 bp, Homo sapiens
  misc_feature (61)..(62): /note="This region represents a CpG dinucleotide"
  misc_feature (61)..(61): /note="Nucleotide may be methylated to form 5-methylcytosine"
ttatgatttggcttagtgtacgtgcagtgacccatgtgtgcatattgatcatcaatccatcgtggctttcttagctatcttggctttcttttgttagcagagcttacctgcaactgtagttt

SEQ ID NO: 10524 - DNA, 122 bp, Homo sapiens
  misc_feature (61)..(62): /note="This region represents a CpG dinucleotide"
  misc_feature (61)..(61): /note="Nucleotide may be methylated to form 5-methylcytosine"
cgtggctgggctgtccagctccgaatccccccagtgctgcacccgaacgcctccctcccacgcagcctcctgccgtctccgcaggttttaaatcagacgccgctcaggctgtgcccaggctg

SEQ ID NO: 10525 - DNA, 122 bp, Homo sapiens
  misc_feature (61)..(62): /note="This region represents a CpG dinucleotide"
  misc_feature (61)..(61): /note="Nucleotide may be methylated to form 5-methylcytosine"
agagtcatatatttgtgggatctgcctgtgtgcatttgtcattcatggaacacccaaaggcgcttagaactccaaagacccagcaccactggcataaagaacgaggcgagtaagaccagtga

SEQ ID NO: 10526 - DNA, 122 bp, Homo sapiens
  misc_feature (61)..(62): /note="This region represents a CpG dinucleotide"
  misc_feature (61)..(61): /note="Nucleotide may be methylated to form 5-methylcytosine"
gtccaataagcaacatctagctccacacagaaccagcagggggaattcagacattcatatcgtatgattggcttctgtacatctctggaagttataccaagaatcccaaggtcattagagct

SEQ ID NO: 10527 - DNA, 122 bp, Homo sapiens
  misc_feature (61)..(62): /note="This region represents a CpG dinucleotide"
  misc_feature (61)..(61): /note="Nucleotide may be methylated to form 5-methylcytosine"
tctttattatatctaaactcactgattcactctggtgttcctcattcctccctgcagatccgtgctttcatcttggctcatttcccttcagcctgaagatcttcctttagtatttcctttgg

SEQ ID NO: 10528 - DNA, 122 bp, Homo sapiens
  misc_feature (61)..(62): /note="This region represents a CpG dinucleotide"
  misc_feature (61)..(61): /note="Nucleotide may be methylated to form 5-methylcytosine"
tgagtttggtaattgccaaccggtatgttacccaagacatatgcatcctctcatgtggagcggccaggctcatggctggaatttcaagcacttgctccaattgtttgcagagttctggtcat

SEQ ID NO: 10529 - DNA, 122 bp, Homo sapiens
  misc_feature (61)..(62): /note="This region represents a CpG dinucleotide"
  misc_feature (61)..(61): /note="Nucleotide may be methylated to form 5-methylcytosine"
taagaaggatgagagggtgcagagaatgaatctttgattttgcaatggcccagagtcatacggtataaaactacagctgtgcaatgatctggaggtattttaaaggttacaaatagaattta

SEQ ID NO: 10530 - DNA, 122 bp, Homo sapiens
  misc_feature (61)..(62): /note="This region represents a CpG dinucleotide"
  misc_feature (61)..(61): /note="Nucleotide may be methylated to form 5-methylcytosine"
aaccgcagtatgtatttcacaaccagcttttccaaactaggtcccaggaagcactggtttcggcgagtgttaccagatctcctgcaggggagaaacggtcacgaaacatgaactggtctgcc

SEQ ID NO: 10531 - DNA, 122 bp, Homo sapiens
  misc_feature (61)..(62): /note="This region represents a CpG dinucleotide"
  misc_feature (61)..(61): /note="Nucleotide may be methylated to form 5-methylcytosine"
atgccttcaccactgccatctccgattgtgaaagtccaaatgggtgccgaaacttgtgggcgcgcagcttgcagatcctgggcggtggccaagcaggccatgttttagaattctttccaggc

SEQ ID NO: 10532 - DNA, 122 bp, Homo sapiens
  misc_feature (61)..(62): /note="This region represents a CpG dinucleotide"
  misc_feature (61)..(61): /note="Nucleotide may be methylated to form 5-methylcytosine"
acatggaatttctttagcgtcatgcgaactgaacccagttctcgattaatcctttccaaacgatcttccaaggcttcctaggtgaaaacaatgggaaaagtttaattagaattctataccaa

SEQ ID NO: 10533 - DNA, 122 bp, Homo sapiens
  misc_feature (61)..(62): /note="This region represents a CpG dinucleotide"
  misc_feature (61)..(61): /note="Nucleotide may be methylated to form 5-methylcytosine"
gtgaactgtgagtgtgctgtggctgtgagcgtgtgcacacgtgaactgagcgtgacagtgcgaatgtgtgtgccgcgaattccactggccacatgaatgcaggcgaggccgctccgctaggc

SEQ ID NO: 10534 - DNA, 122 bp, Homo sapiens
  misc_feature (61)..(62): /note="This region represents a CpG dinucleotide"
  misc_feature (61)..(61): /note="Nucleotide may be methylated to form 5-methylcytosine"
ggagcagcgagaagaagaagaggaggaaggacacaaagaggaggaggcggcggcgggcggcgaactgagggcagctcagggggaggaggactcattgtccggtccccccagtccaattgata

SEQ ID NO: 10535 - DNA, 122 bp, Homo sapiens
  misc_feature (61)..(62): /note="This region represents a CpG dinucleotide"
  misc_feature (61)..(61): /note="Nucleotide may be methylated to form 5-methylcytosine"
ggggtctctgtgatggcagtttagcctatatcccaatatatctgggataccaaatattggcgagaacagggagtagcagagatgtttacactctaggaacacatattttgaaaatcaattag

SEQ ID NO: 10536 - DNA, 122 bp, Homo sapiens
  misc_feature (61)..(62): /note="This region represents a CpG dinucleotide"
  misc_feature (61)..(61): /note="Nucleotide may be methylated to form 5-methylcytosine"
catcattttctcttgtgcttgatttaatctcatgctgttttgttcctcacggtccctaagcgtacagaatccatggctaatgttgccaaagagaagccacattgagtgattgtattagtcca

SEQ ID NO: 10537 - DNA, 122 bp, Homo sapiens
  misc_feature (61)..(62): /note="This region represents a CpG dinucleotide"
  misc_feature (61)..(61): /note="Nucleotide may be methylated to form 5-methylcytosine"
gatgctcgctaccgaattatttgaaatcgaaggtcaaaacaacaagtgaaagacaggaaacgaccaaaattggcacacatctgacacaatggtaaccaagcagaagggtgttcaccaggaaa

SEQ ID NO: 10538 - DNA, 122 bp, Homo sapiens
  misc_feature (61)..(62): /note="This region represents a CpG dinucleotide"
  misc_feature (61)..(61): /note="Nucleotide may be methylated to form 5-methylcytosine"
ttggaactcacagatcttaatattgttcccctaatctttatacagtgccccatgcctgtacgctctctgcctccctcctcctcctcactccaagctggcatcctgattggttctaccttgag

SEQ ID NO: 10539 - DNA, 122 bp, Homo sapiens
  misc_feature (61)..(62): /note="This region represents a CpG dinucleotide"
  misc_feature (61)..(61): /note="Nucleotide may be methylated to form 5-methylcytosine"
gatgagaaactgagagcagttaacaactaaaggttaagtatgagagccaggatgcacttgcggtggtattgcttacaaagagatccttatcaccctgcagtggaagagagctcagctgcggg

SEQ ID NO: 10540 - DNA, 122 bp, Homo sapiens
  misc_feature (61)..(62): /note="This region represents a CpG dinucleotide"
  misc_feature (61)..(61): /note="Nucleotide may be methylated to form 5-methylcytosine"
ctctcaatttaatactacaaaaagcatttctagtcagagaaagaactctacaatcttttgcggacaagaagatatggcattaaactgtggagtttttaagggcgaacagggatatactaatt

SEQ ID NO: 10541 - DNA, 122 bp, Homo sapiens
  misc_feature (61)..(62): /note="This region represents a CpG dinucleotide"
  misc_feature (61)..(61): /note="Nucleotide may be methylated to form 5-methylcytosine"
actgaaggttccttgggtttgtgttttctctggaaaaaatttttcgtgaaacctgatgtacgtatactgcactgatgtagcctgcctgacactgtaagagattttggaaccatactcaacct

SEQ ID NO: 10542 - DNA, 122 bp, Homo sapiens
  misc_feature (61)..(62): /note="This region represents a CpG dinucleotide"
  misc_feature (61)..(61): /note="Nucleotide may be methylated to form 5-methylcytosine"
aggacccaatgcataatgcatattgactgttaactctctcctctctggaatttcttgcctcgtgagaaagttcagaacttcccacacacttaatatccaaacactttcttcacgcttagctc

SEQ ID NO: 10543 - DNA, 122 bp, Homo sapiens
  misc_feature (61)..(62): /note="This region represents a CpG dinucleotide"
  misc_feature (61)..(61): /note="Nucleotide may be methylated to form 5-methylcytosine"
acaggatttagccacagcatgacccggcaacttgggttcttaacgctggcaaaagccagccgaactaacagggagcaacttataaaaatgcaaagacgtacaagatcaaaacaaacaaaaaa

SEQ ID NO: 10544 - DNA, 122 bp, Homo sapiens
  misc_feature (61)..(62): /note="This region represents a CpG dinucleotide"
  misc_feature (61)..(61): /note="Nucleotide may be methylated to form 5-methylcytosine"
attgtgatggtaactgaacttatcagaagtcaacttatccttgttgacttatccttgttacgtaagtccaacttatcttgttgatgagtgtgggtgggaggcacgactgagagatatattga

SEQ ID NO: 10545 - DNA, 122 bp, Homo sapiens
  misc_feature (61)..(62): /note="This region represents a CpG dinucleotide"
  misc_feature (61)..(61): /note="Nucleotide may be methylated to form 5-methylcytosine"
aggagaaggaggagtgagacccagccgggtcaataaacctggacgcttggaccctgcctgcgagtctgccggggcgggagggcgcgtcggtggctgctgggccttgcgcacggggagtcgct

SEQ ID NO: 10546 - DNA, 122 bp, Homo sapiens
  misc_feature (61)..(62): /note="This region represents a CpG dinucleotide"
  misc_feature (61)..(61): /note="Nucleotide may be methylated to form 5-methylcytosine"
ctctctctttttttcaagcctgagaacataatgcttttggatagaaatgtccccaaacctcggatcaagatcattgactttgggttggcccataaaattgactttggaaatgaatttaaaaa

SEQ ID NO: 10547 - DNA, 122 bp, Homo sapiens
  misc_feature (61)..(62): /note="This region represents a CpG dinucleotide"
  misc_feature (61)..(61): /note="Nucleotide may be methylated to form 5-methylcytosine"
atcccgttatgactgcctatgactactaggttatatggctgaaaccatgaaatgtggacacgtgatttcattcagccaaggatgtggactaacatgcccatcaatctcatttgtctttttcc

SEQ ID NO: 10548 - DNA, 122 bp, Homo sapiens
  misc_feature (61)..(62): /note="This region represents a CpG dinucleotide"
  misc_feature (61)..(61): /note="Nucleotide may be methylated to form 5-methylcytosine"
cccagaaatggattaacaagccctgactcccctcttggtgcaaggtcagccctgcacttacgaggctccaagcctggctcttcaccaggcactctgtgaggaaggagcacccattcaaaaca

SEQ ID NO: 10549 - DNA, 122 bp, Homo sapiens
  misc_feature (61)..(62): /note="This region represents a CpG dinucleotide"
  misc_feature (61)..(61): /note="Nucleotide may be methylated to form 5-methylcytosine"
tctccaggtccctctaacatcatgagccagtggggcaccccctggcaacccctatatacacgctgggcaaccgtaagtatttagggagacagaggtgcctcttctgcagagtcacccatggc

SEQ ID NO: 10550 - DNA, 122 bp, Homo sapiens
  misc_feature (61)..(62): /note="This region represents a CpG dinucleotide"
  misc_feature (61)..(61): /note="Nucleotide may be methylated to form 5-methylcytosine"
gaacctagcttgagaaacttcattcattcatttattcaacatgtctttattgaacacttacgatgtgcactgttgttctaggtgctgcagatatatctgtaaataatgagatgaaaatagtt

SEQ ID NO: 10551 - DNA, 122 bp, Homo sapiens
  misc_feature (61)..(62): /note="This region represents a CpG dinucleotide"
  misc_feature (61)..(61): /note="Nucleotide may be methylated to form 5-methylcytosine"
tttacagggtgaagtacctgtcaggtccttctactacatgtaatcctcaaatctctctgacgctcttcctctacagtgcaaatcactctccttcagcagacattgctctctctgtaacataa

SEQ ID NO: 10552 - DNA, 122 bp, Homo sapiens
  misc_feature (61)..(62): /note="This region represents a CpG dinucleotide"
  misc_feature (61)..(61): /note="Nucleotide may be methylated to form 5-methylcytosine"
gggcaggaggccttactttcttgccatgtagtcatcttcatagatctgcttgagtgtcctcgtgacatggcagctgacttccttcacagtgagtgatccaaggaagagagtaaacaggaaac

SEQ ID NO: 10553 - DNA, 122 bp, Homo sapiens
  misc_feature (61)..(62): /note="This region represents a CpG dinucleotide"
  misc_feature (61)..(61): /note="Nucleotide may be methylated to form 5-methylcytosine"
gaagtggcaataaaagaaagggctattggaatgtggagatggtggtaggaaggaaagaagcgagtcacagagagcagttgtacaagatgctaaagcccatgtgccctccattttaacagact

SEQ ID NO: 10554 - DNA, 122 bp, Homo sapiens
  misc_feature (61)..(62): /note="This region represents a CpG dinucleotide"
  misc_feature (61)..(61): /note="Nucleotide may be methylated to form 5-methylcytosine"
aatatgaatcaatgctgaatcattatcaagcttcaaatcatcatcttctccaaatgtacacgtcaccctttactccctcgttccttcctaacaaatcatgactgccttcttctaccttagac

SEQ ID NO: 10555 - DNA, 122 bp, Homo sapiens
  misc_feature (61)..(62): /note="This region represents a CpG dinucleotide"
  misc_feature (61)..(61): /note="Nucleotide may be methylated to form 5-methylcytosine"
ggcttagggagctgagagcccagcgctaatgcctaagaaagtcgtgggtggattagaaatcgagggggattagggccagagctggtggctgatgcaggagcggagcccctccctctgaggaa

SEQ ID NO: 10556 - DNA, 122 bp, Homo sapiens
  misc_feature (61)..(62): /note="This region represents a CpG dinucleotide"
  misc_feature (61)..(61): /note="Nucleotide may be methylated to form 5-methylcytosine"
tcagatggtgatcagcggtcagcaggatgatgattggtgagacggagaggcagcagttgacgagagacagcaagacagccatcagcactacggtaatcaaagctgcagagctgtaacactaa

SEQ ID NO: 10557 - DNA, 122 bp, Homo sapiens
  misc_feature (61)..(62): /note="This region represents a CpG dinucleotide"
  misc_feature (61)..(61): /note="Nucleotide may be methylated to form 5-methylcytosine"
tctgcagttcaaagtgtagtcagcaaaaaaagcatacacgctatcgcactgggaggaaatcggtgtctttgaaatcaaataccctgccattggcatatccaggcttgaaactcagctgcagc

SEQ ID NO: 10558 - DNA, 122 bp, Homo sapiens
  misc_feature (61)..(62): /note="This region represents a CpG dinucleotide"
  misc_feature (61)..(61): /note="Nucleotide may be methylated to form 5-methylcytosine"
attttccatggatttgtgagtgactgctcacagactcacatctgtgttcatgactcagaccgtgagctcgcaaggcagaagccaagactgtgtccattcaccattgtccccagtcacgggca

SEQ ID NO: 10559 - DNA, 122 bp, Homo sapiens
  misc_feature (61)..(62): /note="This region represents a CpG dinucleotide"
  misc_feature (61)..(61): /note="Nucleotide may be methylated to form 5-methylcytosine"
tgtagctgaaaaacaaagataaatcaacgtgtacagcctgctgaaagaggagctagttttcgtactactttcctgaaaggaaatatcagaaatggcaatggaagaaacatccttcttaggtc

SEQ ID NO: 10560 - DNA, 122 bp, Homo sapiens
  misc_feature (61)..(62): /note="This region represents a CpG dinucleotide"
  misc_feature (61)..(61): /note="Nucleotide may be methylated to form 5-methylcytosine"
ggaaggttgatggcttgcagagctgtgtgcagatcctagtgggatctgattcagtgcaggcgtctctgtcattggacacccacagccagctgcccatggattccggcagatgctcctgtttt

SEQ ID NO: 10561 - DNA, 122 bp, Homo sapiens
  misc_feature (61)..(62): /note="This region represents a CpG dinucleotide"
  misc_feature (61)..(61): /note="Nucleotide may be methylated to form 5-methylcytosine"
taatctgctaagcaactctaataataaaactaggatgtgggcggcaagccacccaggtgccgaggcaggagaccgagggcaccagctgttccagtataataaaatataaaacaagaatagtt

SEQ ID NO: 10562 - DNA, 122 bp, Homo sapiens
  misc_feature (61)..(62): /note="This region represents a CpG dinucleotide"
  misc_feature (61)..(61): /note="Nucleotide may be methylated to form 5-methylcytosine"
ctactaccagaaaaccagcctaagacaaacctgccctctcttgtgacaaaacccaaactacgactcaagaattaaatgctgatggtaaatacaatagagtttggaatgacaacagaatgttc

SEQ ID NO: 10563 - DNA, 122 bp, Homo sapiens
  misc_feature (61)..(62): /note="This region represents a CpG dinucleotide"
  misc_feature (61)..(61): /note="Nucleotide may be methylated to form 5-methylcytosine"
cgcttctgtctctacctggcctcacctccccccgccccgagcgggcgtctcagacgaagacggaccctgccactgtagagtggcaatgtgtgtgccgtgccacacctcctttctcaaaactg

SEQ ID NO: 10564 - DNA, 122 bp, Homo sapiens
  misc_feature (61)..(62): /note="This region represents a CpG dinucleotide"
  misc_feature (61)..(61): /note="Nucleotide may be methylated to form 5-methylcytosine"
agcagaaggatacatttttagtattttattgcctgtcaatgctctgcgccttgccagaaacggataacgataattttaaattatttatgtgtttatttttatgagacagtttcactctgtca

SEQ ID NO: 10565 - DNA, 122 bp, Homo sapiens
  misc_feature (61)..(62): /note="This region represents a CpG dinucleotide"
  misc_feature (61)..(61): /note="Nucleotide may be methylated to form 5-methylcytosine"
tgctttcctgtctcttggggagactggacagccggcggggcgtggcgggtgctggggtctcggcccgccgctgccctcgcccccgccccaaggggccagcactcaccggcatggtctggctg

SEQ ID NO: 10566 - DNA, 122 bp, Homo sapiens
  misc_feature (61)..(62): /note="This region represents a CpG dinucleotide"
  misc_feature (61)..(61): /note="Nucleotide may be methylated to form 5-methylcytosine"
tcttggttcccacagtcttccaccagaagcccaccccacgtgtaggcgcgggcgttcaggcgggctgctgcttgctgggaaccacgtttctcagcctgacttgttctctctcttcctctcct

SEQ ID NO: 10567 - DNA, 122 bp, Homo sapiens
  misc_feature (61)..(62): /note="This region represents a CpG dinucleotide"
  misc_feature (61)..(61): /note="Nucleotide may be methylated to form 5-methylcytosine"
ctaatggcccgccagttgatacatgtgccctatcatttgcttcctgtgggggctggggggcggttccagcaagccttgcctagaattggccaattagaatccattggtgacttgatggacag

SEQ ID NO: 10568 - DNA, 122 bp, Homo sapiens
  misc_feature (61)..(62): /note="This region represents a CpG dinucleotide"
  misc_feature (61)..(61): /note="Nucleotide may be methylated to form 5-methylcytosine"
aggtaatggggggtagaaggatgttgtgataagctacaaattctggcaagggccagatcacgtgggccctgctacgccacaaggaggagcttgcttttacttagcagatgatagagatatta

SEQ ID NO: 10569 - DNA, 122 bp, Homo sapiens
  misc_feature (61)..(62): /note="This region represents a CpG dinucleotide"
  misc_feature (61)..(61): /note="Nucleotide may be methylated to form 5-methylcytosine"
tatctgacaagaggcttatttagcttttaaaaagatacacacacacacacacactacacacggattataattacaatttgctcaagaaaatgttttaagaaaggggggtgggggaatgtctc

SEQ ID NO: 10570 - DNA, 122 bp, Homo sapiens
  misc_feature (61)..(62): /note="This region represents a CpG dinucleotide"
  misc_feature (61)..(61): /note="Nucleotide may be methylated to form 5-methylcytosine"
cctttatttcccattcagtaacactgccagtttcatcatctttcctttcaactttatttacgagacgatgctgattgcagacagcatataacagaggcatttcaaatcaaacagtagagtta

SEQ ID NO: 10571 - DNA, 122 bp, Homo sapiens
  misc_feature (61)..(62): /note="This region represents a CpG dinucleotide"
  misc_feature (61)..(61): /note="Nucleotide may be methylated to form 5-methylcytosine"
gtgttgggtgtgttgttgtgaaaccaggaactgttacatttcttttgcttccacgagagacgcaatcgatgtaaagatgaagacatcacacagaagagaagagaactgagggaactacagag

SEQ ID NO: 10572 - DNA, 122 bp, Homo sapiens
  misc_feature (61)..(62): /note="This region represents a CpG dinucleotide"
  misc_feature (61)..(61): /note="Nucleotide may be methylated to form 5-methylcytosine"
tgggcgttgccgtctgacctgtgcacagatgtggccaggtgaggacacaagctgttgtctcgtttgctgtgtgctgttcgcagacacgtctcactaggcggtttgctcagaactccagagga

SEQ ID NO: 10573 - DNA, 122 bp, Homo sapiens
  misc_feature (61)..(62): /note="This region represents a CpG dinucleotide"
  misc_feature (61)..(61): /note="Nucleotide may be methylated to form 5-methylcytosine"
actcctgtcttcctgagcgcagggaggctgcagggtaattgcttttggatcttccaaatgcgggtgagacaaatccacagcagcctgtaattatcaagcatgtatgtggtgtgtatcgagta

SEQ ID NO: 10574 - DNA, 122 bp, Homo sapiens
  misc_feature (61)..(62): /note="This region represents a CpG dinucleotide"
  misc_feature (61)..(61): /note="Nucleotide may be methylated to form 5-methylcytosine"
agggcctaaggtggacagacaactgattcatttaaatacatgagacaaatgcttaaaatacgtattttaaaaaaggctacctgagtaccaagcaaggttgaccaggctgactagctgggttg

SEQ ID NO: 10575 - DNA, 122 bp, Homo sapiens
  misc_feature (61)..(62): /note="This region represents a CpG dinucleotide"
  misc_feature (61)..(61): /note="Nucleotide may be methylated to form 5-methylcytosine"
gtaccttgtccagttttttctagaaaataaaaggatgaaatgtttaactggtcaggccaacgagcacacacactccagagtgctctgtccagcacagtacacctggacagagtgggcgtttg

SEQ ID NO: 10576 - DNA, 122 bp, Homo sapiens
  misc_feature (61)..(62): /note="This region represents a CpG dinucleotide"
  misc_feature (61)..(61): /note="Nucleotide may be methylated to form 5-methylcytosine"
caaaaaagtttcaaagccaactcagaaactccatgtgcaccccatcctcccctgtccccacgttctcttgatgaaagcatccctgcttgtgcgggcacacgaaagaaaacttgggtgtcatt

SEQ ID NO: 10577 - DNA, 122 bp, Homo sapiens
  misc_feature (61)..(62): /note="This region represents a CpG dinucleotide"
  misc_feature (61)..(61): /note="Nucleotide may be methylated to form 5-methylcytosine"
agcatactggacatgcctcttctttaccttctcaggccagaacaccctcctctccacaaacgtgtgcacacttgcacgctcattaagcatgtgcacacatcatattcacacactcaagccat

SEQ ID NO: 10578 - DNA, 122 bp, Homo sapiens
  misc_feature (61)..(62): /note="This region represents a CpG dinucleotide"
  misc_feature (61)..(61): /note="Nucleotide may be methylated to form 5-methylcytosine"
accaacattgtactttctccggtctggcgaggctgagttctggtagcctgaaaatgctgacgcagccattgactgggtttgacccaggagctctgaggggccctgagagctcacaatctggc

SEQ ID NO: 10579 - DNA, 122 bp, Homo sapiens
  misc_feature (61)..(62): /note="This region represents a CpG dinucleotide"
  misc_feature (61)..(61): /note="Nucleotide may be methylated to form 5-methylcytosine"
accccctagatttgtcttttgcttttcatttgataaatcacatttctaagtggtaggtttcgtaatgcctggtaataagataggctttttaattagaagtttgttttcattaccaatttaat

SEQ ID NO: 10580 - DNA, 122 bp, Homo sapiens
  misc_feature (61)..(62): /note="This region represents a CpG dinucleotide"
  misc_feature (61)..(61): /note="Nucleotide may be methylated to form 5-methylcytosine"
aaaataaaaagagttccacaaataaggcatattggctgcaggcaaatccacacaaaggaccgctttaaagaaaaatctcttgtgttcctgagttctgagctttgggtgagtttctgaagagg

SEQ ID NO: 10581 - DNA, 122 bp, Homo sapiens
  misc_feature (61)..(62): /note="This region represents a CpG dinucleotide"
  misc_feature (61)..(61): /note="Nucleotide may be methylated to form 5-methylcytosine"
ttgttcagttttgactcatagagacacatttggcaaagcaatgtcttctgctgactgaggcgcttactggagaaaggcagttgcaaaagcagataccaaaactaagtattttaaaataattt

SEQ ID NO: 10582 - DNA, 122 bp, Homo sapiens
  misc_feature (61)..(62): /note="This region represents a CpG dinucleotide"
  misc_feature (61)..(61): /note="Nucleotide may be methylated to form 5-methylcytosine"
agtaggcgtgaggtttcaataagccagattaggtgatgcacttaccacagtgcctgcacccgttaagtgctcaataaacattagccattattctctggctcagtttggaagacttacaattg

SEQ ID NO: 10583 - DNA, 122 bp, Homo sapiens
  misc_feature (61)..(62): /note="This region represents a CpG dinucleotide"
  misc_feature (61)..(61): /note="Nucleotide may be methylated to form 5-methylcytosine"
aagaacttaaaatgttttaaagataatatttccgtctcgtctggaagtaagggaccttttcgattacttccacttacacaggagacacaggtactgtcaaatattgatagtaaaaagctaaa

SEQ ID NO: 10584 - DNA, 122 bp, Homo sapiens
  misc_feature (61)..(62): /note="This region represents a CpG dinucleotide"
  misc_feature (61)..(61): /note="Nucleotide may be methylated to form 5-methylcytosine"
tatgagtggttttgggagaggccaggctgagctcttactagctccttgcaacaaaacaagcgaatgtgaaaagtcttaaacactcagctttctggtcagaggaaatcccaaaatcagcatga

SEQ ID NO: 10585 - DNA, 122 bp, Homo sapiens
  misc_feature (61)..(62): /note="This region represents a CpG dinucleotide"
  misc_feature (61)..(61): /note="Nucleotide may be methylated to form 5-methylcytosine"
gcagctgcatgacagcacccactaacttgaggaagccagccgaggggccagcttcctgagcgtgattcaaaccggaactaagggtgcagctgacaagagtttgtcaacagccattgaagtaa

SEQ ID NO: 10586 - DNA, 122 bp, Homo sapiens
  misc_feature (61)..(62): /note="This region represents a CpG dinucleotide"
  misc_feature (61)..(61): /note="Nucleotide may be methylated to form 5-methylcytosine"
tctaatcttatctatctgtcttatctatcgacctaactgtccatctggttttgaatattccgtattccagccataagtagtagatcttttgcatccctggggttaatggttccttgagcaga

SEQ ID NO: 10587 - DNA, 122 bp, Homo sapiens
  misc_feature (61)..(62): /note="This region represents a CpG dinucleotide"
  misc_feature (61)..(61): /note="Nucleotide may be methylated to form 5-methylcytosine"
acatataggaaactttaaggagcagtggccataggaagctgtgacaatgaaggcagcacacggccgcagcctcccgttagctgctggaaggaagccacacacacccagatatttcaattctg

SEQ ID NO: 10588 - DNA, 122 bp, Homo sapiens
  misc_feature (61)..(62): /note="This region represents a CpG dinucleotide"
  misc_feature (61)..(61): /note="Nucleotide may be methylated to form 5-methylcytosine"
gctacattatgcagttgccaatgaaagcagcaggaagtgtcaactgtttgggaggatctgcggtgtacttggacttgcctggcattgttatttgcttctaatcactctgggaagtgttgtgg

SEQ ID NO: 10589 - DNA, 122 bp, Homo sapiens
  misc_feature (61)..(62): /note="This region represents a CpG dinucleotide"
  misc_feature (61)..(61): /note="Nucleotide may be methylated to form 5-methylcytosine"
tcctcagggcatgggtgtctgtgtgttcactatgtcagtgccaacagctggtcctgatgccgtcccgggcttccgcaagacgctacccctgggcggaaacggagtaaaggctgcaagtggcc

SEQ ID NO: 10590 - DNA, 122 bp, Homo sapiens
  misc_feature (61)..(62): /note="This region represents a CpG dinucleotide"
  misc_feature (61)..(61): /note="Nucleotide may be methylated to form 5-methylcytosine"
tgcggaggagccggcgcgggcgggccggggagggggcgctgcgggcagacggggcggggccgtgtcgggctccgcccccacctagggacctgggaacccggacacccagagactgggcagtt

SEQ ID NO: 10591 - DNA, 122 bp, Homo sapiens
  misc_feature (61)..(62): /note="This region represents a CpG dinucleotide"
  misc_feature (61)..(61): /note="Nucleotide may be methylated to form 5-methylcytosine"
cttggaactgatgctaaggcacatcagaaggatctcagggtggaaaggctcctatacagccgtctgaaaacaaaaacaaaacagaggggagctcctatggttgagggtcagaaggagaccct

SEQ ID NO: 10592 - DNA, 122 bp, Homo sapiens
  misc_feature (61)..(62): /note="This region represents a CpG dinucleotide"
  misc_feature (61)..(61): /note="Nucleotide may be methylated to form 5-methylcytosine"
agaaacgggaaatcaaatccttaagtcaactagttaaattttactgtatgcagccgggcacgctggcccatgcctgtaatcccagcacttcaggaggccaaggcaggtggatcacctgaggt

SEQ ID NO: 10593 - DNA, 122 bp, Homo sapiens
  misc_feature (61)..(62): /note="This region represents a CpG dinucleotide"
  misc_feature (61)..(61): /note="Nucleotide may be methylated to form 5-methylcytosine"
gtaacagggggttggtgcaggatggagccaggccacgcagcaaggctggcatgtagcatacgggaagcggagcttgcagtgagccgagattgcgccactgcagtccgcagtccggcctgggc

SEQ ID NO: 10594 - DNA, 122 bp, Homo sapiens
  misc_feature (61)..(62): /note="This region represents a CpG dinucleotide"
  misc_feature (61)..(61): /note="Nucleotide may be methylated to form 5-methylcytosine"
atttagtgctttaaacaaagtttgcagtgcagactatcagtgtgtgtcatccaaggcacacgattttcagctgttattgatagatgaatgtggtaatttatagatatgtgcagtcatttatg

SEQ ID NO: 10595 - DNA, 122 bp, Homo sapiens
  misc_feature (61)..(62): /note="This region represents a CpG dinucleotide"
  misc_feature (61)..(61): /note="Nucleotide may be methylated to form 5-methylcytosine"
gtgagggagcctcagaagtgtcagacagctgattctaaacatcttcttggtccaccgccacgcccaccttcaataagccgagaagaggtgaggaggcgggtggctgggtgccaatcatgctg

SEQ ID NO: 10596 - DNA, 122 bp, Homo sapiens
  misc_feature (61)..(62): /note="This region represents a CpG dinucleotide"
  misc_feature (61)..(61): /note="Nucleotide may be methylated to form 5-methylcytosine"
aggtttttaattttttaattgtaagaatctgtaatacagcatttttatttcggtcttattcgttgtgctcaaaggcaggaaacaactattaatttgccttctcgaatcttaatagttataag

SEQ ID NO: 10597 - DNA, 122 bp, Homo sapiens
  misc_feature (61)..(62): /note="This region represents a CpG dinucleotide"
  misc_feature (61)..(61): /note="Nucleotide may be methylated to form 5-methylcytosine"
ataagctgttgaatccaccattgagctctacatatgtggttttaaccctaagcagtataccgtagacttcgaaactgaactaagatgtagatcagtactcaggtctcacaatggccactggg

SEQ ID NO: 10598 - DNA, 122 bp, Homo sapiens
  misc_feature (61)..(62): /note="This region represents a CpG dinucleotide"
  misc_feature (61)..(61): /note="Nucleotide may be methylated to form 5-methylcytosine"
tctacaatgcctttgggtagacctgaaggactcagggtcccctgagaggaggtggcaggccgtggtggcaggtcactctcacactgcaaggatgatgccttcgagttccacacaaggagcat

SEQ ID NO: 10599 - DNA, 122 bp, Homo sapiens
  misc_feature (61)..(62): /note="This region represents a CpG dinucleotide"
  misc_feature (61)..(61): /note="Nucleotide may be methylated to form 5-methylcytosine"
gtcatactctacacagttttacaacttccttaaatgcacactacttaaaacactcatgcacgtgctttcacaaaatttaaatgcaatcatatagcacatataaaaagatagcaaaacccaga

SEQ ID NO: 10600 - DNA, 122 bp, Homo sapiens
  misc_feature (61)..(62): /note="This region represents a CpG dinucleotide"
  misc_feature (61)..(61): /note="Nucleotide may be methylated to form 5-methylcytosine"
agcagagagaacagatctcccctttcccatcttagatctccatttttatgttcctgttgtcgagtggtttgtcatggtaaagaaaaaatgcttttaaatgtgagtgtatatatatcatctat

SEQ ID NO: 10601 - DNA, 122 bp, Homo sapiens
  misc_feature (61)..(62): /note="This region represents a CpG dinucleotide"
  misc_feature (61)..(61): /note="Nucleotide may be methylated to form 5-methylcytosine"
gtcatcttgggcaggtcactctgtccctcagtttccacctttgcaatttgggactagtaacgccatccaactcatagggttgttatgagttgtaatgaggattcagtggatttaacccattt

SEQ ID NO: 10602 - DNA, 122 bp, Homo sapiens
  misc_feature (61)..(62): /note="This region represents a CpG dinucleotide"
  misc_feature (61)..(61): /note="Nucleotide may be methylated to form 5-methylcytosine"
cagcagtcttttgcaaagcctttcaaatgccccacagtcctgagcagagttcatatggaacgtggccttgtccaggttgccttgaccgcagtgactttcctcatgctctttcctctgctcta

SEQ ID NO: 10603 - DNA, 122 bp, Homo sapiens
  misc_feature (61)..(62): /note="This region represents a CpG dinucleotide"
  misc_feature (61)..(61): /note="Nucleotide may be methylated to form 5-methylcytosine"
attgttttttttaatttaattgtccttttaaatatttaattcaaagacagggctgggggacggtcatggaggaggtttacaggatgactcaagaaatgtttcctgtctatcaaatggacagc

SEQ ID NO: 10604 - DNA, 122 bp, Homo sapiens
  misc_feature (61)..(62): /note="This region represents a CpG dinucleotide"
  misc_feature (61)..(61): /note="Nucleotide may be methylated to form 5-methylcytosine"
gtcctccacagaagtgatgatccaaacacagagacaagaaatggcactggcaccctgccacgggataaataaaataacaactaggcctggattacctggcaaatgtacaaatactacagatg

SEQ ID NO: 10605 - DNA, 122 bp, Homo sapiens
  misc_feature (61)..(62): /note="This region represents a CpG dinucleotide"
  misc_feature (61)..(61): /note="Nucleotide may be methylated to form 5-methylcytosine"
tttttttaaaaatcactgatgcattacatgcccagctgcctcactaaatagattatttgccgtcaccattctgtcaccgtaaaagtttctaacatttttgaaaaggctcccttacccagaaa

SEQ ID NO: 10606 - DNA, 122 bp, Homo sapiens
  misc_feature (61)..(62): /note="This region represents a CpG dinucleotide"
  misc_feature (61)..(61): /note="Nucleotide may be methylated to form 5-methylcytosine"
agtttcccatctgctgtgcctctgggaggagagggactcctggggggcctgcccctcatacgccatcaccaaaaggaaaggacaaagccacacgcagccagggcttcacacccttcaggctg

SEQ ID NO: 10607 - DNA, 122 bp, Homo sapiens
  misc_feature (61)..(62): /note="This region represents a CpG dinucleotide"
  misc_feature (61)..(61): /note="Nucleotide may be methylated to form 5-methylcytosine"
tatatctctgtggtatattctgtatcactagagaagtggaacagcatttagggtctagtgcgtaatcttgttgctatgttgaagaatggatgtaggcaatttattgcattcatacctgccag

SEQ ID NO: 10608 - DNA, 122 bp, Homo sapiens
  misc_feature (61)..(62): /note="This region represents a CpG dinucleotide"
  misc_feature (61)..(61): /note="Nucleotide may be methylated to form 5-methylcytosine"
atgataacatatcaaaacccaaatctcagtggcttaaaacatcaaggtttatttcctactcgtgctacatgttcatgtggaggagagggagctctgctccacagaatcactcaggaatccag

SEQ ID NO: 10609 - DNA, 122 bp, Homo sapiens
  misc_feature (61)..(62): /note="This region represents a CpG dinucleotide"
  misc_feature (61)..(61): /note="Nucleotide may be methylated to form 5-methylcytosine"
acctgacaaccctcgtacacagaattagtcattctgatgcataatgcaatgccgcatagccgcctctcacggaataccattaggctctttctcccggcctgacgtccttattcccagaggag

SEQ ID NO: 10610 - DNA, 122 bp, Homo sapiens
  misc_feature (61)..(62): /note="This region represents a CpG dinucleotide"
  misc_feature (61)..(61): /note="Nucleotide may be methylated to form 5-methylcytosine"
gaggaaatggtgcagtttagtgttcagctctagtgatccactgtggtcagaaagcaccaacgttagaccacaacagaactactctagcaagacctttgtttcttttttgtcttcacttcctt

SEQ ID NO: 10611 - DNA, 122 bp, Homo sapiens
  misc_feature (61)..(62): /note="This region represents a CpG dinucleotide"
  misc_feature (61)..(61): /note="Nucleotide may be methylated to form 5-methylcytosine"
cctctgctccggaaaagcacagtggagacttcatgcaacaatattcccaaaaagaagcctcgaactctcagaattctcaggctaaaatcataacaggaaaaaccggtgtgttgccacctccc

SEQ ID NO: 10612 - DNA, 122 bp, Homo sapiens
  misc_feature (61)..(62): /note="This region represents a CpG dinucleotide"
  misc_feature (61)..(61): /note="Nucleotide may be methylated to form 5-methylcytosine"
tgtgtggcacagcctaggctcatagacatcacattctctgtggttctacttgtgctcactcgtaattgtcacctgccctggaatatgtgagctttcagtgagaaagaacatctgtccctctt

SEQ ID NO: 10613 - DNA, 122 bp, Homo sapiens
  misc_feature (61)..(62): /note="This region represents a CpG dinucleotide"
  misc_feature (61)..(61): /note="Nucleotide may be methylated to form 5-methylcytosine"
actctcatctccaccaacaatgtcttactgtttgtaatcaccaaaattatctgttttttccggggttgaaattgtagaaagcactcaaaattaggatcatatttcaatgtgtgtaggtgaac

SEQ ID NO: 10614 - DNA, 122 bp, Homo sapiens
  misc_feature (61)..(62): /note="This region represents a CpG dinucleotide"
  misc_feature (61)..(61): /note="Nucleotide may be methylated to form 5-methylcytosine"
gtgagcaaagcctagagactcaacagcgaggagtaaccacatgtgggagctgtcagctcacggggattttctctcctctccaagggcaggaattctcttcattgtcacagacctattcctta

SEQ ID NO: 10615 - DNA, 122 bp, Homo sapiens
  misc_feature (61)..(62): /note="This region represents a CpG dinucleotide"
  misc_feature (61)..(61): /note="Nucleotide may be methylated to form 5-methylcytosine"
ccactgggcctaggatagaaaggctcattccagatcattcaccagcaaacaatgtcaacacgataccagtagggctgagtcagtatgggctcagggcctgggcaggaggaagggagggaaag

SEQ ID NO: 10616 - DNA, 122 bp, Homo sapiens
  misc_feature (61)..(62): /note="This region represents a CpG dinucleotide"
  misc_feature (61)..(61): /note="Nucleotide may be methylated to form 5-methylcytosine"
ttggtttgtgctatttccttctttccatttttcactttctatacaggtgtcgataggtaacgttacaatttagtcttcagggaacagaatattcagcagcgctgtgatggaatctgaggagt

SEQ ID NO: 10617 - DNA, 122 bp, Homo sapiens
  misc_feature (61)..(62): /note="This region represents a CpG dinucleotide"
  misc_feature (61)..(61): /note="Nucleotide may be methylated to form 5-methylcytosine"
ggaagtacaacgtgctatgagaacacaaagcagaagcaccacaggcttccccaaagaagtcgcatctctctctagtgggggcaaagaagggaaagcatttcagggagagagaatgatatgag

SEQ ID NO: 10618 - DNA, 122 bp, Homo sapiens
  misc_feature (61)..(62): /note="This region represents a CpG dinucleotide"
  misc_feature (61)..(61): /note="Nucleotide may be methylated to form 5-methylcytosine"
catcttggttttagctgggttctttaccacatcctgttctgaccagactgttttgttcagcggggtcatgactggtgcctgggaagcaagtcctgctgatctcctgcctcagaagggagggg

SEQ ID NO: 10619 - DNA, 122 bp, Homo sapiens
  misc_feature (61)..(62): /note="This region represents a CpG dinucleotide"
  misc_feature (61)..(61): /note="Nucleotide may be methylated to form 5-methylcytosine"
tgcatttgtgctctctcaaatcctgtcttagtcttaggaaaggaagtaaagtttcaaggacggttccgaactgctttttgtctctgggctcaagttagagaaccttgcaatcctcaaagatg

SEQ ID NO: 10620 - DNA, 122 bp, Homo sapiens
  misc_feature (61)..(62): /note="This region represents a CpG dinucleotide"
  misc_feature (61)..(61): /note="Nucleotide may be methylated to form 5-methylcytosine"
gtcatgaagcttttgccttatgctttctaataacagctttatagttttagtcctatgtttcgatctttgatccattttgaggtcattttgtacatagtattaagtaagagtaatgtcattct

SEQ ID NO: 10621 - DNA, 122 bp, Homo sapiens
  misc_feature (61)..(62): /note="This region represents a CpG dinucleotide"
  misc_feature (61)..(61): /note="Nucleotide may be methylated to form 5-methylcytosine"
tttatcattatgtgtgatgtgagcttagagcctagctctaagctccccaaaggtggtgaccgtataatcatttcccacccccattacctaggacaggactctggccacagtggagggtcaga

SEQ ID NO: 10622 - DNA, 122 bp, Homo sapiens
  misc_feature (61)..(62): /note="This region represents a CpG dinucleotide"
  misc_feature (61)..(61): /note="Nucleotide may be methylated to form 5-methylcytosine"
ctacacgaagttagaagagatgcagaaaaggctgctaagaggctggtgggaggaccagaacgggccattcagtaaatacctaagacatgcctactacaagacagccatggtctccacctccc

SEQ ID NO: 10623 - DNA, 122 bp, Homo sapiens
  misc_feature (61)..(62): /note="This region represents a CpG dinucleotide"
  misc_feature (61)..(61): /note="Nucleotide may be methylated to form 5-methylcytosine"
tcctccctccggtaagtagctccatcccatagcctctgaagtttgcatgccatgagggaccgccccctccagcaaatctgtcaaggctttgaccaaagaaaacgtatgcattctactgccat

SEQ ID NO: 10624 - DNA, 122 bp, Homo sapiens
  misc_feature (61)..(62): /note="This region represents a CpG dinucleotide"
  misc_feature (61)..(61): /note="Nucleotide may be methylated to form 5-methylcytosine"
acgtggccacagaaggagccaaagaaaggtgagggggaggtgccacacacttttgaaggacgagatctaatgagaactcactcactatacagtaccaactgcggggtcggggggcaggggtg

SEQ ID NO: 10625 - DNA, 122 bp, Homo sapiens
  misc_feature (61)..(62): /note="This region represents a CpG dinucleotide"
  misc_feature (61)..(61): /note="Nucleotide may be methylated to form 5-methylcytosine"
caacaaactatacatattgtagcctcaggcattcagaaagactggtctctttccaaatcccgctttcaaaaatctcagagaagacaatgactcgctcagcattgattgtgaggcctctgcag

SEQ ID NO: 10626 - DNA, 122 bp, Homo sapiens
  misc_feature (61)..(62): /note="This region represents a CpG dinucleotide"
  misc_feature (61)..(61): /note="Nucleotide may be methylated to form 5-methylcytosine"
tcagttttgtacaaatttgtatttgttctgtctgcagcccaggaacgtgcactctcaggccgcagggccttctctaaggaggtgctggctcccctcacaacagaggcaggctagcttttttc

SEQ ID NO: 10627 - DNA, 122 bp, Homo sapiens
  misc_feature (61)..(62): /note="This region represents a CpG dinucleotide"
  misc_feature (61)..(61): /note="Nucleotide may be methylated to form 5-methylcytosine"
cagaggacgcaattccacctcaaaggcgcagggtggaggaggatggaagagcagcaggcacggtcagtgttggtatcttgggatctctgaaatgttgactgttgactttcttttctccttcc

SEQ ID NO: 10628 - DNA, 122 bp, Homo sapiens
  misc_feature (61)..(62): /note="This region represents a CpG dinucleotide"
  misc_feature (61)..(61): /note="Nucleotide may be methylated to form 5-methylcytosine"
ctgtcctgtggacacaaaacttgaggagaacccttttctactggcctacttggccctaaccgaatattcaagtatgaaaatacaagttacactggaaatactgcatatatcatttggtcctg

SEQ ID NO: 10629 - DNA, 122 bp, Homo sapiens
  misc_feature (61)..(62): /note="This region represents a CpG dinucleotide"
  misc_feature (61)..(61): /note="Nucleotide may be methylated to form 5-methylcytosine"
tgtcagagaccttacatgacccttggaacacttcgagatcaagtgatatatccagatggacgagaagatcagaaaaggaagggaatttctgacctagtaagggaatgtttatatcctagatc

SEQ ID NO: 10630 - DNA, 122 bp, Homo sapiens
  misc_feature (61)..(62): /note="This region represents a CpG dinucleotide"
  misc_feature (61)..(61): /note="Nucleotide may be methylated to form 5-methylcytosine"
aaataaaaactgatttccttattttcatgatttaaatgaaacctgttcagcttcgttgaccgtaactttaaagttactaagtggcctggttcagcttcattgacagtaacttaaaagtttcc

SEQ ID NO: 10631 - DNA, 122 bp, Homo sapiens
  misc_feature (61)..(62): /note="This region represents a CpG dinucleotide"
  misc_feature (61)..(61): /note="Nucleotide may be methylated to form 5-methylcytosine"
ctctgtctctgcctagccactaacacactgctgcctccttcactaaggaagcctttctgacgcttctgaggacactgtgattcccatgggtaaccatcatgactcctccacacatgtggtct

SEQ ID NO: 10632 - DNA, 122 bp, Homo sapiens
  misc_feature (61)..(62): /note="This region represents a CpG dinucleotide"
  misc_feature (61)..(61): /note="Nucleotide may be methylated to form 5-methylcytosine"
gtcctcatagtttctttactaacagctctgacttcccttcccaacctctcttagtacatgcggaagatgagaacagtggacaacggctttgctaagccctgaattgttccgaagtttgaagt

SEQ ID NO: 10633 - DNA, 122 bp, Homo sapiens
  misc_feature (61)..(62): /note="This region represents a CpG dinucleotide"
  misc_feature (61)..(61): /note="Nucleotide may be methylated to form 5-methylcytosine"
atgtagtctgtggtcagtgtggctggcagccagcctggcagatggccagaacccagagctcgctgggaaggagcataaacaaggcgcctggtgggcagctgtgacccagaatcttccagcag

SEQ ID NO: 10634 - DNA, 122 bp, Homo sapiens
  misc_feature (61)..(62): /note="This region represents a CpG dinucleotide"
  misc_feature (61)..(61): /note="Nucleotide may be methylated to form 5-methylcytosine"
gcaagtgagtctgcagcttatctgtgttgcttttccctatctctcctttacttcctgtctcgcagcctcccttaccacagtagccagccccagtgctgtgttctgcatcctggcagtcccag

SEQ ID NO: 10635 - DNA, 122 bp, Homo sapiens
  misc_feature (61)..(62): /note="This region represents a CpG dinucleotide"
  misc_feature (61)..(61): /note="Nucleotide may be methylated to form 5-methylcytosine"
aataaccatgtaaagtaatttttcatacagcatatggtgcttcccaggagagcacaccttcgaggaataaagaaggggccaggtatgacaacttcctctcactgtggttcaagagctattcg

SEQ ID NO: 10636 - DNA, 122 bp, Homo sapiens
  misc_feature (61)..(62): /note="This region represents a CpG dinucleotide"
  misc_feature (61)..(61): /note="Nucleotide may be methylated to form 5-methylcytosine"
tccagacccagtggctacaaactcttaataagcacagaagctgcttttccttcctccaagcgaaacatcataaaaagtaagtgacagcaattgtgaccctatctgtagaagtttatgagaac

SEQ ID NO: 10637 - DNA, 122 bp, Homo sapiens
  misc_feature (61)..(62): /note="This region represents a CpG dinucleotide"
  misc_feature (61)..(61): /note="Nucleotide may be methylated to form 5-methylcytosine"
tgccccagtcttctgcactaagctgtggtgagcacatccgggttccactggatttttgtgcggggagggggttttctacgttgggtcaatgatgagaatcttatattgtcctgaagagaggt

SEQ ID NO: 10638 - DNA, 122 bp, Homo sapiens
  misc_feature (61)..(62): /note="This region represents a CpG dinucleotide"
  misc_feature (61)..(61): /note="Nucleotide may be methylated to form 5-methylcytosine"
actgcggttcagtgcagggctccccagtggctgctccgggtcgcaggtggcctttgctgccgggtcagtgctgtggtgaccgtcctcgggcagatgctgcccacatcctcctggtgcagcgt

SEQ ID NO: 10639 - DNA, 122 bp, Homo sapiens
  misc_feature (61)..(62): /note="This region represents a CpG dinucleotide"
  misc_feature (61)..(61): /note="Nucleotide may be methylated to form 5-methylcytosine"
ataataacataaaatcagaatgtaaatccagacgcattgttttgctgcgattaagttgaacgaaaatagcaaggacgaagtaaggagagagccagcctacccgcgggatgaggcgtcccgcg

SEQ ID NO: 10640 - DNA, 122 bp, Homo sapiens
  misc_feature (61)..(62): /note="This region represents a CpG dinucleotide"
  misc_feature (61)..(61): /note="Nucleotide may be methylated to form 5-methylcytosine"
cacagccttgccccctgacatcctgctagccatgtggcctggaatgccacacagttccttcggtcccatccaccctagcactcctgtgatctttgctcttggggaagtctcgtgctatccct

SEQ ID NO: 10641 - DNA, 122 bp, Homo sapiens
  misc_feature (61)..(62): /note="This region represents a CpG dinucleotide"
  misc_feature (61)..(61): /note="Nucleotide may be methylated to form 5-methylcytosine"
ttgttcttagttctcataatgttcaaaataaatgactatggtaggtaatatcacaaaagacgaatatctcacagttctgtgcttctgcatatgaaggcgagggtagttaattggctcataat

SEQ ID NO: 10642 - DNA, 122 bp, Homo sapiens
  misc_feature (61)..(62): /note="This region represents a CpG dinucleotide"
  misc_feature (61)..(61): /note="Nucleotide may be methylated to form 5-methylcytosine"
accacgcccagcccacactggtaaattctataatcattagttgtatggaaaagtacctagcgcattgttgttgcacaatatattttaagtgaatgaatgagtctccagtgtaaatacatgaa

SEQ ID NO: 10643 - DNA, 122 bp, Homo sapiens
  misc_feature (61)..(62): /note="This region represents a CpG dinucleotide"
  misc_feature (61)..(61): /note="Nucleotide may be methylated to form 5-methylcytosine"
cagagtaattagaaacctgcattcaaaaacacctatcaaaatccaatagctaattataaacgaccttttgaagaggactgaaaataagacaattgtctgtggatgacaaagtcttaggacag

SEQ ID NO: 10644 - DNA, 122 bp, Homo sapiens
  misc_feature (61)..(62): /note="This region represents a CpG dinucleotide"
  misc_feature (61)..(61): /note="Nucleotide may be methylated to form 5-methylcytosine"
tacaactctggaaataggatttcctctttatccccaggttttgtcattgcttctgcttatcgtggtcattattgtttgttcagtgatgctgaacaaattctgtattctttgtcaagcatggc

SEQ ID NO: 10645 - DNA, 122 bp, Homo sapiens
  misc_feature (61)..(62): /note="This region represents a CpG dinucleotide"
  misc_feature (61)..(61): /note="Nucleotide may be methylated to form 5-methylcytosine"
tttcaccaccaggcattataactgtatttatccttggtcccagttttgccagagggtgaacgcacaagccacctgcatcaggcccttaggaattctgagaggagaaaaaaaattttcttgag

SEQ ID NO: 10646 - DNA, 122 bp, Homo sapiens
  misc_feature (61)..(62): /note="This region represents a CpG dinucleotide"
  misc_feature (61)..(61): /note="Nucleotide may be methylated to form 5-methylcytosine"
aggacaagtgtgtaacaatacaatccaaacactttagtatctagtatcacaacaactctgcgtcgtaggtattcatatcacgatgttccacatgaggaaacttaacgcaaacagcggataag

SEQ ID NO: 10647 - DNA, 122 bp, Homo sapiens
  misc_feature (61)..(62): /note="This region represents a CpG dinucleotide"
  misc_feature (61)..(61): /note="Nucleotide may be methylated to form 5-methylcytosine"
ataaaacacaaaaaattcttaatctttatttaactgactcacaagattaaccaatatcctcggcttcctgagtaaaattaatagatgactttggcacattaaatattctgactagtagttta

SEQ ID NO: 10648 - DNA, 122 bp, Homo sapiens
  misc_feature (61)..(62): /note="This region represents a CpG dinucleotide"
  misc_feature (61)..(61): /note="Nucleotide may be methylated to form 5-methylcytosine"
atcaagtccacccaccacctcggcggctaaggcggtgaaagaggaacaccgcgggtggagcgggggggcccgtccccagtcccctggacctcagtttcctcatgcccgcagatcaagcgaga

SEQ ID NO: 10649 - DNA, 122 bp, Homo sapiens
  misc_feature (61)..(62): /note="This region represents a CpG dinucleotide"
  misc_feature (61)..(61): /note="Nucleotide may be methylated to form 5-methylcytosine"
gcaatagagacctggagtgggcacactacatatccccctgcagtgatggaacccacagaccgcaggtcctctgcagtccattctcctgcctgtccagaggatccggatgttttctctttact

SEQ ID NO: 10650 - DNA, 122 bp, Homo sapiens
  misc_feature (61)..(62): /note="This region represents a CpG dinucleotide"
  misc_feature (61)..(61): /note="Nucleotide may be methylated to form 5-methylcytosine"
ggtatcagagcacccaaccatgatgccaaattagagcagatcaaggtccacactagactgcgtatattagaacattttaatcatagccaagaattatattggacatcactgttttagatgta

SEQ ID NO: 10651 - DNA, 122 bp, Homo sapiens
  misc_feature (61)..(62): /note="This region represents a CpG dinucleotide"
  misc_feature (61)..(61): /note="Nucleotide may be methylated to form 5-methylcytosine"
tcagcatcagtgaggcccctccaactctcctactggacaagttctggtttccctcatggacgagggttgaacaaaaatgaaagataagtcagttgttatgactagaaaaagtgattaccagg

SEQ ID NO: 10652 - DNA, 122 bp, Homo sapiens
  misc_feature (61)..(62): /note="This region represents a CpG dinucleotide"
  misc_feature (61)..(61): /note="Nucleotide may be methylated to form 5-methylcytosine"
ttagaaaatatgattaagtacagagtttattcaagtgcaaggtttgaggatgatcacctgcgaaacacatactccaaaggaatgggatcagtgttggaaagagaggaagctaaggtttcact

SEQ ID NO: 10653 - DNA, 122 bp, Homo sapiens
  misc_feature (61)..(62): /note="This region represents a CpG dinucleotide"
  misc_feature (61)..(61): /note="Nucleotide may be methylated to form 5-methylcytosine"
gacatggtaagaagaccttggactatttgtctatgcttctctgactgtagtattgctacacgtgaggagatatagcaatagacggaggagtagattgcacgtgtgccgttctcttcattagg

SEQ ID NO: 10654 - DNA, 122 bp, Homo sapiens
  misc_feature (61)..(62): /note="This region represents a CpG dinucleotide"
  misc_feature (61)..(61): /note="Nucleotide may be methylated to form 5-methylcytosine"
aacagaaatgcaggatgaatgtagctgagcctgggaaaccagcctgcttaccgcccaccccgctgtgatgggccctaaaacagggtgcagacagaacagaatttgcaaacctctaagctgtg

SEQ ID NO: 10655 - DNA, 122 bp, Homo sapiens
  misc_feature (61)..(62): /note="This region represents a CpG dinucleotide"
  misc_feature (61)..(61): /note="Nucleotide may be methylated to form 5-methylcytosine"
ggggcgttggggggctggagggcaagaggttacgcgccccagctcccaccttgggtccttcgcctgcacccagtctaacctggcacctaaaggtttcgtcacccagccaaccttctagttct

SEQ ID NO: 10656 - DNA, 122 bp, Homo sapiens
  misc_feature (61)..(62): /note="This region represents a CpG dinucleotide"
  misc_feature (61)..(61): /note="Nucleotide may be methylated to form 5-methylcytosine"
cagtttttccacgcctgatgagaattgccaaggcacagcaaagcctgcagcttccatacccgtcatgagagcaaataacttatttgtaaacctaagcacttaattaactaaatggaaagcaa

SEQ ID NO: 10657 - DNA, 122 bp, Homo sapiens
  misc_feature (61)..(62): /note="This region represents a CpG dinucleotide"
  misc_feature (61)..(61): /note="Nucleotide may be methylated to form 5-methylcytosine"
gccttggtcatagtccaggaagacacccaccttgtcaagcttgtcccggacgttaagccgcgtccagggctccgtgcaggcgctgtactggttgccatcgtgcatcacgatgcagtagaagc

SEQ ID NO: 10658 - DNA, 122 bp, Homo sapiens
  misc_feature (61)..(62): /note="This region represents a CpG dinucleotide"
  misc_feature (61)..(61): /note="Nucleotide may be methylated to form 5-methylcytosine"
agacacacacacagagtattaacagaagacaaagcctcaccggctcccttaggcatctcacgtgcattccaggcaggaactacccagtgccagcatcagccctcagcaggctgcccaattac

SEQ ID NO: 10659 - DNA, 122 bp, Homo sapiens
  misc_feature (61)..(62): /note="This region represents a CpG dinucleotide"
  misc_feature (61)..(61): /note="Nucleotide may be methylated to form 5-methylcytosine"
caggaaattgaatacttgacaattctaacaatagtagacaaaagtattcttcccctgccccgccaatcaaagagagacttccttaattcacatggaagtgtataggtgcttttctgtaacag

SEQ ID NO: 10660 - DNA, 122 bp, Homo sapiens
  misc_feature (61)..(62): /note="This region represents a CpG dinucleotide"
  misc_feature (61)..(61): /note="Nucleotide may be methylated to form 5-methylcytosine"
ttgttttgtattgtattggctgggtggcagctggcatcctagaggaagtgtccacccaggcgcagaggccaggcccaggaaaagctgggggcagtgggggtggggagcggtgcaggtggtga

SEQ ID NO: 10661 - DNA, 122 bp, Homo sapiens
  misc_feature (61)..(62): /note="This region represents a CpG dinucleotide"
  misc_feature (61)..(61): /note="Nucleotide may be methylated to form 5-methylcytosine"
ctggagacagggaccctctggctaatgagacacaccccagggaagccaagatactggcaacgtgccacatcacattatgacaggcaaagttgagactccaggcaaagagttttaaagcattt

SEQ ID NO: 10662 - DNA, 122 bp, Homo sapiens
  misc_feature (61)..(62): /note="This region represents a CpG dinucleotide"
  misc_feature (61)..(61): /note="Nucleotide may be methylated to form 5-methylcytosine"
aggggaggggtgaaagagccttttcttcctaggacctttgacaaattctggcagtgtccacggcactgtaaaacaaaacaagagaaaattcaagctcatgctgccagttcagtttatttcgg

SEQ ID NO: 10663 - DNA, 122 bp, Homo sapiens
  misc_feature (61)..(62): /note="This region represents a CpG dinucleotide"
  misc_feature (61)..(61): /note="Nucleotide may be methylated to form 5-methylcytosine"
gaggtgcagatttaaataggctggtcagggaagtcctttcccactgatttcccctcaaggcgtgagcctgtggtgagggagcaatcctgtgcttgttcaggagaaagggctttcaggaaggg

SEQ ID NO: 10664 - DNA, 122 bp, Homo sapiens
  misc_feature (61)..(62): /note="This region represents a CpG dinucleotide"
  misc_feature (61)..(61): /note="Nucleotide may be methylated to form 5-methylcytosine"
aaagagattacaagtaagtgttctctctctatgcaatctttacaaaatcaagcacatttccgatccaaggcagagaacgagtatttcctttactttccttgagatgaaatacaaactttaaa

SEQ ID NO: 10665 - DNA, 122 bp, Homo sapiens
  misc_feature (61)..(62): /note="This region represents a CpG dinucleotide"
  misc_feature (61)..(61): /note="Nucleotide may be methylated to form 5-methylcytosine"
tgagcttgggaggcggaggttgcagtgagtcgagatcgcaccagtgcactccagcctgggcgagagagtgagactgtcttggaaaaaaaaaaagtataagtttttgcttccaataacatttg

SEQ ID NO: 10666 - DNA, 122 bp, Homo sapiens
  misc_feature (61)..(62): /note="This region represents a CpG dinucleotide"
  misc_feature (61)..(61): /note="Nucleotide may be methylated to form 5-methylcytosine"
aatcttcgaattgccgcactgtggcatggtattagtatcctctctatgatgggctgattacgaggtaaagctgcattggctgaccgctctatcaggtgtctgctctaataactccaagcatg

SEQ ID NO: 10667 - DNA, 122 bp, Homo sapiens
  misc_feature (61)..(62): /note="This region represents a CpG dinucleotide"
  misc_feature (61)..(61): /note="Nucleotide may be methylated to form 5-methylcytosine"
acatgtgcgagaggtgagagcggcactttcagagaactggccttgatgtcttccctgtaacgttgtctcagtgtgctttctcacgtggaaatttgaccatgcccacataacttccgattccc

SEQ ID NO: 10668 - DNA, 122 bp, Homo sapiens
  misc_feature (61)..(62): /note="This region represents a CpG dinucleotide"
  misc_feature (61)..(61): /note="Nucleotide may be methylated to form 5-methylcytosine"
gttttcggcagtcatctgactaggtgtgcgaggtggtttctcactgcggtttgatctgcacgcccctaacgatgagtgatgtggagcatctttccatgggtttgttggctttgcagagcttc

SEQ ID NO: 10669 - DNA, 122 bp, Homo sapiens
  misc_feature (61)..(62): /note="This region represents a CpG dinucleotide"
  misc_feature (61)..(61): /note="Nucleotide may be methylated to form 5-methylcytosine"
aagggagttgtataagtcatggttccacaacgctgttgtgtgttgttttgctttttatcacgggattcattaagttttgaggactttcattacgttttgaagagataataagttgataattc

SEQ ID NO: 10670 - DNA, 122 bp, Homo sapiens
  misc_feature (61)..(62): /note="This region represents a CpG dinucleotide"
  misc_feature (61)..(61): /note="Nucleotide may be methylated to form 5-methylcytosine"
agtgtgatggcagttctggcggatttcaaagctagttcctcatcactctattaattctaccgtaagagttgatcgcatgtgttcccattttacagaggtacctgtgcaaacaggttgtcaat

SEQ ID NO: 10671 - DNA, 122 bp, Homo sapiens
  misc_feature (61)..(62): /note="This region represents a CpG dinucleotide"
  misc_feature (61)..(61): /note="Nucleotide may be methylated to form 5-methylcytosine"
agagcctctgatctactagaatcgtactccagtttgttcatatacccagaaactatgcaccgctgagtggtccctgaagacgttagtacatgcacgtgatggaaccagctgatgggaatgta

SEQ ID NO: 10672 - DNA, 122 bp, Homo sapiens
  misc_feature (61)..(62): /note="This region represents a CpG dinucleotide"
  misc_feature (61)..(61): /note="Nucleotide may be methylated to form 5-methylcytosine"
tccatggtgacgggttccgcgaaggttttcctggggtgaagaggcagggcgttgaataatcgccatggcgacagcagcagatgacggtgtcccttctgagtgctcctacctagagttaaggg

SEQ ID NO: 10673 - DNA, 122 bp, Homo sapiens
  misc_feature (61)..(62): /note="This region represents a CpG dinucleotide"
  misc_feature (61)..(61): /note="Nucleotide may be methylated to form 5-methylcytosine"
tcacagttgcaccaggcactttctcctttacgtgttcctgacctggggaagtggcatcatcgttcctcctaccacttcctggttgtgtttgactcctccgtttctcactttgcacaagaggt

SEQ ID NO: 10674 - DNA, 122 bp, Homo sapiens
  misc_feature (61)..(62): /note="This region represents a CpG dinucleotide"
  misc_feature (61)..(61): /note="Nucleotide may be methylated to form 5-methylcytosine"
gtgcggtgcaaatgcctgtttgtgcaaggctccgagcggctgaccttcccctggctgtgccgcaggtgcagaacaagttggacggctgctgctacgcagtgaagcgcatccccatcaacccg

SEQ ID NO: 10675 - DNA, 122 bp, Homo sapiens
  misc_feature (61)..(62): /note="This region represents a CpG dinucleotide"
  misc_feature (61)..(61): /note="Nucleotide may be methylated to form 5-methylcytosine"
gatctgcttatctgttatgctgtacaacagaatccagacaaaaaacagactgtgaagaaacggattaaaaatgattgtaacttctctaagagttcagtatctgtgctaagcaactttgtaga

SEQ ID NO: 10676 - DNA, 122 bp, Homo sapiens
  misc_feature (61)..(62): /note="This region represents a CpG dinucleotide"
  misc_feature (61)..(61): /note="Nucleotide may be methylated to form 5-methylcytosine"
gaactctgttttctttgctcatgctgtgctttcacatcctgtttcccttgcttggatacccgcccccccgccctccccccgcctcccccggcctcccccggcctgcctggctaattcctacc

SEQ ID NO: 10677 - DNA, 122 bp, Homo sapiens
  misc_feature (61)..(62): /note="This region represents a CpG dinucleotide"
  misc_feature (61)..(61): /note="Nucleotide may be methylated to form 5-methylcytosine"
agtgctgcggggctgtgtcctcacccttgggcggagcgtagagcagccagaactggattgcgcttagcaagtctgtttccaggatccgacacaggagctccaggacctgtgggcaggaggcc

SEQ ID NO: 10678 - DNA, 122 bp, Homo sapiens
  misc_feature (61)..(62): /note="This region represents a CpG dinucleotide"
  misc_feature (61)..(61): /note="Nucleotide may be methylated to form 5-methylcytosine"
ccgatccggcgacccgccacccccactccgcgtctctgcctgcggggactccacggagttcgataattacctagagctccaccgcgccgccattacaccggacgtacgtcacttcctcttcc

SEQ ID NO: 10679 - DNA, 122 bp, Homo sapiens
  misc_feature (61)..(62): /note="This region represents a CpG dinucleotide"
  misc_feature (61)..(61): /note="Nucleotide may be methylated to form 5-methylcytosine"
ctctgagtgtgtttgtgctgggttcttacaccttgaggcatgattttcctgtctcacagacgaagatgttgaggctccaagaggttacgtgcctttcaggaacccatattaagtggtaacaa

SEQ ID NO: 10680 - DNA, 122 bp, Homo sapiens
  misc_feature (61)..(62): /note="This region represents a CpG dinucleotide"
  misc_feature (61)..(61): /note="Nucleotide may be methylated to form 5-methylcytosine"
actttacaattttatacattttcaacctggaacctccaccttgtctctttacagcctacccgacccattgacctgtgagccctgtcctggcgcccccaggcgtgagggttctaaggcgggtc

SEQ ID NO: 10681 - DNA, 122 bp, Homo sapiens
  misc_feature (61)..(62): /note="This region represents a CpG dinucleotide"
  misc_feature (61)..(61): /note="Nucleotide may be methylated to form 5-methylcytosine"
acttctcttcggttaccaaggaacggctctgaggaaagtccaagtttcttttgtaacttgcgctccatgtgacagaaacatgagcgtttccaaaatgaaaacactgggggctttcgcctgga

SEQ ID NO: 10682 - DNA, 122 bp, Homo sapiens
  misc_feature (61)..(62): /note="This region represents a CpG dinucleotide"
  misc_feature (61)..(61): /note="Nucleotide may be methylated to form 5-methylcytosine"
cagtgggatctggtataaataccccagttccctgaccccttgggcggaacgactctgagacgtcggttctacactggcttccagagttcccagcatgattaaccacggagaatgacttgaca

SEQ ID NO: 10683 - DNA, 122 bp, Homo sapiens
  misc_feature (61)..(62): /note="This region represents a CpG dinucleotide"
  misc_feature (61)..(61): /note="Nucleotide may be methylated to form 5-methylcytosine"
tttgttgtaagaaatagaaactcactctagcttaagtaaagtgagacttatataaggaatcggcatctctcaggaagaatgggaaggccttcacaaaggaaatgcaaacaggaactgagagt

SEQ ID NO: 10684 - DNA, 122 bp, Homo sapiens
  misc_feature (61)..(62): /note="This region represents a CpG dinucleotide"
  misc_feature (61)..(61): /note="Nucleotide may be methylated to form 5-methylcytosine"
ctgaggaagcagtctgggaactgaagccgctgtgtatccgctctctggagacctgaggggcggccccgacgccctccagggctgagtacctacactcacacacacggcggcatttcctcacg

SEQ ID NO: 10685 - DNA, 122 bp, Homo sapiens
  misc_feature (61)..(62): /note="This region represents a CpG dinucleotide"
  misc_feature (61)..(61): /note="Nucleotide may be methylated to form 5-methylcytosine"
ggacagaaaccattccctctaaaaaaatcgtttactttgacgataggtagcaacgaagcacggaagaatcttgaccctttgaggaacccgtaactgacgcaagtgccataaatgctactttg

SEQ ID NO: 10686 - DNA, 122 bp, Homo sapiens
  misc_feature (61)..(62): /note="This region represents a CpG dinucleotide"
  misc_feature (61)..(61): /note="Nucleotide may be methylated to form 5-methylcytosine"
atacagccgggctgatgggggacctgaggctggggagcttcccagcattggggaggccaccgcagcattggcactggcaggccggaggccctcacgaggccttgcaggggcctctgggcgga

SEQ ID NO: 10687 - DNA, 122 bp, Homo sapiens
  misc_feature (61)..(62): /note="This region represents a CpG dinucleotide"
  misc_feature (61)..(61): /note="Nucleotide may be methylated to form 5-methylcytosine"
gctgggaagtccaagatccaggcactgatagattcagcgtctggtccgctccatagatggcgccttgtgcctgtgtcctcacatggtagaatgagtaaaagcagggaggcgcctccctttaa

SEQ ID NO: 10688 - DNA, 122 bp, Homo sapiens
  misc_feature (61)..(62): /note="This region represents a CpG dinucleotide"
  misc_feature (61)..(61): /note="Nucleotide may be methylated to form 5-methylcytosine"
acctgggtaaaaataaagcccaggcaatatgactgcaccttttccattccatgctgcaatcgcatttacatctcgaaattgactctaatgaccaaggcaaggtcaactagaaaaatccactc

SEQ ID NO: 10689 - DNA, 122 bp, Homo sapiens
  misc_feature (61)..(62): /note="This region represents a CpG dinucleotide"
  misc_feature (61)..(61): /note="Nucleotide may be methylated to form 5-methylcytosine"
aaataaaaacatgcatatttggtttttctgtgacttaagaagtctacgaggaaatgggcacgggaaccagaggataaagatcagtagacacatatttgaaatgatgtgtgtacaaggttatt

SEQ ID NO: 10690 - DNA, 122 bp, Homo sapiens
  misc_feature (61)..(62): /note="This region represents a CpG dinucleotide"
  misc_feature (61)..(61): /note="Nucleotide may be methylated to form 5-methylcytosine"
ttgttatagtagcaagaggaaactaatataagaacacagaaagattctatttaaactctccgtcagctacaaagaagaggagtaacttgctactactaatttatgtaagtgacttagcgata

SEQ ID NO: 10691 - DNA, 122 bp, Homo sapiens
  misc_feature (61)..(62): /note="This region represents a CpG dinucleotide"
  misc_feature (61)..(61): /note="Nucleotide may be methylated to form 5-methylcytosine"
ggaggagcgggaggaggatggtgattgttaggccttacaagtccctggggaatgtaacagcgtcctcagccagagtcactatgttctgggttgtcccctgagcatcttgctgagtgaaaagg

SEQ ID NO: 10692 - DNA, 122 bp, Homo sapiens
  misc_feature (61)..(62): /note="This region represents a CpG dinucleotide"
  misc_feature (61)..(61): /note="Nucleotide may be methylated to form 5-methylcytosine"
gatccaagcacgagttgagtgggtaacgcgcacatccacctgcctgtgggcaagtgagtgcgcgtgcactggaatgcgagcatgttccagtgtccagggaggtgtgagtgaagaatatgtgc

SEQ ID NO: 10693 - DNA, 122 bp, Homo sapiens
  misc_feature (61)..(62): /note="This region represents a CpG dinucleotide"
  misc_feature (61)..(61): /note="Nucleotide may be methylated to form 5-methylcytosine"
acaaatctgactggaggtcttgacatcctttatagcagtagaccaaatgttagctacatccgccaacactttcaaaagtttttatggaacaaacagagacaaataccaaatgccaagtaacc

SEQ ID NO: 10694 - DNA, 122 bp, Homo sapiens
  misc_feature (61)..(62): /note="This region represents a CpG dinucleotide"
  misc_feature (61)..(61): /note="Nucleotide may be methylated to form 5-methylcytosine"
tctagctcagcctctcagcccctggtagcccacatcacaatgtatacagtgtatcataatcgtgttccctggtggactccctccctccctccctctccttctcttgttggaagatctgctcc

SEQ ID NO: 10695 - DNA, 122 bp, Homo sapiens
  misc_feature (61)..(62): /note="This region represents a CpG dinucleotide"
  misc_feature (61)..(61): /note="Nucleotide may be methylated to form 5-methylcytosine"
agttttttctaactaaaatcctacagacctgtgtttcccaccacgtgcaccttcttctggcggcctctttgatttggaaataacgtttttaacaaaacttctcattccaaacgtttgggaca

SEQ ID NO: 10696 - DNA, 122 bp, Homo sapiens
  misc_feature (61)..(62): /note="This region represents a CpG dinucleotide"
  misc_feature (61)..(61): /note="Nucleotide may be methylated to form 5-methylcytosine"
cgttgtaaggtaggaggagttgggtgatgggtctggtttctttgaaaagccagcggggggcgctttgagccttctgatgatgccatgatggctgccatgcccccatggcccagccctggcaa

SEQ ID NO: 10697 - DNA, 122 bp, Homo sapiens
  misc_feature (61)..(62): /note="This region represents a CpG dinucleotide"
  misc_feature (61)..(61): /note="Nucleotide may be methylated to form 5-methylcytosine"
ataagtcatttactgtggtttaataccaggactacccacgaggcttgtccaaaagtaagccgtctcctactccagcctgatttcttactatcaagagaagacttctcccttttaactgccct

SEQ ID NO: 10698 - DNA, 122 bp, Homo sapiens
  misc_feature (61)..(62): /note="This region represents a CpG dinucleotide"
  misc_feature (61)..(61): /note="Nucleotide may be methylated to form 5-methylcytosine"
ggtggagtagaagtggagggaaggaggggtgatgctgaccccacactcgagccacagcctcggaatctctttacccgtaggcgccacacttggcacacaatgagtctgtgagttgaggggaa

SEQ ID NO: 10699 - DNA, 122 bp, Homo sapiens
  misc_feature (61)..(62): /note="This region represents a CpG dinucleotide"
  misc_feature (61)..(61): /note="Nucleotide may be methylated to form 5-methylcytosine"
gcacacacaccatctccctgccagagctgagggacaccaaaacctgccttgtcacgtccccgccctgggttcccatggttgagtcgctctcactcacaagctgtgtggcttggggcaagggc

SEQ ID NO: 10700 - DNA, 122 bp, Homo sapiens
  misc_feature (61)..(62): /note="This region represents a CpG dinucleotide"
  misc_feature (61)..(61): /note="Nucleotide may be methylated to form 5-methylcytosine"
ctacaggggtgtggaacgcgccaatggacgctgacaccttcatgcggtcgtttaacgctccgtgcacaataaccattttactcagttgtgtgatgctccatcgaaaataacccatttacacg

SEQ ID NO: 10701 - DNA, 122 bp, Homo sapiens
  misc_feature (61)..(62): /note="This region represents a CpG dinucleotide"
  misc_feature (61)..(61): /note="Nucleotide may be methylated to form 5-methylcytosine"
agatatgtggggaaaaataaacctatcaaaacatttgccaaaccaaaccaaatgaaacaccgactgtacgggccaacgaaactgctatctcactgctgttcctggcctgagcgggggaagag

SEQ ID NO: 10702 - DNA, 122 bp, Homo sapiens
  misc_feature (61)..(62): /note="This region represents a CpG dinucleotide"
  misc_feature (61)..(61): /note="Nucleotide may be methylated to form 5-methylcytosine"
gactgagatgtaagggggttgattaggtcactcaagcaagatcacaccatttggatggggcgaagttaaactttagattccgcatctcagactggtgtgccctgctgacgctactcaggaaa

SEQ ID NO: 10703 - DNA, 122 bp, Homo sapiens
  misc_feature (61)..(62): /note="This region represents a CpG dinucleotide"
  misc_feature (61)..(61): /note="Nucleotide may be methylated to form 5-methylcytosine"
tgaaaataaagaagttctcagttatactgcagcttgttcatgcctcctgcctcgggatgccgcagtggctgccccagccctgccctttcagcctcagcccttccctcagtgaaggagagaaa

SEQ ID NO: 10704 - DNA, 122 bp, Homo sapiens
  misc_feature (61)..(62): /note="This region represents a CpG dinucleotide"
  misc_feature (61)..(61): /note="Nucleotide may be methylated to form 5-methylcytosine"
ggctcaccgaccggttgccaggaagtctacctcctccacgtggcaatcgccgctgctgctcggctccctgccacggggctgccccgactgtgcctccgcaggtctctctggttctgcccgcc

SEQ ID NO: 10705 - DNA, 122 bp, Homo sapiens
  misc_feature (61)..(62): /note="This region represents a CpG dinucleotide"
  misc_feature (61)..(61): /note="Nucleotide may be methylated to form 5-methylcytosine"
gtagtattgttatagcagcaccagacagactaaggctgtgtgtgtgtgtaaatacagatacgtggcatgcatatatattattaacaaacaggtaagaatccaaacgacattcctgagcacat

SEQ ID NO: 10706 - DNA, 122 bp, Homo sapiens
  misc_feature (61)..(62): /note="This region represents a CpG dinucleotide"
  misc_feature (61)..(61): /note="Nucleotide may be methylated to form 5-methylcytosine"
gcactcccttccttaatgattacatttcaaagacattatcaaagagataactcccaggtgcgtgcgaaagacattcataggaattaaagttgttaagaggcttttaaaaaagatttacatat

SEQ ID NO: 10707 - DNA, 122 bp, Homo sapiens
  misc_feature (61)..(62): /note="This region represents a CpG dinucleotide"
  misc_feature (61)..(61): /note="Nucleotide may be methylated to form 5-methylcytosine"
gccagcacagcactgggtgttgcccatggtctggtgtaaccactacttggctaccacttacgtttgctcaaggccctagggttcttcagtcagcaggtggtaaggacagtcgtgcttgtttt

SEQ ID NO: 10708 - DNA, 122 bp, Homo sapiens
  misc_feature (61)..(62): /note="This region represents a CpG dinucleotide"
  misc_feature (61)..(61): /note="Nucleotide may be methylated to form 5-methylcytosine"
tgcctaagacagccccaacagcaaagacttgacaatatcagcagtgcaataccagcaatacggcccgacatagcagcagtgctccagcaaagaaaccctgccagctccagcctctcgaatgc

SEQ ID NO: 10709 - DNA, 122 bp, Homo sapiens
  misc_feature (61)..(62): /note="This region represents a CpG dinucleotide"
  misc_feature (61)..(61): /note="Nucleotide may be methylated to form 5-methylcytosine"
tcatgtaagtagttatggcatgcagcttttcagtcactcaaacctgacctcttacactagcgtgccatagagcctacatttcctacactcagccaaattctttaaagagatatccatatttt

SEQ ID NO: 10710 - DNA, 122 bp, Homo sapiens
  misc_feature (61)..(62): /note="This region represents a CpG dinucleotide"
  misc_feature (61)..(61): /note="Nucleotide may be methylated to form 5-methylcytosine"
cctagttaattttaagatggcgtgacatcaggaagcaggtgcttcctcgtgattagatcccgcctgtgcactgtcagcagcaacatcacatgcataaagctgcatccttttcagggcagcac

SEQ ID NO: 10711 - DNA, 122 bp, Homo sapiens
  misc_feature (61)..(62): /note="This region represents a CpG dinucleotide"
  misc_feature (61)..(61): /note="Nucleotide may be methylated to form 5-methylcytosine"
ggcctgagaatgaagctgaggcagtgccaaaatatgccagtgatactgagacccagatcccgccatgcctggtcttttccattacatgagctcatacagtttctactggcacaagccaggct

SEQ ID NO: 10712 - DNA, 122 bp, Homo sapiens
  misc_feature (61)..(62): /note="This region represents a CpG dinucleotide"
  misc_feature (61)..(61): /note="Nucleotide may be methylated to form 5-methylcytosine"
tctcttggtctccaccatccagagaacaggaattttcaagttcatgtcaggcacccaatccgaaagggctgggagtctgagatgagtcagcacattcttcatcccaaatgtgtcaagccctt

SEQ ID NO: 10713 - DNA, 122 bp, Homo sapiens
  misc_feature (61)..(62): /note="This region represents a CpG dinucleotide"
  misc_feature (61)..(61): /note="Nucleotide may be methylated to form 5-methylcytosine"
gtgtgtgcattctttataatgaagcattttacaaagtggtttcacatacattactgcttccgtttctcattacagccccattaatattccccacctgatgaggaaactttcttcattctcct

SEQ ID NO: 10714 - DNA, 122 bp, Homo sapiens
  misc_feature (61)..(62): /note="This region represents a CpG dinucleotide"
  misc_feature (61)..(61): /note="Nucleotide may be methylated to form 5-methylcytosine"
ccttgcaagccctccgcagtcagcgctgcccaggaaaggactcagggaacaaactcctgacgtcctgggcttgggatcatctcagcccaggccctgcaggtacagatggggagactaaagca

SEQ ID NO: 10715 - DNA, 122 bp, Homo sapiens
  misc_feature (61)..(62): /note="This region represents a CpG dinucleotide"
  misc_feature (61)..(61): /note="Nucleotide may be methylated to form 5-methylcytosine"
gtgggtcagatgcaagttagatcaaaaagaggaaggaagctttcctggggaacctcagctcgaactggcagaagaccatggatgagtgtttggggcaccattctggaagagaaaggaagaga

SEQ ID NO: 10716 - DNA, 122 bp, Homo sapiens
  misc_feature (61)..(62): /note="This region represents a CpG dinucleotide"
  misc_feature (61)..(61): /note="Nucleotide may be methylated to form 5-methylcytosine"
atactgatggagaggctgcaatgagcacttttagaatttatctgaatgaacatgactgatcgtgaaattgctgggtcctagttcatgcatatcttaaactttctgatatttggtaaactgtt

SEQ ID NO: 10717 - DNA, 122 bp, Homo sapiens
  misc_feature (61)..(62): /note="This region represents a CpG dinucleotide"
  misc_feature (61)..(61): /note="Nucleotide may be methylated to form 5-methylcytosine"
ttcatactcacacaaacttgtgtacatacaaaaatgactgtttggaaagcaaccacctaccgtgaagtgacccagaactttgcaccgttccatggataattgtaggaaaccaacaaatagtt

SEQ ID NO: 10718 - DNA, 122 bp, Homo sapiens
  misc_feature (61)..(62): /note="This region represents a CpG dinucleotide"
  misc_feature (61)..(61): /note="Nucleotide may be methylated to form 5-methylcytosine"
aatgtttatccagcagagaatgcaacaccaagccagggtgtcttatctacatcaaattcacgctagcctactaaattaaaaaacagaacatattttctcctgtatcttgatttagaaagtac

SEQ ID NO: 10719 - DNA, 122 bp, Homo sapiens
  misc_feature (61)..(62): /note="This region represents a CpG dinucleotide"
  misc_feature (61)..(61): /note="Nucleotide may be methylated to form 5-methylcytosine"
ggtaggtgaagcaatgcacccaaagctacagagctaggaagcggtggggcagtgtggctacgcctgtgccctgaaccacaaaagtaacaggcacacggctgactggggaaaacgtgagaaca

SEQ ID NO: 10720 - DNA, 122 bp, Homo sapiens
  misc_feature (61)..(62): /note="This region represents a CpG dinucleotide"
  misc_feature (61)..(61): /note="Nucleotide may be methylated to form 5-methylcytosine"
tatgacttcttgctgagcttcacatgagctccttttagataacgtgccttctatcttggacgatttattcactttcatgttccctggaatttattgctaaacgttgacgtgaatgcttacag

SEQ ID NO: 10721 - DNA, 122 bp, Homo sapiens
  misc_feature (61)..(62): /note="This region represents a CpG dinucleotide"
  misc_feature (61)..(61): /note="Nucleotide may be methylated to form 5-methylcytosine"
ttcctcttcctgtgatccccacgatggtgaattcagcaacataaatagctcctgcgcacacgccaggcagggatggcgaagaacacacaagaaccctcactgcctccaccaaaagggctcag

SEQ ID NO: 10722 - DNA, 122 bp, Homo sapiens
  misc_feature (61)..(62): /note="This region represents a CpG dinucleotide"
  misc_feature (61)..(61): /note="Nucleotide may be methylated to form 5-methylcytosine"
ctactgcctggtgattcgcaccacagccccagcctcagcagccccaagatactctgcaggcgcatcccactgtctcctgagggcaggtctcaacacaaacataaatcctagtccacccctcc

SEQ ID NO: 10723 - DNA, 122 bp, Homo sapiens
  misc_feature (61)..(62): /note="This region represents a CpG dinucleotide"
  misc_feature (61)..(61): /note="Nucleotide may be methylated to form 5-methylcytosine"
taatcatgcttctaaacatgggctggcaattcaggaaagggccactgaaaatattagcctcgttcttttctctgtagagtgagcacagactattcctaaaccacattgcagtatgccaacat

SEQ ID NO: 10724 - DNA, 122 bp, Homo sapiens
  misc_feature (61)..(62): /note="This region represents a CpG dinucleotide"
  misc_feature (61)..(61): /note="Nucleotide may be methylated to form 5-methylcytosine"
cagcccctttttctacatttaagcgtctcttaaattggaacatatgttcaattgatgcctcgatttatatagtagtcttttcttgttttcttttcctaaaaagctgttattagttcttagtt

SEQ ID NO: 10725 - DNA, 122 bp, Homo sapiens
  misc_feature (61)..(62): /note="This region represents a CpG dinucleotide"
  misc_feature (61)..(61): /note="Nucleotide may be methylated to form 5-methylcytosine"
cctggctgggtgggggcccctcttggctgagctcgggtgccccccctccccacccaaggccggccctttcctgtggagtcatctcaccgccgtgcgcacccactcgtaactcgcacccgggt

SEQ ID NO: 10726 - DNA, 122 bp, Homo sapiens
  misc_feature (61)..(62): /note="This region represents a CpG dinucleotide"
  misc_feature (61)..(61): /note="Nucleotide may be methylated to form 5-methylcytosine"
cagaaaaaaggtcaagtcagttgttgcttaactgcagcctggctgatgtgttcttttgaccggaaagataggggttggggtgtgatgtggtgggacctggtccagacaggataaagtgccgg

SEQ ID NO: 10727 - DNA, 122 bp, Homo sapiens
  misc_feature (61)..(62): /note="This region represents a CpG dinucleotide"
  misc_feature (61)..(61): /note="Nucleotide may be methylated to form 5-methylcytosine"
ttaccctaagaacaaggaatacactgttaatttttcagtgactaataactgatgaggccacgttaaggaagatgatacaactatcattgtactaaactattttgtaatcattcaagggaatg

SEQ ID NO: 10728 - DNA, 122 bp, Homo sapiens
  misc_feature (61)..(62): /note="This region represents a CpG dinucleotide"
  misc_feature (61)..(61): /note="Nucleotide may be methylated to form 5-methylcytosine"
gtttccagatgcgaagccctgataggctgagtcaaagaaggggaacagaaaccggtgctgcggggaagcaaagtgagtcagggcaggaaatccttctggcaccaacctcagacaccggcctt

SEQ ID NO: 10729 - DNA, 122 bp, Homo sapiens
  misc_feature (61)..(62): /note="This region represents a CpG dinucleotide"
  misc_feature (61)..(61): /note="Nucleotide may be methylated to form 5-methylcytosine"
ctgtgctttttcctctttgccctcgaggtgtctttctttatcgacgtgccctctcatccccgcttgcctatcccgggaccttgcccgcgccttcggacaggacaagactaaatcttggctcc

SEQ ID NO: 10730 - DNA, 122 bp, Homo sapiens
  misc_feature (61)..(62): /note="This region represents a CpG dinucleotide"
  misc_feature (61)..(61): /note="Nucleotide may be methylated to form 5-methylcytosine"
gaggccccatgctggctccactcggcctctgcagccctctcttcccaccagttgcctcctcggatccttccggtgcagcttctaggctgctcttggcctgagtccaaagccgactggccctg

SEQ ID NO: 10731 - DNA, 122 bp, Homo sapiens
  misc_feature (61)..(62): /note="This region represents a CpG dinucleotide"
  misc_feature (61)..(61): /note="Nucleotide may be methylated to form 5-methylcytosine"
gatgcagtgggaatttaacccgcattgtctgtttccatttcgtaatagtttccaaagcaacgggttcatgaattcatactgttgactaattttgctggatatatgtggcctcagtattctaa

SEQ ID NO: 10732 - DNA, 122 bp, Homo sapiens
  misc_feature (61)..(62): /note="This region represents a CpG dinucleotide"
  misc_feature (61)..(61): /note="Nucleotide may be methylated to form 5-methylcytosine"
gtggagggcttcgaaaacgggggtgggggcgcccaagagctcagtgcccagccccgggatcgcctcctcccctcaggacccgcgagccctcggtgccgaggacgctcgagtggggccgcgag

SEQ ID NO: 10733 - DNA, 122 bp, Homo sapiens
  misc_feature (61)..(62): /note="This region represents a CpG dinucleotide"
  misc_feature (61)..(61): /note="Nucleotide may be methylated to form 5-methylcytosine"
tcagaaatggacatgtgacccaatcaaagccagagatgcagaaactcttgctgggactttcggagaaaagactcactctcaactcctcaaagttgggtggatgtgaggccagagttgctgtt

SEQ ID NO: 10734 - DNA, 122 bp, Homo sapiens
  misc_feature (61)..(62): /note="This region represents a CpG dinucleotide"
  misc_feature (61)..(61): /note="Nucleotide may be methylated to form 5-methylcytosine"
ggtctaagaatgatggtttgctcaattgctgttggtggctgtgcaggggaacatgcctagcgccaccctgttgatggtaacactctgtcatggctgaatgagcaactcttcctggaaaccat

SEQ ID NO: 10735 - DNA, 122 bp, Homo sapiens
  misc_feature (61)..(62): /note="This region represents a CpG dinucleotide"
  misc_feature (61)..(61): /note="Nucleotide may be methylated to form 5-methylcytosine"
aaggagataacacccttaatctattcattgctggtgcgcttacccagtctggtttagaaccgtttaacaaaggcttagaatcataatgtctatgattattacctcttagctcctagttttac

SEQ ID NO: 10736 - DNA, 122 bp, Homo sapiens
  misc_feature (61)..(62): /note="This region represents a CpG dinucleotide"
  misc_feature (61)..(61): /note="Nucleotide may be methylated to form 5-methylcytosine"
ctgaatctggctgccattgtgactctgccgcgcacgcgcagctccatcccctttgaggcgcgcatgtgctcgccaagggggcgcttctgtcaggcctctgagcccaagccaagccatcgcat

SEQ ID NO: 10737 - DNA, 122 bp, Homo sapiens
  misc_feature (61)..(62): /note="This region represents a CpG dinucleotide"
  misc_feature (61)..(61): /note="Nucleotide may be methylated to form 5-methylcytosine"
acagttaagtcctgaggtttattgtttgtacaggcttagatacattgtttgattcgtctgcgattcagtttattttatgtgaaagaggaataagaagccccacctatgttcttcatgcagtt

SEQ ID NO: 10738 - DNA, 122 bp, Homo sapiens
  misc_feature (61)..(62): /note="This region represents a CpG dinucleotide"
  misc_feature (61)..(61): /note="Nucleotide may be methylated to form 5-methylcytosine"
aaattaaacaccacatcccgtggtaaaattgttcttgctctattaatagccagcttggctcgtgttgcactgaaaatccacggaggaagggtgtcagagagaagaaaaaggctacagaccca

SEQ ID NO: 10739 - DNA, 122 bp, Homo sapiens
  misc_feature (61)..(62): /note="This region represents a CpG dinucleotide"
  misc_feature (61)..(61): /note="Nucleotide may be methylated to form 5-methylcytosine"
gagagaattgctgctagctattattaaggttaaatccctgttttataatttcctagtttgcgaaagagaaatttgaaacataacagccaggaagtcataaaaattggagcgtagttgtattc

SEQ ID NO: 10740 - DNA, 122 bp, Homo sapiens
  misc_feature (61)..(62): /note="This region represents a CpG dinucleotide"
  misc_feature (61)..(61): /note="Nucleotide may be methylated to form 5-methylcytosine"
ctgtgagcaattgatggggaatgttctgcagggacatctcaaagcctgggatgggtgggacggaaattactattctttggtgtggaatcttcattctctaggccagtgatgtcccctgctca

SEQ ID NO: 10741 - DNA, 122 bp, Homo sapiens
  misc_feature (61)..(62): /note="This region represents a CpG dinucleotide"
  misc_feature (61)..(61): /note="Nucleotide may be methylated to form 5-methylcytosine"
gtgaaaaagtgcccttgtgccagcagccctgggtaacaaatagggagcttatttcataatcgagacaggaggtaagaagcaagcattcgttccaccatgtcatggttcgcctcctgcagccc

SEQ ID NO: 10742 - DNA, 122 bp, Homo sapiens
  misc_feature (61)..(62): /note="This region represents a CpG dinucleotide"
  misc_feature (61)..(61): /note="Nucleotide may be methylated to form 5-methylcytosine"
tcagtctcttctgtgcaaccacggtaatcttttgaaagtgcaagtccaatcgtgttttcccgaattaaaaagcttttgctggctgtacatcttcacagaatataccgaatgaaattataggt

SEQ ID NO: 10743 - DNA, 122 bp, Homo sapiens
  misc_feature (61)..(62): /note="This region represents a CpG dinucleotide"
  misc_feature (61)..(61): /note="Nucleotide may be methylated to form 5-methylcytosine"
gaaagttactgtaagtatcatccttttctaaaagtttaaacaacttttcgaatgaggaaacgaaaccccagagagagcagccagctaagtgacaaagctggtttctgaacacacgggcccgt

SEQ ID NO: 10744 - DNA, 122 bp, Homo sapiens
  misc_feature (61)..(62): /note="This region represents a CpG dinucleotide"
  misc_feature (61)..(61): /note="Nucleotide may be methylated to form 5-methylcytosine"
cagaagacttgatggatttttgatagctggataaacgagtctctgcctcttcaaaggacacgctgccaaagcttactgcagtgtttttctgtcgttggaggaaaactctagaaagaatgcaa

SEQ ID NO: 10745 - DNA, 122 bp, Homo sapiens
  misc_feature (61)..(62): /note="This region represents a CpG dinucleotide"
  misc_feature (61)..(61): /note="Nucleotide may be methylated to form 5-methylcytosine"
tatcagcaaggctaggatcattatatatcaacaatttaaaatgtaagtctttagagttgacgtggagtaacctatggataatttttggcaagtagttcaggtgatttaatttttaatccctg

SEQ ID NO: 10746 - DNA, 122 bp, Homo sapiens
  misc_feature (61)..(62): /note="This region represents a CpG dinucleotide"
  misc_feature (61)..(61): /note="Nucleotide may be methylated to form 5-methylcytosine"
gtcctttctggggctcatgggtgcctctgccatccctgggatgctggaaggggaggtggacgggggataaattgcttaatgcaactctaaagccttgcttgaagagagaaccagccctgcag

SEQ ID NO: 10747 - DNA, 122 bp, Homo sapiens
  misc_feature (61)..(62): /note="This region represents a CpG dinucleotide"
  misc_feature (61)..(61): /note="Nucleotide may be methylated to form 5-methylcytosine"
taaggattgcttggttagccaagagtttagttactggcttggctgatggctcagcagacacgcaggcctttctttccctcctagtttaggttgaatgactcatactcaccaggttgaggcta

SEQ ID NO: 10748 - DNA, 122 bp, Homo sapiens
  misc_feature (61)..(62): /note="This region represents a CpG dinucleotide"
  misc_feature (61)..(61): /note="Nucleotide may be methylated to form 5-methylcytosine"
cattcaccaaagtgtgaattactcagtctataaaccactagtgtagcagcaatacagtcacggttaacctttgcccagcctcatcaaattctcttttctctgtgaagattaggcaagcatgt

SEQ ID NO: 10749 - DNA, 122 bp, Homo sapiens
  misc_feature (61)..(62): /note="This region represents a CpG dinucleotide"
  misc_feature (61)..(61): /note="Nucleotide may be methylated to form 5-methylcytosine"
ttgcttatcagtgcatcagttgatagacatttgggatccttccaaaatggggtgatttcacgcctcccttatcagttgaccatgatgactgaaagtgaaagctacaaaacccacctagccca

SEQ ID NO: 10750 - DNA, 122 bp, Homo sapiens
  misc_feature (61)..(62): /note="This region represents a CpG dinucleotide"
  misc_feature (61)..(61): /note="Nucleotide may be methylated to form 5-methylcytosine"
gtgggggttgggcagagaaggccaaggacagacttgaattcacactttataaatctggcacggtatatgtgaactgcttcatgaactggctgatatcaggcaaataagaaagttaaagcaaa

SEQ ID NO: 10751 - DNA, 122 bp, Homo sapiens
  misc_feature (61)..(62): /note="This region represents a CpG dinucleotide"
  misc_feature (61)..(61): /note="Nucleotide may be methylated to form 5-methylcytosine"
gtagcttactgaatctccagacacaagtgacacaatcttagatcatccattgcttagacacgtaagcaagctcagctcagagtaagagaattactcaacttgctcactttaccattacccat

SEQ ID NO: 10752 - DNA, 122 bp, Homo sapiens
  misc_feature (61)..(62): /note="This region represents a CpG dinucleotide"
  misc_feature (61)..(61): /note="Nucleotide may be methylated to form 5-methylcytosine"
gaaatgggtctgtcagcccttccaatgaattaaggctgatgcgaagatctaatggaatctcgcaacgggaggcccattggaaattgtgaatataattaggtgagttactactgctgtgccga

SEQ ID NO: 10753 - DNA, 122 bp, Homo sapiens
  misc_feature (61)..(62): /note="This region represents a CpG dinucleotide"
  misc_feature (61)..(61): /note="Nucleotide may be methylated to form 5-methylcytosine"
cgtgatctgcccgccttagcctcccaaagtgctgggattacaggcatgagcctccgcccccggccttaaataattcttaaaggaagtaaagttaactttgaaagaactatcaggatttggat

SEQ ID NO: 10754 - DNA, 122 bp, Homo sapiens
  misc_feature (61)..(62): /note="This region represents a CpG dinucleotide"
  misc_feature (61)..(61): /note="Nucleotide may be methylated to form 5-methylcytosine"
ttcgccaacgcccaccccgggcctctgtgtcccctcctgcacaacgtggtgggtggatgacgggccccacctggggctgtggatgagaaacagcccataaaactttccgtaaagctctgcac

SEQ ID NO: 10755 - DNA, 122 bp, Homo sapiens
  misc_feature (61)..(62): /note="This region represents a CpG dinucleotide"
  misc_feature (61)..(61): /note="Nucleotide may be methylated to form 5-methylcytosine"
cttcaacatcccaccgacagtattagacagatcatcaaggcagaaaattaacaaagatatcgggacctgaactcaacactggaacagatgaacctgatagatttctatagcactctccacct

SEQ ID NO: 10756 - DNA, 122 bp, Homo sapiens
  misc_feature (61)..(62): /note="This region represents a CpG dinucleotide"
  misc_feature (61)..(61): /note="Nucleotide may be methylated to form 5-methylcytosine"
ttaaagtgcaaaaagctagaagcctggacaaacagagtttctaaagagtgctgaaagtcccgtaagttaataataaataataatgaagtaggtgatgatcttgaaattatatacctgccagg

SEQ ID NO: 10757 - DNA, 122 bp, Homo sapiens
  misc_feature (61)..(62): /note="This region represents a CpG dinucleotide"
  misc_feature (61)..(61): /note="Nucleotide may be methylated to form 5-methylcytosine"
ttgagggcggagctgtgaacccttccaaagctctccctccctgtcataaagaccagaagtcggaagccacccctccccctagaccaggcagggactgaggtctccccagcccactctccacc

SEQ ID NO: 10758 - DNA, 122 bp, Homo sapiens
  misc_feature (61)..(62): /note="This region represents a CpG dinucleotide"
  misc_feature (61)..(61): /note="Nucleotide may be methylated to form 5-methylcytosine"
acctcgaccagcactatgcacacaagagacctcggtgaatggagtggtgtgtttagacaacgattgctggagaacagtgtacccatagttagctcattcctgtaaaggatatgctatcaacc

SEQ ID NO: 10759 - DNA, 122 bp, Homo sapiens
  misc_feature (61)..(62): /note="This region represents a CpG dinucleotide"
  misc_feature (61)..(61): /note="Nucleotide may be methylated to form 5-methylcytosine"
ggtgtgagtttgtgtacccgattctactgtgaggagttcaggttgctttacctgctgttgcgtcttaacagggtgagacatgtgcctgtggttacaggcctgtcccaggagaacttgtccta

SEQ ID NO: 10760 - DNA, 122 bp, Homo sapiens
  misc_feature (61)..(62): /note="This region represents a CpG dinucleotide"
  misc_feature (61)..(61): /note="Nucleotide may be methylated to form 5-methylcytosine"
ggaccaggaactagctcacaggttgtctagatctagtccccacccactttattctaggtgcgcccttgggaaattcacttcatcccttagagtggcagtttccacctctgtcaaggtgaaaa

SEQ ID NO: 10761 - DNA, 122 bp, Homo sapiens
  misc_feature (61)..(62): /note="This region represents a CpG dinucleotide"
  misc_feature (61)..(61): /note="Nucleotide may be methylated to form 5-methylcytosine"
tttttaaagacaaggtcttgctctgtcatccagctggagtgcagtggtgtgatgacagctcgcagatcacagcaacctcgaccacctggggtcatgggattctcctgcctcagccttccaag

SEQ ID NO: 10762 - DNA, 122 bp, Homo sapiens
  misc_feature (61)..(62): /note="This region represents a CpG dinucleotide"
  misc_feature (61)..(61): /note="Nucleotide may be methylated to form 5-methylcytosine"
tggcatgctctgccagggctgcaggctaatggggcatctgggaaggctgcctggaggtggcgtgagctagaagacagtgagggcagcctaggcttcctgctcaggtctccaggttgttcccc

SEQ ID NO: 10763 - DNA, 122 bp, Homo sapiens
  misc_feature (61)..(62): /note="This region represents a CpG dinucleotide"
  misc_feature (61)..(61): /note="Nucleotide may be methylated to form 5-methylcytosine"
cagatgtgatattctccatttttactggcattatcagtgaaactgtgtctgtaccatattcgttgactaacacatctttcaggtttcagtatgaataagctgcattctgcatgtatgttcag

SEQ ID NO: 10764 - DNA, 122 bp, Homo sapiens
  misc_feature (61)..(62): /note="This region represents a CpG dinucleotide"
  misc_feature (61)..(61): /note="Nucleotide may be methylated to form 5-methylcytosine"
ggcagaccttggtaggtgattagatctgaaggacacaggaggaaaaaaagttagagctgacgtatttctaaagttcagagagaggcaagcagatggagtcattccaagatacaggcctctgt

SEQ ID NO: 10765 - DNA, 122 bp, Homo sapiens
  misc_feature (61)..(62): /note="This region represents a CpG dinucleotide"
  misc_feature (61)..(61): /note="Nucleotide may be methylated to form 5-methylcytosine"
cactcatcagtctcccaaaatgctgggattacatgcatgagccactgcacctggccttgacgcacattaattcagacgtagtcattttggtatgggactgagtgctaagctgtgcaatgcca

SEQ ID NO: 10766 - DNA, 122 bp, Homo sapiens
  misc_feature (61)..(62): /note="This region represents a CpG dinucleotide"
  misc_feature (61)..(61): /note="Nucleotide may be methylated to form 5-methylcytosine"
ttgcttgtgggccaggggaacacgtgattaaagccttcctgcaaacagagcatctgcaaacgcagttttaaacccttcctgcaaacaaaccaagtaaattttactcgaaaagaggccgtgga

SEQ ID NO: 10767 - DNA, 122 bp, Homo sapiens
  misc_feature (61)..(62): /note="This region represents a CpG dinucleotide"
  misc_feature (61)..(61): /note="Nucleotide may be methylated to form 5-methylcytosine"
gaatgtgaaatccagggagactgctcagggccatgtggtccagctaaccatacccagtgacgtggttctttttttgtaagccctggaagttaggaatttgaatttgttaagaaaaatgaatt

SEQ ID NO: 10768 - DNA, 122 bp, Homo sapiens
  misc_feature (61)..(62): /note="This region represents a CpG dinucleotide"
  misc_feature (61)..(61): /note="Nucleotide may be methylated to form 5-methylcytosine"
aggaacccatgggaatgagctaaccggagtatttctggttaagcattggctagagaatggcgctgagattcagagaacagggctggaggtaaaaccatttattactaaccccagagcagtga

SEQ ID NO: 10769 - DNA, 122 bp, Homo sapiens
  misc_feature (61)..(62): /note="This region represents a CpG dinucleotide"
  misc_feature (61)..(61): /note="Nucleotide may be methylated to form 5-methylcytosine"
agcagcactcattcaagtagcaacagctgaaaccagccttattgtgcccctcagtgactccgttaccagccagttggaggcctctcctcaaagagctgagcctgagctcctctttcaaattc

SEQ ID NO: 10770 - DNA, 122 bp, Homo sapiens
  misc_feature (61)..(62): /note="This region represents a CpG dinucleotide"
  misc_feature (61)..(61): /note="Nucleotide may be methylated to form 5-methylcytosine"
gccgagttctgtttcctcttgggttgggacatgctgctgagtacgtcaggcctcgggtggcgctcattgggtaagacgataacagagcagggccactcccttctcactttgctgccagaggt

SEQ ID NO: 10771 - DNA, 122 bp, Homo sapiens
  misc_feature (61)..(62): /note="This region represents a CpG dinucleotide"
  misc_feature (61)..(61): /note="Nucleotide may be methylated to form 5-methylcytosine"
gatgatttgattgtgagccaggtgcttgcttatatatttggctttttgccactgctgtaacgcctgcctaaaatacacactgtgaaaatcaaataacatgcattagtcttaacatactctgg

SEQ ID NO: 10772 - DNA, 122 bp, Homo sapiens
  misc_feature (61)..(62): /note="This region represents a CpG dinucleotide"
  misc_feature (61)..(61): /note="Nucleotide may be methylated to form 5-methylcytosine"
tgcccagtatacatggaggagctgagattcaaactcaagtcaccctgagcctctgggtaacggggttatcagccatctgctcaatggtcactgataaggaagtgacacttcccagcatggga

SEQ ID NO: 10773 - DNA, 122 bp, Homo sapiens
  misc_feature (61)..(62): /note="This region represents a CpG dinucleotide"
  misc_feature (61)..(61): /note="Nucleotide may be methylated to form 5-methylcytosine"
gggatttgggctaaattcctggcctggcccacaaagaagaccaagcggtcagtcccattccgtcccatcctgatttacaggaactcacaccagcgatcaatcttccttaatttgtaactggg

SEQ ID NO: 10774 - DNA, 122 bp, Homo sapiens
  misc_feature (61)..(62): /note="This region represents a CpG dinucleotide"
  misc_feature (61)..(61): /note="Nucleotide may be methylated to form 5-methylcytosine"
ctcctgcccctctccccatcttcaaggtcatgtgagtgccccacttcctcagtgtagaggcgtttccagtgtccgggagacttggaggaggggtggggtctgagctgggatgtggactcctg

SEQ ID NO: 10775 - DNA, 122 bp, Homo sapiens
  misc_feature (61)..(62): /note="This region represents a CpG dinucleotide"
  misc_feature (61)..(61): /note="Nucleotide may be methylated to form 5-methylcytosine"
tgatgaaaatagctgctgtttattgagaactggtataccaggcctgcagtcagctcttcacgtgtatttttaaagtggattcttgccgcaaccccttgagtattattatcattatttcaact

SEQ ID NO: 10776 - DNA, 122 bp, Homo sapiens
  misc_feature (61)..(62): /note="This region represents a CpG dinucleotide"
  misc_feature (61)..(61): /note="Nucleotide may be methylated to form 5-methylcytosine"
cctcacagtgtggagggacccctacggtgaggttgtgcccgccctgaaggaggtttccatcgctgatgctgacggcctcttcatggtcaccacagctgtgatcatcagagacaagtatgtga

SEQ ID NO: 10777 - DNA, 122 bp, Homo sapiens
  misc_feature (61)..(62): /note="This region represents a CpG dinucleotide"
  misc_feature (61)..(61): /note="Nucleotide may be methylated to form 5-methylcytosine"
ccggcctacccggtgggtcttgtcctgccccccaactaccctggctggccccacaggggccgccaaccacacaagccagttcctgtccctgaggacttggctcagggactctgggaatgtgg

SEQ ID NO: 10778 - DNA, 122 bp, Homo sapiens
  misc_feature (61)..(62): /note="This region represents a CpG dinucleotide"
  misc_feature (61)..(61): /note="Nucleotide may be methylated to form 5-methylcytosine"
ataggcattagaaatggagctcaaaatgtgcctgtgacccaggtagtgtacatggaagttcgaggtcaagttgagcacacctccatctctcatcccctcccagcctgtggtgagctaagcct

SEQ ID NO: 10779 - DNA, 122 bp, Homo sapiens
  misc_feature (61)..(62): /note="This region represents a CpG dinucleotide"
  misc_feature (61)..(61): /note="Nucleotide may be methylated to form 5-methylcytosine"
tgccagttagaagaagacaagagctcctagccctaagacgccttgtatggggccgccttgcgagggtggaacccgcccttgtagcccggggagaacaggctctttgaggcctctgcttcctc

SEQ ID NO: 10780 - DNA, 122 bp, Homo sapiens
  misc_feature (61)..(62): /note="This region represents a CpG dinucleotide"
  misc_feature (61)..(61): /note="Nucleotide may be methylated to form 5-methylcytosine"
acaagcatctgagtggtgcggggaaagaaagctcagcgttgtttataacaagagtcatcacggaccaggaagaacaaagcagcaagaactgacaaagaagatgatacccagagcacaaggaa

SEQ ID NO: 10781 - DNA, 122 bp, Homo sapiens
  misc_feature (61)..(62): /note="This region represents a CpG dinucleotide"
  misc_feature (61)..(61): /note="Nucleotide may be methylated to form 5-methylcytosine"
aggcagagttgggaatattacatccattatcattccacaaaatgtaagatcctgtgaggacgcgtggtggcgctgcaggataagaaggcacaaaccagaaccgcagctgcagctccattaac

SEQ ID NO: 10782 - DNA, 122 bp, Homo sapiens
  misc_feature (61)..(62): /note="This region represents a CpG dinucleotide"
  misc_feature (61)..(61): /note="Nucleotide may be methylated to form 5-methylcytosine"
tgaaacagcatgtgcagatcaagcactgttctttcctttagagtgtgtgtttatttggggcgacttggagggttgctaattgagattatggggaatctaaagccacaccccaaaccgcccct

SEQ ID NO: 10783 - DNA, 122 bp, Homo sapiens
  misc_feature (61)..(62): /note="This region represents a CpG dinucleotide"
  misc_feature (61)..(61): /note="Nucleotide may be methylated to form 5-methylcytosine"
tactgccagctgtttgatcacaggcaaaattactcgaagccttgagcctgttttctaaaacgaaggtaatatctaccttcagagtttactgtgaaactttgatgtcatcatgtttgtaaaag

SEQ ID NO: 10784 - DNA, 122 bp, Homo sapiens
  misc_feature (61)..(62): /note="This region represents a CpG dinucleotide"
  misc_feature (61)..(61): /note="Nucleotide may be methylated to form 5-methylcytosine"
accaacgtgaaaaataaggcttagagaagaaaagtaacttgccataactaatgaagaacacgaaaaggaacctaggttagttagctcgaaagaacaagcctttgtgcatgaggcaacactgc

SEQ ID NO: 10785 - DNA, 122 bp, Homo sapiens
  misc_feature (61)..(62): /note="This region represents a CpG dinucleotide"
  misc_feature (61)..(61): /note="Nucleotide may be methylated to form 5-methylcytosine"
atcacatacactcattgccagagttcatacaccagaacacaggttaatcaaatcatagtgcgaccatgattaggacagaacagtttcggaatgacatacagaatggctccactctgagaagg

SEQ ID NO: 10786 - DNA, 122 bp, Homo sapiens
  misc_feature (61)..(62): /note="This region represents a CpG dinucleotide"
  misc_feature (61)..(61): /note="Nucleotide may be methylated to form 5-methylcytosine"
gccattaattagatgcgagaagggggaagaggagggaaaacccctgctgtaggaacttcacggaaggatgtgagcctatgtttgcaggagatctggacatagcattggcagataaaactggt

SEQ ID NO: 10787 - DNA, 122 bp, Homo sapiens
  misc_feature (61)..(62): /note="This region represents a CpG dinucleotide"
  misc_feature (61)..(61): /note="Nucleotide may be methylated to form 5-methylcytosine"
actcttccagacttcctaattttaagaactgtgacatacaccccttttttgagacagccacgcacactgtgtcacaagagtctccaagaattttttcttttcttttttttttccccttggcc

SEQ ID NO: 10788 - DNA, 122 bp, Homo sapiens
  misc_feature (61)..(62): /note="This region represents a CpG dinucleotide"
  misc_feature (61)..(61): /note="Nucleotide may be methylated to form 5-methylcytosine"
tcttgtccagattctgctatttacaactggggaggaaaataaaatataaaagtttgtctacgtttagaagagcagacataagtaaagaaaacagtgaagaaacagacaggctagcttagcag

SEQ ID NO: 10789 - DNA, 122 bp, Homo sapiens
  misc_feature (61)..(62): /note="This region represents a CpG dinucleotide"
  misc_feature (61)..(61): /note="Nucleotide may be methylated to form 5-methylcytosine"
actaaaggttactcaaacacaaacaatgtgataccatgacagtcaacctgataacagagccggctcctgtgagactatctagcaggtagcatacactgtgtggatacactagacaaagggat

SEQ ID NO: 10790 - DNA, 122 bp, Homo sapiens
  misc_feature (61)..(62): /note="This region represents a CpG dinucleotide"
  misc_feature (61)..(61): /note="Nucleotide may be methylated to form 5-methylcytosine"
tttcagttactatatgtactcaccaacatttaacttcccattttcaagttgcagcaatctcgtaagtatgtagtaatctttcactgaagttttaagttgcatttccccaatgtctaatgtta

SEQ ID NO: 10791 - DNA, 122 bp, Homo sapiens
  misc_feature (61)..(62): /note="This region represents a CpG dinucleotide"
  misc_feature (61)..(61): /note="Nucleotide may be methylated to form 5-methylcytosine"
gggcacttcccatgtgccaggcactctctgaagtgtttgttcactcactgaatcctcacccgcagctaagcagagggtgcaaggctgtgtctgtattgtatagtgagatgtcacccagtagc

SEQ ID NO: 10792 - DNA, 122 bp, Homo sapiens
  misc_feature (61)..(62): /note="This region represents a CpG dinucleotide"
  misc_feature (61)..(61): /note="Nucleotide may be methylated to form 5-methylcytosine"
ttaatttcatatattcaacttatagctatgtataagcttggtgctaggtataaatcttggcgctaggtataaatcttcatggggataaagtaacattatcattattatggcttttatggatt

SEQ ID NO: 10793 - DNA, 122 bp, Homo sapiens
  misc_feature (61)..(62): /note="This region represents a CpG dinucleotide"
  misc_feature (61)..(61): /note="Nucleotide may be methylated to form 5-methylcytosine"
agcaaagctttagggagactcacacgatgtgagcggggggcagttctagcttcctgattccgtgaagggcataccctcaagtgtaaatctattatttgctgccggttgaaatcttgttagtc

SEQ ID NO: 10794 - DNA, 122 bp, Homo sapiens
  misc_feature (61)..(62): /note="This region represents a CpG dinucleotide"
  misc_feature (61)..(61): /note="Nucleotide may be methylated to form 5-methylcytosine"
cctagaactttgagaaactttggtgtttccccccttcctacttttgtttacatcatagtacgtagatggtacaatattttggttaacctcagtctgacacttagattgtgttctcttttgcc

SEQ ID NO: 10795 - DNA, 122 bp, Homo sapiens
  misc_feature (61)..(62): /note="This region represents a CpG dinucleotide"
  misc_feature (61)..(61): /note="Nucleotide may be methylated to form 5-methylcytosine"
acttcaagatatggcaaataaacgtatatgcatttaaaatacctcatttccttccttgtccgtcatgtgatgctacaccacagtcaggctggaaaggcagccgtgttatgtggggttaaata

SEQ ID NO: 10796 - DNA, 122 bp, Homo sapiens
  misc_feature (61)..(62): /note="This region represents a CpG dinucleotide"
  misc_feature (61)..(61): /note="Nucleotide may be methylated to form 5-methylcytosine"
gggctttctaacttgggcagcacaacttctcaaatactgtcagttagcagtggggaaactcgtcagtcttacttcctgtggttctctgtggcttggcttgagtggatggggaaaaaccaaat

SEQ ID NO: 10797 - DNA, 122 bp, Homo sapiens
  misc_feature (61)..(62): /note="This region represents a CpG dinucleotide"
  misc_feature (61)..(61): /note="Nucleotide may be methylated to form 5-methylcytosine"
gccgtttccctttgtggcctaggtgcagtggaggcttgcctcttgcatcagctgagacgccgtgccgctggcttcctgcgcagtgacaagatggcagccctgttcaccaaggtggggaagac

SEQ ID NO: 10798 - DNA, 122 bp, Homo sapiens
  misc_feature (61)..(62): /note="This region represents a CpG dinucleotide"
  misc_feature (61)..(61): /note="Nucleotide may be methylated to form 5-methylcytosine"
taaaacagataaaaatgaagttttctagaaaaaactcatgaaagtggctgcaattacatccgtcatagaacctaaaacccatgtgacaaggtaggaagtgatggctcttacctggctcttct

SEQ ID NO: 10799 - DNA, 122 bp, Homo sapiens
  misc_feature (61)..(62): /note="This region represents a CpG dinucleotide"
  misc_feature (61)..(61): /note="Nucleotide may be methylated to form 5-methylcytosine"
ggaggcttgtgaggagcaagaacccaattaagcagctcagctgcacaggcctgagtgtagcgtggcagacccggggcgccctagcacgccccctttgactctgcctggctgagcttccttta

SEQ ID NO: 10800 - DNA, 122 bp, Homo sapiens
  misc_feature (61)..(62): /note="This region represents a CpG dinucleotide"
  misc_feature (61)..(61): /note="Nucleotide may be methylated to form 5-methylcytosine"
gaattgtacacctgaacacagagtcaggaagcacttgtcattgtggccactttagccactcgcccacatacatcaccgtaataaccactcagtgggcttggacaaaagacaaacccaaaagt

SEQ ID NO: 10801 - DNA, 122 bp, Homo sapiens
  misc_feature (61)..(62): /note="This region represents a CpG dinucleotide"
  misc_feature (61)..(61): /note="Nucleotide may be methylated to form 5-methylcytosine"
gcattgccatttatcaattaacagttattttattaagcaatcattgtatgcctggatattcgtttgctgacatcttcatgtgcaaatcattccttctaaatcttaagaatacacacataagt

SEQ ID NO: 10802 - DNA, 122 bp, Homo sapiens
  misc_feature (61)..(62): /note="This region represents a CpG dinucleotide"
  misc_feature (61)..(61): /note="Nucleotide may be methylated to form 5-methylcytosine"
ttgagtcttggtttccttgcctgtgaaatgggaagaatgactcatttcctgactaccttgcgtggttgggcaaatatcatttaggataattggtctgaaatgactctatggacttccaagcc

SEQ ID NO: 10803 - DNA, 122 bp, Homo sapiens
  misc_feature (61)..(62): /note="This region represents a CpG dinucleotide"
  misc_feature (61)..(61): /note="Nucleotide may be methylated to form 5-methylcytosine"
caagtaatgtcacatgcttagcacagcacatagtaagaatttgacacataggctgggtgccgtggctcacgcctgtaatcccagcactttgggaggctgaggcaggtggatcacgaggtcag

SEQ ID NO: 10804 - DNA, 122 bp, Homo sapiens
  misc_feature (61)..(62): /note="This region represents a CpG dinucleotide"
  misc_feature (61)..(61): /note="Nucleotide may be methylated to form 5-methylcytosine"
tgtggctgtgtgtctcgaagatggtccctgctcgccgctgggcaagaggcccttcctaaacgtcagttgtcaacatgaaaccagttttgttatgggcaaaatggtgtttccttctcccagta

SEQ ID NO: 10805 - DNA, 122 bp, Homo sapiens
  misc_feature (61)..(62): /note="This region represents a CpG dinucleotide"
  misc_feature (61)..(61): /note="Nucleotide may be methylated to form 5-methylcytosine"
actgggtctacctggataatccaggataatctccctgtctcagagttcttaacatcatcacgcctgcaaaatccctcttgccttatgaggtaacatattcacaggttctggggattagggcg

SEQ ID NO: 10806 - DNA, 122 bp, Homo sapiens
  misc_feature (61)..(62): /note="This region represents a CpG dinucleotide"
  misc_feature (61)..(61): /note="Nucleotide may be methylated to form 5-methylcytosine"
gagtgagtttgagtaagtcacctcacttctctcaacctcagtttcctcagtggtagaatgcgagttctgataccttacaggttgcagtgaggattcccgtcaatataagggtctcagcacat

SEQ ID NO: 10807 - DNA, 122 bp, Homo sapiens
  misc_feature (61)..(62): /note="This region represents a CpG dinucleotide"
  misc_feature (61)..(61): /note="Nucleotide may be methylated to form 5-methylcytosine"
tccaaacagggaaacaatattcctttaagccacattagctctcaacggtgtcactggtcacgcgtagagaggcaaattcatgagcagcattggggagttaatgaacggctggccagatggtg

SEQ ID NO: 10808 - DNA, 122 bp, Homo sapiens
  misc_feature (61)..(62): /note="This region represents a CpG dinucleotide"
  misc_feature (61)..(61): /note="Nucleotide may be methylated to form 5-methylcytosine"
gtaaggagtgaaagaggaagccttttattttctccctggagatcagaaccagagcagctacgataagaaagtaggttggagacgcaagagaatttgcataagtgtttctgagaaccatatat

SEQ ID NO: 10809 - DNA, 122 bp, Homo sapiens
  misc_feature (61)..(62): /note="This region represents a CpG dinucleotide"
  misc_feature (61)..(61): /note="Nucleotide may be methylated to form 5-methylcytosine"
tccttcatgcttaaaagcactaatctttcagaaatgctgtagtggtgttctgtgcctggacgtaactgaccaagccagttaggtcagccaagcaggttaatcaatgtggtttgctatcagct

SEQ ID NO: 10810 - DNA, 122 bp, Homo sapiens
  misc_feature (61)..(62): /note="This region represents a CpG dinucleotide"
  misc_feature (61)..(61): /note="Nucleotide may be methylated to form 5-methylcytosine"
aaggtctagcagaagtcatatggataggtcatattgatagagtcatatcgctatccctggcgattactgcaggtgcagtaatcagctcagacagcactgtgtgtctgcttaatcagatgagt

SEQ ID NO: 10811 - DNA, 122 bp, Homo sapiens
  misc_feature (61)..(62): /note="This region represents a CpG dinucleotide"
  misc_feature (61)..(61): /note="Nucleotide may be methylated to form 5-methylcytosine"
agtgaaagtagggctcatggaagcaagcgatccatggagatgtaggtcagatccatttcacgtggttccaggcccatcctgtggttacttccccaggtccagaatgcataactgaagtacat

SEQ ID NO: 10812 - DNA, 122 bp, Homo sapiens
  misc_feature (61)..(62): /note="This region represents a CpG dinucleotide"
  misc_feature (61)..(61): /note="Nucleotide may be methylated to form 5-methylcytosine"
atcttcctactcagtaaaccttatcatccttcagtggtggtcacatggcagtccgaaacacgtcagtgtttgtgtctgttttctcagtaacttctctctttgtttcccactaactgttactt

SEQ ID NO: 10813 - DNA, 122 bp, Homo sapiens
  misc_feature (61)..(62): /note="This region represents a CpG dinucleotide"
  misc_feature (61)..(61): /note="Nucleotide may be methylated to form 5-methylcytosine"
tcccagttggcctggaactttcccagtttaagcactgaaaactccttgtcccagccctgccggtttcccaacaaactgagatggttggccgctcaagtggctaccctgaccatcaccccagg

SEQ ID NO: 10814 - DNA, 122 bp, Homo sapiens
  misc_feature (61)..(62): /note="This region represents a CpG dinucleotide"
  misc_feature (61)..(61): /note="Nucleotide may be methylated to form 5-methylcytosine"
ccttaggatttggggtcattataattagccagaatggaaagaactcctgaatgatatatccggtctaagcacaggcacatgaattacatggctgagatgggtaaacctgaaaattttctgag

SEQ ID NO: 10815 - DNA, 122 bp, Homo sapiens
  misc_feature (61)..(62): /note="This region represents a CpG dinucleotide"
  misc_feature (61)..(61): /note="Nucleotide may be methylated to form 5-methylcytosine"
ctggggcagagccctgggttctgagctggagaaaatcgtgggtttgatacagactgtactcgggaccgggaacctagggtttgggtagaggtgaggcctgtcccctttgggctgggggcaga

SEQ ID NO: 10816 - DNA, 122 bp, Homo sapiens
  misc_feature (61)..(62): /note="This region represents a CpG dinucleotide"
  misc_feature (61)..(61): /note="Nucleotide may be methylated to form 5-methylcytosine"
cctggctgcatattcacatttgcaatcactcatcaaatccaatatcttattctatatgtacgagaagggaagtaatttacccaaagtcacatagtttaggacacatttgttcgttgtctacc

SEQ ID NO: 10817 - DNA, 122 bp, Homo sapiens
  misc_feature (61)..(62): /note="This region represents a CpG dinucleotide"
  misc_feature (61)..(61): /note="Nucleotide may be methylated to form 5-methylcytosine"
atagtgaaagtaatcttagtagcaatgttaatttatttgactcttgctagttttcaggtacgcaaaaggaggagatgatttcctttaaaaactcagctttgaatagttcgtgttatctggta

SEQ ID NO: 10818 - DNA, 122 bp, Homo sapiens
  misc_feature (61)..(62): /note="This region represents a CpG dinucleotide"
  misc_feature (61)..(61): /note="Nucleotide may be methylated to form 5-methylcytosine"
caccccaaaagacactgcactaaatgctgtgcaggctcactataatcagtaagtgcttatcgcccccttcaggtgcttatcttcttgagaacagagacagtgactcatgttatattttatta

SEQ ID NO: 10819 - DNA, 122 bp, Homo sapiens
  misc_feature (61)..(62): /note="This region represents a CpG dinucleotide"
  misc_feature (61)..(61): /note="Nucleotide may be methylated to form 5-methylcytosine"
gttcctgcaattgatctctttgatgacattctcattcatagaaagcgtttgatttatgagcgtaggacgaatcgcatccaggagctgcgcagccctggccgctgccgggacgccctgctccg

SEQ ID NO: 10820 - DNA, 122 bp, Homo sapiens
  misc_feature (61)..(62): /note="This region represents a CpG dinucleotide"
  misc_feature (61)..(61): /note="Nucleotide may be methylated to form 5-methylcytosine"
aaatgataaggctaggtgcatatcgacagtcttctgggctgtggcttgtaggagaatgttcgtgcgaatgatggaatatttagtgctgcctgctggtagatctttcttttatttccttgata

SEQ ID NO: 10821 - DNA, 122 bp, Homo sapiens
  misc_feature (61)..(62): /note="This region represents a CpG dinucleotide"
  misc_feature (61)..(61): /note="Nucleotide may be methylated to form 5-methylcytosine"
accggctgagccagaatgctcccctctcctggggtggctgtcgggctcaagcacagaaggcgaaagccacacaggctggcccgccgccagctctggtgttctttccatgaggtgcttctgaa

SEQ ID NO: 10822 - DNA, 122 bp, Homo sapiens
  misc_feature (61)..(62): /note="This region represents a CpG dinucleotide"
  misc_feature (61)..(61): /note="Nucleotide may be methylated to form 5-methylcytosine"
caacactaacccaacttctaccacgcacagcaaggctgtgctatttaggcgtggatcacacgcacactgcgccaacttctaagctaacaatggacaaccaaagcctccggaactctgtcttg

SEQ ID NO: 10823 - DNA, 122 bp, Homo sapiens
  misc_feature (61)..(62): /note="This region represents a CpG dinucleotide"
  misc_feature (61)..(61): /note="Nucleotide may be methylated to form 5-methylcytosine"
caacttgcctttgttcccggacacttggggtgttgtttactttctcctgcggccagcggccgaccgggcgctgctggctacccggggaggggctgagggctgcggcaccgacaccccggggg

SEQ ID NO: 10824 - DNA, 122 bp, Homo sapiens
  misc_feature (61)..(62): /note="This region represents a CpG dinucleotide"
  misc_feature (61)..(61): /note="Nucleotide may be methylated to form 5-methylcytosine"
atgggcacagagatcttacctaatttcacaattttacccctagaagaatttatgacaaaccgaaaaatatgcctcatttgtctttctgtcaatttaacaaggttagtttaattaatccagaa

SEQ ID NO: 10825 - DNA, 122 bp, Homo sapiens
  misc_feature (61)..(62): /note="This region represents a CpG dinucleotide"
  misc_feature (61)..(61): /note="Nucleotide may be methylated to form 5-methylcytosine"
tcgttgatgatcctcataacatttaggccagcaatagttccagcgtctttggttgcttggcgttgggcatcattaaaataggctggtacagtaacaactgcatgggtaacctaaaaggataa

SEQ ID NO: 10826 - DNA, 122 bp, Homo sapiens
  misc_feature (61)..(62): /note="This region represents a CpG dinucleotide"
  misc_feature (61)..(61): /note="Nucleotide may be methylated to form 5-methylcytosine"
aattgaagcttatgttgcactgaggaagatttgtgtgatataacaggaagaacttccctgcgttagggtggtaagatattggagtaataataataatggccagcacttacagaatactctct

SEQ ID NO: 10827 - DNA, 122 bp, Homo sapiens
  misc_feature (61)..(62): /note="This region represents a CpG dinucleotide"
  misc_feature (61)..(61): /note="Nucleotide may be methylated to form 5-methylcytosine"
ttcctttctttcacttctgattctagtcatttcagtcttctctttttctcttctctctctcgtcaatctagctaaagatctgtcaatgttgtcgattttttcaaagaactatcttttggttt

SEQ ID NO: 10828 - DNA, 122 bp, Homo sapiens
  misc_feature (61)..(62): /note="This region represents a CpG dinucleotide"
  misc_feature (61)..(61): /note="Nucleotide may be methylated to form 5-methylcytosine"
gtaaggctctctccattcaggctaagtgattgaattcacaattcctctgatttagtgcctcgtttgtcactttcttgaggagaggtttttggacccatttagttgggagattggctggagca

SEQ ID NO: 10829 - DNA, 122 bp, Homo sapiens
  misc_feature (61)..(62): /note="This region represents a CpG dinucleotide"
  misc_feature (61)..(61): /note="Nucleotide may be methylated to form 5-methylcytosine"
gaatctgctctgctggaacatggataatgtggggcggcctgtcgccatggtgatgcaccgcgttgctctcctgttcataaatggcatcacgttctggctgaggaagactgaggaaccttcgg

SEQ ID NO: 10830 - DNA, 122 bp, Homo sapiens
  misc_feature (61)..(62): /note="This region represents a CpG dinucleotide"
  misc_feature (61)..(61): /note="Nucleotide may be methylated to form 5-methylcytosine"
aaatgtttatttttttttaatttatctaatttttttttttttgtttttgagacagagtctcgctctgtcacccagactctggggtgcagtggcacagtcatggttcatgacagcttcaactt

SEQ ID NO: 10831 - DNA, 122 bp, Homo sapiens
  misc_feature (61)..(62): /note="This region represents a CpG dinucleotide"
  misc_feature (61)..(61): /note="Nucleotide may be methylated to form 5-methylcytosine"
caccacactgtggccacatgccaaagggcctgccctttgcatgtgagctctcagcacagccggcatctccgtgctctatgtcgtgcccttgtgtcctggcgtcttgtcccgcttggctgcca

SEQ ID NO: 10832 - DNA, 122 bp, Homo sapiens
  misc_feature (61)..(62): /note="This region represents a CpG dinucleotide"
  misc_feature (61)..(61): /note="Nucleotide may be methylated to form 5-methylcytosine"
atcacctgcagatgcggttaagcaacttgcagaggccccagggctgagccaccgcagaaccggagctggaaaccagtcctatgactcctgaggcagtgctctttctactacctggccatggc

SEQ ID NO: 10833 - DNA, 122 bp, Homo sapiens
  misc_feature (61)..(62): /note="This region represents a CpG dinucleotide"
  misc_feature (61)..(61): /note="Nucleotide may be methylated to form 5-methylcytosine"
aatatgccctcaaagttttactcctacctagaaacaagcctagggcagcagctggaaaaacggggcatttagcctgccccagagaataccagagccaaggagtccatgtcctgggaggactt

SEQ ID NO: 10834 - DNA, 122 bp, Homo sapiens
  misc_feature (61)..(62): /note="This region represents a CpG dinucleotide"
  misc_feature (61)..(61): /note="Nucleotide may be methylated to form 5-methylcytosine"
agtggctcaccaacagatggcaaattcaaggactcagtattgtcttccggattctaatatcgttagtttggctgtggcaagtgactcaaatgtgtgggtttgaatttccttatctaatacgt

SEQ ID NO: 10835 - DNA, 122 bp, Homo sapiens
  misc_feature (61)..(62): /note="This region represents a CpG dinucleotide"
  misc_feature (61)..(61): /note="Nucleotide may be methylated to form 5-methylcytosine"
gaagtcaccttctgcattctttctcattagtcatctacaattttttttttcttttgagaccgagtttcactcttgttgcccaggctggagagcaatggcaccatctcggcttactgcaatct

SEQ ID NO: 10836 - DNA, 122 bp, Homo sapiens
  misc_feature (61)..(62): /note="This region represents a CpG dinucleotide"
  misc_feature (61)..(61): /note="Nucleotide may be methylated to form 5-methylcytosine"
caaaagtatatagaaggataacaaggtgtggataaggaaggggtgccattagtacaaggacgtgcctgtcacatgtaagagctggaaatcaggctccaagcttccccagtgccacagcaaag

SEQ ID NO: 10837 - DNA, 122 bp, Homo sapiens
  misc_feature (61)..(62): /note="This region represents a CpG dinucleotide"
  misc_feature (61)..(61): /note="Nucleotide may be methylated to form 5-methylcytosine"
ggaacacatcctcagatgagtcagcagtctgccatcttccagattcaagtattgttcaaacgcttttggctaaagattaagcaagaacagagattattcattttctgtgtcataacatcatc

SEQ ID NO: 10838 - DNA, 122 bp, Homo sapiens
  misc_feature (61)..(62): /note="This region represents a CpG dinucleotide"
  misc_feature (61)..(61): /note="Nucleotide may be methylated to form 5-methylcytosine"
cgctgttggaatttcctctcccccgcggtttccctcgcggttcagatcgggaccagaacgcgatcagcttcagtgccccgccgcaggcatttttaaatagagtattgcgtcccccattcagc

SEQ ID NO: 10839 - DNA, 122 bp, Homo sapiens
  misc_feature (61)..(62): /note="This region represents a CpG dinucleotide"
  misc_feature (61)..(61): /note="Nucleotide may be methylated to form 5-methylcytosine"
tgaagtcacttgcctagggtcacacggctagtcactagtcagccacaaagcaaaggccagcgttgccaaacacaccgcctgctgagtgattgatggcagcactgaccactgtgagcctgccc

SEQ ID NO: 10840 - DNA, 122 bp, Homo sapiens
  misc_feature (61)..(62): /note="This region represents a CpG dinucleotide"
  misc_feature (61)..(61): /note="Nucleotide may be methylated to form 5-methylcytosine"
aggagagtagtctagctccatgtccggggctctaggggttcatagatggcagctcctgtccggggctgaggttgggaggggagaaacaggggcagagtgagttggtctctggagtgactgtg

SEQ ID NO: 10841 - DNA, 122 bp, Homo sapiens
  misc_feature (61)..(62): /note="This region represents a CpG dinucleotide"
  misc_feature (61)..(61): /note="Nucleotide may be methylated to form 5-methylcytosine"
ccccatccccacctccaaccccagctctacaaaaaaattaaaaaattagctagggccaggcgccgtggctcacgcctgtaatcccagaattttgggaggccgaggcgggcggatcacgaggt

SEQ ID NO: 10842 - DNA, 122 bp, Homo sapiens
  misc_feature (61)..(62): /note="This region represents a CpG dinucleotide"
  misc_feature (61)..(61): /note="Nucleotide may be methylated to form 5-methylcytosine"
ggaccttgaggcttcttcagttcagatgtcaaaacgccattatttgggggtatgtttctgcgcctccaacactgtttaacagggaggcttgtttcatccagtaagggagtcaagaaatggtt

SEQ ID NO: 10843 - DNA, 122 bp, Homo sapiens
  misc_feature (61)..(62): /note="This region represents a CpG dinucleotide"
  misc_feature (61)..(61): /note="Nucleotide may be methylated to form 5-methylcytosine"
ctcctgcggacagccctgtgtaccaagaggaggagctgagtgaggtcatttgggagccaccgaaaagttctaagcagggaagtgaagcaatcagatgtgtgtttagtaaagacaacttcagc

SEQ ID NO: 10844 - DNA, 122 bp, Homo sapiens
  misc_feature (61)..(62): /note="This region represents a CpG dinucleotide"
  misc_feature (61)..(61): /note="Nucleotide may be methylated to form 5-methylcytosine"
agggaaagataaacacaaaccaaacctccttcctttcagggacttcctgctgggtttcagcgtaagagtaaacttaagaggtgattaacaacagagggaaggaaaatgaactctgcaggcat

SEQ ID NO: 10845 - DNA, 122 bp, Homo sapiens
  misc_feature (61)..(62): /note="This region represents a CpG dinucleotide"
  misc_feature (61)..(61): /note="Nucleotide may be methylated to form 5-methylcytosine"
tctgcgttgtgtgtttcgcattccggaagcaaattactcatctgattttacttcagctgacgctgattttaaatgtgacttggaatcctcagaataattagctgcctaatttggaggttcat

SEQ ID NO: 10846 - DNA, 122 bp, Homo sapiens
  misc_feature (61)..(62): /note="This region represents a CpG dinucleotide"
  misc_feature (61)..(61): /note="Nucleotide may be methylated to form 5-methylcytosine"
tgatgagcagttttttctttatcctatgagcactaggaagcccccaaaaggtgccaagtacggaagtaacacgatcaggtatgtcttttaaaaaaaatcattctgggtggaaaacactggag

SEQ ID NO: 10847 - DNA, 122 bp, Homo sapiens
  misc_feature (61)..(62): /note="This region represents a CpG dinucleotide"
  misc_feature (61)..(61): /note="Nucleotide may be methylated to form 5-methylcytosine"
gaatggtggcccacactataaataatcaaccaagccacacaggtctgtatgtttttgctccgcaccaggggctgccttaagcactttaacctttaggtacagttgtcacacccattttagag

SEQ ID NO: 10848 - DNA, 122 bp, Homo sapiens
  misc_feature (61)..(62): /note="This region represents a CpG dinucleotide"
  misc_feature (61)..(61): /note="Nucleotide may be methylated to form 5-methylcytosine"
aataacaaaaccttggttttaattacaaaatgttgtttggtggctggtggatcaaatcaacgaggattagctagaggcaaactgcaaagacagagtatgaggcaatcaagaaaaacttaaaa

SEQ ID NO: 10849 - DNA, 122 bp, Homo sapiens
  misc_feature (61)..(62): /note="This region represents a CpG dinucleotide"
  misc_feature (61)..(61): /note="Nucleotide may be methylated to form 5-methylcytosine"
aatgctcctcacaactatataaaacagaatgttctcttagatatacaaacttcccctttacgatgttatgataagcaaaatatttaactcccaaaaacttgacagaaaatgaaagtgcagtg

SEQ ID NO: 10850 - DNA, 122 bp, Homo sapiens
  misc_feature (61)..(62): /note="This region represents a CpG dinucleotide"
  misc_feature (61)..(61): /note="Nucleotide may be methylated to form 5-methylcytosine"
tctgtagcttggccctactcgctcttacaaggttcccaggtgatgccgatgctgccgctccgggatcacacctggagacctagtgccaaaccctcctaatcaaggcaccgactcagccggca

SEQ ID NO: 10851 - DNA, 122 bp, Homo sapiens
  misc_feature (61)..(62): /note="This region represents a CpG dinucleotide"
  misc_feature (61)..(61): /note="Nucleotide may be methylated to form 5-methylcytosine"
tatttgttaaacaaatgaatgaattttgaatgattatctcctctactcagagctaaaaatcgaactgagactcagaaagctttattgcttgcccaagtgaaagagctaaggtaaaccccaag

SEQ ID NO: 10852 - DNA, 122 bp, Homo sapiens
  misc_feature (61)..(62): /note="This region represents a CpG dinucleotide"
  misc_feature (61)..(61): /note="Nucleotide may be methylated to form 5-methylcytosine"
ccagtgtggggagtagacaatctgggtggtggacaacagctgctggcttccaccctgacacggctgcatttcattagtgggtaaactgattgctcagagtatgtttatgtgtgggtgtggtt

SEQ ID NO: 10853 - DNA, 122 bp, Homo sapiens
  misc_feature (61)..(62): /note="This region represents a CpG dinucleotide"
  misc_feature (61)..(61): /note="Nucleotide may be methylated to form 5-methylcytosine"
tttggaggcggtagcgttttcggcgtcgagactggaggctgagtgctaaactgtgtggggcgcggatgggatccagctgttagtcgggtaggcataggtaggaccgctgccctgtggggagt

SEQ ID NO: 10854 - DNA, 122 bp, Homo sapiens
  misc_feature (61)..(62): /note="This region represents a CpG dinucleotide"
  misc_feature (61)..(61): /note="Nucleotide may be methylated to form 5-methylcytosine"
cactgcactcacagcagcagattgttaataattgggtatatcagcttctgaagcagcaagcgaggttgatcagattaaaacacgaacaagactgaaaacaagagagcagtggaattaaaaat

SEQ ID NO: 10855 - DNA, 122 bp, Homo sapiens
  misc_feature (61)..(62): /note="This region represents a CpG dinucleotide"
  misc_feature (61)..(61): /note="Nucleotide may be methylated to form 5-methylcytosine"
ctttgttcccactattccctttgcttgcaatgcaactttctggattttcccataatacatcgtcatgcaccctgtaaaaggcagccaggcaccacccaccctaggaagtcttgcttgactaa

SEQ ID NO: 10856 - DNA, 122 bp, Homo sapiens
  misc_feature (61)..(62): /note="This region represents a CpG dinucleotide"
  misc_feature (61)..(61): /note="Nucleotide may be methylated to form 5-methylcytosine"
cctgggccttgggaggaggctctgagtagggccgcctggggcgcgtcttcagggtcctcccggcactggggtgaccgccgagctagacgcgcctgagggctgagccccagggctcgtgatct

SEQ ID NO: 10857 - DNA, 122 bp, Homo sapiens
  misc_feature (61)..(62): /note="This region represents a CpG dinucleotide"
  misc_feature (61)..(61): /note="Nucleotide may be methylated to form 5-methylcytosine"
aacagagtcctccatcgctgaagagacttaaccaaggtcaccagcctgtcctcttccactcgcacttacacagtgcatgtaaggagtccaggagctttttatggaactaactaatgaaggaa

SEQ ID NO: 10858 - DNA, 122 bp, Homo sapiens
  misc_feature (61)..(62): /note="This region represents a CpG dinucleotide"
  misc_feature (61)..(61): /note="Nucleotide may be methylated to form 5-methylcytosine"
tactgcttcctattgtattaaatttctttttttaaaaaattattgctctgtaatctaggacggtgatgaatcatctccaattttaacaagttttgaattagtgaaagttcctgacccccaga

SEQ ID NO: 10859 - DNA, 122 bp, Homo sapiens
  misc_feature (61)..(62): /note="This region represents a CpG dinucleotide"
  misc_feature (61)..(61): /note="Nucleotide may be methylated to form 5-methylcytosine"
ccttgtcgcgtgtttccacccttcgtatgaggcaggtaccatgggtcttcaccaacagcacggcctgttgtctccaggaaatggtagcccctcacagtgctttctgtctgcttgtttagctt

SEQ ID NO: 10860 - DNA, 122 bp, Homo sapiens
  misc_feature (61)..(62): /note="This region represents a CpG dinucleotide"
  misc_feature (61)..(61): /note="Nucleotide may be methylated to form 5-methylcytosine"
ctgcctgtcagggagcccggtgcttgtactctgtatagacattcagcagttagcaggtcacgttcacgcagtctcaagtgccctcctgaaaggagctcatagtcatcaggatggctgggaac

SEQ ID NO: 10861 - DNA, 122 bp, Homo sapiens
  misc_feature (61)..(62): /note="This region represents a CpG dinucleotide"
  misc_feature (61)..(61): /note="Nucleotide may be methylated to form 5-methylcytosine"
gtcttgagaaatcggctctgtctaggcagtgggcaaggtgaatccattgagcggttacaacgacagattactagaaagtgtaaatagaagtatgagagaagacagtgtcaaatatggggata

SEQ ID NO: 10862 - DNA, 122 bp, Homo sapiens
  misc_feature (61)..(62): /note="This region represents a CpG dinucleotide"
  misc_feature (61)..(61): /note="Nucleotide may be methylated to form 5-methylcytosine"
tcatagatcagaacatactggagcctgtaacccgtgcacagagggtgtggattacaccaacgcttccaacaatgaaccttcttgcttcccatgtacagtttgtaaatcaggtacagaatgtg

SEQ ID NO: 10863 - DNA, 122 bp, Homo sapiens
  misc_feature (61)..(62): /note="This region represents a CpG dinucleotide"
  misc_feature (61)..(61): /note="Nucleotide may be methylated to form 5-methylcytosine"
tatagatcaagattaatatcaccagtggtatgacaagttgacatcctacgtttcctggcacgtcatcatttgtgtggtattcttgccaagaatactgtaactaagtctgatcaggaggaaat

SEQ ID NO: 10864 - DNA, 122 bp, Homo sapiens
  misc_feature (61)..(62): /note="This region represents a CpG dinucleotide"
  misc_feature (61)..(61): /note="Nucleotide may be methylated to form 5-methylcytosine"
agttttatcactttctacaagtataagcaagttacttatctggacctctgtttcctcttacgttaaatggggattaaagcccccttgcagacttgttatgagaatagtgataaggaatattc

SEQ ID NO: 10865 - DNA, 122 bp, Homo sapiens
  misc_feature (61)..(62): /note="This region represents a CpG dinucleotide"
  misc_feature (61)..(61): /note="Nucleotide may be methylated to form 5-methylcytosine"
gatccacctgacttggcctcccaaagtgctgggattacaggcctgagccactgtgcctggcgggcgttattaaactcagggcaaacactaatgtgaactagcttactcagagtctctctgtc

SEQ ID NO: 10866 - DNA, 122 bp, Homo sapiens
  misc_feature (61)..(62): /note="This region represents a CpG dinucleotide"
  misc_feature (61)..(61): /note="Nucleotide may be methylated to form 5-methylcytosine"
tggttaggcccatcttagactggtcagaagcaaactgaaggacagagataagccatcaaacgtagcagaggggaattctggcttggagcttcctgttagtcatctagaagactaaacagaat

SEQ ID NO: 10867 - DNA, 122 bp, Homo sapiens
  misc_feature (61)..(62): /note="This region represents a CpG dinucleotide"
  misc_feature (61)..(61): /note="Nucleotide may be methylated to form 5-methylcytosine"
cgcctggactcaagttctttttaaagcttgattaaggtataaccgacatataatacacttcgcatatttgaacagtacttgatacagtttgatgtatgtatatacccttgacataatcaaaa

SEQ ID NO: 10868 - DNA, 122 bp, Homo sapiens
  misc_feature (61)..(62): /note="This region represents a CpG dinucleotide"
  misc_feature (61)..(61): /note="Nucleotide may be methylated to form 5-methylcytosine"
caccccaggcagggccagggtgggtcaccatctgcagaagccctcaggggcccccagcagcgcccctcctatccccctgccccagggcgggctgccgccttgtaacccccagaactcttggc

SEQ ID NO: 10869 - DNA, 122 bp, Homo sapiens
  misc_feature (61)..(62): /note="This region represents a CpG dinucleotide"
  misc_feature (61)..(61): /note="Nucleotide may be methylated to form 5-methylcytosine"
cctaggacagaccaagccagtacgcatgggagaggaaagacaggaagaacctgagcctgacgctgctgctgagtcacagattagcccattctggagctgccatcacctccccgcttcctgct

SEQ ID NO: 10870 - DNA, 122 bp, Homo sapiens
  misc_feature (61)..(62): /note="This region represents a CpG dinucleotide"
  misc_feature (61)..(61): /note="Nucleotide may be methylated to form 5-methylcytosine"
tccccgggacaggatggccagccacagctggggccagtgtagccgggaaagcacacgcaacgaccacggacacagcgaccctgatcattgcagtcatctgggcaggaccccgaggctgaggg

SEQ ID NO: 10871 - DNA, 122 bp, Homo sapiens
  misc_feature (61)..(62): /note="This region represents a CpG dinucleotide"
  misc_feature (61)..(61): /note="Nucleotide may be methylated to form 5-methylcytosine"
ctccttgtggccatagaaccagtgcgcagggggtgcaggaaacaggtgcatggctctgatcgtccatctcctcctctggtacaacctgattacctgaaacagcagcagagacatgcagagga

SEQ ID NO: 10872 - DNA, 122 bp, Homo sapiens
  misc_feature (61)..(62): /note="This region represents a CpG dinucleotide"
  misc_feature (61)..(61): /note="Nucleotide may be methylated to form 5-methylcytosine"
agctggtaaaggcacaggctacagaacgctggcaggcatgagaaatgcagctcaggggcccgctctgctgaagtcttcctactgatctcacctcatgagagcaaggtgccactactgcgggc

SEQ ID NO: 10873 - DNA, 122 bp, Homo sapiens
  misc_feature (61)..(62): /note="This region represents a CpG dinucleotide"
  misc_feature (61)..(61): /note="Nucleotide may be methylated to form 5-methylcytosine"
tgaaaggaggaaccccaaagagaatgccattggccagtaaggccttctgtcatcctcatccggcattgctcattctctgaacttgaccttgttgtttccccttcccaaatgaaaatcagtct

SEQ ID NO: 10874 - DNA, 122 bp, Homo sapiens
  misc_feature (61)..(62): /note="This region represents a CpG dinucleotide"
  misc_feature (61)..(61): /note="Nucleotide may be methylated to form 5-methylcytosine"
cttacagagaccacagcctatggagtgtctagcttcagagaatatgtactccactggcagcgtgagaaacaaatacccaagaaaatacaatatagcacaaaccaggagctgagggtgaatga

SEQ ID NO: 10875 - DNA, 122 bp, Homo sapiens
  misc_feature (61)..(62): /note="This region represents a CpG dinucleotide"
  misc_feature (61)..(61): /note="Nucleotide may be methylated to form 5-methylcytosine"
tattctccaacttggtccagtgagacccttttaagatatgagtcacgatgactcattctgcgtaaagaacttactgatttccaatttaccgagtttaaatcttttgcttggtgcacaaagcc

SEQ ID NO: 10876 - DNA, 122 bp, Homo sapiens
  misc_feature (61)..(62): /note="This region represents a CpG dinucleotide"
  misc_feature (61)..(61): /note="Nucleotide may be methylated to form 5-methylcytosine"
tgggctggaaagaacaaactttcctccaggtcacatcttcctaccttcccactgctgccacgagcctgaatcctcatggtgggccagagtcttcatccatgcaagagacactcccaggcttg

SEQ ID NO: 10877 - DNA, 122 bp, Homo sapiens
  misc_feature (61)..(62): /note="This region represents a CpG dinucleotide"
  misc_feature (61)..(61): /note="Nucleotide may be methylated to form 5-methylcytosine"
cgggctccctaagccaccgaccccagcccgcggcgccttcgagccttctagggcctccggcgccgcgacctcctctcaagatcgagtgaaagaatcttaaaaactgttttttccactcaggg

SEQ ID NO: 10878 - DNA, 122 bp, Homo sapiens
  misc_feature (61)..(62): /note="This region represents a CpG dinucleotide"
  misc_feature (61)..(61): /note="Nucleotide may be methylated to form 5-methylcytosine"
aggagaatgagttggccatggaagaggaagtgaaagagctttctggcaataggaactctgcgtgcaataagcctgagacaggggcccctagcatgctagagcacagtaaaagaaggccagtg

SEQ ID NO: 10879 - DNA, 122 bp, Homo sapiens
  misc_feature (61)..(62): /note="This region represents a CpG dinucleotide"
  misc_feature (61)..(61): /note="Nucleotide may be methylated to form 5-methylcytosine"
tgagcaaggtgccttgcccatagtcaattgttattgaaaacaagcaccccactttttcctcgtatctaaatttctttcagattccacccaggtcatccaaattctgatctgggatcaacact

SEQ ID NO: 10880 - DNA, 122 bp, Homo sapiens
  misc_feature (61)..(62): /note="This region represents a CpG dinucleotide"
  misc_feature (61)..(61): /note="Nucleotide may be methylated to form 5-methylcytosine"
agtggcctaagggtggtggaaacaaagggaggtaatgaatcaccccgggaaaccagggcgcgcttggggtcccccacaacagactcagttcgccaccgacgtccccgctagtgcaggatttc

SEQ ID NO: 10881 - DNA, 122 bp, Homo sapiens
  misc_feature (61)..(62): /note="This region represents a CpG dinucleotide"
  misc_feature (61)..(61): /note="Nucleotide may be methylated to form 5-methylcytosine"
gacatattccacccactaagtcataccagaagccttggtaatcatggtggatggtgtgaacgcaaatcccttagatttccattctgcaacaagctttcttggaggaaggtgtgaatatatca

SEQ ID NO: 10882 - DNA, 122 bp, Homo sapiens
  misc_feature (61)..(62): /note="This region represents a CpG dinucleotide"
  misc_feature (61)..(61): /note="Nucleotide may be methylated to form 5-methylcytosine"
cttttttttctgactggcttatttgtctcagcaaggttcatccttgttgtcgcatgtttccgaatttcctttctgaagtctgagtaataatccactgtatcacatttattcatttatccatg

SEQ ID NO: 10883 - DNA, 122 bp, Homo sapiens
  misc_feature (61)..(62): /note="This region represents a CpG dinucleotide"
  misc_feature (61)..(61): /note="Nucleotide may be methylated to form 5-methylcytosine"
ctgaaaacagtacctgggcagaaggtatcgcccgaacgtgtcttctgaacggctgggccacggggtttgccttgaactaaaaccttacaaagggggtcggtccaacctcccaactctccagt

SEQ ID NO: 10884 - DNA, 122 bp, Homo sapiens
  misc_feature (61)..(62): /note="This region represents a CpG dinucleotide"
  misc_feature (61)..(61): /note="Nucleotide may be methylated to form 5-methylcytosine"
taacttcaaacatctggcaaactccacaggtagtatttgcaaaagcaattttgcaatgaccgcttttgttatcgcttaagtctttttgagttttccttgggaaatctccaacgtttaacatt

SEQ ID NO: 10885 - DNA, 122 bp, Homo sapiens
  misc_feature (61)..(62): /note="This region represents a CpG dinucleotide"
  misc_feature (61)..(61): /note="Nucleotide may be methylated to form 5-methylcytosine"
tgtactgccccatgaaaacaactgatatcatctctatgtaaaggtgcagtggctcatgcccgtagtcccagctactcagggggctaaggcaggaggactgcttgaacctgggaggtggaggt

SEQ ID NO: 10886 - DNA, 122 bp, Homo sapiens
  misc_feature (61)..(62): /note="This region represents a CpG dinucleotide"
  misc_feature (61)..(61): /note="Nucleotide may be methylated to form 5-methylcytosine"
agctgcaggattcactcttccggggcacagatgcctgagaaacttcagagaggcagaaggcgtgagtctgagcagccatcatctgggcatcaaggggttaacccatccctgagggctgggcc

SEQ ID NO: 10887 - DNA, 122 bp, Homo sapiens
  misc_feature (61)..(62): /note="This region represents a CpG dinucleotide"
  misc_feature (61)..(61): /note="Nucleotide may be methylated to form 5-methylcytosine"
acagctgggcaaattatatgcacagaaagtttcctggattgggctgggcatgttgactcacgcctgtaatcccagcactttgggaggccgaggtgggcggatcatgaggtcaggagattgag

SEQ ID NO: 10888 - DNA, 122 bp, Homo sapiens
  misc_feature (61)..(62): /note="This region represents a CpG dinucleotide"
  misc_feature (61)..(61): /note="Nucleotide may be methylated to form 5-methylcytosine"
atctttaacaagcctgtaacctctcaagtgaaagaacatgcacctgtcaagctcatagtgcgggatgtacacacagatgtgtttaataaatatctgcccacagggagattagaggtttgctt

SEQ ID NO: 10889 - DNA, 122 bp, Homo sapiens
  misc_feature (61)..(62): /note="This region represents a CpG dinucleotide"
  misc_feature (61)..(61): /note="Nucleotide may be methylated to form 5-methylcytosine"
agacccccatggcctgctggagctagggggcgccagaagccttacttctgtgtctctggccgatgaacaagagagcctggatactgctgcagagcagaggctgttccggagagcagggctgg

SEQ ID NO: 10890 - DNA, 122 bp, Homo sapiens
  misc_feature (61)..(62): /note="This region represents a CpG dinucleotide"
  misc_feature (61)..(61): /note="Nucleotide may be methylated to form 5-methylcytosine"
aaaaaagatgacaccactgcttgcctaaaagtctcaaaggtcatttgttacaaagtttcccgtgatttttaaaagaatatgtttttattaagccttctttttagaaatgtccataggtttga

SEQ ID NO: 10891 - DNA, 122 bp, Homo sapiens
  misc_feature (61)..(62): /note="This region represents a CpG dinucleotide"
  misc_feature (61)..(61): /note="Nucleotide may be methylated to form 5-methylcytosine"
ccatggtttgttccttttatagatgagtttgtcttttctgcctttgattggcacctgaaccgcttcaaggtgctaacaactctgaataagctgctataaagtttttataaaagtctaattgt

SEQ ID NO: 10892 - DNA, 122 bp, Homo sapiens
  misc_feature (61)..(62): /note="This region represents a CpG dinucleotide"
  misc_feature (61)..(61): /note="Nucleotide may be methylated to form 5-methylcytosine"
gatttcctgatcaccatggcaacacacaggggtgggtactgtggtttctctgcctgaagacgcactcgtcaaagactacttggtgttacagaattctggtgcagtgaagcaacagttctggg

SEQ ID NO: 10893 - DNA, 122 bp, Homo sapiens
  misc_feature (61)..(62): /note="This region represents a CpG dinucleotide"
  misc_feature (61)..(61): /note="Nucleotide may be methylated to form 5-methylcytosine"
taatggcgtccacggaagctgtgacgatgttggtcttgcagtggcgtgcagccacgatcccggcgacctcatccatgagcttcatggtcacacctgcggagaaagggacatgcggcagatga

SEQ ID NO: 10894 - DNA, 122 bp, Homo sapiens
  misc_feature (61)..(62): /note="This region represents a CpG dinucleotide"
  misc_feature (61)..(61): /note="Nucleotide may be methylated to form 5-methylcytosine"
tttgaaacataatcttaatgtcattttctcaatctctgtgactcatgcctaagtaattgtcgttatttagtagtttctcacgtgctacagaaggtaaaattaatctgctgcttatagtctgg

SEQ ID NO: 10895 - DNA, 122 bp, Homo sapiens
  misc_feature (61)..(62): /note="This region represents a CpG dinucleotide"
  misc_feature (61)..(61): /note="Nucleotide may be methylated to form 5-methylcytosine"
tagtcttattttatgtcaaatggaaaaatcaaatcttttccaaaataattttcttacttccgagaggtcacataactgctggatatccatggatactgacactggaatggtaaggtttatac

SEQ ID NO: 10896 - DNA, 122 bp, Homo sapiens
  misc_feature (61)..(62): /note="This region represents a CpG dinucleotide"
  misc_feature (61)..(61): /note="Nucleotide may be methylated to form 5-methylcytosine"
catctggaaagaggggtcactgagacacagagagaaggtaaatgactaatcaaggtcttacgactagtaagctgaagcatggctttaaatggagagagtgtgacttctctggccatgttcta

SEQ ID NO: 10897 - DNA, 122 bp, Homo sapiens
  misc_feature (61)..(62): /note="This region represents a CpG dinucleotide"
  misc_feature (61)..(61): /note="Nucleotide may be methylated to form 5-methylcytosine"
aggccacctccccgctgtctctataaaaaaatctagaaattagtcccacgtggtgatgtgcgcctgtagtcccagctgcttgggaggctgaggtggggggatcgctgaagccgggaggtcaa

SEQ ID NO: 10898 - DNA, 122 bp, Homo sapiens
  misc_feature (61)..(62): /note="This region represents a CpG dinucleotide"
  misc_feature (61)..(61): /note="Nucleotide may be methylated to form 5-methylcytosine"
ttgatgtcagtctcattgggcctgccgttgctcttcttgggacagaagatctctttgatccggccaattcggtagggctcaggggcatccaggttgctgcctttgatgtagtcggagtattt

SEQ ID NO: 10899 - DNA, 122 bp, Homo sapiens
  misc_feature (61)..(62): /note="This region represents a CpG dinucleotide"
  misc_feature (61)..(61): /note="Nucleotide may be methylated to form 5-methylcytosine"
tgaaggaaaaaaagagatcgatcatatgattgttttgtagttcctaggacttaggctcttcgtaagattcttctttctgtttcttttttttttttttttttttaagacagagtctcgccctg

SEQ ID NO: 10900 - DNA, 122 bp, Homo sapiens
  misc_feature (61)..(62): /note="This region represents a CpG dinucleotide"
  misc_feature (61)..(61): /note="Nucleotide may be methylated to form 5-methylcytosine"
actactatgttctatactatcaatgttttcagtggtggccaaagtgttataaaaagcacacggaatctgaaagtcaggtagaccgagttcaatccctcttgaatcctcaacaaaaatcccag

SEQ ID NO: 10901 - DNA, 122 bp, Homo sapiens
  misc_feature (61)..(62): /note="This region represents a CpG dinucleotide"
  misc_feature (61)..(61): /note="Nucleotide may be methylated to form 5-methylcytosine"
aatgatttttagttctgattattcatgggctcagctcagcacagttccaaattttaactacgtaaggtgaggcaacacactacttggccctaatagtaacattaaagaaaaaaataatcatt

SEQ ID NO: 10902 - DNA, 122 bp, Homo sapiens
  misc_feature (61)..(62): /note="This region represents a CpG dinucleotide"
  misc_feature (61)..(61): /note="Nucleotide may be methylated to form 5-methylcytosine"
tgaggaaataaggtgccttggcgattctcagactggataatcagctcctggggaatcaggcgctgacttttttttttttcctcctgcttttactcagagatcatcttttcatattttgggat

SEQ ID NO: 10903 - DNA, 122 bp, Homo sapiens
  misc_feature (61)..(62): /note="This region represents a CpG dinucleotide"
  misc_feature (61)..(61): /note="Nucleotide may be methylated to form 5-methylcytosine"
ttgctgtgggcaccctctttgctagggtgccaaggtcggagctgatattggttatctcatcgggccttgcagcagcgccgcagatattctgcctcccattttgcccgcggggacgccgaggc

SEQ ID NO: 10904 - DNA, 122 bp, Homo sapiens
  misc_feature (61)..(62): /note="This region represents a CpG dinucleotide"
  misc_feature (61)..(61): /note="Nucleotide may be methylated to form 5-methylcytosine"
ataataaaaatggggcataagttctacaaaaaggaaaaaaatgggggaagggggactgggcggagagacacagggaatcattgatccatgacaaacacaatgttcccttcctcacacctctg

SEQ ID NO: 10905 - DNA, 122 bp, Homo sapiens
  misc_feature (61)..(62): /note="This region represents a CpG dinucleotide"
  misc_feature (61)..(61): /note="Nucleotide may be methylated to form 5-methylcytosine"
gcacattggaccatgattcctattcattctgagaacggttcttgagtaaaaccccaatgtcgcagctggcaatacatagaattaaatcatcttacattattcattcaacaaatacttgagtg

SEQ ID NO: 10906 - DNA, 122 bp, Homo sapiens
  misc_feature (61)..(62): /note="This region represents a CpG dinucleotide"
  misc_feature (61)..(61): /note="Nucleotide may be methylated to form 5-methylcytosine"
gctgcattgaccaataacagtaaaaatgatgcaatctagtagtattgtattcctaacacacgctgtgttaggaatggggaactttttaggatcatgcaaaagtacaatgattcttcattttg

SEQ ID NO: 10907 - DNA, 122 bp, Homo sapiens
  misc_feature (61)..(62): /note="This region represents a CpG dinucleotide"
  misc_feature (61)..(61): /note="Nucleotide may be methylated to form 5-methylcytosine"
cagagaagaaagcaggcagcccaggcgacagcagcaagcgggggccacgtgggtgcggaacggtccgtggaagcgtgcgtgcaggcccctgcaccctgcaagaagccctttcgagccaggaa

SEQ ID NO: 10908 - DNA, 122 bp, Homo sapiens
  misc_feature (61)..(62): /note="This region represents a CpG dinucleotide"
  misc_feature (61)..(61): /note="Nucleotide may be methylated to form 5-methylcytosine"
atgcctcacccctccagggcctcaggagtgaacttttagctcccagtgtggcagctaaagcgctccacaatatgacacagatcctctcctttcacccttacttctctttattttcctatgca

SEQ ID NO: 10909 - DNA, 122 bp, Homo sapiens
  misc_feature (61)..(62): /note="This region represents a CpG dinucleotide"
  misc_feature (61)..(61): /note="Nucleotide may be methylated to form 5-methylcytosine"
tggataaatggggagtcagccgtgacagctgccgcttgcaagtgtcttcattgtgccagtcgctcctcacacatcctttcatttaatcctcacattatgaggtgtaatgtctttaataagct

SEQ ID NO: 10910 - DNA, 122 bp, Homo sapiens
  misc_feature (61)..(62): /note="This region represents a CpG dinucleotide"
  misc_feature (61)..(61): /note="Nucleotide may be methylated to form 5-methylcytosine"
tcagcgcatctcaactcgcggcaggccgccccgcgagccgcctctccctttcctgcggctcgaagggaccccagcgtgaaccgtgtgcttgtttttcattgtctccatctcggggcttcctt

SEQ ID NO: 10911 - DNA, 122 bp, Homo sapiens
  misc_feature (61)..(62): /note="This region represents a CpG dinucleotide"
  misc_feature (61)..(61): /note="Nucleotide may be methylated to form 5-methylcytosine"
tgttacactatgacaaaacatctggcatatgataacacagcaaacgagagcgacagattacgcagctctagggcagagtttctcaaccttggcactgacttatacgtaaagcacttactaca

SEQ ID NO: 10912 - DNA, 122 bp, Homo sapiens
  misc_feature (61)..(62): /note="This region represents a CpG dinucleotide"
  misc_feature (61)..(61): /note="Nucleotide may be methylated to form 5-methylcytosine"
cctggcagggcactgccagccattccccacgtacgtgcaccgtgtatctgggcatggctccgctgcagcctgaggtcctcagctggtcacaggaggggagagctttatgcaggagtggctac

SEQ ID NO: 10913 - DNA, 122 bp, Homo sapiens
  misc_feature (61)..(62): /note="This region represents a CpG dinucleotide"
  misc_feature (61)..(61): /note="Nucleotide may be methylated to form 5-methylcytosine"
acggctggcacttgtcagtgggtaggaccttcagcctacctggggttatgcaaggcactacggctgtggctaggcttggatgtggacagcaggggcagcctggcatgaggactggactagag

SEQ ID NO: 10914 - DNA, 122 bp, Homo sapiens
  misc_feature (61)..(62): /note="This region represents a CpG dinucleotide"
  misc_feature (61)..(61): /note="Nucleotide may be methylated to form 5-methylcytosine"
gaaaccagacaagctagagttgtcaccacaccctggactcagagaacttgggtacttcaccgacggccacctcccatcgccctttcattcttcatgggcagggccttgcaagccttggtgat

SEQ ID NO: 10915 - DNA, 122 bp, Homo sapiens
  misc_feature (61)..(62): /note="This region represents a CpG dinucleotide"
  misc_feature (61)..(61): /note="Nucleotide may be methylated to form 5-methylcytosine"
cgcccgacacccgccccctccccccactcctgagaactctttactttttgtttggaaaatcggggccatttctttatttatctctgggtcttcccggaggagggcagagaaggggagagcga

SEQ ID NO: 10916 - DNA, 122 bp, Homo sapiens
  misc_feature (61)..(62): /note="This region represents a CpG dinucleotide"
  misc_feature (61)..(61): /note="Nucleotide may be methylated to form 5-methylcytosine"
tctcttccgccaggctccggaaccggacgtcaacgttgtaggacacgttgtagttgctggcgatgttctgcaggtgtgtccaggtcacctcctggaatctccggaactgtaaggaggacacg

SEQ ID NO: 10917 - DNA, 122 bp, Homo sapiens
  misc_feature (61)..(62): /note="This region represents a CpG dinucleotide"
  misc_feature (61)..(61): /note="Nucleotide may be methylated to form 5-methylcytosine"
cagtttgtatgttctagttactgtaagattgtggccattctgcaattcaggtacagatcacggtgcagaaacatgatttaatggttaatactgtgatctaaatttctgcttgtggagaagca

SEQ ID NO: 10918 - DNA, 122 bp, Homo sapiens
  misc_feature (61)..(62): /note="This region represents a CpG dinucleotide"
  misc_feature (61)..(61): /note="Nucleotide may be methylated to form 5-methylcytosine"
acggctgctactttcttgcaatgaaaacttgacattggcttgaatggaagtttgtctatccgtaagacttttcatgtggaaaatggtcctctggaacttagggcaggatactgggctgcatt

SEQ ID NO: 10919 - DNA, 122 bp, Homo sapiens
  misc_feature (61)..(62): /note="This region represents a CpG dinucleotide"
  misc_feature (61)..(61): /note="Nucleotide may be methylated to form 5-methylcytosine"
gtcagttttagaggtgcagggctagtcctatatgcaaaacagtaatgtctgtagctattgcgggctgacttgcagaaatgagcggcttctctagaacattcatttgcataaaggaaactatc

SEQ ID NO: 10920 - DNA, 122 bp, Homo sapiens
  misc_feature (61)..(62): /note="This region represents a CpG dinucleotide"
  misc_feature (61)..(61): /note="Nucleotide may be methylated to form 5-methylcytosine"
tgaagtgtgtaccctgtgtttgggcagagcagcaagaccagacttccaaatggcatgctgcgttttaatgtgctttcataattgtctgttccaaaagggtgcctgtgtgtgtatggtgtgtg

SEQ ID NO: 10921 - DNA, 122 bp, Homo sapiens
  misc_feature (61)..(62): /note="This region represents a CpG dinucleotide"
  misc_feature (61)..(61): /note="Nucleotide may be methylated to form 5-methylcytosine"
ctcttgattcttggtggctcacttccagtggaacttccttcgggaaaacttacccaattccgtgaagaattaatcatttcatcttgtctgcttctatagcattttgaacatactttgaataa

SEQ ID NO: 10922 - DNA, 122 bp, Homo sapiens
  misc_feature (61)..(62): /note="This region represents a CpG dinucleotide"
  misc_feature (61)..(61): /note="Nucleotide may be methylated to form 5-methylcytosine"
cccaccagtgagcaggctgaggttgaaggactatatgctgtccatgtcacaactgactcacgaactgcagaaggcaaagctttccactgcagaaaggcattcatgacctcatcccaaaggac

SEQ ID NO: 10923 - DNA, 122 bp, Homo sapiens
  misc_feature (61)..(62): /note="This region represents a CpG dinucleotide"
  misc_feature (61)..(61): /note="Nucleotide may be methylated to form 5-methylcytosine"
tcgccctgcacgcacttgtgagctaagctaatatgattcaatgcagaacacaacacaggtcgaggagtgaatcattctgccagggacgtgcaagtgacacagctggagggcgtgtgaagcat

SEQ ID NO: 10924 - DNA, 122 bp, Homo sapiens
  misc_feature (61)..(62): /note="This region represents a CpG dinucleotide"
  misc_feature (61)..(61): /note="Nucleotide may be methylated to form 5-methylcytosine"
tccctgttgcctgtgggtcatttcctcatggagcctgtgggcagctggggtgacgcggtgcgaagccagccgatgacatcttggtttgtgtgtctcagtgtttgttctgtggtttttcggtg

SEQ ID NO: 10925 - DNA, 122 bp, Homo sapiens
  misc_feature (61)..(62): /note="This region represents a CpG dinucleotide"
  misc_feature (61)..(61): /note="Nucleotide may be methylated to form 5-methylcytosine"
ctcagatctggccagtcagattcctttattccccaacctacagtgattaatccagagatacgcatatggcacaagctgagccaaatcttctatggaaggtcttctcctactactagtgttta

SEQ ID NO: 10926 - DNA, 122 bp, Homo sapiens
  misc_feature (61)..(62): /note="This region represents a CpG dinucleotide"
  misc_feature (61)..(61): /note="Nucleotide may be methylated to form 5-methylcytosine"
atataaaagattacaaatatacagaatgatgtaataaatccttgcttctcttcttaggctcgatttagtgtttataatcatatgcagttatactattattgtatatgtatgtatctataaat

SEQ ID NO: 10927 - DNA, 122 bp, Homo sapiens
  misc_feature (61)..(62): /note="This region represents a CpG dinucleotide"
  misc_feature (61)..(61): /note="Nucleotide may be methylated to form 5-methylcytosine"
acaggttagggatgtgtgatctggaacaggtgacttaactcttctaaactttggtttcctcgttaggaaagggagggtactggtgcatggctttgtgggagtctaagagggtggaaatgtga

SEQ ID NO: 10928 - DNA, 122 bp, Homo sapiens
  misc_feature (61)..(62): /note="This region represents a CpG dinucleotide"
  misc_feature (61)..(61): /note="Nucleotide may be methylated to form 5-methylcytosine"
aaacaacagccgcccgcagctgtctgtctctaacacgtatcagactttgaaaaacatatccggaggcaaaacaacctgcctcagagaagcccggcaaacacccacggagtctctagcccgtc

SEQ ID NO: 10929 - DNA, 122 bp, Homo sapiens
  misc_feature (61)..(62): /note="This region represents a CpG dinucleotide"
  misc_feature (61)..(61): /note="Nucleotide may be methylated to form 5-methylcytosine"
atgtttccggcaagaggaaatggtgtctgactaatctctgagagttctttcagaatgggacggaataggttattacagcacatggggaagccaatgaccagaactctggaggttaaagcact

SEQ ID NO: 10930 - DNA, 122 bp, Homo sapiens
  misc_feature (61)..(62): /note="This region represents a CpG dinucleotide"
  misc_feature (61)..(61): /note="Nucleotide may be methylated to form 5-methylcytosine"
atatgaatgagcagaggccaagttgtatttggctgcatgcttgattgcgtagaaaaatgacgacactacccttggtacatctattggccccaacaggaaggagatgaaagtattgcaaaggg

SEQ ID NO: 10931 - DNA, 122 bp, Homo sapiens
  misc_feature (61)..(62): /note="This region represents a CpG dinucleotide"
  misc_feature (61)..(61): /note="Nucleotide may be methylated to form 5-methylcytosine"
acatgctagtcatgaactaaaagaccaggtttcctaccacttctcacaaaattcttatcacgtcagggaggattctgactccacagtaagaagctttggaaaaaggtttttggtattcaggt

SEQ ID NO: 10932 - DNA, 122 bp, Homo sapiens
  misc_feature (61)..(62): /note="This region represents a CpG dinucleotide"
  misc_feature (61)..(61): /note="Nucleotide may be methylated to form 5-methylcytosine"
cgagtcgtccgctgtgtgtgcatcatctgctgtgcgtgtgtcatctgctgtgcatgcctgcgtcatctgctgtgtatgtgtcatctgttgtgcatgcgtgtgtcgtctgctgtgggcgcgtg

SEQ ID NO: 10933 - DNA, 122 bp, Homo sapiens
  misc_feature (61)..(62): /note="This region represents a CpG dinucleotide"
  misc_feature (61)..(61): /note="Nucleotide may be methylated to form 5-methylcytosine"
tgaaggtgccacaccctgcccctaaactttatcgggtttgatgtttcctgagtcctttgacgtgcctttctctgcagctgttggagtgtgtgcctggctcatcccaaaacctttcatctaac

SEQ ID NO: 10934 - DNA, 122 bp, Homo sapiens
  misc_feature (61)..(62): /note="This region represents a CpG dinucleotide"
  misc_feature (61)..(61): /note="Nucleotide may be methylated to form 5-methylcytosine"
cccaaattgctcaaagaaatgaaccctgaggtctccctctgactcaacactcccagatggcgcctacctcttcagaggcctctctctccccaactcagctataagcctcataaagccagaga

SEQ ID NO: 10935 - DNA, 122 bp, Homo sapiens
  misc_feature (61)..(62): /note="This region represents a CpG dinucleotide"
  misc_feature (61)..(61): /note="Nucleotide may be methylated to form 5-methylcytosine"
ggaagtgtgcgacagtttataaatcacgtatacacgcataacctctttcaggtgtattaccgccctggttcctctcactgcccagagagtgatagattatctctgttttacagatggggatg

SEQ ID NO: 10936 - DNA, 122 bp, Homo sapiens
  misc_feature (61)..(62): /note="This region represents a CpG dinucleotide"
  misc_feature (61)..(61): /note="Nucleotide may be methylated to form 5-methylcytosine"
agggagctgaattcacagttccctgctctctccaagcacggcacctcagccctgtgtgggcgaggctgttgaccttgatctgcgtcctgccagctcaccgtcaagtaccctgttcacgcacc

SEQ ID NO: 10937 - DNA, 122 bp, Homo sapiens
  misc_feature (61)..(62): /note="This region represents a CpG dinucleotide"
  misc_feature (61)..(61): /note="Nucleotide may be methylated to form 5-methylcytosine"
acctcaggtgatccacccgccttggcttcccaaagtgctgggattacaggcgggagctaccgcaccctgcctgagactttgtcttcagttacaagtgcagtgagtgacgaggggagggaaga

SEQ ID NO: 10938 - DNA, 122 bp, Homo sapiens
  misc_feature (61)..(62): /note="This region represents a CpG dinucleotide"
  misc_feature (61)..(61): /note="Nucleotide may be methylated to form 5-methylcytosine"
gagacctagctcagggagctggtcatatggcctagcaaggatggctcctcaggctgggctcgtggtctcccatctcactgggtgtctgagactcaggtattgctgggtggttgggggagctg

SEQ ID NO: 10939 - DNA, 122 bp, Homo sapiens
  misc_feature (61)..(62): /note="This region represents a CpG dinucleotide"
  misc_feature (61)..(61): /note="Nucleotide may be methylated to form 5-methylcytosine"
ggacatctgcccagatatcttttcaaatctggccatcatagccaaagttggacaatgatccgttgggtccacaaatcttacagtgagagcactcaatgcagagaattcttatcgggattaaa

SEQ ID NO: 10940 - DNA, 122 bp, Homo sapiens
  misc_feature (61)..(62): /note="This region represents a CpG dinucleotide"
  misc_feature (61)..(61): /note="Nucleotide may be methylated to form 5-methylcytosine"
tatttttctgttatccatatgctgcacttatttgtgctaagttcttagtatttacttgctcgcttgttcaatgttctgtcttaaggtactgaatttttcttaaatattttcgttggaagatt

SEQ ID NO: 10941 - DNA, 122 bp, Homo sapiens
  misc_feature (61)..(62): /note="This region represents a CpG dinucleotide"
  misc_feature (61)..(61): /note="Nucleotide may be methylated to form 5-methylcytosine"
cctgtcaacctatctggaggtcctatcacctggcctgctctgttaccttctgccccacagcgccctctgttgagtcctaggaaatggtgatatcaagtcccttctgagtcataatcagagtc

SEQ ID NO: 10942 - DNA, 122 bp, Homo sapiens
  misc_feature (61)..(62): /note="This region represents a CpG dinucleotide"
  misc_feature (61)..(61): /note="Nucleotide may be methylated to form 5-methylcytosine"
aaccaaatcttgattttcacctctccaagtgaaatatcaccagtgaccggggtacctattcgttgcatgtgaattattaacattttatttcttaaaacgccatggcttgaagctccgcttta

SEQ ID NO: 10943 - DNA, 122 bp, Homo sapiens
  misc_feature (61)..(62): /note="This region represents a CpG dinucleotide"
  misc_feature (61)..(61): /note="Nucleotide may be methylated to form 5-methylcytosine"
aactacaaaatgagcacgaaatgatgtttttattcttagaacagaaagtccccacacccgcggccctggtgactgatgaggatgaggttctgcggggcctctctggccgcccagctctgcct

SEQ ID NO: 10944 - DNA, 122 bp, Homo sapiens
  misc_feature (61)..(62): /note="This region represents a CpG dinucleotide"
  misc_feature (61)..(61): /note="Nucleotide may be methylated to form 5-methylcytosine"
ctttgatctttctgaaaagaacataaaagaaataatgacataagctatcctctctctctacgccttggctacctaacatagaagggctccctgtccagtggacacgtgactcacatgacctt

SEQ ID NO: 10945 - DNA, 122 bp, Homo sapiens
  misc_feature (61)..(62): /note="This region represents a CpG dinucleotide"
  misc_feature (61)..(61): /note="Nucleotide may be methylated to form 5-methylcytosine"
tggcacagggtgagcaatgagtcaattaattacagctgcttaatctataatggatgctgacgcgtagtgagcaggaacttagctttgtcacactgcaccacgagactcctttgcaagctaat

SEQ ID NO: 10946 - DNA, 122 bp, Homo sapiens
  misc_feature (61)..(62): /note="This region represents a CpG dinucleotide"
  misc_feature (61)..(61): /note="Nucleotide may be methylated to form 5-methylcytosine"
taatccttcattagttccaatttgaagccttgtttggggattttctttggggataatttccgtatgattgcttcgaccaagttgcataagttgtttgacagaaagccgactgaattcttgtc

SEQ ID NO: 10947 - DNA, 122 bp, Homo sapiens
  misc_feature (61)..(62): /note="This region represents a CpG dinucleotide"
  misc_feature (61)..(61): /note="Nucleotide may be methylated to form 5-methylcytosine"
ccgggaatagaatcatggtgaatgccccttctgtcttatccctctcaatcccttgtcaagcgacaacttcaatagctattgaaaggaaaggcacatgtgcacagagagttaaaacatttctt

SEQ ID NO: 10948 - DNA, 122 bp, Homo sapiens
  misc_feature (61)..(62): /note="This region represents a CpG dinucleotide"
  misc_feature (61)..(61): /note="Nucleotide may be methylated to form 5-methylcytosine"
ttttacagcatacctgttagtttgaggagtgacaggaaagattctacagagactgccagacgtgttaaatgggttggcaagaataacagagtaagtcactgttgaatccagaagaggaaaag

SEQ ID NO: 10949 - DNA, 122 bp, Homo sapiens
  misc_feature (61)..(62): /note="This region represents a CpG dinucleotide"
  misc_feature (61)..(61): /note="Nucleotide may be methylated to form 5-methylcytosine"
tatgactgaacaaaaatattctaagtggaaagtcttgttcccagtcctgcagtgcatctgcgtggctttcacagtcccccaaccatggagggagcatccccattgtttttacatttgtgtct

SEQ ID NO: 10950 - DNA, 122 bp, Homo sapiens
  misc_feature (61)..(62): /note="This region represents a CpG dinucleotide"
  misc_feature (61)..(61): /note="Nucleotide may be methylated to form 5-methylcytosine"
atttttcttccttagtaaaaacaaccccttggtcttagattctgctcttgtacagtcatccgtacagtggccagggcttaagctctggtactgtatgagtatgcaaacaagcagatttcaca

SEQ ID NO: 10951 - DNA, 122 bp, Homo sapiens
  misc_feature (61)..(62): /note="This region represents a CpG dinucleotide"
  misc_feature (61)..(61): /note="Nucleotide may be methylated to form 5-methylcytosine"
attaaatctcctctctttataaattacccagtctcagaaatgtctttataacagtgaaaacggactaagacaggtgtctaagcagaaggaacagcttggacaaaggctcagaggtagtagag

SEQ ID NO: 10952 - DNA, 122 bp, Homo sapiens
  misc_feature (61)..(62): /note="This region represents a CpG dinucleotide"
  misc_feature (61)..(61): /note="Nucleotide may be methylated to form 5-methylcytosine"
tttctttcaactctacagcttagtgcctgaaaggcacatattggtctctgtgaatctctacgttaagaatctgatttgcagcactggaaaccttgctagtcttagctctgggctgaatccca

SEQ ID NO: 10953 - DNA, 122 bp, Homo sapiens
  misc_feature (61)..(62): /note="This region represents a CpG dinucleotide"
  misc_feature (61)..(61): /note="Nucleotide may be methylated to form 5-methylcytosine"
ggagctggtgagcatgtgaacgtttagaggtgtgtgggtgtgtgtgtgtttgtgtgtgtacgtgtactcttgtgcaccaaggtcttcctaatggcttcctgtgggttctcctattcagttca

SEQ ID NO: 10954 - DNA, 122 bp, Homo sapiens
  misc_feature (61)..(62): /note="This region represents a CpG dinucleotide"
  misc_feature (61)..(61): /note="Nucleotide may be methylated to form 5-methylcytosine"
tttgttttgtttttgtttttgagacagtctcgctctgtctcccgggcaggggcttgatctcggctcacttcagcctccacctcctgggttcaagcgattctgcagcagccttccaagtagct

SEQ ID NO: 10955 - DNA, 122 bp, Homo sapiens
  misc_feature (61)..(62): /note="This region represents a CpG dinucleotide"
  misc_feature (61)..(61): /note="Nucleotide may be methylated to form 5-methylcytosine"
atttagctcagtcctgatcagtaaacatttgttctttgtattttgtatgtcaagtactgtcggttaacttcctgagacatgaagactaagcaggttacagcatttacaagtaataattagga

SEQ ID NO: 10956 - DNA, 122 bp, Homo sapiens
  misc_feature (61)..(62): /note="This region represents a CpG dinucleotide"
  misc_feature (61)..(61): /note="Nucleotide may be methylated to form 5-methylcytosine"
aattctagtgattacgttgttgattgagtagtcactaaatccaggcacatctgacaacaacggtgtaaggcagagtttgcgaagtggcacaaccttccatagaaaaaatgttgaggcacata

SEQ ID NO: 10957 - DNA, 122 bp, Homo sapiens
  misc_feature (61)..(62): /note="This region represents a CpG dinucleotide"
  misc_feature (61)..(61): /note="Nucleotide may be methylated to form 5-methylcytosine"
ggaaataccgatgaccagtattagatgtcagggttctgtcgcccttccctccgcccccgacgaagatcccagctttgtttacatatttgtggtgcacaaaaatagaaatggactaaacaaaa

SEQ ID NO: 10958 - DNA, 122 bp, Homo sapiens
  misc_feature (61)..(62): /note="This region represents a CpG dinucleotide"
  misc_feature (61)..(61): /note="Nucleotide may be methylated to form 5-methylcytosine"
cgaggggcatcctggtttttatgtacgccactgagaggccaccagacacattttctcaaccgcagatcccccttccccacaccctgctccttgcgtgtcagcctgagagcccttgctttgag

SEQ ID NO: 10959 - DNA, 122 bp, Homo sapiens
  misc_feature (61)..(62): /note="This region represents a CpG dinucleotide"
  misc_feature (61)..(61): /note="Nucleotide may be methylated to form 5-methylcytosine"
agtccttcatctgaagactgaagtccagtctagtgctgagaaccactcccttaccgagagcgagcgcttagcacaacatagccataataatagctgcctaataaccttttcctttctgcctg

SEQ ID NO: 10960 - DNA, 122 bp, Homo sapiens
  misc_feature (61)..(62): /note="This region represents a CpG dinucleotide"
  misc_feature (61)..(61): /note="Nucleotide may be methylated to form 5-methylcytosine"
tggtttcttttgagcagccactcccatgggaacaggtgtctgacttgagccatcttggagcggagcctccatgaatgcattccagcaaaggagactggggcaagaaaatgtgccccagggca

SEQ ID NO: 10961 - DNA, 122 bp, Homo sapiens
  misc_feature (61)..(62): /note="This region represents a CpG dinucleotide"
  misc_feature (61)..(61): /note="Nucleotide may be methylated to form 5-methylcytosine"
aaagaatgagcctggtcaacaggaaatgtacatcagtgtgcaaaagtgacaatattaatacgacagctaacatttgagcagtaattctgtgccaggcactatgctgagggccttacatgcat

SEQ ID NO: 10962 - DNA, 122 bp, Homo sapiens
  misc_feature (61)..(62): /note="This region represents a CpG dinucleotide"
  misc_feature (61)..(61): /note="Nucleotide may be methylated to form 5-methylcytosine"
tcctagctgtttcctaaacttcttttatcatgctttctcaccggtaaagtgctggtgatacgttctttgcaggtttgttacaaatgaaaataaaagtaggaaaaattctcagcacagagctt

SEQ ID NO: 10963 - DNA, 122 bp, Homo sapiens
  misc_feature (61)..(62): /note="This region represents a CpG dinucleotide"
  misc_feature (61)..(61): /note="Nucleotide may be methylated to form 5-methylcytosine"
tgtctagatcttgggaagaagacatcagtatgtttgcaggaggatcatgaagcacatgatcgttgcatgaaaaatgttgcttcctgcctgttcaaactgtccaattttggagggtggggtgg

SEQ ID NO: 10964 - DNA, 122 bp, Homo sapiens
  misc_feature (61)..(62): /note="This region represents a CpG dinucleotide"
  misc_feature (61)..(61): /note="Nucleotide may be methylated to form 5-methylcytosine"
acagaaacaggaaatgagtggtgtcattgccactccagctatgctacaacaaccgacaagcgagaagcatgcttatacattgcattggttcaaccattgtggtagacagtgtggcgattcct

SEQ ID NO: 10965 - DNA, 122 bp, Homo sapiens
  misc_feature (61)..(62): /note="This region represents a CpG dinucleotide"
  misc_feature (61)..(61): /note="Nucleotide may be methylated to form 5-methylcytosine"
gctggggttgcccaactaatcagagctgtctgctcactattcaacccatgactcagatctcgtcagccaggactaagctaaactccatgaggccaacagcatctgtagtggggccacctttt

SEQ ID NO: 10966 - DNA, 122 bp, Homo sapiens
  misc_feature (61)..(62): /note="This region represents a CpG dinucleotide"
  misc_feature (61)..(61): /note="Nucleotide may be methylated to form 5-methylcytosine"
agcgggggtccacgaacttgttgagggcctccaggatcacggtgtgcacgggctgggattcgaagtccaggcgctgcgggagggagcagagggccggttagtgggtggggtctggtggacac

SEQ ID NO: 10967 - DNA, 122 bp, Homo sapiens
  misc_feature (61)..(62): /note="This region represents a CpG dinucleotide"
  misc_feature (61)..(61): /note="Nucleotide may be methylated to form 5-methylcytosine"
accaagagactgtgtcagtcttccccccacccatctgaggggggagctcaggagagctcccgacagggaagtttaatttattctgacaacgtccacttaggcaggaagagaaacccactgag

SEQ ID NO: 10968 - DNA, 122 bp, Homo sapiens
  misc_feature (61)..(62): /note="This region represents a CpG dinucleotide"
  misc_feature (61)..(61): /note="Nucleotide may be methylated to form 5-methylcytosine"
gcagctgttaccttcatcttctttaagagacttgaaatgaggcagcgctccaatctttaacgcctgctcatgccgtcatgcctggtcacacctagtcactcctggtctcctaccagcagtct

SEQ ID NO: 10969 - DNA, 122 bp, Homo sapiens
  misc_feature (61)..(62): /note="This region represents a CpG dinucleotide"
  misc_feature (61)..(61): /note="Nucleotide may be methylated to form 5-methylcytosine"
acaattgattgcaaggaacagcaactacctcaggctaacttacaactaaaattggattcacgttaaggatgctggaatatctccaggaactcagctgcaagatgttcatagaaatcctagag

SEQ ID NO: 10970 - DNA, 122 bp, Homo sapiens
  misc_feature (61)..(62): /note="This region represents a CpG dinucleotide"
  misc_feature (61)..(61): /note="Nucleotide may be methylated to form 5-methylcytosine"
tccttgtgtttcctgtaggtcattctctagggacataaatttctgaatgttcctcaagcacggataatcgaatcattggactccaagcaaaaggttaagtggagattgataggatctggcta

SEQ ID NO: 10971 - DNA, 122 bp, Homo sapiens
  misc_feature (61)..(62): /note="This region represents a CpG dinucleotide"
  misc_feature (61)..(61): /note="Nucleotide may be methylated to form 5-methylcytosine"
ttttaaatcttttctaaaccccagtggaaaataaccttttactgtgaaaagtaatccaaccgggtatcttcaaaatcttaataggcaaagtgaattgaccttggctcatcttcatggagtat

SEQ ID NO: 10972 - DNA, 122 bp, Homo sapiens
  misc_feature (61)..(62): /note="This region represents a CpG dinucleotide"
  misc_feature (61)..(61): /note="Nucleotide may be methylated to form 5-methylcytosine"
tgatgctaatttttcatttcctgggcctgccattccatccaaatcacattttgctcagcacgcttcttaacaaaacagatccagttgattggtgacttttaagtgaggaagctttctgattt

SEQ ID NO: 10973 - DNA, 122 bp, Homo sapiens
  misc_feature (61)..(62): /note="This region represents a CpG dinucleotide"
  misc_feature (61)..(61): /note="Nucleotide may be methylated to form 5-methylcytosine"
gagggtgaggaaggcagaccacctaatgacctggccccgtggaatttggcctccctgcttcgtggcacttattcagcagtgctccactgtggaagcagggtgtggctgggtctggcattaag

SEQ ID NO: 10974 - DNA, 122 bp, Homo sapiens
  misc_feature (61)..(62): /note="This region represents a CpG dinucleotide"
  misc_feature (61)..(61): /note="Nucleotide may be methylated to form 5-methylcytosine"
aattgtaggatatgcagagggtcccattcaagtcttcagctgagagctgatgcgcgcacgcgggcatgcgtgtttgtgtgtacaaatcaaggccagagaaaaccacctgaaaagataagagg

SEQ ID NO: 10975 - DNA, 122 bp, Homo sapiens
  misc_feature (61)..(62): /note="This region represents a CpG dinucleotide"
  misc_feature (61)..(61): /note="Nucleotide may be methylated to form 5-methylcytosine"
agtccccactggctttgtcatatattcatatactggaagacagatgtcatgtccacccttcgtaagtcttttctaattaaacattccccaattcctaaaccattctcctaacagtaaatctg

SEQ ID NO: 10976 - DNA, 122 bp, Homo sapiens
  misc_feature (61)..(62): /note="This region represents a CpG dinucleotide"
  misc_feature (61)..(61): /note="Nucleotide may be methylated to form 5-methylcytosine"
cccccatctaagttggccctctctgtgctccatatcattgccccctccttgacttcctttcgcaatttatcacgcgcatatgtatgtgtatgcataaacagatataattttgtttgctcgct

SEQ ID NO: 10977 - DNA, 122 bp, Homo sapiens
  misc_feature (61)..(62): /note="This region represents a CpG dinucleotide"
  misc_feature (61)..(61): /note="Nucleotide may be methylated to form 5-methylcytosine"
acagcgccggggacagggaaggcacagcgcgggggtgcaggggctgtgtgggcagggaggcgagctgagaaacagcagccccaagggccgaccctgggactgccagtgtgtgggacaccctg

SEQ ID NO: 10978 - DNA, 122 bp, Homo sapiens
  misc_feature (61)..(62): /note="This region represents a CpG dinucleotide"
  misc_feature (61)..(61): /note="Nucleotide may be methylated to form 5-methylcytosine"
tcataatgaaccagacagccatatggaagagagtggatcatcaagttggagtgacaagcacggacttcatcatcaaagatccacctaggcctttgctcagtgctctatcaaaatgtaggatt

SEQ ID NO: 10979 - DNA, 122 bp, Homo sapiens
  misc_feature (61)..(62): /note="This region represents a CpG dinucleotide"
  misc_feature (61)..(61): /note="Nucleotide may be methylated to form 5-methylcytosine"
cttttttaaacaaccagctcttacatgaactcatagagtgataactcattaccatgaggacggcatcaagccgttcatgaaggatctggccccgtgacccagacacctcctactaggtccat

SEQ ID NO: 10980 - DNA, 122 bp, Homo sapiens
  misc_feature (61)..(62): /note="This region represents a CpG dinucleotide"
  misc_feature (61)..(61): /note="Nucleotide may be methylated to form 5-methylcytosine"
gccagatgcaaagccccttttatgtgctgtaggtccatgaggctgttctgccaatatgttcgtctgtggatgaggaaacaggcctgggagaatgctacttgcccaaggccacccagttggct

SEQ ID NO: 10981 - DNA, 122 bp, Homo sapiens
  misc_feature (61)..(62): /note="This region represents a CpG dinucleotide"
  misc_feature (61)..(61): /note="Nucleotide may be methylated to form 5-methylcytosine"
cattacacttgacatgcctgtgaaatatcctagtggagctgtcaatgtggtgaatacacacgtctagagctcaggaggagagtgccagcaagatatgggagtttttaccatgtaaatggtat

SEQ ID NO: 10982 - DNA, 122 bp, Homo sapiens
  misc_feature (61)..(62): /note="This region represents a CpG dinucleotide"
  misc_feature (61)..(61): /note="Nucleotide may be methylated to form 5-methylcytosine"
ttttacaagtttctccagactatgtagctgggtcagagtccttggcaggtgttgccctttcgttcctttatctcctggattatagtgtgggccagaaggtcctaggagaggggtctggagtc

SEQ ID NO: 10983 - DNA, 122 bp, Homo sapiens
  misc_feature (61)..(62): /note="This region represents a CpG dinucleotide"
  misc_feature (61)..(61): /note="Nucleotide may be methylated to form 5-methylcytosine"
catcctactccacctacattcccgaaaacaaccccagaggagcctctgtcttctcagtgacggcccatgaccccgacagcaacgacaatgctcatgtaacttactctttcgcggaggacact

SEQ ID NO: 10984 - DNA, 122 bp, Homo sapiens
  misc_feature (61)..(62): /note="This region represents a CpG dinucleotide"
  misc_feature (61)..(61): /note="Nucleotide may be methylated to form 5-methylcytosine"
agatagtcactcaacctcacctgtccaaaagcagaagagaaacgtaatacagcaaagcaacgtgcagtctgtttcacaggctacatgactcaggaaatgaagaaggatttagatctttacaa

SEQ ID NO: 10985 - DNA, 122 bp, Homo sapiens
  misc_feature (61)..(62): /note="This region represents a CpG dinucleotide"
  misc_feature (61)..(61): /note="Nucleotide may be methylated to form 5-methylcytosine"
cacactttccaatgaccttgagactatttacatccttaaagtgataagcaggggctctctcgggatcatttagagtgcccgcttttctcatctgagcctttgctgataagctttgaatttta

SEQ ID NO: 10986 - DNA, 122 bp, Homo sapiens
  misc_feature (61)..(62): /note="This region represents a CpG dinucleotide"
  misc_feature (61)..(61): /note="Nucleotide may be methylated to form 5-methylcytosine"
gacaacacttaacccaaccttgtaatcttctgcagcaaaagtggtgggggaattctgatacgtgctctgtcctggttaatactagaaggttctgaggcatccataattctaaataattaaag

SEQ ID NO: 10987 - DNA, 122 bp, Homo sapiens
  misc_feature (61)..(62): /note="This region represents a CpG dinucleotide"
  misc_feature (61)..(61): /note="Nucleotide may be methylated to form 5-methylcytosine"
ctatctggactatactgtcaggaggtgaaagagtcaccttctcttccttgacgctactggcgcacacacagcagctatcagcacctgggatcaagcacaccagagaaggaaatacacaggaa

SEQ ID NO: 10988 - DNA, 122 bp, Homo sapiens
  misc_feature (61)..(62): /note="This region represents a CpG dinucleotide"
  misc_feature (61)..(61): /note="Nucleotide may be methylated to form 5-methylcytosine"
cactatttgaatccttgaaacaatcctatgatgtactattaatattccaattttacagaacgaggatactgatgcatagagaggtcgtgactccaaacccctactcttactgtattacacct

SEQ ID NO: 10989 - DNA, 122 bp, Homo sapiens
  misc_feature (61)..(62): /note="This region represents a CpG dinucleotide"
  misc_feature (61)..(61): /note="Nucleotide may be methylated to form 5-methylcytosine"
cgggttttcccgggagaacagaggacacatcacgctggtgggttcgccttctctctccctcgctttgggttttctgccgccctgtggttactttgccacgttcctgtcttcgctgttgcctg

SEQ ID NO: 10990 - DNA, 122 bp, Homo sapiens
  misc_feature (61)..(62): /note="This region represents a CpG dinucleotide"
  misc_feature (61)..(61): /note="Nucleotide may be methylated to form 5-methylcytosine"
ggagctggctcattggtattaatggatgaatgggcctcatttgggcagttgtaattaacacgctgactactgagatgagctcagcccgagtcactcctgaatggcataaagcattgctcaac

SEQ ID NO: 10991 - DNA, 122 bp, Homo sapiens
  misc_feature (61)..(62): /note="This region represents a CpG dinucleotide"
  misc_feature (61)..(61): /note="Nucleotide may be methylated to form 5-methylcytosine"
cctcggaggaggcccatgaggaactgccgcatggtctcgaactcgaaagggcgcacgctgcgggagctgtcaatcacgaacaccagatccaggggcccagtgtgacacctgggacctgcggg

SEQ ID NO: 10992 - DNA, 122 bp, Homo sapiens
  misc_feature (61)..(62): /note="This region represents a CpG dinucleotide"
  misc_feature (61)..(61): /note="Nucleotide may be methylated to form 5-methylcytosine"
agtatatgcagagagcctcagaccatgatgcacgcctgacaattttgcagaaggaaaagacgaaggaaggaggattaggtggaaagaacctaagactacagtgcaggtctgcgaaagtctca

SEQ ID NO: 10993 - DNA, 122 bp, Homo sapiens
  misc_feature (61)..(62): /note="This region represents a CpG dinucleotide"
  misc_feature (61)..(61): /note="Nucleotide may be methylated to form 5-methylcytosine"
acacaaaaatcctccaacaaatcctgacatagaaaactgtgttttcttagcagatgtgatcgtatagttttgtaacctcattactattataaatgtaaataattctcatactttctcacctc

SEQ ID NO: 10994 - DNA, 122 bp, Homo sapiens
  misc_feature (61)..(62): /note="This region represents a CpG dinucleotide"
  misc_feature (61)..(61): /note="Nucleotide may be methylated to form 5-methylcytosine"
catcgggtcctgcgcacgcgtccagcggccactccaatgggcccgcgggcacggagcgtgcgtgggagccccgcctcgaaatccgcctccaaaggggaggagcgtttccagggggcccggcg

SEQ ID NO: 10995 - DNA, 122 bp, Homo sapiens
  misc_feature (61)..(62): /note="This region represents a CpG dinucleotide"
  misc_feature (61)..(61): /note="Nucleotide may be methylated to form 5-methylcytosine"
ttaaatcagtcaggactgagagatctagatgcatgttgactcttagggagttcatgggatcgtcaccaaatctattcttgcatcacctgaatcttcccaggttgaagatgagagcagacact

SEQ ID NO: 10996 - DNA, 122 bp, Homo sapiens
  misc_feature (61)..(62): /note="This region represents a CpG dinucleotide"
  misc_feature (61)..(61): /note="Nucleotide may be methylated to form 5-methylcytosine"
aagcaaagccacacatggacaaatgccagataatgtaacagccactttctagatgtgagccgaggggtatggagtccagtcaatttaaaagaaacaaaactgatataatcattgagagtaat

SEQ ID NO: 10997 - DNA, 122 bp, Homo sapiens
  misc_feature (61)..(62): /note="This region represents a CpG dinucleotide"
  misc_feature (61)..(61): /note="Nucleotide may be methylated to form 5-methylcytosine"
ttctcaggagcagcaccaatacatatttgctgagtaaacagactcaggttttgtgtattacgccaagcacccagccagctgcgtggcagagcttcctgtttatgtccctgtggctggcagat

SEQ ID NO: 10998 - DNA, 122 bp, Homo sapiens
  misc_feature (61)..(62): /note="This region represents a CpG dinucleotide"
  misc_feature (61)..(61): /note="Nucleotide may be methylated to form 5-methylcytosine"
tccaagaagggtagctctgggatcccgggcaggaaattggtgacaaggtgacaaggtgcgcgtgtcacagctgcccagttcacggcttattcagtcttctccctccccccactccccaccag

SEQ ID NO: 10999 - DNA, 122 bp, Homo sapiens
  misc_feature (61)..(62): /note="This region represents a CpG dinucleotide"
  misc_feature (61)..(61): /note="Nucleotide may be methylated to form 5-methylcytosine"
aatatattcccaaaagctctatttttttttctttcttcttttaggttctctgtgttctatcgacgtctggtgcaatggagaagtcaggagatggtacttgaatcctgactctgtcacaagct

SEQ ID NO: 11000 - DNA, 122 bp, Homo sapiens
  misc_feature (61)..(62): /note="This region represents a CpG dinucleotide"
  misc_feature (61)..(61): /note="Nucleotide may be methylated to form 5-methylcytosine"
gccacactgaagaggtgatgtcatgggcctctgatgctgtgcttgcccccatcacccagccgtctggaatagctgctggaggtgcccagtgtgccagcactgaaggaaggcctggctgcttg

SEQ ID NO: 11001 - DNA, 122 bp, Homo sapiens
  misc_feature (61)..(62): /note="This region represents a CpG dinucleotide"
  misc_feature (61)..(61): /note="Nucleotide may be methylated to form 5-methylcytosine"
gtttaaagaatgtccatgtctttcttagaaaagccccttgtgagcagccttgttttgttgcggttgtcttacaggaagcagctcagggttttgcgtatatgtgttttatttttaagttgtac

SEQ ID NO: 11002 - DNA, 122 bp, Homo sapiens
  misc_feature (61)..(62): /note="This region represents a CpG dinucleotide"
  misc_feature (61)..(61): /note="Nucleotide may be methylated to form 5-methylcytosine"
gcatgttcatactgggatcataatagggatctcacctcacactgaaccactgaactgaatcggaggctttgacatgattcagagatactgtaggctacagacccatggaacagccatactga

SEQ ID NO: 11003 - DNA, 122 bp, Homo sapiens
  misc_feature (61)..(62): /note="This region represents a CpG dinucleotide"
  misc_feature (61)..(61): /note="Nucleotide may be methylated to form 5-methylcytosine"
aatccattgagcaggaatttctgacagatgtcacagaaggcaagcttcaggaacgtcttccgagcctacaacaagaacacaggtgtaaattatgctgaataaataaaagatgacaaaagaca

SEQ ID NO: 11004 - DNA, 122 bp, Homo sapiens
  misc_feature (61)..(62): /note="This region represents a CpG dinucleotide"
  misc_feature (61)..(61): /note="Nucleotide may be methylated to form 5-methylcytosine"
gcatttgtccccacttagtaaataaatggctatctgttgctcagccaaaaaccctggagtcgcacttgccttctctcatttaccaacacctgacagttgatccatcagagagtcctgctggc

SEQ ID NO: 11005 - DNA, 122 bp, Homo sapiens
  misc_feature (61)..(62): /note="This region represents a CpG dinucleotide"
  misc_feature (61)..(61): /note="Nucleotide may be methylated to form 5-methylcytosine"
aggctggtctcaaactcctgacctcaggtgatccacctgcgaaagtgttgggattacaggcgtgagtcactgcacccagccaggcaaattgcccttgaagccttggtttcctcatttgagaa

SEQ ID NO: 11006 - DNA, 122 bp, Homo sapiens
  misc_feature (61)..(62): /note="This region represents a CpG dinucleotide"
  misc_feature (61)..(61): /note="Nucleotide may be methylated to form 5-methylcytosine"
gtgaaagacagacccgcggccaggctcccagttctccagctcgtagagggcccaagtggccgctataatctgaaagagcagatatcgtaatcccatagtacttcctattggctgcaggacac

SEQ ID NO: 11007 - DNA, 122 bp, Homo sapiens
  misc_feature (61)..(62): /note="This region represents a CpG dinucleotide"
  misc_feature (61)..(61): /note="Nucleotide may be methylated to form 5-methylcytosine"
atgggcccctcccaagagcctgaacctgaatacttcttataaaaaggttctctggctggacgctgctcaatccactgcctagcaggtggcccattccagttggagaacgtagtgagtctttc

SEQ ID NO: 11008 - DNA, 122 bp, Homo sapiens
  misc_feature (61)..(62): /note="This region represents a CpG dinucleotide"
  misc_feature (61)..(61): /note="Nucleotide may be methylated to form 5-methylcytosine"
atgttgagtaaggtcttggccccagagtgtcctgtctagctgcagagcaaggatcttatgcgtggcagttcctgggcatgtactaggtctgctgggtgttgggccccgtgctgagtgctggc

SEQ ID NO: 11009 - DNA, 122 bp, Homo sapiens
  misc_feature (61)..(62): /note="This region represents a CpG dinucleotide"
  misc_feature (61)..(61): /note="Nucleotide may be methylated to form 5-methylcytosine"
gaggaagcccagagaggagagctcaggcgccacacctgtcagtttctacagattttccaccggaattgtatttgaatgtcaataagataagagtcaaggtgttagggtgcaaaggcccaatg

SEQ ID NO: 11010 - DNA, 122 bp, Homo sapiens
  misc_feature (61)..(62): /note="This region represents a CpG dinucleotide"
  misc_feature (61)..(61): /note="Nucleotide may be methylated to form 5-methylcytosine"
tggcctcctagggccatgtggaccagagagatcttatcacagaagtcataaactgatatccgtgagccaaatctagctcatgggcatgttgtttggcctacagcacattttttttttttttt

SEQ ID NO: 11011 - DNA, 122 bp, Homo sapiens
  misc_feature (61)..(62): /note="This region represents a CpG dinucleotide"
  misc_feature (61)..(61): /note="Nucleotide may be methylated to form 5-methylcytosine"
gcgcgctgctgcctgcagtccgccgggcctgagcacacccgaggctcccacctgcggagccgctgggggacctcacgtcccagccaggatccccctggaagaaaaagggcgtccccacactc

SEQ ID NO: 11012 - DNA, 122 bp, Homo sapiens
  misc_feature (61)..(62): /note="This region represents a CpG dinucleotide"
  misc_feature (61)..(61): /note="Nucleotide may be methylated to form 5-methylcytosine"
tttttaaaaagatgatgtttattgggttaagtattagcagaatacataaatcatttagtacgtttcctgtttgcgtgaattctatttatgttggtcacattttgcaaattaatgttaaaacc

SEQ ID NO: 11013 - DNA, 122 bp, Homo sapiens
  misc_feature (61)..(62): /note="This region represents a CpG dinucleotide"
  misc_feature (61)..(61): /note="Nucleotide may be methylated to form 5-methylcytosine"
ctctgcagtgagagaggggtggagcctgagagaaagtgaaccgtgaagaaaccaacaatccgaagccacagggctgaagaacaaataatttcttagattaagttcctcatttatgagctacc

SEQ ID NO: 11014 - DNA, 122 bp, Homo sapiens
  misc_feature (61)..(62): /note="This region represents a CpG dinucleotide"
  misc_feature (61)..(61): /note="Nucleotide may be methylated to form 5-methylcytosine"
taataaaatcaggtaccactccaaaaagagacactggagaagaacgaaactagagctatacggaattgtgcctgagatggcacacacgcttatgatgtatcaggtcactaccatcctaacat

SEQ ID NO: 11015 - DNA, 122 bp, Homo sapiens
  misc_feature (61)..(62): /note="This region represents a CpG dinucleotide"
  misc_feature (61)..(61): /note="Nucleotide may be methylated to form 5-methylcytosine"
ttatttttaagtgttcttgtgtccgggccaatagaaaagaacatattccaagagctttctcggacaagagaaagggcatttgaggtttctgcacatatcctctggatacagtgaggcaaaga

SEQ ID NO: 11016 - DNA, 122 bp, Homo sapiens
  misc_feature (61)..(62): /note="This region represents a CpG dinucleotide"
  misc_feature (61)..(61): /note="Nucleotide may be methylated to form 5-methylcytosine"
cagccagtcacttcctggtaaatattttcattttctttgctcagtgtcttttttggagggcgtgccatgcgatactgcctctccttcacttgagcaatttctgtattttccaagtcagatat

SEQ ID NO: 11017 - DNA, 122 bp, Homo sapiens
  misc_feature (61)..(62): /note="This region represents a CpG dinucleotide"
  misc_feature (61)..(61): /note="Nucleotide may be methylated to form 5-methylcytosine"
aaaaaaagaaaagtagcacacacacacacacacacacacacacacacacacacacacacacgaaatatagaaaaatccagttggattctacaaggatttattgacatgtttttacaaataat

SEQ ID NO: 11018 - DNA, 122 bp, Homo sapiens
  misc_feature (61)..(62): /note="This region represents a CpG dinucleotide"
  misc_feature (61)..(61): /note="Nucleotide may be methylated to form 5-methylcytosine"
tactgaataagagactctgggggtgggcccagcaatctgtgtcttcacaagccctcaggacgttgtgactcaggctaaagtttgggaaccactgccctcaaccacactaactcagactacgc

SEQ ID NO: 11019 - DNA, 122 bp, Homo sapiens
  misc_feature (61)..(62): /note="This region represents a CpG dinucleotide"
  misc_feature (61)..(61): /note="Nucleotide may be methylated to form 5-methylcytosine"
agttatacacccttcctgaatatgctgcatatgattctgcctccttgtgtctgcatttgccgtccctgcagtcaatatcctacagttcttcacaaactagttcagacatccatgaatccctc

SEQ ID NO: 11020 - DNA, 122 bp, Homo sapiens
  misc_feature (61)..(62): /note="This region represents a CpG dinucleotide"
  misc_feature (61)..(61): /note="Nucleotide may be methylated to form 5-methylcytosine"
ggaccttggggccaggtgccatggtcctctaagcactcttgctcgatggtaaacataacacgcgctgcttgcagaacatgtggaaacactgaaacgcttaaaggagagaacatggtcccggt

SEQ ID NO: 11021 - DNA, 122 bp, Homo sapiens
  misc_feature (61)..(62): /note="This region represents a CpG dinucleotide"
  misc_feature (61)..(61): /note="Nucleotide may be methylated to form 5-methylcytosine"
tatgtaagcaactctcacagaagtggcaagcaccctttgcaaatgatttctccatttagtcgagcaacttttagagaagacagaaatgtcttgtattgttggtgtaatgccatattataaaa

SEQ ID NO: 11022 - DNA, 122 bp, Homo sapiens
  misc_feature (61)..(62): /note="This region represents a CpG dinucleotide"
  misc_feature (61)..(61): /note="Nucleotide may be methylated to form 5-methylcytosine"
tcagtagttgagtctgaggtcaaacttggggctcactgtctctatatgccccaacagggacgtgctgtgtggcttcctcctctgtgtcaacatctctggagctcctcggctaggggacctgg

SEQ ID NO: 11023 - DNA, 122 bp, Homo sapiens
  misc_feature (61)..(62): /note="This region represents a CpG dinucleotide"
  misc_feature (61)..(61): /note="Nucleotide may be methylated to form 5-methylcytosine"
ccacaggaggaaggctggcagagaggattcattccgtattcattcccctagtgagccacacgcttcggaaggatcacattaaagagatgaatcacacactgactcaaagagagggggtggca

SEQ ID NO: 11024 - DNA, 122 bp, Homo sapiens
  misc_feature (61)..(62): /note="This region represents a CpG dinucleotide"
  misc_feature (61)..(61): /note="Nucleotide may be methylated to form 5-methylcytosine"
gctggcgggggacacctcagatggcctggccgcactacagctggatgggctgccctcaggcgacatcgacgggctggtgcccacgcgggatgagcgcggccagcccatcccagagtggaagc

SEQ ID NO: 11025 - DNA, 122 bp, Homo sapiens
  misc_feature (61)..(62): /note="This region represents a CpG dinucleotide"
  misc_feature (61)..(61): /note="Nucleotide may be methylated to form 5-methylcytosine"
ggaggaagggagtccaggtggagctggagcgctcatgctcaaatacttgtggagacagctcgccgtcctcagcaagacgtggcaaacaagatgcagtgaatctttggtaaaactgaatttac

SEQ ID NO: 11026 - DNA, 122 bp, Homo sapiens
  misc_feature (61)..(62): /note="This region represents a CpG dinucleotide"
  misc_feature (61)..(61): /note="Nucleotide may be methylated to form 5-methylcytosine"
tgcagaaaagctctttgcaaataatgcctggtccctccatactgtgtagacagtaaaaatcgtacactttttgaaagtctttgaaaatttaggttactagggtataatttctgtcgttcaag

SEQ ID NO: 11027 - DNA, 122 bp, Homo sapiens
  misc_feature (61)..(62): /note="This region represents a CpG dinucleotide"
  misc_feature (61)..(61): /note="Nucleotide may be methylated to form 5-methylcytosine"
cgccgcccccccacctcttgcgctgtcggccatcagcccagcagagcagggtgagctgggcgggcgggcggcaggattagctcaggagacgtgagtcaccccatccccagcagccccgagag

SEQ ID NO: 11028 - DNA, 122 bp, Homo sapiens
  misc_feature (61)..(62): /note="This region represents a CpG dinucleotide"
  misc_feature (61)..(61): /note="Nucleotide may be methylated to form 5-methylcytosine"
tttgaaagaactacaataaagtcacctgtggattgacccacatgccttagctctgaaacacgcaaactggctaactggggaatccactcccatgccattctctaatatttgttcatctaaac

SEQ ID NO: 11029 - DNA, 122 bp, Homo sapiens
  misc_feature (61)..(62): /note="This region represents a CpG dinucleotide"
  misc_feature (61)..(61): /note="Nucleotide may be methylated to form 5-methylcytosine"
gccattcatcaagacagaaacagaatccacatccctgctgttcatctaagcagagacaaacggttgaccaaagactagacatggggtgactaagattaagaaatcctacagaaaagtcaaga

SEQ ID NO: 11030 - DNA, 122 bp, Homo sapiens
  misc_feature (61)..(62): /note="This region represents a CpG dinucleotide"
  misc_feature (61)..(61): /note="Nucleotide may be methylated to form 5-methylcytosine"
agtcctggtcttcaagtcatagcagcctagaagcctcaggatgattccagccccacctgtcgagtcacctaagcctttgagtcttcccagctgaggtcccggatatcatgcagcagaggcat

SEQ ID NO: 11031 - DNA, 122 bp, Homo sapiens
  misc_feature (61)..(62): /note="This region represents a CpG dinucleotide"
  misc_feature (61)..(61): /note="Nucleotide may be methylated to form 5-methylcytosine"
catgtagaaggagtcagcactacttcatgaaatgtctatttcagttacataagtactgtacgtgtatgtgagcatattggttgtgatgtaaaattaacttcacatgatagatcagtcaaaag

SEQ ID NO: 11032 - DNA, 122 bp, Homo sapiens
  misc_feature (61)..(62): /note="This region represents a CpG dinucleotide"
  misc_feature (61)..(61): /note="Nucleotide may be methylated to form 5-methylcytosine"
gtggtgggtggcgggaagttgtcagtggtgcgtgtgggatgcccctgggccaggtatcaccggggcgcagcgtgccgagctcctccagcaccaatgtgcccagtgcggacgctcagcgagca

SEQ ID NO: 11033 - DNA, 122 bp, Homo sapiens
  misc_feature (61)..(62): /note="This region represents a CpG dinucleotide"
  misc_feature (61)..(61): /note="Nucleotide may be methylated to form 5-methylcytosine"
tttatgtgcaaatctacacgtccctttctctactggggaagaacagagataaggagcggacgtgctcaaagggtgagtcaatgggatcttaggccaggagcctattgttttcccatttgggc

SEQ ID NO: 11034 - DNA, 122 bp, Homo sapiens
  misc_feature (61)..(62): /note="This region represents a CpG dinucleotide"
  misc_feature (61)..(61): /note="Nucleotide may be methylated to form 5-methylcytosine"
ctgtagttaaagtttctaaaatgcatcttgctttcttacagtgaaagcgctacagacccacgcagtcaagcccctagtgagattcctttccaagaggctgtaggttccttcttgagctggtg

SEQ ID NO: 11035 - DNA, 122 bp, Homo sapiens
  misc_feature (61)..(62): /note="This region represents a CpG dinucleotide"
  misc_feature (61)..(61): /note="Nucleotide may be methylated to form 5-methylcytosine"
tttggctcaaatccccgcagtggctcctggtcttcctcagactaaagaccaaagtccttacgatggccttcaaggtcctacatgattcctttccaagaacagcaagtgtgttcttcaaacac

SEQ ID NO: 11036 - DNA, 122 bp, Homo sapiens
  misc_feature (61)..(62): /note="This region represents a CpG dinucleotide"
  misc_feature (61)..(61): /note="Nucleotide may be methylated to form 5-methylcytosine"
gggagcacctgtgcagggtggtgcaagggaagcatactcctgtcactcatgtcaggaaggcgacaccttctgctgaggatgtgagtgaaacctagtctttacctacatgcagttcaatggtc

SEQ ID NO: 11037 - DNA, 122 bp, Homo sapiens
  misc_feature (61)..(62): /note="This region represents a CpG dinucleotide"
  misc_feature (61)..(61): /note="Nucleotide may be methylated to form 5-methylcytosine"
aagcatgtggaattgctgtgactggccagtactgcctttgcctgtagataagatcaggtgcgtccaggatggtatggccgtagattgcctttgcctttagaccaaccttccctgcatactca

SEQ ID NO: 11038 - DNA, 122 bp, Homo sapiens
  misc_feature (61)..(62): /note="This region represents a CpG dinucleotide"
  misc_feature (61)..(61): /note="Nucleotide may be methylated to form 5-methylcytosine"
ggagataaactaaacagccactctggctgggtttgttttaccaaacaaacatagcaagtccgcaaacatttgctggtgtgtggtatatgccaggcactatgttagagtcccaagatccaaag

SEQ ID NO: 11039 - DNA, 122 bp, Homo sapiens
  misc_feature (61)..(62): /note="This region represents a CpG dinucleotide"
  misc_feature (61)..(61): /note="Nucleotide may be methylated to form 5-methylcytosine"
gcactttccgtaaatcagttcaagtgcaccaactaatcacaagaaactaaattgagattacgtaaatcacaggtacacagtatcatgttactcaattatcttggcatcaagttgaaacaatg

SEQ ID NO: 11040 - DNA, 122 bp, Homo sapiens
  misc_feature (61)..(62): /note="This region represents a CpG dinucleotide"
  misc_feature (61)..(61): /note="Nucleotide may be methylated to form 5-methylcytosine"
gggtccgggacacgtggctttgtagtcactggctggctgggtgtggtaaagccgcacatacgtgacacagccccgaagcaccctaagggacaccacccaggacagaccgttcatccccggca

SEQ ID NO: 11041 - DNA, 122 bp, Homo sapiens
  misc_feature (61)..(62): /note="This region represents a CpG dinucleotide"
  misc_feature (61)..(61): /note="Nucleotide may be methylated to form 5-methylcytosine"
agggaaaagtgtggtataaactggttgcagagcaggcacagccagactgtgcagggcaaacgtcataaactagtggcctgtggttctaatctggacatctgtcttgcagatgtttcgagttt

SEQ ID NO: 11042 - DNA, 122 bp, Homo sapiens
  misc_feature (61)..(62): /note="This region represents a CpG dinucleotide"
  misc_feature (61)..(61): /note="Nucleotide may be methylated to form 5-methylcytosine"
aaagtcttcacatgaaccattctattatggaacaaactgaaattacttataaagctttatcgtaattagcgttttggatacaagtgtaagggactgcactgatgtacttgtgaatacgaaat

SEQ ID NO: 11043 - DNA, 122 bp, Homo sapiens
  misc_feature (61)..(62): /note="This region represents a CpG dinucleotide"
  misc_feature (61)..(61): /note="Nucleotide may be methylated to form 5-methylcytosine"
tgccccagagggcctggccaactggttgggttgggatgaggcctcggttttgagcctctgcggtggcaattccagatataccaggaggccgaaactgctcctggaggctggggcaggagagg

SEQ ID NO: 11044 - DNA, 122 bp, Homo sapiens
  misc_feature (61)..(62): /note="This region represents a CpG dinucleotide"
  misc_feature (61)..(61): /note="Nucleotide may be methylated to form 5-methylcytosine"
ataaccaagctattcagttaatgaaagtaccccattcccagacaaatctggattctcaggcgtttactgtttctgaggtatgagtcgtaattgtatttgttacaacgtgatctgacctataa

SEQ ID NO: 11045 - DNA, 122 bp, Homo sapiens
  misc_feature (61)..(62): /note="This region represents a CpG dinucleotide"
  misc_feature (61)..(61): /note="Nucleotide may be methylated to form 5-methylcytosine"
tttcaaaagggaggttactggcttatcaagagagaaaaaaaatgtcttggtaagaagctacggagaaacataaggaataggtcaatgtgtagataagagatactaatcataatattaacata

SEQ ID NO: 11046 - DNA, 122 bp, Homo sapiens
  misc_feature (61)..(62): /note="This region represents a CpG dinucleotide"
  misc_feature (61)..(61): /note="Nucleotide may be methylated to form 5-methylcytosine"
cagtgtccacttttaagtttcacattcagttaattgaggacacttgaaccttttcccccacgcagtcgactcctttagcatgagccaagttcctaggaatttgacagttactactttataaa

SEQ ID NO: 11047 - DNA, 122 bp, Homo sapiens
  misc_feature (61)..(62): /note="This region represents a CpG dinucleotide"
  misc_feature (61)..(61): /note="Nucleotide may be methylated to form 5-methylcytosine"
agcaaaacaggtgctgcttcacatgccctttgctaagagtcctggagtttgaagtctccacggccgatctaaaagcaagttcctgaggaaggagccggaaagttctctgaaaccagtagtgg

SEQ ID NO: 11048 - DNA, 122 bp, Homo sapiens
  misc_feature (61)..(62): /note="This region represents a CpG dinucleotide"
  misc_feature (61)..(61): /note="Nucleotide may be methylated to form 5-methylcytosine"
ggaggggcaatatgaatcttattaggggttgtatgacaccatatgtaatacatttggaaacggtaagtgatggattgcagagagctaaggagcatgaaatttatttcatggacaaaaaagat

SEQ ID NO: 11049 - DNA, 122 bp, Homo sapiens
  misc_feature (61)..(62): /note="This region represents a CpG dinucleotide"
  misc_feature (61)..(61): /note="Nucleotide may be methylated to form 5-methylcytosine"
gggatggttcagccccgccccgctagggcggggcctgcgcctgcgcgctcagcggccgggcgtgtaacccacgggtgcgcgcccacgaccgccagactcgagcagtctctggaacacgctgc

SEQ ID NO: 11050 - DNA, 122 bp, Homo sapiens
  misc_feature (61)..(62): /note="This region represents a CpG dinucleotide"
  misc_feature (61)..(61): /note="Nucleotide may be methylated to form 5-methylcytosine"
attacctaccagttaggaagttgtgtaaattcaatgacagccatcttacagaggagcttgcggacacacaaggaagctgatgcatagtcaacatttaacaagtgttatttacagtacttcct

SEQ ID NO: 11051 - DNA, 122 bp, Homo sapiens
  misc_feature (61)..(62): /note="This region represents a CpG dinucleotide"
  misc_feature (61)..(61): /note="Nucleotide may be methylated to form 5-methylcytosine"
aacactcattaaaaatactaggttgtatttcttgtgtgttacgagagaagacagatgtaacgtgcctaacaccttgcttggcacaaaggagccctaaataaatgttaacattgatttatgat

SEQ ID NO: 11052 - DNA, 122 bp, Homo sapiens
  misc_feature (61)..(62): /note="This region represents a CpG dinucleotide"
  misc_feature (61)..(61): /note="Nucleotide may be methylated to form 5-methylcytosine"
cacacctaacgaatggaggcgggccggaggccggtggaaccagctcgagctctcgagggccgtttgggggctcgcgccgtacggcttgtgaagtctcgcgcctctccccttagtccgcctct

SEQ ID NO: 11053 - DNA, 122 bp, Homo sapiens
  misc_feature (61)..(62): /note="This region represents a CpG dinucleotide"
  misc_feature (61)..(61): /note="Nucleotide may be methylated to form 5-methylcytosine"
ctctctctgcattgctcagccctcggttgatcccttcaatgaccttctcaatggggtcatcgctggccgcccatccagacagggcccccagtagcagaaggagggagcaggagccgaccaga

SEQ ID NO: 11054 - DNA, 122 bp, Homo sapiens
  misc_feature (61)..(62): /note="This region represents a CpG dinucleotide"
  misc_feature (61)..(61): /note="Nucleotide may be methylated to form 5-methylcytosine"
gacttgccacatattgggcaatggagcctggcacgattacacctggagcggatggccttacgtggagcatgggccctacctggggcagtgaacatctctgaagacatttccttcgggtggtg

SEQ ID NO: 11055 - DNA, 122 bp, Homo sapiens
  misc_feature (61)..(62): /note="This region represents a CpG dinucleotide"
  misc_feature (61)..(61): /note="Nucleotide may be methylated to form 5-methylcytosine"
gcctcaagggacaagtctggagtgtgtgttctaagccagcattcctccaactttcatggacgcatgaatcatcggagtgctttacgaaagtgcagattctgattcagcagttgtggggcgag

SEQ ID NO: 11056 - DNA, 122 bp, Homo sapiens
  misc_feature (61)..(62): /note="This region represents a CpG dinucleotide"
  misc_feature (61)..(61): /note="Nucleotide may be methylated to form 5-methylcytosine"
ttaggaaggtggttataatgaccaatgacaacttacaattagtgcattaaggcacttatccgtttacacctggttgtttctataagtcttagtaagatttattcagattacattttgaattc

SEQ ID NO: 11057 - DNA, 122 bp, Homo sapiens
  misc_feature (61)..(62): /note="This region represents a CpG dinucleotide"
  misc_feature (61)..(61): /note="Nucleotide may be methylated to form 5-methylcytosine"
cttgtgtgccatccaagcctagaattctctgctttcttgatcatgagctgtcacctagcacggcctggcttttctctccttcccacgtgagaccttgtcctttgtctacccctagtggtggt

SEQ ID NO: 11058 - DNA, 122 bp, Homo sapiens
  misc_feature (61)..(62): /note="This region represents a CpG dinucleotide"
  misc_feature (61)..(61): /note="Nucleotide may be methylated to form 5-methylcytosine"
gtgtaacaataaaaggtcatggtattctcaatctgacttagttttctttctgttatatatcggtaaaagagttcctagaacagaaaccagaacaggtggtgtagtatgcgggtactaggttt

SEQ ID NO: 11059 - DNA, 122 bp, Homo sapiens
  misc_feature (61)..(62): /note="This region represents a CpG dinucleotide"
  misc_feature (61)..(61): /note="Nucleotide may be methylated to form 5-methylcytosine"
atgagataatcacgtcaagtgctcagcatagtgcctggcacgtagtacctgctcagtaaacgttagtgcttattattgcgcacaattactgcaatgactaaggagaattcatctgagttgca

SEQ ID NO: 11060 - DNA, 122 bp, Homo sapiens
  misc_feature (61)..(62): /note="This region represents a CpG dinucleotide"
  misc_feature (61)..(61): /note="Nucleotide may be methylated to form 5-methylcytosine"
ctgagtgctgggtggtcccgcggaaagtgcctggggctctgcagggctctcaagagaccgcgtgcggcctgggggcctggctctgggggctgccatccgggatcagaaaatgtcccagagga

SEQ ID NO: 11061 - DNA, 122 bp, Homo sapiens
  misc_feature (61)..(62): /note="This region represents a CpG dinucleotide"
  misc_feature (61)..(61): /note="Nucleotide may be methylated to form 5-methylcytosine"
gctgagccagttggagcagagatccctgcagctgcaggtggataaccaggcactgaagtgcgtatggcccacggaggggcgggcggcgggtgcaggctggggccaagctctggcccagctct

SEQ ID NO: 11062 - DNA, 122 bp, Homo sapiens
  misc_feature (61)..(62): /note="This region represents a CpG dinucleotide"
  misc_feature (61)..(61): /note="Nucleotide may be methylated to form 5-methylcytosine"
tagaaactaacgacttgagaattctgtagaacagcagcaacaaaaatctctttgcagcagcgttgaccacgtgaattgtcttggacgcagcagcagcgttgggcgttgaattcactttgccg

SEQ ID NO: 11063 - DNA, 122 bp, Homo sapiens
  misc_feature (61)..(62): /note="This region represents a CpG dinucleotide"
  misc_feature (61)..(61): /note="Nucleotide may be methylated to form 5-methylcytosine"
aaataaggctgttaaaataattttaaaagattaaaaaaaaactatatgagtgcttttttacgtaccatgcactgttctagactctggggttatagttgtgaacaagaatgacactgaactta

SEQ ID NO: 11064 - DNA, 122 bp, Homo sapiens
  misc_feature (61)..(62): /note="This region represents a CpG dinucleotide"
  misc_feature (61)..(61): /note="Nucleotide may be methylated to form 5-methylcytosine"
acagcagctgagatctcacagagacgacagtgtgtaggcacctgtaaagttcagtgccaccgtgagtggttatggaaagagttgcgatgagaagggagctgccatagaaaatcagactggcc

SEQ ID NO: 11065 - DNA, 122 bp, Homo sapiens
  misc_feature (61)..(62): /note="This region represents a CpG dinucleotide"
  misc_feature (61)..(61): /note="Nucleotide may be methylated to form 5-methylcytosine"
cactgcagccttgaatccctgggctcaagccatcctcctgagtagctgggactacaggcacgtgccactgccctgcctgaacctgttatttttaggaggctggagcagatgtgccctctctt

SEQ ID NO: 11066 - DNA, 122 bp, Homo sapiens
  misc_feature (61)..(62): /note="This region represents a CpG dinucleotide"
  misc_feature (61)..(61): /note="Nucleotide may be methylated to form 5-methylcytosine"
gaacttaggccttaggattaagtagacttaggtttggttccaaactctaccacttgctaccgtgtcaccacttacagctctgtcattatcactagttgtccttcccaatgtcccttaactac

SEQ ID NO: 11067 - DNA, 122 bp, Homo sapiens
  misc_feature (61)..(62): /note="This region represents a CpG dinucleotide"
  misc_feature (61)..(61): /note="Nucleotide may be methylated to form 5-methylcytosine"
ctccttatctgatttctaagtttgctccctcattcagccttatcttatctgaaatggatccgtgaagtaaaaacaatttcctgtggtttttaccttgtttttcctctaactagaagttaaat

SEQ ID NO: 11068 - DNA, 122 bp, Homo sapiens
  misc_feature (61)..(62): /note="This region represents a CpG dinucleotide"
  misc_feature (61)..(61): /note="Nucleotide may be methylated to form 5-methylcytosine"
aaatcagccgtcatcctcatgccagtttgccaactgctgagatgaggaaaccgaggtcaacggaggatgtgtgaattttcgaagttgtcttaatctgctgacccctagactgaaattacctt

SEQ ID NO: 11069 - DNA, 122 bp, Homo sapiens
  misc_feature (61)..(62): /note="This region represents a CpG dinucleotide"
  misc_feature (61)..(61): /note="Nucleotide may be methylated to form 5-methylcytosine"
gctgggtcagtgataatgcgtatactgccaaactgtcctacaaacaggccatcctctaaccgttagtgtgataggcagaataaagcctcctcccagacatatccatgtcctaatcctgagag

SEQ ID NO: 11070 - DNA, 122 bp, Homo sapiens
  misc_feature (61)..(62): /note="This region represents a CpG dinucleotide"
  misc_feature (61)..(61): /note="Nucleotide may be methylated to form 5-methylcytosine"
aatcacgtgtcccagaggaactgaatttgactcagaagctacctgcagtctgtgactatccgcctgtgaagttcagtctatcagcaagaaggtagtagtaaaaacctgtttgagagtctagt

SEQ ID NO: 11071 - DNA, 122 bp, Homo sapiens
  misc_feature (61)..(62): /note="This region represents a CpG dinucleotide"
  misc_feature (61)..(61): /note="Nucleotide may be methylated to form 5-methylcytosine"
actaaaagctgaaggactgtgctgaggctttgtagtagccactttatggaatgggacaagcggcatggagggcacaagtcagtgttgagatccccactaagcttagaaaccattggtatgtg

SEQ ID NO: 11072 - DNA, 122 bp, Homo sapiens
  misc_feature (61)..(62): /note="This region represents a CpG dinucleotide"
  misc_feature (61)..(61): /note="Nucleotide may be methylated to form 5-methylcytosine"
ttaccttgataaacgctaacaatgcttttgctttgaggcagagcacacatacctctaaagcgcatcctctcagctgatgagcaacaggaaataactctttttttcctttttagagccgtcat

SEQ ID NO: 11073 - DNA, 122 bp, Homo sapiens
  misc_feature (61)..(62): /note="This region represents a CpG dinucleotide"
  misc_feature (61)..(61): /note="Nucleotide may be methylated to form 5-methylcytosine"
ttataagagttcccttttctctgcatccttgtcaacacttttttttctttttctttttttcgtctgttcatttgataatagctacgctgattggagtgtagtggtatattattgtggttttg

SEQ ID NO: 11074 - DNA, 122 bp, Homo sapiens
  misc_feature (61)..(62): /note="This region represents a CpG dinucleotide"
  misc_feature (61)..(61): /note="Nucleotide may be methylated to form 5-methylcytosine"
tcctcaaaatgtaaacagagttaacatatgactcagcaattccaatcctatgtatatatccgacagaaataaaaacatacatctgccaaaaataaaacttgtgcacaaatcttcataataac

SEQ ID NO: 11075 - DNA, 122 bp, Homo sapiens
  misc_feature (61)..(62): /note="This region represents a CpG dinucleotide"
  misc_feature (61)..(61): /note="Nucleotide may be methylated to form 5-methylcytosine"
gccagcctgctccacaggtccccagctcttcctcggaaaagggggcagtggtctggatcacgctctgcagggcttctagctgtgacactccaggatgtttgccccaaaccccaggtctgacc

SEQ ID NO: 11076 - DNA, 122 bp, Homo sapiens
  misc_feature (61)..(62): /note="This region represents a CpG dinucleotide"
  misc_feature (61)..(61): /note="Nucleotide may be methylated to form 5-methylcytosine"
gtttggaaagggaaacaacacattgaatgccaacccctggactagatatttcatcaacttcgttcatcctcactaccacccacacaagacggtcttcctatttccaacttagaagaaggaag

SEQ ID NO: 11077 - DNA, 122 bp, Homo sapiens
  misc_feature (61)..(62): /note="This region represents a CpG dinucleotide"
  misc_feature (61)..(61): /note="Nucleotide may be methylated to form 5-methylcytosine"
atcatctctaggagtagttgtggaagttaaaatatcttgcagcctcaaggtacgtgacttcggggcagtaggcaccatagaaaagcaagcgaggcagtggcaggtcattactgaactgtgcc

SEQ ID NO: 11078 - DNA, 122 bp, Homo sapiens
  misc_feature (61)..(62): /note="This region represents a CpG dinucleotide"
  misc_feature (61)..(61): /note="Nucleotide may be methylated to form 5-methylcytosine"
gatatggaatctgatcccataactagatagcaggttacaaaataaggatttgtatctctccgttccttattatactcaatgaccttagacagttttctagctaatagtatagtagttatcat

SEQ ID NO: 11079 - DNA, 122 bp, Homo sapiens
  misc_feature (61)..(62): /note="This region represents a CpG dinucleotide"
  misc_feature (61)..(61): /note="Nucleotide may be methylated to form 5-methylcytosine"
gtgttgagaatatgctgtaagagctgtgtcgagataccagtttttatattcttgtaccttcgactgctgcagaactccccaagcaagaagttcttccacagtgtccccaaattgtggaagag

SEQ ID NO: 11080 - DNA, 122 bp, Homo sapiens
  misc_feature (61)..(62): /note="This region represents a CpG dinucleotide"
  misc_feature (61)..(61): /note="Nucleotide may be methylated to form 5-methylcytosine"
gtgtgtgtgtttgttggggtggtcggggaggacactgaagcagcacggtctgctctgtgtcgctgtgtgtctgaaactgtctagggagaggctgaaggacgcaggccagggaagtggggaaa

SEQ ID NO: 11081 - DNA, 122 bp, Homo sapiens
  misc_feature (61)..(62): /note="This region represents a CpG dinucleotide"
  misc_feature (61)..(61): /note="Nucleotide may be methylated to form 5-methylcytosine"
gtttttcttggcatttcctatcttgagctcctaggtttcgactatggactctgtctctggcgtcaccaactatgtctggcagttgggaactgctttttaaaaactaattaattttggccggg

SEQ ID NO: 11082 - DNA, 122 bp, Homo sapiens
  misc_feature (61)..(62): /note="This region represents a CpG dinucleotide"
  misc_feature (61)..(61): /note="Nucleotide may be methylated to form 5-methylcytosine"
tcctagggcaggggaggggcgggcaatgccagagaacggtccccacctggggtggtctgacggccagggatgcagggagagacgcctcccacactcccggaggcacgcacgtgctgtggcca

SEQ ID NO: 11083 - DNA, 122 bp, Homo sapiens
  misc_feature (61)..(62): /note="This region represents a CpG dinucleotide"
  misc_feature (61)..(61): /note="Nucleotide may be methylated to form 5-methylcytosine"
caggtggccatccatataggggaatagactagcttttttttaaaaaaaatatcctttcaacgaggttgtactgcaaactggaaaactggtttgaatatattctaaggttaaaacataaacat

SEQ ID NO: 11084 - DNA, 122 bp, Homo sapiens
  misc_feature (61)..(62): /note="This region represents a CpG dinucleotide"
  misc_feature (61)..(61): /note="Nucleotide may be methylated to form 5-methylcytosine"
ctgataaaacttctgtacggattctacaaagctgccatggcaaacagcttcagtattcagcgtaacatatctgtctccatctcctgcatctgattgatacaggccctttggactgactggac

SEQ ID NO: 11085 - DNA, 122 bp, Homo sapiens
  misc_feature (61)..(62): /note="This region represents a CpG dinucleotide"
  misc_feature (61)..(61): /note="Nucleotide may be methylated to form 5-methylcytosine"
ctcccgggttcaagcgattctcctgcctctgccacctgcatagctgggattataggtgcccgctaccacatctggctaatttttgtatttttagtagagacagtgtttcaccatgttagtca

SEQ ID NO: 11086 - DNA, 122 bp, Homo sapiens
  misc_feature (61)..(62): /note="This region represents a CpG dinucleotide"
  misc_feature (61)..(61): /note="Nucleotide may be methylated to form 5-methylcytosine"
cagggctttggcccaaatttgtgtttgccccagagagcattttgggaggtgttcttggagcgactcacgtatttagcagtgagctatggctctgggccagatcctctgccgggggaaggggt

SEQ ID NO: 11087 - DNA, 122 bp, Homo sapiens
  misc_feature (61)..(62): /note="This region represents a CpG dinucleotide"
  misc_feature (61)..(61): /note="Nucleotide may be methylated to form 5-methylcytosine"
aagagcgggaagggttcctaccagcatggggctttgttctcagaaagcttctctaagatacgttacttagatacatccgtaaaatccctcagtcaactgcacccctgtggcctatagcctga

SEQ ID NO: 11088 - DNA, 122 bp, Homo sapiens
  misc_feature (61)..(62): /note="This region represents a CpG dinucleotide"
  misc_feature (61)..(61): /note="Nucleotide may be methylated to form 5-methylcytosine"
ataatttataaattgtaaactattttagggtttgtgagtttctgttgcaaccactcgactcgtccattgcagtgtgatgaaagccgccatcgaaaaaatgtaaacgaatgagtgtggctgtg

SEQ ID NO: 11089 - DNA, 122 bp, Homo sapiens
  misc_feature (61)..(62): /note="This region represents a CpG dinucleotide"
  misc_feature (61)..(61): /note="Nucleotide may be methylated to form 5-methylcytosine"
tgcctgccccacccccgccagactccggcctttgctccgcacctggccccggccccgccccgcccctcgaaactcacctttgagtcgcatcgagtcccagccccgccccggccccgcccctc

SEQ ID NO: 11090 - DNA, 122 bp, Homo sapiens
  misc_feature (61)..(62): /note="This region represents a CpG dinucleotide"
  misc_feature (61)..(61): /note="Nucleotide may be methylated to form 5-methylcytosine"
aagccctgcagctagtaaatgactgaaccaggatttgagcccatagctgatgccaaagcccgtgtgtctaaccatcacaccacactgccacttcctgtgccagttgcttctgtacagctggt

SEQ ID NO: 11091 - DNA, 122 bp, Homo sapiens
  misc_feature (61)..(62): /note="This region represents a CpG dinucleotide"
  misc_feature (61)..(61): /note="Nucleotide may be methylated to form 5-methylcytosine"
gggagaggggccaattcagtaagttatctttccttaaagtctttgttcctttgaccattgcggccttcttattgttgaaggatcacgaacttcaggagtcttgatgtacactactttcactt

SEQ ID NO: 11092 - DNA, 122 bp, Homo sapiens
  misc_feature (61)..(62): /note="This region represents a CpG dinucleotide"
  misc_feature (61)..(61): /note="Nucleotide may be methylated to form 5-methylcytosine"
gaaggctcaaagtccagcagggagccattgatcagtccgggacttctgttgggagggtgccggcaaactatctgatgggtccccagggcctcccctggaggaagtggggacttgagcaggag

SEQ ID NO: 11093 - DNA, 122 bp, Homo sapiens
  misc_feature (61)..(62): /note="This region represents a CpG dinucleotide"
  misc_feature (61)..(61): /note="Nucleotide may be methylated to form 5-methylcytosine"
cttgggacgtcatcccggagctcctagcctgcccgggaggcagagccatcaggtaagagacggtcacaatgacagcaacacaatcccgcttgggttctctgtacagagttttccttttaaaa

SEQ ID NO: 11094 - DNA, 122 bp, Homo sapiens
  misc_feature (61)..(62): /note="This region represents a CpG dinucleotide"
  misc_feature (61)..(61): /note="Nucleotide may be methylated to form 5-methylcytosine"
caccactgtggccactcccaaggaagatgccaaccataccatgaaacccatggcttctcacgggacagactttactgagatgtaccaactcaagtatctgaaatgactgcacacccatgcta

SEQ ID NO: 11095 - DNA, 122 bp, Homo sapiens
  misc_feature (61)..(62): /note="This region represents a CpG dinucleotide"
  misc_feature (61)..(61): /note="Nucleotide may be methylated to form 5-methylcytosine"
ctgcagtcatctgaaggtttggctgaggctgatagagtcatttctaagtcaactcatgtacgtgactgataagttagtacatggtttttggcaagaggtctgtctcacttcctcaccacatt

SEQ ID NO: 11096 - DNA, 122 bp, Homo sapiens
  misc_feature (61)..(62): /note="This region represents a CpG dinucleotide"
  misc_feature (61)..(61): /note="Nucleotide may be methylated to form 5-methylcytosine"
tggaaggaatgtcttgtcttcttcaatctttgtcactaacttctacatcttcagagtagccgttagagtcgccgtttgtccaaggtggcttgaaaatggctccactctgatttatgggaggt

SEQ ID NO: 11097 - DNA, 122 bp, Homo sapiens
  misc_feature (61)..(62): /note="This region represents a CpG dinucleotide"
  misc_feature (61)..(61): /note="Nucleotide may be methylated to form 5-methylcytosine"
ccaagtgcaaaggaaacacactctggcctccaggcaagcattttcttgaacatgtcattccgctctccctagtgacaataataggaaggggaggaagagagagaaaagttacagctttggag

SEQ ID NO: 11098 - DNA, 122 bp, Homo sapiens
  misc_feature (61)..(62): /note="This region represents a CpG dinucleotide"
  misc_feature (61)..(61): /note="Nucleotide may be methylated to form 5-methylcytosine"
cttgctagggtcacttgggacacagaattgggggtgacagcccaggacaagaagcctctacgaatgttgcaggtctttccagatgacccaggcaggctcccttgctgatctgctggcgatgt

SEQ ID NO: 11099 - DNA, 122 bp, Homo sapiens
  misc_feature (61)..(62): /note="This region represents a CpG dinucleotide"
  misc_feature (61)..(61): /note="Nucleotide may be methylated to form 5-methylcytosine"
tgtttattagaaaaatacacagggcgtcaccaaagccaagttcaagttgcttgtagtcttcgtgcagagttatgccatgcttggcacgtgaatgtagcacacacacacagacacacacgcct

SEQ ID NO: 11100 - DNA, 122 bp, Homo sapiens
  misc_feature (61)..(62): /note="This region represents a CpG dinucleotide"
  misc_feature (61)..(61): /note="Nucleotide may be methylated to form 5-methylcytosine"
ttgtacatgttgattcattcacaccacatcccaagaaataatgctcttcctatgagattacgtataagaaaagtgcttttgaagggtgaatcattgtttattgtctctaatacacagtgcct

SEQ ID NO: 11101 - DNA, 122 bp, Homo sapiens
  misc_feature (61)..(62): /note="This region represents a CpG dinucleotide"
  misc_feature (61)..(61): /note="Nucleotide may be methylated to form 5-methylcytosine"
tcattacatgtgtctgtctggcctgatctgtgcatctgctcggagacgctcctgacaagtcgggaatttctctatttctccactggtgcaaagagcggatttctccctgcttctcttctgtc

SEQ ID NO: 11102 - DNA, 122 bp, Homo sapiens
  misc_feature (61)..(62): /note="This region represents a CpG dinucleotide"
  misc_feature (61)..(61): /note="Nucleotide may be methylated to form 5-methylcytosine"
aagattttgccatgttacccaggctggtctcttactcatgggcccaagtgattccttcctcgttagcctctcaagatgttggaattacaggcgtgagccaccacgcctgggcaaatctcatt

SEQ ID NO: 11103 - DNA, 122 bp, Homo sapiens
  misc_feature (61)..(62): /note="This region represents a CpG dinucleotide"
  misc_feature (61)..(61): /note="Nucleotide may be methylated to form 5-methylcytosine"
aacacccggaagccgcccttgtcctctccagctgcagcctgattgcccggttttcggccccgtgccccttattggataaagcttcaggccccgtccccagtccgtgagtgacagaagatgtg

SEQ ID NO: 11104 - DNA, 122 bp, Homo sapiens
  misc_feature (61)..(62): /note="This region represents a CpG dinucleotide"
  misc_feature (61)..(61): /note="Nucleotide may be methylated to form 5-methylcytosine"
gggaaggggcctgactagcggaaggccacaccccacaccaggcctgctgaggcctccccacgagcccagggcagtagggggagtacagctggcttccttgtcaaatgggttgaggaaatgct

SEQ ID NO: 11105 - DNA, 122 bp, Homo sapiens
  misc_feature (61)..(62): /note="This region represents a CpG dinucleotide"
  misc_feature (61)..(61): /note="Nucleotide may be methylated to form 5-methylcytosine"
ccctcagatagaggagcagaagtgccgtcaggggtgtaggagtaagggataaggaggggacggagtcccagaaaagctgaaggaaatactgtctgtgtcaacatctgggaagggatgagaac

SEQ ID NO: 11106 - DNA, 122 bp, Homo sapiens
  misc_feature (61)..(62): /note="This region represents a CpG dinucleotide"
  misc_feature (61)..(61): /note="Nucleotide may be methylated to form 5-methylcytosine"
gacgggcttaggtcatgcagtagtcaaattcagaactcatgtttgattccaaagcccacacgttttcctagtttagaaacactaaacatttaattcaccgcaccgggggccagacaggtaat

SEQ ID NO: 11107 - DNA, 122 bp, Homo sapiens
  misc_feature (61)..(62): /note="This region represents a CpG dinucleotide"
  misc_feature (61)..(61): /note="Nucleotide may be methylated to form 5-methylcytosine"
aataaaagggaataactgcccttattcactaaacttctcagcaggaactcaaattaagtacgggataggaaagagtaggcagcaaaaaaaactaaagcccgtgtgaactgcattcttagaag

SEQ ID NO: 11108 - DNA, 122 bp, Homo sapiens
  misc_feature (61)..(62): /note="This region represents a CpG dinucleotide"
  misc_feature (61)..(61): /note="Nucleotide may be methylated to form 5-methylcytosine"
gtgtcccatccttttctcctctaaataactaagcagtttctgtttctcaccactgaacagcgactaatacaaggatgaaattaaaagttctgtttaggacatgtaaatattctgatacctat

SEQ ID NO: 11109 - DNA, 122 bp, Homo sapiens
  misc_feature (61)..(62): /note="This region represents a CpG dinucleotide"
  misc_feature (61)..(61): /note="Nucleotide may be methylated to form 5-methylcytosine"
gacacacagttgatcagcacccaggacagcatctcttgtgagcttggggaggatggacctcgcagcacaacacaaacccagttgaattcaggactctagggcctatattctgcagatagaaa

SEQ ID NO: 11110 - DNA, 122 bp, Homo sapiens
  misc_feature (61)..(62): /note="This region represents a CpG dinucleotide"
  misc_feature (61)..(61): /note="Nucleotide may be methylated to form 5-methylcytosine"
atatagagagtcatgtgttgcttaatgacaaggatactttctgagaaatgcattgttaggcgatttcatggttgtgtgaaatcacagagcgtgttgctgcaaacctaggtggtgtggcctac

SEQ ID NO: 11111 - DNA, 122 bp, Homo sapiens
  misc_feature (61)..(62): /note="This region represents a CpG dinucleotide"
  misc_feature (61)..(61): /note="Nucleotide may be methylated to form 5-methylcytosine"
ccatttaaatgatcatctttcattcttacaacaaccctacaaagtagtgattcttatgcccgtttaacaaatgaagaaacagagattaagtaacttgacaaaggttactcagctaataacct

SEQ ID NO: 11112 - DNA, 122 bp, Homo sapiens
  misc_feature (61)..(62): /note="This region represents a CpG dinucleotide"
  misc_feature (61)..(61): /note="Nucleotide may be methylated to form 5-methylcytosine"
cccgcatcagctgctgcgtgtccacttggtcggccttgttcagcacgacacggatcttgtcgtcctggccccggaaggccttgatggcctctgagaattcatctgagatgtccagcttgtga

SEQ ID NO: 11113 - DNA, 122 bp, Homo sapiens
  misc_feature (61)..(62): /note="This region represents a CpG dinucleotide"
  misc_feature (61)..(61): /note="Nucleotide may be methylated to form 5-methylcytosine"
tttttttttttactgcatttttctcccttcagaatgtgagctcagctagggcagggaccacgtctatctcatccatcactgtttctccaccatgtagaacaatgcccagtgcatattggtac

SEQ ID NO: 11114 - DNA, 122 bp, Homo sapiens
  misc_feature (61)..(62): /note="This region represents a CpG dinucleotide"
  misc_feature (61)..(61): /note="Nucleotide may be methylated to form 5-methylcytosine"
caggggaaacccagctgggccgaagccaggggctgtgtatttcaggaggaggtgacagagcggcagcagcaccaactcaactgtcagtatctgtggggccagctaagagaaggcagctatct

SEQ ID NO: 11115 - DNA, 122 bp, Homo sapiens
  misc_feature (61)..(62): /note="This region represents a CpG dinucleotide"
  misc_feature (61)..(61): /note="Nucleotide may be methylated to form 5-methylcytosine"
cgtggaaacccccagcccagtggttatggactttcttggggcctcaactctccccaagagcgtgatcctcactacgggggagcggcgctttatccggcggggcgggtggacactcctacaga

SEQ ID NO: 11116 - DNA, 122 bp, Homo sapiens
  misc_feature (61)..(62): /note="This region represents a CpG dinucleotide"
  misc_feature (61)..(61): /note="Nucleotide may be methylated to form 5-methylcytosine"
tggtggctttccttctgagctttccccacctgagtcatctgcaaagggcaaggctgcaggcgggagaggccggtgtgatgtgaccgccagccacggtccccacacccctctctgagggctgt

SEQ ID NO: 11117 - DNA, 122 bp, Homo sapiens
  misc_feature (61)..(62): /note="This region represents a CpG dinucleotide"
  misc_feature (61)..(61): /note="Nucleotide may be methylated to form 5-methylcytosine"
gttatagtgaaaaccacagaaaaaactgcagctattaacctatgaggaactccctgggcccgctgcacatgtgtacatataacacagctctgtactctgaagagcttcacaaaataaaacat

SEQ ID NO: 11118 - DNA, 122 bp, Homo sapiens
  misc_feature (61)..(62): /note="This region represents a CpG dinucleotide"
  misc_feature (61)..(61): /note="Nucleotide may be methylated to form 5-methylcytosine"
cacgacgcccccgtcacgacgcgcccccttcgtcacgtccccctcacgacctccccctcacgacgccttcctcacgacgtgccctcctcacgacgtccccgtcacgacgccctccacacgac

SEQ ID NO: 11119 - DNA, 122 bp, Homo sapiens
  misc_feature (61)..(62): /note="This region represents a CpG dinucleotide"
  misc_feature (61)..(61): /note="Nucleotide may be methylated to form 5-methylcytosine"
tacataaacactactttttgttggtttgtttgttttaaaaacaagatagggttttcatttcgggaagtcataaaaacatcatgtccttcaacagtgattacaaaggaagtctgtggcagggt

SEQ ID NO: 11120 - DNA, 122 bp, Homo sapiens
  misc_feature (61)..(62): /note="This region represents a CpG dinucleotide"
  misc_feature (61)..(61): /note="Nucleotide may be methylated to form 5-methylcytosine"
atcacacaatgtgagaaactctccgtttgcaaagtgctgtgaaagcacaaagtactgcttcgtcctgctaaaagctttcaggaagtggagatatccaaacattcataattttaaatataaat

SEQ ID NO: 11121 - DNA, 122 bp, Homo sapiens
  misc_feature (61)..(62): /note="This region represents a CpG dinucleotide"
  misc_feature (61)..(61): /note="Nucleotide may be methylated to form 5-methylcytosine"
agcaacagcagtaaactgctgagataacactaggaacatggacaaagaccctttctgagtcgtccctatgcagggctgctcaaagcaaccatgctgagaaaagccttccaacactctagatg

SEQ ID NO: 11122 - DNA, 122 bp, Homo sapiens
  misc_feature (61)..(62): /note="This region represents a CpG dinucleotide"
  misc_feature (61)..(61): /note="Nucleotide may be methylated to form 5-methylcytosine"
ctccaagctcaacatgtggcaaaggtcggtgagttcctcctgccccagggaccctgtgcccgtcgtgtcaaaactgtcaaacagctccttgagtcgggcctcatgctggtcctgctccacct

SEQ ID NO: 11123 - DNA, 122 bp, Homo sapiens
  misc_feature (61)..(62): /note="This region represents a CpG dinucleotide"
  misc_feature (61)..(61): /note="Nucleotide may be methylated to form 5-methylcytosine"
ttatgaaagtaattcatcagaagagatgaatcctctctttctctgcatgttgtgtgtaaacgtgaatcctggagttattgtagtcatcttgctacctgcctgaggataaagccaatgcaggg

SEQ ID NO: 11124 - DNA, 122 bp, Homo sapiens
  misc_feature (61)..(62): /note="This region represents a CpG dinucleotide"
  misc_feature (61)..(61): /note="Nucleotide may be methylated to form 5-methylcytosine"
aaaggcaagatgagagagcaatggctcccagccctttttagttaatgaatagcttagaaacgaacccatgtccagtgcaaagctcaagagaagccaagggaagcagaatctggaggcaaacc

SEQ ID NO: 11125 - DNA, 122 bp, Homo sapiens
  misc_feature (61)..(62): /note="This region represents a CpG dinucleotide"
  misc_feature (61)..(61): /note="Nucleotide may be methylated to form 5-methylcytosine"
aagaagttgatggccaagtctgggaatgtgtacataaccaggacacaaagttacagatgacgagagctttaactgaagtgttagacaatgctagagagtttggagaaacagatgtctgctgt

SEQ ID NO: 11126 - DNA, 122 bp, Homo sapiens
  misc_feature (61)..(62): /note="This region represents a CpG dinucleotide"
  misc_feature (61)..(61): /note="Nucleotide may be methylated to form 5-methylcytosine"
tatgaggctggggcatttaatggatcatccacaaggccactgaaggtactaaagatatagcgagagtaggcattgtgagtcagactgtaagccatgctctaaagcccattctcaaagtggaa

SEQ ID NO: 11127 - DNA, 122 bp, Homo sapiens
  misc_feature (61)..(62): /note="This region represents a CpG dinucleotide"
  misc_feature (61)..(61): /note="Nucleotide may be methylated to form 5-methylcytosine"
ccagatcctggaaattatgaacccggtcccatttgtattaattaaaaactctttgaagtacgaattttcatgatacaagcaagagaagtcaggttaaaagaatggtaagaggaagagcaaag

SEQ ID NO: 11128 - DNA, 122 bp, Homo sapiens
  misc_feature (61)..(62): /note="This region represents a CpG dinucleotide"
  misc_feature (61)..(61): /note="Nucleotide may be methylated to form 5-methylcytosine"
acttaaataacaattgctaacattttaatctctatgttccaagaacttttctaacctcttcgtagaatattaactcatttaatcacaactaccttctgtggtaagcagagatttttgtctgg

SEQ ID NO: 11129 - DNA, 122 bp, Homo sapiens
  misc_feature (61)..(62): /note="This region represents a CpG dinucleotide"
  misc_feature (61)..(61): /note="Nucleotide may be methylated to form 5-methylcytosine"
gttgtagctgagatgaatcactttcacagtaaccggatctatgattacaacagtgtcatccgcctgtacctggagcagcaagtgcaattttacgaaacggtgagtgggcgtccacgtgcctt

SEQ ID NO: 11130 - DNA, 122 bp, Homo sapiens
  misc_feature (61)..(62): /note="This region represents a CpG dinucleotide"
  misc_feature (61)..(61): /note="Nucleotide may be methylated to form 5-methylcytosine"
ctggccccgaaatccttttggggtggcatttgcttttgtgataccataaacacagagattcgagttggtgctcagggagctgtcctgccaagatcattgtgtcagtgaggaaatagacatgc

SEQ ID NO: 11131 - DNA, 122 bp, Homo sapiens
  misc_feature (61)..(62): /note="This region represents a CpG dinucleotide"
  misc_feature (61)..(61): /note="Nucleotide may be methylated to form 5-methylcytosine"
acaaaatcctgttttgtttaattactccacatgatctgttgcaaaggtgacaatggtcagcgaggctgcactgaggtaacactgtcacgtggtcagccaggctcactcaccagcaggtggct

SEQ ID NO: 11132 - DNA, 122 bp, Homo sapiens
  misc_feature (61)..(62): /note="This region represents a CpG dinucleotide"
  misc_feature (61)..(61): /note="Nucleotide may be methylated to form 5-methylcytosine"
ggaagtgggtgtgtccaattcaggaagctacagggtattaggcatcaaacagcattacctcgtcatgaccagtggataaatgatgagttctgaattatatggggagaagagtatggagagga

SEQ ID NO: 11133 - DNA, 122 bp, Homo sapiens
  misc_feature (61)..(62): /note="This region represents a CpG dinucleotide"
  misc_feature (61)..(61): /note="Nucleotide may be methylated to form 5-methylcytosine"
atcagcagcaaaatcttcaacaatttagcctccatcttgtgcaaggggctatccatgtgccgtattctactcaggatagggccttccttgccagcagggaggtgagtgagtcattctgcaaa

SEQ ID NO: 11134 - DNA, 122 bp, Homo sapiens
  misc_feature (61)..(62): /note="This region represents a CpG dinucleotide"
  misc_feature (61)..(61): /note="Nucleotide may be methylated to form 5-methylcytosine"
cagagccagtcacctgagctacccagggtgggatccctggccccgacctctgtcctgacacgccccaagcggcagcaacaaagccccaattggcctgggcctgggcaggaggagctgggccg

SEQ ID NO: 11135 - DNA, 122 bp, Homo sapiens
  misc_feature (61)..(62): /note="This region represents a CpG dinucleotide"
  misc_feature (61)..(61): /note="Nucleotide may be methylated to form 5-methylcytosine"
tggcaagtgtcctagggaaaggagcaggcatggggtgaaggtgggaacaagagtgcctggcgtgaccatgtgaggcagggcatttggctatgtgttgctgtgtgctctgtctcacccccgtg

SEQ ID NO: 11136 - DNA, 122 bp, Homo sapiens
  misc_feature (61)..(62): /note="This region represents a CpG dinucleotide"
  misc_feature (61)..(61): /note="Nucleotide may be methylated to form 5-methylcytosine"
agtttttgcatttcaacctataaggataaggatatatgcctatttttacacacacacacacgactatatgtgaaaaaaatatatataagaaaagtaaaatgtagacacagcaaattttttat

SEQ ID NO: 11137 - DNA, 122 bp, Homo sapiens
  misc_feature (61)..(62): /note="This region represents a CpG dinucleotide"
  misc_feature (61)..(61): /note="Nucleotide may be methylated to form 5-methylcytosine"
aaagtctccttcactgccctctcccctcatctagttagtttcttcaaatcatcctgccgacgtccatcaccagcaaatgtcgaatctatggcaggtttatgtttttatttatgtattttaac

SEQ ID NO: 11138 - DNA, 122 bp, Homo sapiens
  misc_feature (61)..(62): /note="This region represents a CpG dinucleotide"
  misc_feature (61)..(61): /note="Nucleotide may be methylated to form 5-methylcytosine"
aacattccacttccacagagatttaaaaaaaaacacaacacctaattcttaatcaatgtacgacactgcattcatataacatggtttgcatggtgaaaaaagtctgacttctgtgctgcctt

SEQ ID NO: 11139 - DNA, 122 bp, Homo sapiens
  misc_feature (61)..(62): /note="This region represents a CpG dinucleotide"
  misc_feature (61)..(61): /note="Nucleotide may be methylated to form 5-methylcytosine"
gtaaggctgcctgtcctcagctatcttatcactagtggccatgtacagacttcctcttgacgtcaaaggcaagttgggtacaatatcaaatgagttcccctaacatgaggaaattgtgttcc

SEQ ID NO: 11140 - DNA, 122 bp, Homo sapiens
  misc_feature (61)..(62): /note="This region represents a CpG dinucleotide"
  misc_feature (61)..(61): /note="Nucleotide may be methylated to form 5-methylcytosine"
aggcaactggacaacttggtctttggtaagatcacttatgataacaaagtgagtcagcttcgcttcagacaagcaatgtggcagtgatacaaagacatgctattttgacaaatattattttt

SEQ ID NO: 11141 - DNA, 122 bp, Homo sapiens
  misc_feature (61)..(62): /note="This region represents a CpG dinucleotide"
  misc_feature (61)..(61): /note="Nucleotide may be methylated to form 5-methylcytosine"
ctagtatgagcatttgctcaattactcactatgattagtatccggattatttacagatcacgggtcatggtcatttggacataggagcatgttccacttacaatgactgtgcaccaatcacc

SEQ ID NO: 11142 - DNA, 122 bp, Homo sapiens
  misc_feature (61)..(62): /note="This region represents a CpG dinucleotide"
  misc_feature (61)..(61): /note="Nucleotide may be methylated to form 5-methylcytosine"
gttccttaaagcctggaaacactttccatttcagctttcacagctcctaggacataatgacgtaactgtgcactacacaaattactaacatcaacattatcatatctgttttggcaactgag

SEQ ID NO: 11143 - DNA, 122 bp, Homo sapiens
  misc_feature (61)..(62): /note="This region represents a CpG dinucleotide"
  misc_feature (61)..(61): /note="Nucleotide may be methylated to form 5-methylcytosine"
ccccctccttggatgtctgccatacaaaactccacttgaatttatttcattagtcactaacgagatttggttaatatgttttcaaatgaatactggtagaatagtctgaaagaaacacattt

SEQ ID NO: 11144 - DNA, 122 bp, Homo sapiens
  misc_feature (61)..(62): /note="This region represents a CpG dinucleotide"
  misc_feature (61)..(61): /note="Nucleotide may be methylated to form 5-methylcytosine"
catgaacagctccaggtccaatactggctcctttgcttattagcagtgtgaccgtgggcacgttacttacacccttttattagcggtaaaatgggagcgttactcaccttgttagaattatg

SEQ ID NO: 11145 - DNA, 122 bp, Homo sapiens
  misc_feature (61)..(62): /note="This region represents a CpG dinucleotide"
  misc_feature (61)..(61): /note="Nucleotide may be methylated to form 5-methylcytosine"
ggaggggaggcctgggcttccccagggcccttgcagtggcttcgagcaccgccacctcctcggcctgctgagcctccatgagtgccatctgctgctccaacttccggcgttgctcttcctgc

SEQ ID NO: 11146 - DNA, 122 bp, Homo sapiens
  misc_feature (61)..(62): /note="This region represents a CpG dinucleotide"
  misc_feature (61)..(61): /note="Nucleotide may be methylated to form 5-methylcytosine"
gagactatttgaacaactataccctaacaaattagaaaacctagaggaaatggataaacacgtggacacttacaaccctaccaagattggactaggaggaaatagaaaacctgaacagacaa

SEQ ID NO: 11147 - DNA, 122 bp, Homo sapiens
  misc_feature (61)..(62): /note="This region represents a CpG dinucleotide"
  misc_feature (61)..(61): /note="Nucleotide may be methylated to form 5-methylcytosine"
cgggcttgaaaagggagcacttctcacacgtgaaggtgcacacaaatttccaagggatctcgttaaaaatgtacattctgactcagtaggtctggggtggaatcttaagagtctgtgtgtcg

SEQ ID NO: 11148 - DNA, 122 bp, Homo sapiens
  misc_feature (61)..(62): /note="This region represents a CpG dinucleotide"
  misc_feature (61)..(61): /note="Nucleotide may be methylated to form 5-methylcytosine"
tcggctcggctctggccaaggagcagctctgggaagcaacgggaggtgaggcagcttgttcgaagcctgctggtcaggatggagtcggatctgaactgtggccgtctgacccccaagcaggc

SEQ ID NO: 11149 - DNA, 122 bp, Homo sapiens
  misc_feature (61)..(62): /note="This region represents a CpG dinucleotide"
  misc_feature (61)..(61): /note="Nucleotide may be methylated to form 5-methylcytosine"
atatattcatcattttacttagcaatcttacttgtgggaatctatcctatagatacagtacgaaatgtacaataggcctagcgcagtggctcaggcatgtaatcccagtactttgggaggcc

SEQ ID NO: 11150 - DNA, 122 bp, Homo sapiens
  misc_feature (61)..(62): /note="This region represents a CpG dinucleotide"
  misc_feature (61)..(61): /note="Nucleotide may be methylated to form 5-methylcytosine"
tctgttacttgcaacagaaacaatttttacttacacaggaaggggaggctccttagaggacgtgggagtattgttaccagaagaccgtacattggatacagggcagaaaaaacaatagattc

SEQ ID NO: 11151 - DNA, 122 bp, Homo sapiens
  misc_feature (61)..(62): /note="This region represents a CpG dinucleotide"
  misc_feature (61)..(61): /note="Nucleotide may be methylated to form 5-methylcytosine"
tgtgtggtcaccaggccagcagcaatggtatcacctgggagagaattccaaagccactcccgacttgctgaatcagaatctgcatttcacaagtttgagaagtgctgatctgaggaactatt

SEQ ID NO: 11152 - DNA, 122 bp, Homo sapiens
  misc_feature (61)..(62): /note="This region represents a CpG dinucleotide"
  misc_feature (61)..(61): /note="Nucleotide may be methylated to form 5-methylcytosine"
ttatgacagtgactaataaaaacatagtgcctgctgtcatggaccttatactctaatgctcgtttatagtaaatgctaagggaacagagagatgccttggcctgcatatgtgaacatgttcc

SEQ ID NO: 11153 - DNA, 122 bp, Homo sapiens
  misc_feature (61)..(62): /note="This region represents a CpG dinucleotide"
  misc_feature (61)..(61): /note="Nucleotide may be methylated to form 5-methylcytosine"
atggaaacttacagttgttctgcaggagtttgtccagggaatcacgccactgcagggcctcgtccagcgaggttctacatcaataataaggagagaaaaggggtatggcgtaagtaggcatt

SEQ ID NO: 11154 - DNA, 122 bp, Homo sapiens
  misc_feature (61)..(62): /note="This region represents a CpG dinucleotide"
  misc_feature (61)..(61): /note="Nucleotide may be methylated to form 5-methylcytosine"
gcttaaagcctttcaaatgcctcaatggctgctcattgcttttaggataacctccaagctcgtaagcatggcctatatatccctctgtggccaacacccctgcctgcctctccagattcatc

SEQ ID NO: 11155 - DNA, 122 bp, Homo sapiens
  misc_feature (61)..(62): /note="This region represents a CpG dinucleotide"
  misc_feature (61)..(61): /note="Nucleotide may be methylated to form 5-methylcytosine"
ctggaataaggccagaacagtttccccaaatgttgctcactgatcttgtgagacagtgtgcgaaaggacaaaggagttcgggaaacacttcatcctgtacgcccatcctggacattcacagc

SEQ ID NO: 11156 - DNA, 122 bp, Homo sapiens
  misc_feature (61)..(62): /note="This region represents a CpG dinucleotide"
  misc_feature (61)..(61): /note="Nucleotide may be methylated to form 5-methylcytosine"
gcttaagtgtgtgctccctagccgttcatctggggctggaatctgtttccatcaccttttcgctgtgtgatcttgatgcaaatcacttttctgcatctgaggtttcctcctacataaaatag

SEQ ID NO: 11157 - DNA, 122 bp, Homo sapiens
  misc_feature (61)..(62): /note="This region represents a CpG dinucleotide"
  misc_feature (61)..(61): /note="Nucleotide may be methylated to form 5-methylcytosine"
gaagtgtttggaattggcaggtaaggaaaaataataagggagcagccttagaaggataagcgcgtctttagtgtcagcaatccttgggctgtagttcatctgataacaaggtcaaaagtctc

SEQ ID NO: 11158 - DNA, 122 bp, Homo sapiens
  misc_feature (61)..(62): /note="This region represents a CpG dinucleotide"
  misc_feature (61)..(61): /note="Nucleotide may be methylated to form 5-methylcytosine"
tgaaaaatgtgtagcttcaccctgagtcatacattgtgcatttgctcttgctggtgtttccgctgcctttatctgaagatctgttttatagaaaccttgacatacagaatagccacagatcc

SEQ ID NO: 11159 - DNA, 122 bp, Homo sapiens
  misc_feature (61)..(62): /note="This region represents a CpG dinucleotide"
  misc_feature (61)..(61): /note="Nucleotide may be methylated to form 5-methylcytosine"
ttaaaggcaatgagactgacacatggagagatcggattatttgctctaaatcacatgtctcgtaagtggaaaggctggacttggccgggtttatttctaaactgaatctctgcacacttttt

SEQ ID NO: 11160 - DNA, 122 bp, Homo sapiens
  misc_feature (61)..(62): /note="This region represents a CpG dinucleotide"
  misc_feature (61)..(61): /note="Nucleotide may be methylated to form 5-methylcytosine"
catgatgccactatgacctctgccctttaacccttagccttactttacattcctgactaccgattggctgagggattgtctaatagaatgccacacaaccagtctcaggatttcagcaccac

SEQ ID NO: 11161 - DNA, 122 bp, Homo sapiens
  misc_feature (61)..(62): /note="This region represents a CpG dinucleotide"
  misc_feature (61)..(61): /note="Nucleotide may be methylated to form 5-methylcytosine"
cgtggcgtcggagctgtgggactctccagctgttgctgtctgtctctgcctcagttctgtcggcctttccttcacgtgttttgggcggggtcacttattggaggcagatacactttcgcttt

SEQ ID NO: 11162 - DNA, 122 bp, Homo sapiens
  misc_feature (61)..(62): /note="This region represents a CpG dinucleotide"
  misc_feature (61)..(61): /note="Nucleotide may be methylated to form 5-methylcytosine"
cagctatcctaataaattagtgctgtatgttctcacattctcagaatgctccatcctccacgttaaccacaaggtggaattaagcatcattgtatctaacaaagaaatgaattacaaggaaa

SEQ ID NO: 11163 - DNA, 122 bp, Homo sapiens
  misc_feature (61)..(62): /note="This region represents a CpG dinucleotide"
  misc_feature (61)..(61): /note="Nucleotide may be methylated to form 5-methylcytosine"
gacctgtcatttccatttatgtaatggattttgaactcaaaagccctgtaaatacataagcgatcttgaaccaagccccattgtgaaaggcaggattgaggaatatgaaacaaattatgctt

SEQ ID NO: 11164 - DNA, 122 bp, Homo sapiens
  misc_feature (61)..(62): /note="This region represents a CpG dinucleotide"
  misc_feature (61)..(61): /note="Nucleotide may be methylated to form 5-methylcytosine"
tgcacagttggatgtggctccttcccggccacttctcagccttgctctggcctgccacagcggtgcccacagagtcttggcggaaagaacagaacatcccatggctctgagccaggtccctg

SEQ ID NO: 11165 - DNA, 122 bp, Homo sapiens
  misc_feature (61)..(62): /note="This region represents a CpG dinucleotide"
  misc_feature (61)..(61): /note="Nucleotide may be methylated to form 5-methylcytosine"
agatttgaccttggttttctgaaccggcaaaataggttatctagctctatgctcattcaacgaactagaacattcatggaagaaatcacttccttgaaaataagattaatttgcaatacatc

SEQ ID NO: 11166 - DNA, 122 bp, Homo sapiens
  misc_feature (61)..(62): /note="This region represents a CpG dinucleotide"
  misc_feature (61)..(61): /note="Nucleotide may be methylated to form 5-methylcytosine"
tacccccccgccccctccacatgtccctgtctcttttcttttccaacttaaactcatccacggctaaattaacagccccagttgtggcacaaaggaagctttgaaggctgcaccggcttggt

SEQ ID NO: 11167 - DNA, 122 bp, Homo sapiens
  misc_feature (61)..(62): /note="This region represents a CpG dinucleotide"
  misc_feature (61)..(61): /note="Nucleotide may be methylated to form 5-methylcytosine"
gggaaaaaaaaaagtatttatgaaactcctacggtagcagaataagcctccagggcccttcgagcaatcccaggtattctcttcctctttcagttccacttagagaaaaactactctgtggc

SEQ ID NO: 11168 - DNA, 122 bp, Homo sapiens
  misc_feature (61)..(62): /note="This region represents a CpG dinucleotide"
  misc_feature (61)..(61): /note="Nucleotide may be methylated to form 5-methylcytosine"
cctccaaaaaagacaaaatcttaagctgcaccaagcaaaacaggatgtgtgttcattctacgtgtttagtgctatgagtaatgtagtaggtcctcaataaatacatgttccctttcccttcc

SEQ ID NO: 11169 - DNA, 122 bp, Homo sapiens
  misc_feature (61)..(62): /note="This region represents a CpG dinucleotide"
  misc_feature (61)..(61): /note="Nucleotide may be methylated to form 5-methylcytosine"
cagcaacaggtgctatagacttctggaacataaaagtgaaaccagctctgtcagcacttacgaaagcaaggcagtgttcaatctctaaatacccagttgaggtttagttcaagtcataagaa

SEQ ID NO: 11170 - DNA, 122 bp, Homo sapiens
  misc_feature (61)..(62): /note="This region represents a CpG dinucleotide"
  misc_feature (61)..(61): /note="Nucleotide may be methylated to form 5-methylcytosine"
ataaacaagaatgtctcggtggcatgtgcagcataacacactaacatctgctaacaagagcgcgggtttttttttttttccatgttttgtactgaggaaaggaccactttatattgtctcta

SEQ ID NO: 11171 - DNA, 122 bp, Homo sapiens
  misc_feature (61)..(62): /note="This region represents a CpG dinucleotide"
  misc_feature (61)..(61): /note="Nucleotide may be methylated to form 5-methylcytosine"
tggtgcagtgaggccctctctgtttcatactcaggcagatatcaagtcatttagagcagccgctctcatggaatatcaacctgaggcaccccacccttcctgggcagaggttctggtgcagt

SEQ ID NO: 11172 - DNA, 122 bp, Homo sapiens
  misc_feature (61)..(62): /note="This region represents a CpG dinucleotide"
  misc_feature (61)..(61): /note="Nucleotide may be methylated to form 5-methylcytosine"
actagcttttattcattcattcaatcaatcatttgttcaatacttattgagtacctgctgcgtgttaagcactgagccaagcagtcagcatacaaggaaacaagtataatgttcttgtcttc

SEQ ID NO: 11173 - DNA, 122 bp, Homo sapiens
  misc_feature (61)..(62): /note="This region represents a CpG dinucleotide"
  misc_feature (61)..(61): /note="Nucleotide may be methylated to form 5-methylcytosine"
agactagtataatacatggtcttttctgactatattatttccttttttaaaatttttaaacgcttttattttaggttcagagtccatgtgcaggtttgttatatggggaaaattgtgccatg

SEQ ID NO: 11174 - DNA, 122 bp, Homo sapiens
  misc_feature (61)..(62): /note="This region represents a CpG dinucleotide"
  misc_feature (61)..(61): /note="Nucleotide may be methylated to form 5-methylcytosine"
aacctctttaccgccttggtttccttgtaggattaagtcagcaaatgcatgcaaattacacgagtgctcaaggtgagtgcttcaaaaacattgctgtcaccctttatgcaatcacctttttc

SEQ ID NO: 11175 - DNA, 122 bp, Homo sapiens
  misc_feature (61)..(62): /note="This region represents a CpG dinucleotide"
  misc_feature (61)..(61): /note="Nucleotide may be methylated to form 5-methylcytosine"
cgcagagagagggtgcagcgccgtccacagccctctccccgctctctctcctcccctgcccgcacagccagcagcctggtccagctctctgcgtcccatcgccagggtagtatcctccaggt

SEQ ID NO: 11176 - DNA, 122 bp, Homo sapiens
  misc_feature (61)..(62): /note="This region represents a CpG dinucleotide"
  misc_feature (61)..(61): /note="Nucleotide may be methylated to form 5-methylcytosine"
atggtggaggagaagggggtgaaaagccgcagaaaggagatctatttaccctggcacatgcgctgtgtggtcagctgaaaacaaaacaggttttttattactcgtgtggtgtaggggggaag

SEQ ID NO: 11177 - DNA, 122 bp, Homo sapiens
  misc_feature (61)..(62): /note="This region represents a CpG dinucleotide"
  misc_feature (61)..(61): /note="Nucleotide may be methylated to form 5-methylcytosine"
cctagaacaaaagagcctcatctaggtcaaagaagaattccctgaagaggtgatacttaacgcaacagggattatttgagggcttatgttcctagccatgagcccgatctatggatttaagt

SEQ ID NO: 11178 - DNA, 122 bp, Homo sapiens
  misc_feature (61)..(62): /note="This region represents a CpG dinucleotide"
  misc_feature (61)..(61): /note="Nucleotide may be methylated to form 5-methylcytosine"
gtggatacaggaagtgctcagcaacgattacgccccgagggccaatcacagggctgcggccgagaaagaagccttaatagagctttctcaacctgcagccctcatctccgccggcgagtagg

SEQ ID NO: 11179 - DNA, 122 bp, Homo sapiens
  misc_feature (61)..(62): /note="This region represents a CpG dinucleotide"
  misc_feature (61)..(61): /note="Nucleotide may be methylated to form 5-methylcytosine"
tttcgaaacgccaataagacttcggtacactgagagacactacttgaaaatactcaatttcgattgccatcagcctgaaagaaagcactgggattttcttaaagtttaggagaaaataaata

SEQ ID NO: 11180 - DNA, 122 bp, Homo sapiens
  misc_feature (61)..(62): /note="This region represents a CpG dinucleotide"
  misc_feature (61)..(61): /note="Nucleotide may be methylated to form 5-methylcytosine"
agtttggggtccttctgtcaaaaatggacagagcctaaagcgtattactttaacacactacgtgtacaagcaaagctacaaacacctatggagtaaagctggtcaactgggctgaggccagt

SEQ ID NO: 11181 - DNA, 122 bp, Homo sapiens
  misc_feature (61)..(62): /note="This region represents a CpG dinucleotide"
  misc_feature (61)..(61): /note="Nucleotide may be methylated to form 5-methylcytosine"
ctcaagtgatcctcccacttcagcctctctagtagctggaactaaaggcatgcgacacgacgcctagctaatttttaaaaaagaatttttatgggaggccaaggcaggtggatcacttgagg

SEQ ID NO: 11182 - DNA, 122 bp, Homo sapiens
  misc_feature (61)..(62): /note="This region represents a CpG dinucleotide"
  misc_feature (61)..(61): /note="Nucleotide may be methylated to form 5-methylcytosine"
tgctgtcttcagagggtctgtggtcctctgatcaacataggctggtgggagtacaggactcgcctcctcagggttccctgtgctgccacttttcagccatggccacaaggtgagtattggaa

SEQ ID NO: 11183 - DNA, 122 bp, Homo sapiens
  misc_feature (61)..(62): /note="This region represents a CpG dinucleotide"
  misc_feature (61)..(61): /note="Nucleotide may be methylated to form 5-methylcytosine"
actcgcagcacctggattatatcaccgagaagctctggcgcaacgcgttgctcgctggggcggtgccggtggtgctgggcccagaccgtgccaactacgagcgctttgtgccccgcggcgcc

SEQ ID NO: 11184 - DNA, 122 bp, Homo sapiens
  misc_feature (61)..(62): /note="This region represents a CpG dinucleotide"
  misc_feature (61)..(61): /note="Nucleotide may be methylated to form 5-methylcytosine"
gcccatcctgcacccgccgcccgtgagcaagagcgacgtgaagcccgtgcctggcgtgcccggggtgtgccgcaagaccaagaagaagcaccttaaaaagagtacgccctccacgccctgcc

SEQ ID NO: 11185 - DNA, 122 bp, Homo sapiens
  misc_feature (61)..(62): /note="This region represents a CpG dinucleotide"
  misc_feature (61)..(61): /note="Nucleotide may be methylated to form 5-methylcytosine"
ggcttcccttagcacacctttgatctgggatctgtacaaacagaatacacagggccaggccgcaagagtgccagcagctacctgcactttccccacagggaaagtgctttcccactgttgtc

SEQ ID NO: 11186 - DNA, 122 bp, Homo sapiens
  misc_feature (61)..(62): /note="This region represents a CpG dinucleotide"
  misc_feature (61)..(61): /note="Nucleotide may be methylated to form 5-methylcytosine"
tgggtgcaggccaagtggtggcgaaggtgcgcgcagttgacgccgactcaggctacaacgcgtggctttcgtatgagctgcagcccccggcaagcagcgctcgcttcccgtttcgcgtgggg

SEQ ID NO: 11187 - DNA, 122 bp, Homo sapiens
  misc_feature (61)..(62): /note="This region represents a CpG dinucleotide"
  misc_feature (61)..(61): /note="Nucleotide may be methylated to form 5-methylcytosine"
gctgttttttaaacatgcactatgctcttaatgtcaattgtcctatgatctatgaggccacgtgactcatgcttgctgacaggatgcaggcacaagtgttgcgcaggcacaccctcactttg

SEQ ID NO: 11188 - DNA, 122 bp, Homo sapiens
  misc_feature (61)..(62): /note="This region represents a CpG dinucleotide"
  misc_feature (61)..(61): /note="Nucleotide may be methylated to form 5-methylcytosine"
gatggcagcatggaaagcagttcagaccgcggcctccgtggggcccgggggtccagtgcccgcaccactatggggcccgggactgggctccctgtccagacctccaacccaggcacagttcc

SEQ ID NO: 11189 - DNA, 122 bp, Homo sapiens
  misc_feature (61)..(62): /note="This region represents a CpG dinucleotide"
  misc_feature (61)..(61): /note="Nucleotide may be methylated to form 5-methylcytosine"
tgagcacttcccgtccccgcagggcggcggcggtgggggtggcggtggcggggggctgcacgtggccattcccgactcggtcctcaccccgcccggcgccgacggcgcggccgcccgcaaga

SEQ ID NO: 11190 - DNA, 122 bp, Homo sapiens
  misc_feature (61)..(62): /note="This region represents a CpG dinucleotide"
  misc_feature (61)..(61): /note="Nucleotide may be methylated to form 5-methylcytosine"
aagagcttattgttttccaggcctgggcagagacagggcccccctgccccatctctccaccgtcctaggtgtgccaagagtcaattgcctcattgctgaccctgtccagctggccatggccc

SEQ ID NO: 11191 - DNA, 122 bp, Homo sapiens
  misc_feature (61)..(62): /note="This region represents a CpG dinucleotide"
  misc_feature (61)..(61): /note="Nucleotide may be methylated to form 5-methylcytosine"
catacccttatgtcctggaaaaagttaaaagaggaactggattacaggctttcatagcttcgggctggctgagagccaccccacattcgcctacactctctggctcatgtttgctgctgatg

SEQ ID NO: 11192 - DNA, 122 bp, Homo sapiens
  misc_feature (61)..(62): /note="This region represents a CpG dinucleotide"
  misc_feature (61)..(61): /note="Nucleotide may be methylated to form 5-methylcytosine"
aaaaacaaaaaggtctacgaaactgtcacagccaagaggtgcctaagaaaccatgaacaacgtaatgtagtgcccagggtgagatcctggaacagaaaaggacattaggtaaaacctaagga

SEQ ID NO: 11193 - DNA, 122 bp, Homo sapiens
  misc_feature (61)..(62): /note="This region represents a CpG dinucleotide"
  misc_feature (61)..(61): /note="Nucleotide may be methylated to form 5-methylcytosine"
agatcgtaaatcataaccagtagggattatctgaaatggatttttccctgtttatgtttacgtggtcaagttttaaaataacagtggccaggaaatctgagagaggctgaaggctctgttct

SEQ ID NO: 11194 - DNA, 122 bp, Homo sapiens
  misc_feature (61)..(62): /note="This region represents a CpG dinucleotide"
  misc_feature (61)..(61): /note="Nucleotide may be methylated to form 5-methylcytosine"
cagccatttaataggctcactcctacaaaatgttcatgtattactttatttgttcacccccgcattgcaaaaagtcaatatgataaaaatgtaatgtgttctagaaaataatgagagaaatt

SEQ ID NO: 11195 - DNA, 122 bp, Homo sapiens
  misc_feature (61)..(62): /note="This region represents a CpG dinucleotide"
  misc_feature (61)..(61): /note="Nucleotide may be methylated to form 5-methylcytosine"
gcctgccgtttggccccgctgaggccccacaggtccggaaccgtcgcaccaccatcagagcggctgtgctctcctgagcagggccagactactcggagatcccgactgacaccttttcctgg

SEQ ID NO: 11196 - DNA, 122 bp, Homo sapiens
  misc_feature (61)..(62): /note="This region represents a CpG dinucleotide"
  misc_feature (61)..(61): /note="Nucleotide may be methylated to form 5-methylcytosine"
ccgccctgccacgcgcaggccgcagcgcggggacccaagctgctgcccgggagcggcagtcgccagtagaaatggacagaccggtcctgtcagagcctgtggcttttgttgtaaacgtctag

SEQ ID NO: 11197 - DNA, 122 bp, Homo sapiens
  misc_feature (61)..(62): /note="This region represents a CpG dinucleotide"
  misc_feature (61)..(61): /note="Nucleotide may be methylated to form 5-methylcytosine"
ggaaggtgaaagtaaggaagaaatattttttcctgtagacacagttgtgcttcttacagacgatgcagtaacaaatgaggcaagagtctcagcagcaacagcagtggtagccatggacaaat

SEQ ID NO: 11198 - DNA, 122 bp, Homo sapiens
  misc_feature (61)..(62): /note="This region represents a CpG dinucleotide"
  misc_feature (61)..(61): /note="Nucleotide may be methylated to form 5-methylcytosine"
ctctcaaagtggtaggattacagccatgagctaccatgcccggcctgtcatactttttttcggaaacaaaagattagttctgtatttcaacattaacaatgaccacactctgactcaatatt

SEQ ID NO: 11199 - DNA, 122 bp, Homo sapiens
  misc_feature (61)..(62): /note="This region represents a CpG dinucleotide"
  misc_feature (61)..(61): /note="Nucleotide may be methylated to form 5-methylcytosine"
acttcagcccacagattaaaactacgcacagttccttaagctgccattatatttctcacccgcactgcctttccttgctgttccacttcgagactccctcccagagtccttctctgatctgc

SEQ ID NO: 11200 - DNA, 122 bp, Homo sapiens
  misc_feature (61)..(62): /note="This region represents a CpG dinucleotide"
  misc_feature (61)..(61): /note="Nucleotide may be methylated to form 5-methylcytosine"
catgtctctacctcatgttccttcatttgactacaacttataactacaggggcagtaaaccgttcacatgtgtgctgatagtttccttcctcaagtgccactggttctcagcttatctgcct

SEQ ID NO: 11201 - DNA, 122 bp, Homo sapiens
  misc_feature (61)..(62): /note="This region represents a CpG dinucleotide"
  misc_feature (61)..(61): /note="Nucleotide may be methylated to form 5-methylcytosine"
gccaggaagaacccctcaggcagggactgcacgtcagcgtgagtcatgctctcagaaacacgcatgcgtgcgtcatgctctcagaaacacgcatgcgtgcgtcatgctctcagaaacacgca

SEQ ID NO: 11202 - DNA, 122 bp, Homo sapiens
  misc_feature (61)..(62): /note="This region represents a CpG dinucleotide"
  misc_feature (61)..(61): /note="Nucleotide may be methylated to form 5-methylcytosine"
gcgtccgggtctgtttatatagcgtctggaggccgggaggcattgcccacccccgccaggcggcccgccctcccctcctgggctccgggctgccgcacgtggcagacaccagcgacgtctcc

SEQ ID NO: 11203 - DNA, 122 bp, Homo sapiens
  misc_feature (61)..(62): /note="This region represents a CpG dinucleotide"
  misc_feature (61)..(61): /note="Nucleotide may be methylated to form 5-methylcytosine"
gatatcttaaagtaagcagggttgggacaggtcacagcttggatgattgacctcaggtgccgtagacagccccagattcaagaattgtatctgctttcttggcagtcgtcactgaactaatg

SEQ ID NO: 11204 - DNA, 122 bp, Homo sapiens
  misc_feature (61)..(62): /note="This region represents a CpG dinucleotide"
  misc_feature (61)..(61): /note="Nucleotide may be methylated to form 5-methylcytosine"
ggttaatgcatctctaccaactaacctagaagtcagcaagcccatcatctctaaccaccacgttttggcaaaagggacattactatttgcctaatttagtttagatggtaagcctaaaaaag

SEQ ID NO: 11205 - DNA, 122 bp, Homo sapiens
  misc_feature (61)..(62): /note="This region represents a CpG dinucleotide"
  misc_feature (61)..(61): /note="Nucleotide may be methylated to form 5-methylcytosine"
tgagaagaggaaaggagatgtccatgcaggcgcctctgcacacagaaagcactcagtaaacgctgtttccccgcttccccctatacaaaggtgaggaactctcattgttcacttggtttctg

SEQ ID NO: 11206 - DNA, 122 bp, Homo sapiens
  misc_feature (61)..(62): /note="This region represents a CpG dinucleotide"
  misc_feature (61)..(61): /note="Nucleotide may be methylated to form 5-methylcytosine"
tgcctataccctcagtaaggaaactgaaacccagaaaggctaaaaggcacttgcctcggccgagccagagccatgacccacagcgtcccctgggtttctaggaaattttctgattccagaac

SEQ ID NO: 11207 - DNA, 122 bp, Homo sapiens
  misc_feature (61)..(62): /note="This region represents a CpG dinucleotide"
  misc_feature (61)..(61): /note="Nucleotide may be methylated to form 5-methylcytosine"
gggagatttggaggaagctttctacgtcctaggaggctgagatcccacggagccggtttacggttgagagcagacagtttcgagtagatagcgctggaagagacacgaagaatctctcttgc

SEQ ID NO: 11208 - DNA, 122 bp, Homo sapiens
  misc_feature (61)..(62): /note="This region represents a CpG dinucleotide"
  misc_feature (61)..(61): /note="Nucleotide may be methylated to form 5-methylcytosine"
acatgccatgtattttccagagagactgtgaccttaagtgatcaacccataactatgcagcgaagcatgggagactaggaggagccctgtgcttttgtatctaaagcttatcgccatctcgc

SEQ ID NO: 11209 - DNA, 122 bp, Homo sapiens
  misc_feature (61)..(62): /note="This region represents a CpG dinucleotide"
  misc_feature (61)..(61): /note="Nucleotide may be methylated to form 5-methylcytosine"
ttgttcttgccctggtcctttctaaagaaccacaaaggtggcttgctttcttggcaagtacgtaatgaattcaggaagtagccatgactctttcttttttatcgtaatgtgagtttagcctg

SEQ ID NO: 11210 - DNA, 122 bp, Homo sapiens
  misc_feature (61)..(62): /note="This region represents a CpG dinucleotide"
  misc_feature (61)..(61): /note="Nucleotide may be methylated to form 5-methylcytosine"
atcgagaggccaaaggctggtggcaagtgcacggggcacagcggagtctgtcctgtgacgcgcaagtctgagggtctgggcggcgggcggctgggtctgtgcatttctggttgcaccgcggc

SEQ ID NO: 11211 - DNA, 122 bp, Homo sapiens
  misc_feature (61)..(62): /note="This region represents a CpG dinucleotide"
  misc_feature (61)..(61): /note="Nucleotide may be methylated to form 5-methylcytosine"
gctgcgactctccggctcgctggctccagatgtcacgaggcctgggagtttctctgtctgcgtgagggatgggaaagctggaggcagaggccagctggagcttctggggctcccgttttaat

SEQ ID NO: 11212 - DNA, 122 bp, Homo sapiens
  misc_feature (61)..(62): /note="This region represents a CpG dinucleotide"
  misc_feature (61)..(61): /note="Nucleotide may be methylated to form 5-methylcytosine"
agttgtcaaaacaaatacttcaccttcaagttaagatgtaaggttttgtgctgtttctggcgagctgctgaactggcaggaaaggaataaaccagaaacaataaatcagaagcaatttgctt

SEQ ID NO: 11213 - DNA, 122 bp, Homo sapiens
  misc_feature (61)..(62): /note="This region represents a CpG dinucleotide"
  misc_feature (61)..(61): /note="Nucleotide may be methylated to form 5-methylcytosine"
gaacccgcgcatctgaggaaagctaaacatttcacctgtagagtcggctgccctggccctcggaggcccacctttggccccagagtccctgaatcaatgataattaacatttttaaaaaatt

SEQ ID NO: 11214 - DNA, 122 bp, Homo sapiens
  misc_feature (61)..(62): /note="This region represents a CpG dinucleotide"
  misc_feature (61)..(61): /note="Nucleotide may be methylated to form 5-methylcytosine"
aatgaaaagtcttagtattaaattattatattctgacattatgtctccaggttagctccacgcagaggcagctgacaaacacagcttcagcaaaagtcatgatccatttatggttcactgtc

SEQ ID NO: 11215 - DNA, 122 bp, Homo sapiens
  misc_feature (61)..(62): /note="This region represents a CpG dinucleotide"
  misc_feature (61)..(61): /note="Nucleotide may be methylated to form 5-methylcytosine"
ctcgtgacctaaacatctcccaaaaggccccacctgcccacactgttgcattggagattacgttttcaacataagaattgagggggacacactgagaccgttaacacccattaaacacaaat

SEQ ID NO: 11216 - DNA, 122 bp, Homo sapiens
  misc_feature (61)..(62): /note="This region represents a CpG dinucleotide"
  misc_feature (61)..(61): /note="Nucleotide may be methylated to form 5-methylcytosine"
gaactagaagagcacatttgcagctaccactgtaatagctgtaataagacaagaatcatccgtgtatgatcaaaaacaatgggaggagtgacactgtgcacaccagcagggcaggaagctct

SEQ ID NO: 11217 - DNA, 122 bp, Homo sapiens
  misc_feature (61)..(62): /note="This region represents a CpG dinucleotide"
  misc_feature (61)..(61): /note="Nucleotide may be methylated to form 5-methylcytosine"
ggataggcagtgaggacagacttgcttccaagctgggtctgacctggagactcctcccagcgtcgttcctgcctagggcgaggggcgtcacagcgaagcacagatgctcaagtcactggtgg

SEQ ID NO: 11218 - DNA, 122 bp, Homo sapiens
  misc_feature (61)..(62): /note="This region represents a CpG dinucleotide"
  misc_feature (61)..(61): /note="Nucleotide may be methylated to form 5-methylcytosine"
caagaatgactcagttttgtgcttagttgtctaggcaatggtggcagaatgaataagaatcgggaatcaggatagaagttgaggaaggagctgaatttaggcagaaagatgacaaatttgtt

SEQ ID NO: 11219 - DNA, 122 bp, Homo sapiens
  misc_feature (61)..(62): /note="This region represents a CpG dinucleotide"
  misc_feature (61)..(61): /note="Nucleotide may be methylated to form 5-methylcytosine"
agaaaacagatacccctatttcctgctaagtctggtcaaggcatactcagtctgaaacaacggtttgatgtccttgtacttatcctaattacatgggcccactgacctgtgagatttgctat

SEQ ID NO: 11220 - DNA, 122 bp, Homo sapiens
  misc_feature (61)..(62): /note="This region represents a CpG dinucleotide"
  misc_feature (61)..(61): /note="Nucleotide may be methylated to form 5-methylcytosine"
actcttgttaaatattttgcatatcacctctattggcaaaccagtatttccttttctctgcgttatcactttctctttcctctctctgctcccctgtcctctccttttacctcccttttctt

SEQ ID NO: 11221 - DNA, 122 bp, Homo sapiens
  misc_feature (61)..(62): /note="This region represents a CpG dinucleotide"
  misc_feature (61)..(61): /note="Nucleotide may be methylated to form 5-methylcytosine"
acaggcgtgagccaccgcacctggccgaccagtaacttttaaaactggcaagctgccaagcgactctggggacactgaggttgggcgtctctggccctggcctttgccgtcatgacactgtg

SEQ ID NO: 11222 - DNA, 122 bp, Homo sapiens
  misc_feature (61)..(62): /note="This region represents a CpG dinucleotide"
  misc_feature (61)..(61): /note="Nucleotide may be methylated to form 5-methylcytosine"
gaaatctgaggcgcgggcgggcaccgtgccagggctgggcgggggaggggctgccaggcccgcccgtcccagcagctgccagcccgccccgagccgccagcccagatggtgcccatctgctg

SEQ ID NO: 11223 - DNA, 122 bp, Homo sapiens
  misc_feature (61)..(62): /note="This region represents a CpG dinucleotide"
  misc_feature (61)..(61): /note="Nucleotide may be methylated to form 5-methylcytosine"
cagccacgcatccccaaatccctttacctctaaaacctgtgggacaacaaatgtttattgcgttaaactttggggtgattgttatgcagccacagagttctaataaactgtcggacatagat

SEQ ID NO: 11224 - DNA, 122 bp, Homo sapiens
  misc_feature (61)..(62): /note="This region represents a CpG dinucleotide"
  misc_feature (61)..(61): /note="Nucleotide may be methylated to form 5-methylcytosine"
ctcgaattcctgacctgttgatccacctgcctcggcctcccaaagcgccgggattacaggcgtgagccgctgcgcctagcctgtctgtagtctgtgtaatactatgactttggttttctcag

SEQ ID NO: 11225 - DNA, 122 bp, Homo sapiens
  misc_feature (61)..(62): /note="This region represents a CpG dinucleotide"
  misc_feature (61)..(61): /note="Nucleotide may be methylated to form 5-methylcytosine"
caacagtgtaaatggtaccaactgtcactgaataaaaggccagacagctgaaatggcccacgggaatttgaagaaactactggccctggcagcagcaagatatcctgaacctagtgcctggt

SEQ ID NO: 11226 - DNA, 122 bp, Homo sapiens
  misc_feature (61)..(62): /note="This region represents a CpG dinucleotide"
  misc_feature (61)..(61): /note="Nucleotide may be methylated to form 5-methylcytosine"
agaagggtttacttcgcttgtttcatccttgcttctaatttcttcttgacttcagttcatcgtacagacagccactgagttaactcttctccaagcagtagttggcttctgggatgatgctg

SEQ ID NO: 11227 - DNA, 122 bp, Homo sapiens
  misc_feature (61)..(62): /note="This region represents a CpG dinucleotide"
  misc_feature (61)..(61): /note="Nucleotide may be methylated to form 5-methylcytosine"
gtaagttcctaccaacttggcagcatactcctggtgaggtgaagctcctcaacattactacgtcttaccaaaatcatggttttgtatctagacttagaaatagattatctgaattctccatc

SEQ ID NO: 11228 - DNA, 122 bp, Homo sapiens
  misc_feature (61)..(62): /note="This region represents a CpG dinucleotide"
  misc_feature (61)..(61): /note="Nucleotide may be methylated to form 5-methylcytosine"
gggcggcaggaaggggaggcggcggccactcccggccaagccctggagtgaagaaatctccgggacttccagtaattgccgtccagccacacgcaggcacttgtgcaatcccgtgggggaga

SEQ ID NO: 11229 - DNA, 122 bp, Homo sapiens
  misc_feature (61)..(62): /note="This region represents a CpG dinucleotide"
  misc_feature (61)..(61): /note="Nucleotide may be methylated to form 5-methylcytosine"
cattacagtcaacgggtgttgatttttacacattctctgctacccatacttggttaggaccgtggttttcagctcaggggtgcttttgctccccagagatattcggcaatgtccagagacat

SEQ ID NO: 11230 - DNA, 122 bp, Homo sapiens
  misc_feature (61)..(62): /note="This region represents a CpG dinucleotide"
  misc_feature (61)..(61): /note="Nucleotide may be methylated to form 5-methylcytosine"
cccagcccagcaactccatggtaatatctctacccactactgactagtgacctgtttcaccggcccagcaagaagatgacccagagccttagccaaagacaggcaccctccagcttccttct

SEQ ID NO: 11231 - DNA, 122 bp, Homo sapiens
  misc_feature (61)..(62): /note="This region represents a CpG dinucleotide"
  misc_feature (61)..(61): /note="Nucleotide may be methylated to form 5-methylcytosine"
tgtagcaataagtaatagtatttcgtaataagtagtaagtaattgctacttgccagacaccgttctgagggcttcttgtatgttaactcatttaatcttcacaacaaccttttaaggaaggt

SEQ ID NO: 11232 - DNA, 122 bp, Homo sapiens
  misc_feature (61)..(62): /note="This region represents a CpG dinucleotide"
  misc_feature (61)..(61): /note="Nucleotide may be methylated to form 5-methylcytosine"
gaatttttctagccattcatgtgcacacagaaaccaaaaccctccgcgcaggttcttctgcgcactgcgctgctcccagcgcagaggggccgtgttccgggaacacgtttcctgctctaaaa

SEQ ID NO: 11233 - DNA, 122 bp, Homo sapiens
  misc_feature (61)..(62): /note="This region represents a CpG dinucleotide"
  misc_feature (61)..(61): /note="Nucleotide may be methylated to form 5-methylcytosine"
agtgaaaatgaactcagggcaagttttctaaataatctcactatagcgcacacacatgcacgcacacacactcacacacactcacactttttagtatactgaaggatattttgtaaagtgct

SEQ ID NO: 11234 - DNA, 122 bp, Homo sapiens
  misc_feature (61)..(62): /note="This region represents a CpG dinucleotide"
  misc_feature (61)..(61): /note="Nucleotide may be methylated to form 5-methylcytosine"
catggccccacagtgagtggcagatctgagactcagcgctagcctttgtgacacataactcgtgaccagcaggtagtgctacccgattgaaaaaatgtgagacttaaagggatgcatgtgtc

SEQ ID NO: 11235 - DNA, 122 bp, Homo sapiens
  misc_feature (61)..(62): /note="This region represents a CpG dinucleotide"
  misc_feature (61)..(61): /note="Nucleotide may be methylated to form 5-methylcytosine"
agatgatttggaccaactctatgctaagacaacttgaaatcgaggcaaaacatacacacacgtatcactgtcatcttcattatcatcatcatctaattgaaggcattggaaagctcttaatg

SEQ ID NO: 11236 - DNA, 122 bp, Homo sapiens
  misc_feature (61)..(62): /note="This region represents a CpG dinucleotide"
  misc_feature (61)..(61): /note="Nucleotide may be methylated to form 5-methylcytosine"
ataaaatcttggcagtcctgaggtagaaggtagccgagaaaaggtgagaagcaatgaggacgaattgagtgagatggtttaattatgatgtgttttatgtaccaagatctctgaggatacag

SEQ ID NO: 11237 - DNA, 122 bp, Homo sapiens
  misc_feature (61)..(62): /note="This region represents a CpG dinucleotide"
  misc_feature (61)..(61): /note="Nucleotide may be methylated to form 5-methylcytosine"
tgctttattcaatgggttcttgcagcccaagggatgccttagccctgatattgtagtattcgtaggctgattcatgatccctgccgacatatccttaaaagactggatagatgctacacaca

SEQ ID NO: 11238 - DNA, 122 bp, Homo sapiens
  misc_feature (61)..(62): /note="This region represents a CpG dinucleotide"
  misc_feature (61)..(61): /note="Nucleotide may be methylated to form 5-methylcytosine"
gttatgactgattgctctacctggaaacttactgagctgtgacatgtctgtgtctcccatcgaagcaattgtgaaacacacattcagagacacccaatttacatgactggcaacactgtgac

SEQ ID NO: 11239 - DNA, 122 bp, Homo sapiens
  misc_feature (61)..(62): /note="This region represents a CpG dinucleotide"
  misc_feature (61)..(61): /note="Nucleotide may be methylated to form 5-methylcytosine"
aggaagagagaagccagaggacctcttccgttctctgcttctggtgcctgtcgggtatcacgttcttgcatcacctctttagtatcagtgtctatcagaatggtcttctgtggtttcagctt

SEQ ID NO: 11240 - DNA, 122 bp, Homo sapiens
  misc_feature (61)..(62): /note="This region represents a CpG dinucleotide"
  misc_feature (61)..(61): /note="Nucleotide may be methylated to form 5-methylcytosine"
cttatgggtaagagccagctgtggccagtgaggctgggtatgtacttaatccttttttaacgggaatatctttctgttgcataaggcaatgggctgatttttggattgctcagtgttttgag

SEQ ID NO: 11241 - DNA, 122 bp, Homo sapiens
  misc_feature (61)..(62): /note="This region represents a CpG dinucleotide"
  misc_feature (61)..(61): /note="Nucleotide may be methylated to form 5-methylcytosine"
ggagggggaggatgggtttgcaggatgattcaggaatcagcagaaccaagtctttggcatcgtgaaatatcttattggaagaggctgagccagaggtaccaggacttaatccaggtaggtgg

SEQ ID NO: 11242 - DNA, 122 bp, Homo sapiens
  misc_feature (61)..(62): /note="This region represents a CpG dinucleotide"
  misc_feature (61)..(61): /note="Nucleotide may be methylated to form 5-methylcytosine"
cgtgatccgcccatctcggcctcccgaagtgctgggattacaggcgtgagccactgcacccggccgattggtgtttcttaactaggctggtttcggtcactgcatgacctctgagtacgatg

SEQ ID NO: 11243 - DNA, 122 bp, Homo sapiens
  misc_feature (61)..(62): /note="This region represents a CpG dinucleotide"
  misc_feature (61)..(61): /note="Nucleotide may be methylated to form 5-methylcytosine"
aagcaagtgagaaaagaaaacagaacaggggtgaagggtgtggtggttgggagaaggaggcgtgggtgagaaaaatttcactgtagtaaacgtccatcataatcaaagagggcttatcttct

SEQ ID NO: 11244 - DNA, 122 bp, Homo sapiens
  misc_feature (61)..(62): /note="This region represents a CpG dinucleotide"
  misc_feature (61)..(61): /note="Nucleotide may be methylated to form 5-methylcytosine"
ttgtttctatttttgataaagatggattgcaaataagccatccacaaacaattttacaaacgagtttgcaccaatatttgtattgggttactacagagtggctccttctatcactgtgtcat

SEQ ID NO: 11245 - DNA, 122 bp, Homo sapiens
  misc_feature (61)..(62): /note="This region represents a CpG dinucleotide"
  misc_feature (61)..(61): /note="Nucleotide may be methylated to form 5-methylcytosine"
taaaaaggaaagaagtcctgtcacatgttacaatatggatgaaccttgaggaaccatccacggatgcttgaatgaataaacaaaacgtggtgtatacatacgatggactagtattcagcctt

SEQ ID NO: 11246 - DNA, 122 bp, Homo sapiens
  misc_feature (61)..(62): /note="This region represents a CpG dinucleotide"
  misc_feature (61)..(61): /note="Nucleotide may be methylated to form 5-methylcytosine"
ctggccttccttctgtgaattgggctgggaaagtgtcccgagttcctgacagctgctctacgtggaagggcagaagcacccacaaagtgtgctggtctggtggtgctggcccccctggcttc

SEQ ID NO: 11247 - DNA, 122 bp, Homo sapiens
  misc_feature (61)..(62): /note="This region represents a CpG dinucleotide"
  misc_feature (61)..(61): /note="Nucleotide may be methylated to form 5-methylcytosine"
caatcaggatttatcacagaagcggaatcactgtgagtgatatggagtaaggaggtattacgaggattatactttaatctatacagaagctggtggaagaggccatgtatctggaactgatt

SEQ ID NO: 11248 - DNA, 122 bp, Homo sapiens
  misc_feature (61)..(62): /note="This region represents a CpG dinucleotide"
  misc_feature (61)..(61): /note="Nucleotide may be methylated to form 5-methylcytosine"
ctgcctagaactgaatcgaacatgaggatgagtcagtgtcaagactcccagtggggccatcggatcattactgcatgatcgtcttaagcctttgttagtgaatccctcagactcacgccttc

SEQ ID NO: 11249 - DNA, 122 bp, Homo sapiens
  misc_feature (61)..(62): /note="This region represents a CpG dinucleotide"
  misc_feature (61)..(61): /note="Nucleotide may be methylated to form 5-methylcytosine"
tagagagaagatcgtcatatgctctccgtaggttacctgtctatttagaagcaaacctctcgtcacccgctgcggagcatctcgatgttagaaaccacgccactatttttagtgtgtgtcct

SEQ ID NO: 11250 - DNA, 122 bp, Homo sapiens
  misc_feature (61)..(62): /note="This region represents a CpG dinucleotide"
  misc_feature (61)..(61): /note="Nucleotide may be methylated to form 5-methylcytosine"
ggaaccgtggaagggggcaaaatccacccactggaggggaggcaggagggtgcgggggggcgtgtgggccgtctacctaggtccagcagccaggctgctgaggagtacccccgccaaaggct

SEQ ID NO: 11251 - DNA, 122 bp, Homo sapiens
  misc_feature (61)..(62): /note="This region represents a CpG dinucleotide"
  misc_feature (61)..(61): /note="Nucleotide may be methylated to form 5-methylcytosine"
acttcttagttatgtttacaaactgtatcatctgtcacatcaccaaatctttaacagtctcgttcctcaaaacataaataatccatgtattctgaacaagtgtttggatgcatgttttataa

SEQ ID NO: 11252 - DNA, 122 bp, Homo sapiens
  misc_feature (61)..(62): /note="This region represents a CpG dinucleotide"
  misc_feature (61)..(61): /note="Nucleotide may be methylated to form 5-methylcytosine"
gttatttaaccaagtgctagcattaacatagatgagtaaaaattacatttttagcagctgcgttaagaaggaatttaggacttgagcttactcattttctaatggccggtttctaatcagag

SEQ ID NO: 11253 - DNA, 122 bp, Homo sapiens
  misc_feature (61)..(62): /note="This region represents a CpG dinucleotide"
  misc_feature (61)..(61): /note="Nucleotide may be methylated to form 5-methylcytosine"
tgacccccactgagcgtgtccctcaaagtggaccttcctaagcatcggcgctttgctttgcgctgggtggtgcggctgagtcactaattagcagtgagagcctgggctgtatctcctaccaa

SEQ ID NO: 11254 - DNA, 122 bp, Homo sapiens
  misc_feature (61)..(62): /note="This region represents a CpG dinucleotide"
  misc_feature (61)..(61): /note="Nucleotide may be methylated to form 5-methylcytosine"
tccaagacatactaggatccatttcaacctgatgattctatccttacctcagtaccacatcgggagcctgaaaaacaggttttcaagctgcacaggggcaacataaccctaagactcaatgc

SEQ ID NO: 11255 - DNA, 122 bp, Homo sapiens
  misc_feature (61)..(62): /note="This region represents a CpG dinucleotide"
  misc_feature (61)..(61): /note="Nucleotide may be methylated to form 5-methylcytosine"
ggcagaaacagtagattgtgtgctctgtgctgtgaggaatgtatcccctgcactgcctgccgtgtgcccagcacttagcacagagcctgcccttcacaggcgtttacaaatggacccagtgg

SEQ ID NO: 11256 - DNA, 122 bp, Homo sapiens
  misc_feature (61)..(62): /note="This region represents a CpG dinucleotide"
  misc_feature (61)..(61): /note="Nucleotide may be methylated to form 5-methylcytosine"
ttcaaagtagttttaccagtttacacttaagccagcagcgcgtgaatggttacttcatatcgtagtcaatacttgataatctacattttagccattctggtgagcgtgtaatggtatatcat

SEQ ID NO: 11257 - DNA, 122 bp, Homo sapiens
  misc_feature (61)..(62): /note="This region represents a CpG dinucleotide"
  misc_feature (61)..(61): /note="Nucleotide may be methylated to form 5-methylcytosine"
attctttctaatcctctaaccctccccactcccccaactcccacaccctacccccaccaacgttcctggaattttggacttagctatttttaaaaccgtcaactcagtagccacctccctcc

SEQ ID NO: 11258 - DNA, 122 bp, Homo sapiens
  misc_feature (61)..(62): /note="This region represents a CpG dinucleotide"
  misc_feature (61)..(61): /note="Nucleotide may be methylated to form 5-methylcytosine"
tggaggccggtgtgagagcggcggcggggcctacctgtgcgtctgcccagagagcttcttcggctaccactgcgagacaggtagggcggcaggcctgcctgctccccgccctctgcccgcct

SEQ ID NO: 11259 - DNA, 122 bp, Homo sapiens
  misc_feature (61)..(62): /note="This region represents a CpG dinucleotide"
  misc_feature (61)..(61): /note="Nucleotide may be methylated to form 5-methylcytosine"
agcgacagattttgtggccctccgtaggtgtttccatgtgaatgatgggctgagcacacacgagaaacctgagtgactgaaatgcaaggatgcacatgccccctgcatgcaggacacatgca

SEQ ID NO: 11260 - DNA, 122 bp, Homo sapiens
  misc_feature (61)..(62): /note="This region represents a CpG dinucleotide"
  misc_feature (61)..(61): /note="Nucleotide may be methylated to form 5-methylcytosine"
ggaggtgtggagagtccccgagcttcctgatgagaagtcaccctctgccccacctctctgcgcccaggcaatggcaggctgccacccagcatccaggtcagcctgcatgtccatttctgggc

SEQ ID NO: 11261 - DNA, 122 bp, Homo sapiens
  misc_feature (61)..(62): /note="This region represents a CpG dinucleotide"
  misc_feature (61)..(61): /note="Nucleotide may be methylated to form 5-methylcytosine"
ccagtgctgacaatcagagcctacattccacagggcagcagatctgctgcctgggtaaggcggcaccatggcaacaggcaggttgctaggaaaccaagagaggataacccctggaggagcgg

SEQ ID NO: 11262 - DNA, 122 bp, Homo sapiens
  misc_feature (61)..(62): /note="This region represents a CpG dinucleotide"
  misc_feature (61)..(61): /note="Nucleotide may be methylated to form 5-methylcytosine"
aaaattctttggtaggaggtagggagtggctcttcctgctcatccttggatgtttagccgcgtccctgggcctctaaccactagatgtcagtagcataccttggccccggttttgacaacca

SEQ ID NO: 11263 - DNA, 122 bp, Homo sapiens
  misc_feature (61)..(62): /note="This region represents a CpG dinucleotide"
  misc_feature (61)..(61): /note="Nucleotide may be methylated to form 5-methylcytosine"
aatcacacaacaaacacatgttcacatgcatactagtacaaattgagttccttcagtcaacgaagtgagttacacctgagggcacttgaagcccagtgtgaagtgacttgatcaagattacc

SEQ ID NO: 11264 - DNA, 122 bp, Homo sapiens
  misc_feature (61)..(62): /note="This region represents a CpG dinucleotide"
  misc_feature (61)..(61): /note="Nucleotide may be methylated to form 5-methylcytosine"
cccaagcactccttcgtgaaccactacatgagcgaccccacctactacaactcatggaagcgcagggcccagggccgcgcacctgcgccgcacaggtacgaggcggtggcgggctccgaggc

SEQ ID NO: 11265 - DNA, 122 bp, Homo sapiens
  misc_feature (61)..(62): /note="This region represents a CpG dinucleotide"
  misc_feature (61)..(61): /note="Nucleotide may be methylated to form 5-methylcytosine"
ggctttctgtggtgcattttggcagccctgtgtggatgtgtcagaggctgtctgaccacgcgtgaggctcgttgatggtgataggtttctatgtgtgacgctaaaacgccaggaaagaaaag

SEQ ID NO: 11266 - DNA, 122 bp, Homo sapiens
  misc_feature (61)..(62): /note="This region represents a CpG dinucleotide"
  misc_feature (61)..(61): /note="Nucleotide may be methylated to form 5-methylcytosine"
taagtattaaagccagaatgcaaacaagcccaagactgagtccaaaaagcctaggctcttcgccactgccttctactctgagcactcttcttcttgtttgcctttcccctggggatccctga

SEQ ID NO: 11267 - DNA, 122 bp, Homo sapiens
  misc_feature (61)..(62): /note="This region represents a CpG dinucleotide"
  misc_feature (61)..(61): /note="Nucleotide may be methylated to form 5-methylcytosine"
ccaattctttcagtgcttcagctcttcagccagcccagttttgtttagatttgtgactaacgaagactttttttttttggtcagaacacgaagaggagctggaccaggaatttgagctggag

SEQ ID NO: 11268 - DNA, 122 bp, Homo sapiens
  misc_feature (61)..(62): /note="This region represents a CpG dinucleotide"
  misc_feature (61)..(61): /note="Nucleotide may be methylated to form 5-methylcytosine"
atgtcccagggccctggcacatcctggaaatttcaaccagggagtgcaaatgacctgccacgcttggttgcaggaatctgtcattttcagggcattttcgcttcaagagaggcatgaaattg

SEQ ID NO: 11269 - DNA, 122 bp, Homo sapiens
  misc_feature (61)..(62): /note="This region represents a CpG dinucleotide"
  misc_feature (61)..(61): /note="Nucleotide may be methylated to form 5-methylcytosine"
cttacagtcaacagagggttagccttccataaatgagaaatccaaaaaagaataatgccacgtatttcaggaatgtcggttagaggtttggccttcttgggaagtgtcacaatgctgagtct

SEQ ID NO: 11270 - DNA, 122 bp, Homo sapiens
  misc_feature (61)..(62): /note="This region represents a CpG dinucleotide"
  misc_feature (61)..(61): /note="Nucleotide may be methylated to form 5-methylcytosine"
aaacattgataggattaaataacagtgcagagctctacttccgggcatcacagaacatagcggggaagaggtcatagagttcagtgtttctccaagtgttatgtcacctgttgggaattgca

SEQ ID NO: 11271 - DNA, 122 bp, Homo sapiens
  misc_feature (61)..(62): /note="This region represents a CpG dinucleotide"
  misc_feature (61)..(61): /note="Nucleotide may be methylated to form 5-methylcytosine"
gtctagttcttagtacccttagaattgagataattcattatttgtcactcaggtaggtttcgagtgaactgatatatttaattagatccttaaagcccataggatttatactggtcatttct

SEQ ID NO: 11272 - DNA, 122 bp, Homo sapiens
  misc_feature (61)..(62): /note="This region represents a CpG dinucleotide"
  misc_feature (61)..(61): /note="Nucleotide may be methylated to form 5-methylcytosine"
aaagcggtgtgaaggctccgctgtcgccctgggcccagcccgcgcgcctcgcacgttgtgcgtctaccccacagccaatcagtggctgcacaggcctctttagtagccaatcagcagcttca

SEQ ID NO: 11273 - DNA, 122 bp, Homo sapiens
  misc_feature (61)..(62): /note="This region represents a CpG dinucleotide"
  misc_feature (61)..(61): /note="Nucleotide may be methylated to form 5-methylcytosine"
gcagcctatgcctttagttgaatggggaaaaggtcatatgtcagaaaggaggatgagaagcgtattacaaaaaaatgctttttgggggaaaattttggaatataatagtagtctctcttatt

SEQ ID NO: 11274 - DNA, 122 bp, Homo sapiens
  misc_feature (61)..(62): /note="This region represents a CpG dinucleotide"
  misc_feature (61)..(61): /note="Nucleotide may be methylated to form 5-methylcytosine"
accttgtgatccgcccgcctcggcctcccaaagtggtgggattacaagtgtgagccaccgcggctggctggtgtcttcatctgtaaagagagaatgacacatccctcaggggcatgctgtga

SEQ ID NO: 11275 - DNA, 122 bp, Homo sapiens
  misc_feature (61)..(62): /note="This region represents a CpG dinucleotide"
  misc_feature (61)..(61): /note="Nucleotide may be methylated to form 5-methylcytosine"
gggaacatgcaagagctcgccgggcggccctggagaatgcgaagccggaggagaccggttcggcctgctgcagtcttcctaggaaccctcgactcctgtgtgggctaggatgagggtcctct

SEQ ID NO: 11276 - DNA, 122 bp, Homo sapiens
  misc_feature (61)..(62): /note="This region represents a CpG dinucleotide"
  misc_feature (61)..(61): /note="Nucleotide may be methylated to form 5-methylcytosine"
aaccttcacaggggccttgaccttctatgactctaccccacggaaatcagcagaagcagacggagatggcccctgaagcactttggtgtgtaatgtcatttaatcctcagaatgaccccatg

SEQ ID NO: 11277 - DNA, 122 bp, Homo sapiens
  misc_feature (61)..(62): /note="This region represents a CpG dinucleotide"
  misc_feature (61)..(61): /note="Nucleotide may be methylated to form 5-methylcytosine"
atgctttttcaccattgagtatgatgttagctatggacttatcttttgtggtttgtattacgttaagttccttctatgcctaatttgttgagagttttttttggtcacgaaaggtaccgaat

SEQ ID NO: 11278 - DNA, 122 bp, Homo sapiens
  misc_feature (61)..(62): /note="This region represents a CpG dinucleotide"
  misc_feature (61)..(61): /note="Nucleotide may be methylated to form 5-methylcytosine"
cctctctacatctccattcttattttatagattgccgttctttggtcttcatggcaggtacgcagcccccactgcttgtgagtgtatgtgacacagggccagctacctcaaggaagtgactc

SEQ ID NO: 11279 - DNA, 122 bp, Homo sapiens
  misc_feature (61)..(62): /note="This region represents a CpG dinucleotide"
  misc_feature (61)..(61): /note="Nucleotide may be methylated to form 5-methylcytosine"
aaattaacattgacaagttagtctgtaacacctggggcaatccaatattgtacaactgtacggaaattgcagacttgacttcttcaattgcaaggtcaatggtgaaaaaaactgactctgct

SEQ ID NO: 11280 - DNA, 122 bp, Homo sapiens
  misc_feature (61)..(62): /note="This region represents a CpG dinucleotide"
  misc_feature (61)..(61): /note="Nucleotide may be methylated to form 5-methylcytosine"
ttgaaagaattgtccttaaaaaataacctgtgcatacgtatgtccatccaggcatgcatgcgtgtttgtatacacacatatgcacacggaatagccatgtacattgaagcaccaaactaggc

SEQ ID NO: 11281 - DNA, 122 bp, Homo sapiens
  misc_feature (61)..(62): /note="This region represents a CpG dinucleotide"
  misc_feature (61)..(61): /note="Nucleotide may be methylated to form 5-methylcytosine"
gcacgaagagggcttctcagtcacactagccggtgaggaggagctggtcaggatgagtcccgacctgcaggcaccagctcccatggtgagtgtgagtcacacttgcccagcttcccctctgc

SEQ ID NO: 11282 - DNA, 122 bp, Homo sapiens
  misc_feature (61)..(62): /note="This region represents a CpG dinucleotide"
  misc_feature (61)..(61): /note="Nucleotide may be methylated to form 5-methylcytosine"
ccgctgacccaggcacccatcctgtttacgcagccctagaggggcacgtgtgagtataagcgcctatgaggggcgggactgggccagctcaccccacccatcccccaggccaggggccaggg

SEQ ID NO: 11283 - DNA, 122 bp, Homo sapiens
  misc_feature (61)..(62): /note="This region represents a CpG dinucleotide"
  misc_feature (61)..(61): /note="Nucleotide may be methylated to form 5-methylcytosine"
atcaccacattagggaccgtaaacaaagtactcagcaaggcttaaacacaattaagggaccggagacaatttggcaagaggaaatcccttaaatgctgctggattttactctgttgtcctcc

SEQ ID NO: 11284 - DNA, 122 bp, Homo sapiens
  misc_feature (61)..(62): /note="This region represents a CpG dinucleotide"
  misc_feature (61)..(61): /note="Nucleotide may be methylated to form 5-methylcytosine"
taatctcttgtttcttaaagaggcacttttgtatacctgcctgattttcaaagctgtccccgattgttaggtaaactggacatgtgctgaggaatcgaatggggcacagtttaccaacttct

SEQ ID NO: 11285 - DNA, 122 bp, Homo sapiens
  misc_feature (61)..(62): /note="This region represents a CpG dinucleotide"
  misc_feature (61)..(61): /note="Nucleotide may be methylated to form 5-methylcytosine"
ctgccgtcccctcttgggtggaggggctgtgatgctctatccttacaagccccagcaagacgcctggcccttagagaagtactcacaagaggcttgcagaatcgaattagatcttaagatag

SEQ ID NO: 11286 - DNA, 122 bp, Homo sapiens
  misc_feature (61)..(62): /note="This region represents a CpG dinucleotide"
  misc_feature (61)..(61): /note="Nucleotide may be methylated to form 5-methylcytosine"
ctgattaggcagccgcgtggcgtggcatcagcatgtgtgtcgcagactgttagctgcccgcgctggggcccacttgagctgcagaaacacacaatggtgcctggggagatggcggctgcagc

SEQ ID NO: 11287 - DNA, 122 bp, Homo sapiens
  misc_feature (61)..(62): /note="This region represents a CpG dinucleotide"
  misc_feature (61)..(61): /note="Nucleotide may be methylated to form 5-methylcytosine"
tgactttcacaatgccatagtcactacgaagaacaattacagcagctacaagctgaaaaacgcagagctcacacagggctgggagtcaatggagtccttataagccaaagtagagatctcat

SEQ ID NO: 11288 - DNA, 122 bp, Homo sapiens
  misc_feature (61)..(62): /note="This region represents a CpG dinucleotide"
  misc_feature (61)..(61): /note="Nucleotide may be methylated to form 5-methylcytosine"
aggcagctggagtgtgaatttccctgagggtttccacttccctgtggttcaggctggggccgtccccgctctcctggccccagagctgccccactaggcagggaaagcctctggaatgaggg

SEQ ID NO: 11289 - DNA, 122 bp, Homo sapiens
  misc_feature (61)..(62): /note="This region represents a CpG dinucleotide"
  misc_feature (61)..(61): /note="Nucleotide may be methylated to form 5-methylcytosine"
ctggctggagtacagtggcttgatcatagctcactgcagccttgaacgcgtaagtcctcccgcctcaacctcacaaccagctgggacctacaggcacatactgccatgcttggttaattttt

SEQ ID NO: 11290 - DNA, 122 bp, Homo sapiens
  misc_feature (61)..(62): /note="This region represents a CpG dinucleotide"
  misc_feature (61)..(61): /note="Nucleotide may be methylated to form 5-methylcytosine"
aacagttggacaaacaaagcagtttctattttgtaagtataaataaattcccccccaccccgctgcgtctcttcgttggatttaaaaagaaaggtatttttgcacagacacaaagctagaga

SEQ ID NO: 11291 - DNA, 122 bp, Homo sapiens
  misc_feature (61)..(62): /note="This region represents a CpG dinucleotide"
  misc_feature (61)..(61): /note="Nucleotide may be methylated to form 5-methylcytosine"
attaccacaccaaaactgtgctcatttcccaaaaagatcttcagcggatttacccacaaacggccttccctcttagccttcccaggccgctcttgtcctgaagtgtggatctggagttcccg

SEQ ID NO: 11292 - DNA, 122 bp, Homo sapiens
  misc_feature (61)..(62): /note="This region represents a CpG dinucleotide"
  misc_feature (61)..(61): /note="Nucleotide may be methylated to form 5-methylcytosine"
tttcagcttccatttttcagtcaaccttccttttttcttagccacagtcataatgagctccgctactctgtggtagctacattttcacagcaataaaacacagcgaaggaacccaaacataa

SEQ ID NO: 11293 - DNA, 122 bp, Homo sapiens
  misc_feature (61)..(62): /note="This region represents a CpG dinucleotide"
  misc_feature (61)..(61): /note="Nucleotide may be methylated to form 5-methylcytosine"
ggtgtgggaaacttgagaggagagccttgcgcagcttcttctgtttacctggtgttggaccgagcatcagcttgctctctaccacactaggaggtagggcggtgggggtttttaactcccca

SEQ ID NO: 11294 - DNA, 122 bp, Homo sapiens
  misc_feature (61)..(62): /note="This region represents a CpG dinucleotide"
  misc_feature (61)..(61): /note="Nucleotide may be methylated to form 5-methylcytosine"
atatgactgtagaccatgtgggaaatagctttcccctttgtgtaatgggacaagcataaccggttagcagttaacatattacatatctattatggtgcaggaacataaaagtaggaggtggt

SEQ ID NO: 11295 - DNA, 122 bp, Homo sapiens
  misc_feature (61)..(62): /note="This region represents a CpG dinucleotide"
  misc_feature (61)..(61): /note="Nucleotide may be methylated to form 5-methylcytosine"
gtaagtatgaattcttagccttcttaaaccctgacctctgcctcttcaactcagggaaaacgcccaggtcctactggtttgatctgttttatgctgcatactctccccaggcagtaagctag

SEQ ID NO: 11296 - DNA, 122 bp, Homo sapiens
  misc_feature (61)..(62): /note="This region represents a CpG dinucleotide"
  misc_feature (61)..(61): /note="Nucleotide may be methylated to form 5-methylcytosine"
tgttagtcagttccttaaaatcatcactctctctctttctggttttctcttgaatacacacgtatacgcacacctccccctctcttatctggagaactccgccttctacaattaccagtggg

SEQ ID NO: 11297 - DNA, 122 bp, Homo sapiens
  misc_feature (61)..(62): /note="This region represents a CpG dinucleotide"
  misc_feature (61)..(61): /note="Nucleotide may be methylated to form 5-methylcytosine"
ccaccccccctttaattgaaactgtgtgcatgcagtgagcgcaggattctagtaatccgacgggaggatccacttaaaagactaaaatccagaaaccccaggaaaaaagaataggaccggcg

SEQ ID NO: 11298 - DNA, 122 bp, Homo sapiens
  misc_feature (61)..(62): /note="This region represents a CpG dinucleotide"
  misc_feature (61)..(61): /note="Nucleotide may be methylated to form 5-methylcytosine"
aaaccagggaggaaccctgaaacgaataggctgtagaggcagaaaggaagtagacactgacgcagggtgtggaggaggacagaatgttcatttggcattcaagccctatcactctggaatca

SEQ ID NO: 11299 - DNA, 122 bp, Homo sapiens
  misc_feature (61)..(62): /note="This region represents a CpG dinucleotide"
  misc_feature (61)..(61): /note="Nucleotide may be methylated to form 5-methylcytosine"
gagccacagaatgttagcttcaggaagccccagatggtagctcaagaactgcaggcattacgctcatggatccatacccaccacgctgtggtctggccacaggccattagaaccgcagcaga

SEQ ID NO: 11300 - DNA, 122 bp, Homo sapiens
  misc_feature (61)..(62): /note="This region represents a CpG dinucleotide"
  misc_feature (61)..(61): /note="Nucleotide may be methylated to form 5-methylcytosine"
aaagccaaagtcacgaagtggctgtggcttcccagcagcaggttctccagtaggagcacacgctcttcagactctggcattcatttccttaactcactcactttaaggccttctgggtgaat

SEQ ID NO: 11301 - DNA, 122 bp, Homo sapiens
  misc_feature (61)..(62): /note="This region represents a CpG dinucleotide"
  misc_feature (61)..(61): /note="Nucleotide may be methylated to form 5-methylcytosine"
tatctcattttgaaacaaatccaagatatcctgtcatttcgtctgtatttcagtttgtatcgctaagagataaggacccttttatagacataaccacaatactattatcacacataaaaaag

SEQ ID NO: 11302 - DNA, 122 bp, Homo sapiens
  misc_feature (61)..(62): /note="This region represents a CpG dinucleotide"
  misc_feature (61)..(61): /note="Nucleotide may be methylated to form 5-methylcytosine"
ggcgatgagcctatagctctcaaatctcacagcttggggaataactcactacagaaaaaccgacctgaatgaaggtgaaggagagaatccacccacgtttacgaaagaccatgccttagcta

SEQ ID NO: 11303 - DNA, 122 bp, Homo sapiens
  misc_feature (61)..(62): /note="This region represents a CpG dinucleotide"
  misc_feature (61)..(61): /note="Nucleotide may be methylated to form 5-methylcytosine"
gccagtacagcctccggaagcagccctacaacaacctgaagcacaagttcccatggctgtcggaggccgggctgcgcctgctgcacttcctgttcatgtacgaccctaagaaaaggtgctga

SEQ ID NO: 11304 - DNA, 122 bp, Homo sapiens
  misc_feature (61)..(62): /note="This region represents a CpG dinucleotide"
  misc_feature (61)..(61): /note="Nucleotide may be methylated to form 5-methylcytosine"
cacaaagaaagacaagaaaaataaaacaggaatgacacttcccttaagcaacttacgttacgcaataaggcatatacaaaaccagttgcagtgtatagtgacgatgatgtacaatatcagag

SEQ ID NO: 11305 - DNA, 122 bp, Homo sapiens
  misc_feature (61)..(62): /note="This region represents a CpG dinucleotide"
  misc_feature (61)..(61): /note="Nucleotide may be methylated to form 5-methylcytosine"
gtaccagctagccctcccattgtaaacaaccatcaaaaatgacaaaacacacaaggcaaccgtattcaggtttcgtaaaataaacacaagactgtaattcctgagagaagagaaactcacca

SEQ ID NO: 11306 - DNA, 122 bp, Homo sapiens
  misc_feature (61)..(62): /note="This region represents a CpG dinucleotide"
  misc_feature (61)..(61): /note="Nucleotide may be methylated to form 5-methylcytosine"
cctctggcttcctgctgccctgaggcctctgcaagcaagggctcttgcctccggggagcacgcccaggaccgtggcaggggctcccaaaggccggggacaggcctgagcaagcggagagccc

SEQ ID NO: 11307 - DNA, 122 bp, Homo sapiens
  misc_feature (61)..(62): /note="This region represents a CpG dinucleotide"
  misc_feature (61)..(61): /note="Nucleotide may be methylated to form 5-methylcytosine"
atcattaccatctcccgcgtggagttctcctcaggtcgtgcgaaacacccccagattcttcgcacagtgtctagatccgaccgcccaacgtttgcctcccagcctgactccctcggccctta

SEQ ID NO: 11308 - DNA, 122 bp, Homo sapiens
  misc_feature (61)..(62): /note="This region represents a CpG dinucleotide"
  misc_feature (61)..(61): /note="Nucleotide may be methylated to form 5-methylcytosine"
attttgaactcctgggctcaagcgattcgccccacccaaggtgttgggattacaggtgtgcgtcaccgcgcctggccagggaacaccaatttatagcaaatcaatcagaagcacaggtcaca

SEQ ID NO: 11309 - DNA, 122 bp, Homo sapiens
  misc_feature (61)..(62): /note="This region represents a CpG dinucleotide"
  misc_feature (61)..(61): /note="Nucleotide may be methylated to form 5-methylcytosine"
agtatgagaagtgaccgaggaaatccagcctgggggattcagcctccgtatcacaggagacgctgctgtgcagtttctgtgcgttcagagcttccacttaatttctcacagtgtgggccttc

SEQ ID NO: 11310 - DNA, 122 bp, Homo sapiens
  misc_feature (61)..(62): /note="This region represents a CpG dinucleotide"
  misc_feature (61)..(61): /note="Nucleotide may be methylated to form 5-methylcytosine"
ctctctccaccctggcacccagagcaaggatgttgctcattagtgactaagtaggaccagcgtctcaggtggcaatctgggagcaagctcagcttcacaatgggggactgtgggttggttgc

SEQ ID NO: 11311 - DNA, 122 bp, Homo sapiens
  misc_feature (61)..(62): /note="This region represents a CpG dinucleotide"
  misc_feature (61)..(61): /note="Nucleotide may be methylated to form 5-methylcytosine"
tagcggatgaagtcaaacgcgcagtccacaaacattgcgctccgggtgaatcctggctcgcgccgatttccagctgctgctactaaattgattgcaactggaatctatctagtgtcagcggc

SEQ ID NO: 11312 - DNA, 122 bp, Homo sapiens
  misc_feature (61)..(62): /note="This region represents a CpG dinucleotide"
  misc_feature (61)..(61): /note="Nucleotide may be methylated to form 5-methylcytosine"
aaggatgttcatcagagcatttcttttgaagagtaaagaaatggacatgaacctgtggtccgttcatacggtggaatacctatgcagctgtaaaaatcagtgtggtagatctccgtatatga

SEQ ID NO: 11313 - DNA, 122 bp, Homo sapiens
  misc_feature (61)..(62): /note="This region represents a CpG dinucleotide"
  misc_feature (61)..(61): /note="Nucleotide may be methylated to form 5-methylcytosine"
gactggctacacccttttcctccttacccaggcctcccacacacattcctcccgcccccacgctctgctcttggtgacccctgaccaggcctccagggaagggagcactggtccctgagtgc

SEQ ID NO: 11314 - DNA, 122 bp, Homo sapiens
  misc_feature (61)..(62): /note="This region represents a CpG dinucleotide"
  misc_feature (61)..(61): /note="Nucleotide may be methylated to form 5-methylcytosine"
acctcaggtgatccgcccaccttggcctcccaaagtgctgggattacaggcgtgagccaccgtgcccagccaagctggcttgtttttagtggaaagtgccgtgagtgtgttagggaacaggc

SEQ ID NO: 11315 - DNA, 122 bp, Homo sapiens
  misc_feature (61)..(62): /note="This region represents a CpG dinucleotide"
  misc_feature (61)..(61): /note="Nucleotide may be methylated to form 5-methylcytosine"
tcccattcatagtttcacccgggtggcaagtgaccagaaacaatagcaactgtgcagcttcgtaggtaataattagtcacacacacattgcttggagggtgaaggaaaggtcactttgaaag

SEQ ID NO: 11316 - DNA, 122 bp, Homo sapiens
  misc_feature (61)..(62): /note="This region represents a CpG dinucleotide"
  misc_feature (61)..(61): /note="Nucleotide may be methylated to form 5-methylcytosine"
tcttctgagagctgtatttgaccctccatttttttccatttaaaatgttatgaaattcaacggttgtggagtctaacaaagaaacacatggaacaggaaacaatgtggcaactgtacagttc

SEQ ID NO: 11317 - DNA, 122 bp, Homo sapiens
  misc_feature (61)..(62): /note="This region represents a CpG dinucleotide"
  misc_feature (61)..(61): /note="Nucleotide may be methylated to form 5-methylcytosine"
agtggcaataggcacctgttcgcacaggtgaacgagctcactcacgccaaacctgcaacacgaaacatcgacagtcatcgcccctctgcgtggagatgggctctgggtgccccggtggggtg

SEQ ID NO: 11318 - DNA, 122 bp, Homo sapiens
  misc_feature (61)..(62): /note="This region represents a CpG dinucleotide"
  misc_feature (61)..(61): /note="Nucleotide may be methylated to form 5-methylcytosine"
ttcagccttgtgacacactgagcagagaacccagtcatgatgggctgggcttctgacttacgaaactgtgagctagtagatgcctgttgcctaagccactaagtttgtggtaatttgttatg

SEQ ID NO: 11319 - DNA, 122 bp, Homo sapiens
  misc_feature (61)..(62): /note="This region represents a CpG dinucleotide"
  misc_feature (61)..(61): /note="Nucleotide may be methylated to form 5-methylcytosine"
aaggggagcacaggaagctgatactcagacctctaatacagcttcttagccaaaattgtgcgctgtcttctttttactgtttccaaatccacaaacagatgggtgtgcaaagctttatttct

SEQ ID NO: 11320 - DNA, 122 bp, Homo sapiens
  misc_feature (61)..(62): /note="This region represents a CpG dinucleotide"
  misc_feature (61)..(61): /note="Nucleotide may be methylated to form 5-methylcytosine"
gtccacagcgtagttttactgtgacaaggcactcagttccttaacattcacctggcacaacgctctcaacagcaaagccaagtggcagaaagtgctgggccacattgccagggtacatgcca

SEQ ID NO: 11321 - DNA, 122 bp, Homo sapiens
  misc_feature (61)..(62): /note="This region represents a CpG dinucleotide"
  misc_feature (61)..(61): /note="Nucleotide may be methylated to form 5-methylcytosine"
aagatccctgagtgcttttgttggctgggctgtgtattttaaaacacttactcagaacaccgcagttatttgaaggatgtgtcatacagtctgctgctggcttaagaaactatgagatgggg

SEQ ID NO: 11322 - DNA, 122 bp, Homo sapiens
  misc_feature (61)..(62): /note="This region represents a CpG dinucleotide"
  misc_feature (61)..(61): /note="Nucleotide may be methylated to form 5-methylcytosine"
ttcttgggtttgagtaccctttagaggtttcctattggttacaccctttgtaaatgaagacgtagcccatgaccaattggaggctgaagtgaaattacaccctatgcaaatgaagatttcgc

SEQ ID NO: 11323 - DNA, 122 bp, Homo sapiens
  misc_feature (61)..(62): /note="This region represents a CpG dinucleotide"
  misc_feature (61)..(61): /note="Nucleotide may be methylated to form 5-methylcytosine"
ggtgaggtggctcacacctgtaatcccagcccattgggagactaaggcaggaggatatcccgtgaggccagaaattcaagaccagcctgagcaacagagcgaaacctcatctctgcaaaaaa

SEQ ID NO: 11324 - DNA, 122 bp, Homo sapiens
  misc_feature (61)..(62): /note="This region represents a CpG dinucleotide"
  misc_feature (61)..(61): /note="Nucleotide may be methylated to form 5-methylcytosine"
caagacatcctggacattggttctgagcagcaatcattgcaatttgctcttttctgcagccgtgaaactaccaggataaagtaatcagagtgatcccatgatgtgctggggcaaactaaaca

SEQ ID NO: 11325 - DNA, 122 bp, Homo sapiens
  misc_feature (61)..(62): /note="This region represents a CpG dinucleotide"
  misc_feature (61)..(61): /note="Nucleotide may be methylated to form 5-methylcytosine"
gtaggttaaagttgatactcattaggactctaagtaccatatttttctacttagtgcaaacgtcagaaagtaagtaatcatgtttaaactgacaagagctttaaccaggaagttgcctacat

SEQ ID NO: 11326 - DNA, 122 bp, Homo sapiens
  misc_feature (61)..(62): /note="This region represents a CpG dinucleotide"
  misc_feature (61)..(61): /note="Nucleotide may be methylated to form 5-methylcytosine"
tctgtcccaacttgttgagctgtcaatgtgtggttaaaaaacagttaaacaggccaggcccggtggctcacacctgtaatcccagcactttgggaggccgaggtgggcggattgcctgaggt

SEQ ID NO: 11327 - DNA, 122 bp, Homo sapiens
  misc_feature (61)..(62): /note="This region represents a CpG dinucleotide"
  misc_feature (61)..(61): /note="Nucleotide may be methylated to form 5-methylcytosine"
taaaccgaagcttgtggaacttgaacgccattttgaagctagttccttagacgattcggtcgaagatctgtctctcggctgccctctatagagctctaaacctggcttcaaggagttctttc

SEQ ID NO: 11328 - DNA, 122 bp, Homo sapiens
  misc_feature (61)..(62): /note="This region represents a CpG dinucleotide"
  misc_feature (61)..(61): /note="Nucleotide may be methylated to form 5-methylcytosine"
ggagaaagaaaggaggagagattaataaagtttggacggctccctcggcctccgctgggccgcgggcgcaagaaagacgcggaccctcgaggcggacgagttgcgggaacttcgcttgcctg

SEQ ID NO: 11329 - DNA, 122 bp, Homo sapiens
  misc_feature (61)..(62): /note="This region represents a CpG dinucleotide"
  misc_feature (61)..(61): /note="Nucleotide may be methylated to form 5-methylcytosine"
aatgtttccatttcctccacacacatatttctgaagagttatgagcaggaagttttctcacgtattttcccaagtagaaaggcctccagctgcacacagactttcccattgccccagtatta

SEQ ID NO: 11330 - DNA, 122 bp, Homo sapiens
  misc_feature (61)..(62): /note="This region represents a CpG dinucleotide"
  misc_feature (61)..(61): /note="Nucleotide may be methylated to form 5-methylcytosine"
ttggaaatcaacagtctgcatttaaaacaaaaacaaaactcattgttctactctactaaacgtgaagaggagtggggggattgtaagactccacagggaagagtttggagggattataaata

SEQ ID NO: 11331 - DNA, 122 bp, Homo sapiens
  misc_feature (61)..(62): /note="This region represents a CpG dinucleotide"
  misc_feature (61)..(61): /note="Nucleotide may be methylated to form 5-methylcytosine"
ctttactaagttgataatctgctggtttctcctgctgttatactataaatgttttatctacgttattagatgtcatttgatggccttcgtggttgtcatttaagtagctgcctatttcacag

SEQ ID NO: 11332 - DNA, 122 bp, Homo sapiens
  misc_feature (61)..(62): /note="This region represents a CpG dinucleotide"
  misc_feature (61)..(61): /note="Nucleotide may be methylated to form 5-methylcytosine"
cgtagcccatagtcaactatagaatcagttggaatcaataacacctctggcttagcatcccgaaggctcacatcagacctttaaaaaacatattttgagaaagtagcctcatcggtcctaag

SEQ ID NO: 11333 - DNA, 122 bp, Homo sapiens
  misc_feature (61)..(62): /note="This region represents a CpG dinucleotide"
  misc_feature (61)..(61): /note="Nucleotide may be methylated to form 5-methylcytosine"
cttcgttgtgctcaacacgatgtttgtcattactaaagcgctcttaaaattgcatctgcacgtctgaatagcctgctaatgcagagctgccctttgcattcaacacaggaacctgcttctgc

SEQ ID NO: 11334 - DNA, 122 bp, Homo sapiens
  misc_feature (61)..(62): /note="This region represents a CpG dinucleotide"
  misc_feature (61)..(61): /note="Nucleotide may be methylated to form 5-methylcytosine"
ttaaattttaaagcattttgttttacgcaatcaattcatctttagaaatgcataagagaacgtaaggattgtcatccttcattttacagaggaaagtgataataatcatttgctgagtcatc

SEQ ID NO: 11335 - DNA, 122 bp, Homo sapiens
  misc_feature (61)..(62): /note="This region represents a CpG dinucleotide"
  misc_feature (61)..(61): /note="Nucleotide may be methylated to form 5-methylcytosine"
gcaaagaggtgcatgcatgtttcacaccttctagaactcagagtaaacctagctcttcaacgagacattctcttaagtcccagactcctcctcctcctggagttcagggcagccactcctaa

SEQ ID NO: 11336 - DNA, 122 bp, Homo sapiens
  misc_feature (61)..(62): /note="This region represents a CpG dinucleotide"
  misc_feature (61)..(61): /note="Nucleotide may be methylated to form 5-methylcytosine"
agttgttctgttgatgttatttaaatattcctctcatcttctcagccacaacttcaaagacgtgttcatgccagtcattcatccaaaataaatttcaattcaatgaaaagtaaataacttag

SEQ ID NO: 11337 - DNA, 122 bp, Homo sapiens
  misc_feature (61)..(62): /note="This region represents a CpG dinucleotide"
  misc_feature (61)..(61): /note="Nucleotide may be methylated to form 5-methylcytosine"
ggctacacactaaatttctcccacccactttttctttttcttaaagtcaacctttagtttcgtggtggttatgaatttattggttttactttcaatatgaaatagacatgcatacttcctct

SEQ ID NO: 11338 - DNA, 122 bp, Homo sapiens
  misc_feature (61)..(62): /note="This region represents a CpG dinucleotide"
  misc_feature (61)..(61): /note="Nucleotide may be methylated to form 5-methylcytosine"
tccactcactcccctacgcttattgtcctgcagctgcaactcatgcctgccaatccccagcggggccatgaactcagatgcctttgcttcatgtgggacgtgccctcattccctttggcagg

SEQ ID NO: 11339 - DNA, 122 bp, Homo sapiens
  misc_feature (61)..(62): /note="This region represents a CpG dinucleotide"
  misc_feature (61)..(61): /note="Nucleotide may be methylated to form 5-methylcytosine"
taaacagcatgtgatccatgggtctgctatcaaaacaaatacatttcacgagatgtgaagcgtcatttaacttgagcaatgacttgagattattacttagggtttagatggaatgttttctt

SEQ ID NO: 11340 - DNA, 122 bp, Homo sapiens
  misc_feature (61)..(62): /note="This region represents a CpG dinucleotide"
  misc_feature (61)..(61): /note="Nucleotide may be methylated to form 5-methylcytosine"
ttcaaactataggagataagtaatatctttgtaatgtgaagaaagccattttcattatcacggggccttgacaagtagcttcccacacagcttgtcaagtcaaatgctactaatactgccag

SEQ ID NO: 11341 - DNA, 122 bp, Homo sapiens
  misc_feature (61)..(62): /note="This region represents a CpG dinucleotide"
  misc_feature (61)..(61): /note="Nucleotide may be methylated to form 5-methylcytosine"
ctgatggctagtattaagcgtccaggccacacaagcttccttgagttcctagcaaacaggcgttcacatcattaaaagactcactgaccctattctcccagttgcagataaactcaatagac

SEQ ID NO: 11342 - DNA, 122 bp, Homo sapiens
  misc_feature (61)..(62): /note="This region represents a CpG dinucleotide"
  misc_feature (61)..(61): /note="Nucleotide may be methylated to form 5-methylcytosine"
gggccactgcctgagtgtgagtcctgccaccaccacctgatggctgagtgaccttgggcacgttacttaacttccccatacctcggttgcctcatctctcaagggagtaatcatattaactt

SEQ ID NO: 11343 - DNA, 122 bp, Homo sapiens
  misc_feature (61)..(62): /note="This region represents a CpG dinucleotide"
  misc_feature (61)..(61): /note="Nucleotide may be methylated to form 5-methylcytosine"
atccagcccctttctgggccatgactatggtgttgactcaaccaaagcctcagttgagttcgtctgagctcaacagggttcacaaatgattggaatcattttctttagcataagtgggtagg

SEQ ID NO: 11344 - DNA, 122 bp, Homo sapiens
  misc_feature (61)..(62): /note="This region represents a CpG dinucleotide"
  misc_feature (61)..(61): /note="Nucleotide may be methylated to form 5-methylcytosine"
ttaactcaggcatcctaccaaggcaatactctgagtcagaaatgacagtgctccctgatacgccctagaagtatgtcaatgatctcatgaaacatacttacacatatatacagaaacatact

SEQ ID NO: 11345 - DNA, 122 bp, Homo sapiens
  misc_feature (61)..(62): /note="This region represents a CpG dinucleotide"
  misc_feature (61)..(61): /note="Nucleotide may be methylated to form 5-methylcytosine"
aggtgtgggtgtgagctgcttgcctgccgacctccctcgccttgcacagcaccctgctggcgtccagtacttggctcccaagtttcattgctcagagcctttctggtttccagtctgggttg

SEQ ID NO: 11346 - DNA, 122 bp, Homo sapiens
  misc_feature (61)..(62): /note="This region represents a CpG dinucleotide"
  misc_feature (61)..(61): /note="Nucleotide may be methylated to form 5-methylcytosine"
tacaaatcgcaacagcaggatcacactgcctggctaaaggcaattgctttgcagtgaacacgtaacttaagccatgtcaattaaggtttttccctggaacttttggaaataaagccatggaa

SEQ ID NO: 11347 - DNA, 122 bp, Homo sapiens
  misc_feature (61)..(62): /note="This region represents a CpG dinucleotide"
  misc_feature (61)..(61): /note="Nucleotide may be methylated to form 5-methylcytosine"
cggttaaagccagcattgttacaactagaaatcgaaactggaataaatctcaacttgctacgctaagaaatagctaaaccctgacttggtcagactaagaaatcgggagtttgagagcagcc

SEQ ID NO: 11348 - DNA, 122 bp, Homo sapiens
  misc_feature (61)..(62): /note="This region represents a CpG dinucleotide"
  misc_feature (61)..(61): /note="Nucleotide may be methylated to form 5-methylcytosine"
gctgaggccaaaggatctgagcctaggacttggagaccagcttgggcaacatagccaccccgcctatttaaaaaaaaaaaaaaatagagagagaagctgatactggctctgtgtgactttga

SEQ ID NO: 11349 - DNA, 122 bp, Homo sapiens
  misc_feature (61)..(62): /note="This region represents a CpG dinucleotide"
  misc_feature (61)..(61): /note="Nucleotide may be methylated to form 5-methylcytosine"
cccagtgccgcatgcttatgtgagtgacatctaatagaactctagaaaccaaagcttggccgagtttccctggtttaccacacttcatgggttatacatcattttgctggcagctttaatca

SEQ ID NO: 11350 - DNA, 122 bp, Homo sapiens
  misc_feature (61)..(62): /note="This region represents a CpG dinucleotide"
  misc_feature (61)..(61): /note="Nucleotide may be methylated to form 5-methylcytosine"
cggacagacagaacagcgtctggagactcacatcatgaacttttgctccaagaactaccacgggaagttcttggaactaccacaggcaagttctcagccctgggcactggctgcctggaaat

SEQ ID NO: 11351 - DNA, 122 bp, Homo sapiens
  misc_feature (61)..(62): /note="This region represents a CpG dinucleotide"
  misc_feature (61)..(61): /note="Nucleotide may be methylated to form 5-methylcytosine"
gctgtggagttgtaatattttatgtttttgtagcctccacaatttaaatttgtctttgtacggtatctgagtggatcccttagagacagattggaacccagagggagaaaattatttgcatt

SEQ ID NO: 11352 - DNA, 122 bp, Homo sapiens
  misc_feature (61)..(62): /note="This region represents a CpG dinucleotide"
  misc_feature (61)..(61): /note="Nucleotide may be methylated to form 5-methylcytosine"
aacaaatcagcagtgctcaagctcctgataagctcgtggtatacattatctcactgaacacgctcacaacactgccaggccagtagagttattgctgtttaacttgaccacagccacacagc

SEQ ID NO: 11353 - DNA, 122 bp, Homo sapiens
  misc_feature (61)..(62): /note="This region represents a CpG dinucleotide"
  misc_feature (61)..(61): /note="Nucleotide may be methylated to form 5-methylcytosine"
ctgcttcattttccttcaatgcacttcttactgtctgacataatttatgtcagtggctcacgcctgtaatctcagcactttgagaggccgaggtgggtggatcagctgaggtcaggagttcg

SEQ ID NO: 11354 - DNA, 122 bp, Homo sapiens
  misc_feature (61)..(62): /note="This region represents a CpG dinucleotide"
  misc_feature (61)..(61): /note="Nucleotide may be methylated to form 5-methylcytosine"
agctaattttaaaaatttagagcaaggaatcaaatcaaagctgactcttgctgcaaaactcgtggtcttttctgttacgctacactgcctctttcatcattccatacacttatattgcaagg

SEQ ID NO: 11355 - DNA, 122 bp, Homo sapiens
  misc_feature (61)..(62): /note="This region represents a CpG dinucleotide"
  misc_feature (61)..(61): /note="Nucleotide may be methylated to form 5-methylcytosine"
tctcctgtgatgtgattgatggagctctccgcagggcctcccattatggtctgaaggacacggtggcctagttttcgtgcagggatgcagggaggccagtcatgcgggactgtggcccactg

SEQ ID NO: 11356 - DNA, 122 bp, Homo sapiens
  misc_feature (61)..(62): /note="This region represents a CpG dinucleotide"
  misc_feature (61)..(61): /note="Nucleotide may be methylated to form 5-methylcytosine"
cagacatggggtgtcttcaggaaagcctctgcaaaaaaaatgtatacacagagggcttaacggatgaaggagagttggaaaggtggggaaagtacaagttcatccaggggccgagagaggga

SEQ ID NO: 11357 - DNA, 122 bp, Homo sapiens
  misc_feature (61)..(62): /note="This region represents a CpG dinucleotide"
  misc_feature (61)..(61): /note="Nucleotide may be methylated to form 5-methylcytosine"
aaatctcgttttctgctttattggacctcttcacacaggctgtgcatttcatctagggtacgagaatgctctgtccactgcacaggtgacaggcagttaagtgaccattgtctagtcagtgg

SEQ ID NO: 11358 - DNA, 122 bp, Homo sapiens
  misc_feature (61)..(62): /note="This region represents a CpG dinucleotide"
  misc_feature (61)..(61): /note="Nucleotide may be methylated to form 5-methylcytosine"
tgagaagcagaacctcccaacacttagtcttttcaaacaaacttttacaggcaattatttcgcaattcctttatgctgggtcaggtgagtggaagaaggagaaactgggaaggggtcacgta

SEQ ID NO: 11359 - DNA, 122 bp, Homo sapiens
  misc_feature (61)..(62): /note="This region represents a CpG dinucleotide"
  misc_feature (61)..(61): /note="Nucleotide may be methylated to form 5-methylcytosine"
tagcattctttgacaatagcagaagcctaaagaacttccactccaaggaaatacagaatccgggaaacaattgttcctagcgattagggaaatctcgcgagattcaggtcctgggagcctgg

SEQ ID NO: 11360 - DNA, 122 bp, Homo sapiens
  misc_feature (61)..(62): /note="This region represents a CpG dinucleotide"
  misc_feature (61)..(61): /note="Nucleotide may be methylated to form 5-methylcytosine"
aagactgcagaaacagcctgggcatggatgggagtctgagccactcagcagtctaggagccggaaaccccagtctagcagcaggaacagcctggtcaggcctctgccactgctgctaggccc

SEQ ID NO: 11361 - DNA, 122 bp, Homo sapiens
  misc_feature (61)..(62): /note="This region represents a CpG dinucleotide"
  misc_feature (61)..(61): /note="Nucleotide may be methylated to form 5-methylcytosine"
attcaaagctcttcactgtttcctctttagtttttcaacctcaaagtccataatcctcctcgtgaaccctccactctagccacccagtaaaattctcattgaccttttccaccctgtggctc

SEQ ID NO: 11362 - DNA, 122 bp, Homo sapiens
  misc_feature (61)..(62): /note="This region represents a CpG dinucleotide"
  misc_feature (61)..(61): /note="Nucleotide may be methylated to form 5-methylcytosine"
ggggcctagggagcccaaaggcaggtggtcaacttctatcaaacatgaaatgaggccgggcgcggtggctcacgcctgtgatccagcactttgagaggctgaggtgggaggatcacgtaagg

SEQ ID NO: 11363 - DNA, 122 bp, Homo sapiens
  misc_feature (61)..(62): /note="This region represents a CpG dinucleotide"
  misc_feature (61)..(61): /note="Nucleotide may be methylated to form 5-methylcytosine"
tctccttcctggtggcttaagtagttgttcacagactttacatattcccatgtgacctgacgaagcaatataggaagtgctgagagcatggtagattagctaagtcctgaggttggaacaat

SEQ ID NO: 11364 - DNA, 122 bp, Homo sapiens
  misc_feature (61)..(62): /note="This region represents a CpG dinucleotide"
  misc_feature (61)..(61): /note="Nucleotide may be methylated to form 5-methylcytosine"
gattcctttaaattacccaacctctcttgcttcattcaaacatgtgcagcttcaagtgggcgtctactgcattagattagataagtcacaagggcagagtctctggactgcaggcgttgctt

SEQ ID NO: 11365 - DNA, 122 bp, Homo sapiens
  misc_feature (61)..(62): /note="This region represents a CpG dinucleotide"
  misc_feature (61)..(61): /note="Nucleotide may be methylated to form 5-methylcytosine"
cataaaaggtagatggacaaatgttaaatgactaagcagaaaagagaaagttcaaaccaacgtatccacagagctactgctgggacataagccagtttgacctgcaggagttcagaaagtct

SEQ ID NO: 11366 - DNA, 122 bp, Homo sapiens
  misc_feature (61)..(62): /note="This region represents a CpG dinucleotide"
  misc_feature (61)..(61): /note="Nucleotide may be methylated to form 5-methylcytosine"
tttttctgctttcagaaacacatcactcttctctaagccctggttttccgtgtttgtgggcgtgtaggtgtgtgtgcttgtacatggtggcagctgttacgattctttccacacggagaaag

SEQ ID NO: 11367 - DNA, 122 bp, Homo sapiens
  misc_feature (61)..(62): /note="This region represents a CpG dinucleotide"
  misc_feature (61)..(61): /note="Nucleotide may be methylated to form 5-methylcytosine"
ctaactgaatgcctgacatttgtctaaattacaaaagccaaaattaaagctccccagtaccgtgacaacagaaatgagactctgcagcaaggctctggggatgcagatggacagagcaggtt

SEQ ID NO: 11368 - DNA, 122 bp, Homo sapiens
  misc_feature (61)..(62): /note="This region represents a CpG dinucleotide"
  misc_feature (61)..(61): /note="Nucleotide may be methylated to form 5-methylcytosine"
caataaaatgaacaagttgtttacatagctgtgagaaaggttattgtttcattggttttgcgtcctagtgcagcattcagcatttagtgggagtccaatcagtgtttactgaataaaacaaa

SEQ ID NO: 11369 - DNA, 122 bp, Homo sapiens
  misc_feature (61)..(62): /note="This region represents a CpG dinucleotide"
  misc_feature (61)..(61): /note="Nucleotide may be methylated to form 5-methylcytosine"
atcaacatacaaattccactcgaaagtagtaaagtgcttttacagtttttaaagcactcgcgtaaacatactatcatttgttcctgagagcaatctggtgtgggaggtggagcaagtagtaa

SEQ ID NO: 11370 - DNA, 122 bp, Homo sapiens
  misc_feature (61)..(62): /note="This region represents a CpG dinucleotide"
  misc_feature (61)..(61): /note="Nucleotide may be methylated to form 5-methylcytosine"
tgccattgcattgtatttgaggaggtgaggtcatctctagccttatctagggagtctctccgagggcacaagtgtcagacaggctggagttattcaggcaggccctccacaaaccctttcac

SEQ ID NO: 11371 - DNA, 122 bp, Homo sapiens
  misc_feature (61)..(62): /note="This region represents a CpG dinucleotide"
  misc_feature (61)..(61): /note="Nucleotide may be methylated to form 5-methylcytosine"
tgagtgcagtaatggggcctgggcttggatttgggagtaaccacctggccagccaaacaacgatcttttttttgagacggagtttcactcttgttgcccaggctggagtacaatggcgcaat

SEQ ID NO: 11372 - DNA, 122 bp, Homo sapiens
  misc_feature (61)..(62): /note="This region represents a CpG dinucleotide"
  misc_feature (61)..(61): /note="Nucleotide may be methylated to form 5-methylcytosine"
ttgatttacatagtcagagactgcatgctgtcacgcctcttgtatagagaccccttgtggcgttcacctgattgcctcctcggtttgtgtgggaaacgttccatttcttttacagtaggatg

SEQ ID NO: 11373 - DNA, 122 bp, Homo sapiens
  misc_feature (61)..(62): /note="This region represents a CpG dinucleotide"
  misc_feature (61)..(61): /note="Nucleotide may be methylated to form 5-methylcytosine"
agcccttgagtcagtctgctgagtttgcacccagaactggttaatgctggctcccatgggcggggagtggagactgctgactgctgactatgaggagggaggacaaagtgcagatgctcagc

SEQ ID NO: 11374 - DNA, 122 bp, Homo sapiens
  misc_feature (61)..(62): /note="This region represents a CpG dinucleotide"
  misc_feature (61)..(61): /note="Nucleotide may be methylated to form 5-methylcytosine"
tgctgaaaacagaatgaatcatgaacattatctcaatgttttgcataatagacaagaccacggcgttttggttccctgacctgttttgtgtttatgttaggatctgaatcatgttctgggta

SEQ ID NO: 11375 - DNA, 122 bp, Homo sapiens
  misc_feature (61)..(62): /note="This region represents a CpG dinucleotide"
  misc_feature (61)..(61): /note="Nucleotide may be methylated to form 5-methylcytosine"
atatagacagtagacctataacatgtcaggaggcgataaatactgtgaagaaattaactccggttatgggaacagcgagtggtagtggtcagggtgagggctgtttgagatgaggtggtcaa

SEQ ID NO: 11376 - DNA, 122 bp, Homo sapiens
  misc_feature (61)..(62): /note="This region represents a CpG dinucleotide"
  misc_feature (61)..(61): /note="Nucleotide may be methylated to form 5-methylcytosine"
aaattttaagtcagaaattcaaagtaagtttgcacaatggcacatcaaaacagagataaacgtcagatgtgaaggaaatcagcagccaggcctccttgtttcccctcaaattttgtgttatg

SEQ ID NO: 11377 - DNA, 122 bp, Homo sapiens
  misc_feature (61)..(62): /note="This region represents a CpG dinucleotide"
  misc_feature (61)..(61): /note="Nucleotide may be methylated to form 5-methylcytosine"
tctaaaagaaccatgtttttgctcaggatcgcaaggctcctgacaactgcatttcccaatcgtgcatgttgggttcagcatgtgactcagttccaaccaatgaggtgtgagtagaatcattg

SEQ ID NO: 11378 - DNA, 122 bp, Homo sapiens
  misc_feature (61)..(62): /note="This region represents a CpG dinucleotide"
  misc_feature (61)..(61): /note="Nucleotide may be methylated to form 5-methylcytosine"
tcattgtcacaccaacaggccatcaactgtggcaacagttcttggggcaattagggtgcacggacggctcccttctctattcattttcactcagtccagtcgcagggcagcacacttcactc

SEQ ID NO: 11379 - DNA, 122 bp, Homo sapiens
  misc_feature (61)..(62): /note="This region represents a CpG dinucleotide"
  misc_feature (61)..(61): /note="Nucleotide may be methylated to form 5-methylcytosine"
tttcttttggagtctctgctttcacttctagtttccttttgaagccttatactgctttgtcgttggctgaaatggtaaggcagcagctgacctgtctctagctttccccattaccttgctga

SEQ ID NO: 11380 - DNA, 122 bp, Homo sapiens
  misc_feature (61)..(62): /note="This region represents a CpG dinucleotide"
  misc_feature (61)..(61): /note="Nucleotide may be methylated to form 5-methylcytosine"
ttttaaatagcccaaacaatgggagttaacaaattgggcactaacattttaactttttctcgtgtttcaatatgtggaatttcttgcttagaagctggctctttccaagtatattgtttcat

SEQ ID NO: 11381 - DNA, 122 bp, Homo sapiens
  misc_feature (61)..(62): /note="This region represents a CpG dinucleotide"
  misc_feature (61)..(61): /note="Nucleotide may be methylated to form 5-methylcytosine"
taataagttaaaaataggtattttcaaaatgcaggctttatttgtatccttttttgatctcggactccagaaaggtaaatagaaaactagaaagaataacaccatccactggccaagcacat

SEQ ID NO: 11382 - DNA, 122 bp, Homo sapiens
  misc_feature (61)..(62): /note="This region represents a CpG dinucleotide"
  misc_feature (61)..(61): /note="Nucleotide may be methylated to form 5-methylcytosine"
gtccattattttattttcccttatagcctgtgtaagtgtagtgccccttgtcattatgctcggcaaagcacaaaccttagcccacttggacttccttcctctccttctcctccccacctgca

SEQ ID NO: 11383 - DNA, 122 bp, Homo sapiens
  misc_feature (61)..(62): /note="This region represents a CpG dinucleotide"
  misc_feature (61)..(61): /note="Nucleotide may be methylated to form 5-methylcytosine"
cccggggaggagtttatcaggctgatgtggagtgaggaatgcatgtggcatgctagcatgcgggttctgtaagcctctgtctgtgtatgcttagtaaaacacagctgaagaaagtccacaaa

SEQ ID NO: 11384 - DNA, 122 bp, Homo sapiens
  misc_feature (61)..(62): /note="This region represents a CpG dinucleotide"
  misc_feature (61)..(61): /note="Nucleotide may be methylated to form 5-methylcytosine"
gaactggggtctccaagtgttgtaaacctgaggctcagtaagtggtttctgagtgatcaccgtcttttatgggacttctacagtatgatcacttctactgttgtgaggagtgagggacattc

SEQ ID NO: 11385 - DNA, 122 bp, Homo sapiens
  misc_feature (61)..(62): /note="This region represents a CpG dinucleotide"
  misc_feature (61)..(61): /note="Nucleotide may be methylated to form 5-methylcytosine"
cagggacaggcccggactgacatttctggaaaacccagtgtgtgcaaggttaggttaccacggtccataccaatgaggaaattaggctgtagagagaagtaacttgtctaaggcaccgcagt

SEQ ID NO: 11386 - DNA, 122 bp, Homo sapiens
  misc_feature (61)..(62): /note="This region represents a CpG dinucleotide"
  misc_feature (61)..(61): /note="Nucleotide may be methylated to form 5-methylcytosine"
ctccttggccccactgtcccaccgcctcctctagcacctctcaccaagcacgtggcccagcgcttgccttccctgtggactttcacatttctcagggaagttcccgagagatgcacatttgc

SEQ ID NO: 11387 - DNA, 122 bp, Homo sapiens
  misc_feature (61)..(62): /note="This region represents a CpG dinucleotide"
  misc_feature (61)..(61): /note="Nucleotide may be methylated to form 5-methylcytosine"
tggagccaaggccccgtggatgccctaggcctttcttttgatgtattttctttttccaggcgttgtcattctgagcctgcaataggaaggtctgcatcagtaatctctcatgtgcctttggg

SEQ ID NO: 11388 - DNA, 122 bp, Homo sapiens
  misc_feature (61)..(62): /note="This region represents a CpG dinucleotide"
  misc_feature (61)..(61): /note="Nucleotide may be methylated to form 5-methylcytosine"
tagtcattgtgtaacatgtgaattacttattcaaaaagccaatggttgagtcacagaagacgtcaccaagcccagtgcatcatcaagctctacattggagcaaagcccaggtccacacgctg

SEQ ID NO: 11389 - DNA, 122 bp, Homo sapiens
  misc_feature (61)..(62): /note="This region represents a CpG dinucleotide"
  misc_feature (61)..(61): /note="Nucleotide may be methylated to form 5-methylcytosine"
tagggttctaaacaatggaagatcttactaaaacttcctgtaaatattcacacaacaaagcgtgcaccacaaacatcacctttataacatgactgaaagttcctgtgatataaaaatttggc

SEQ ID NO: 11390 - DNA, 122 bp, Homo sapiens
  misc_feature (61)..(62): /note="This region represents a CpG dinucleotide"
  misc_feature (61)..(61): /note="Nucleotide may be methylated to form 5-methylcytosine"
ctaggcctaggtaagattgcatctggagcctggggccaggtctggggccctacagtaaggcggagatgggctggtatgtgtcctgagcggaggttaggaaggctctgaacactgtcatggga

SEQ ID NO: 11391 - DNA, 122 bp, Homo sapiens
  misc_feature (61)..(62): /note="This region represents a CpG dinucleotide"
  misc_feature (61)..(61): /note="Nucleotide may be methylated to form 5-methylcytosine"
tttaaaatgtcctgtgaatatgtgcatggattcagaaatgagcctgtacgcttggggatccgcctgccctggagcaggatcattctaaaaactgtccttttataactcagagtcagaatcag

SEQ ID NO: 11392 - DNA, 122 bp, Homo sapiens
  misc_feature (61)..(62): /note="This region represents a CpG dinucleotide"
  misc_feature (61)..(61): /note="Nucleotide may be methylated to form 5-methylcytosine"
gatgctatgaaggtttaatttcctgcttcaccatggatacaagcctcacaacatctaaaacgtaaacttcacaagaatgtgactcttcaaagataccagacctgtgcctgacttgcagcctg

SEQ ID NO: 11393 - DNA, 122 bp, Homo sapiens
  misc_feature (61)..(62): /note="This region represents a CpG dinucleotide"
  misc_feature (61)..(61): /note="Nucleotide may be methylated to form 5-methylcytosine"
gtgtatggagattttgctttatttgaagataattattttaaggaagtctaaacagacaagcgtctgctgggaaaaagctagtctacctgcttatataaagagctggcacttacaaaacccat

SEQ ID NO: 11394 - DNA, 122 bp, Homo sapiens
  misc_feature (61)..(62): /note="This region represents a CpG dinucleotide"
  misc_feature (61)..(61): /note="Nucleotide may be methylated to form 5-methylcytosine"
ccctggaggggcctcggctgccgacttctgcctcataaaccctaccctccctttcagactcgcgccaagcaaagccctcagtgaagtctgctctcacccaagaagaataagctgttctgtgc

SEQ ID NO: 11395 - DNA, 122 bp, Homo sapiens
  misc_feature (61)..(62): /note="This region represents a CpG dinucleotide"
  misc_feature (61)..(61): /note="Nucleotide may be methylated to form 5-methylcytosine"
gtgcaacatcgggtttgagactgcagaaaactaagtctggaaattgggccatttgttccccggggaggcagtgctttccttccagtaccccgtcggttgttatttggaacacctggcatttc

SEQ ID NO: 11396 - DNA, 122 bp, Homo sapiens
  misc_feature (61)..(62): /note="This region represents a CpG dinucleotide"
  misc_feature (61)..(61): /note="Nucleotide may be methylated to form 5-methylcytosine"
tttctgtgatgttcttcttatggagccaacacacagtcagccatcacttccactgttgcacgtgcacaagaaaagctggaattaaatgtgagctgagttaacttaaagaacagtcatttgat

SEQ ID NO: 11397 - DNA, 122 bp, Homo sapiens
  misc_feature (61)..(62): /note="This region represents a CpG dinucleotide"
  misc_feature (61)..(61): /note="Nucleotide may be methylated to form 5-methylcytosine"
ctcattcattcaatcaatcagtcaaccagttggtcagtcaacagacatatctcaggcacacgtgccaggcattagtatctatgggtggaggctgttaagtaagctgattttcattttcattt

SEQ ID NO: 11398 - DNA, 122 bp, Homo sapiens
  misc_feature (61)..(62): /note="This region represents a CpG dinucleotide"
  misc_feature (61)..(61): /note="Nucleotide may be methylated to form 5-methylcytosine"
aagggtatggggaggggacgtggcctccccgaagaagaaccgatgcactggggctcctggcgtctgcggggtccataacgcctccctagggaggagagggaggagctaggagatgcagggag

SEQ ID NO: 11399 - DNA, 122 bp, Homo sapiens
  misc_feature (61)..(62): /note="This region represents a CpG dinucleotide"
  misc_feature (61)..(61): /note="Nucleotide may be methylated to form 5-methylcytosine"
cctacttactggggctttgagtatttcaggcactcttgccccatcccctctgtcaccacccgcaagcctcatcaagcctctaatctggaggtgggtggtggtaaatgagcaagagggaactt

SEQ ID NO: 11400 - DNA, 122 bp, Homo sapiens
  misc_feature (61)..(62): /note="This region represents a CpG dinucleotide"
  misc_feature (61)..(61): /note="Nucleotide may be methylated to form 5-methylcytosine"
agtagcgcgcctgagcctcagggcttagcagcaggttgtacagggcgatccacacttgcccgtccaacttgctcagcttttgctgctctgagggggccacagtatgccaacggctgccctcg

SEQ ID NO: 11401 - DNA, 122 bp, Homo sapiens
  misc_feature (61)..(62): /note="This region represents a CpG dinucleotide"
  misc_feature (61)..(61): /note="Nucleotide may be methylated to form 5-methylcytosine"
ttttttgctgtcatcccttcagggcagtggatgtatctgacacctagtgaatacaggccacggatgttgcaaaacattctattatatagaaggcagtccccgacaacaaagaataatctgga

SEQ ID NO: 11402 - DNA, 122 bp, Homo sapiens
  misc_feature (61)..(62): /note="This region represents a CpG dinucleotide"
  misc_feature (61)..(61): /note="Nucleotide may be methylated to form 5-methylcytosine"
ccctggagccactgtgtccctcgtggctggtggtcagcattgtctgccattcctgctcctcgcccgccaggtgcgggttccgcctgtgagtccctcccagccggcagctgtgctgctccgcc

SEQ ID NO: 11403 - DNA, 122 bp, Homo sapiens
  misc_feature (61)..(62): /note="This region represents a CpG dinucleotide"
  misc_feature (61)..(61): /note="Nucleotide may be methylated to form 5-methylcytosine"
ttttttaaactgcattgagcaatattccgtgggtgtgatccataatagcgtaactatttacgcctgtgacagagaggaaaactgtatggatatcagatatctttaagagctttttaatcttt

SEQ ID NO: 11404 - DNA, 122 bp, Homo sapiens
  misc_feature (61)..(62): /note="This region represents a CpG dinucleotide"
  misc_feature (61)..(61): /note="Nucleotide may be methylated to form 5-methylcytosine"
gtcttataaggggacaagaaatttgagttcagttacgagagatgaggaagaagttcaccacgttaatgacagtggtaaaacagagaaagcatttcagttagaggaaactaagtgggtagagg

SEQ ID NO: 11405 - DNA, 122 bp, Homo sapiens
  misc_feature (61)..(62): /note="This region represents a CpG dinucleotide"
  misc_feature (61)..(61): /note="Nucleotide may be methylated to form 5-methylcytosine"
atctggaagttggatcagccaataagcaactggaaacacaggaaacaggggaatccctgccgcagctcactcagctaagacactgtcaacctcagtgaagaacctcagttgctttacagcta

SEQ ID NO: 11406 - DNA, 122 bp, Homo sapiens
  misc_feature (61)..(62): /note="This region represents a CpG dinucleotide"
  misc_feature (61)..(61): /note="Nucleotide may be methylated to form 5-methylcytosine"
tcagaaggagcgaatttcctgcagagctgagcctcccagggcggccacaccttccccacacgttccctcggcaggttccaggcggaacacaccgctcgtctgcaggcgcttggtggtggagc

SEQ ID NO: 11407 - DNA, 122 bp, Homo sapiens
  misc_feature (61)..(62): /note="This region represents a CpG dinucleotide"
  misc_feature (61)..(61): /note="Nucleotide may be methylated to form 5-methylcytosine"
tattccaagcaaagcccctgaccttgaaaagatggcaaacatttcagtttgggttgggttcgtctaggagtaacaggggcagactagcccattattagttacacatattgagtgtttgaaga

SEQ ID NO: 11408 - DNA, 122 bp, Homo sapiens
  misc_feature (61)..(62): /note="This region represents a CpG dinucleotide"
  misc_feature (61)..(61): /note="Nucleotide may be methylated to form 5-methylcytosine"
tttaatcttattcctgaagcaaaacaaataactcatcatggctgagttatttatgagtgtcggaagtcactctggaaaagataaaggtgtgtttactactactaatttgtcttgaggatctg

SEQ ID NO: 11409 - DNA, 122 bp, Homo sapiens
  misc_feature (61)..(62): /note="This region represents a CpG dinucleotide"
  misc_feature (61)..(61): /note="Nucleotide may be methylated to form 5-methylcytosine"
ttccaactgatactggagttgtttgctttgaacaatgtgactttgtttctttgtcagacacggccagcagcatagctgttgcttaggaaaggaacaaacacattaggagcttgctaaaagtc

SEQ ID NO: 11410 - DNA, 122 bp, Homo sapiens
  misc_feature (61)..(62): /note="This region represents a CpG dinucleotide"
  misc_feature (61)..(61): /note="Nucleotide may be methylated to form 5-methylcytosine"
ccataattcaggttctgcaaggcttcgcatgagaaattaggtaactgtgactcactatttcgttctttctctttcactgccatgttaaggcctatgaatcagatgcctatatcttcagtaaa

SEQ ID NO: 11411 - DNA, 122 bp, Homo sapiens
  misc_feature (61)..(62): /note="This region represents a CpG dinucleotide"
  misc_feature (61)..(61): /note="Nucleotide may be methylated to form 5-methylcytosine"
ggagaaaagccggaggcttgccgagaggagcactgagaggcgactgctgggtgagaccttcgggcagggaaggcatgggatctggggagacacagagcctgatgatactcagagggctgggt

SEQ ID NO: 11412 - DNA, 122 bp, Homo sapiens
  misc_feature (61)..(62): /note="This region represents a CpG dinucleotide"
  misc_feature (61)..(61): /note="Nucleotide may be methylated to form 5-methylcytosine"
gacctggtgaaatcctatttcagacctaatctgggagcctgcaagtgacaacagcctttgcggtccttagacagcttggcctggaggagaacacatgaaagaaaggtttgtttctgcttaat

SEQ ID NO: 11413 - DNA, 122 bp, Homo sapiens
  misc_feature (61)..(62): /note="This region represents a CpG dinucleotide"
  misc_feature (61)..(61): /note="Nucleotide may be methylated to form 5-methylcytosine"
tgtaagctctccctgccagacagctcagatcaattgacctttaatagtttttattgtttacgctgccctttaaagtatccatcatcttttttttaaacctctagtctaaagatctttccaga

SEQ ID NO: 11414 - DNA, 122 bp, Homo sapiens
  misc_feature (61)..(62): /note="This region represents a CpG dinucleotide"
  misc_feature (61)..(61): /note="Nucleotide may be methylated to form 5-methylcytosine"
actctttctcatcatcgcacagttctctatttgaaacagcaaatgattcttgggccgtggcgtggtatttgggctcctcctccggggggaggggtggaaggagtgctctgcaggaagtagag

SEQ ID NO: 11415 - DNA, 122 bp, Homo sapiens
  misc_feature (61)..(62): /note="This region represents a CpG dinucleotide"
  misc_feature (61)..(61): /note="Nucleotide may be methylated to form 5-methylcytosine"
tagaccctgataacctgcaattccacagccaggtttctatcccagagaaacaaaatcacacgtgcacaagagagcgtatgaaagttcacagcagcattgtctgtcttggtgaaagcctgggt

SEQ ID NO: 11416 - DNA, 122 bp, Homo sapiens
  misc_feature (61)..(62): /note="This region represents a CpG dinucleotide"
  misc_feature (61)..(61): /note="Nucleotide may be methylated to form 5-methylcytosine"
aacagcaacggcctaggcctctgcagaacctcaagagcactcgggtgctggggagtttggcgtgctcaggctttgaggtgtgtcactcccaggacaaaccagaaccacaggagacaagatct

SEQ ID NO: 11417 - DNA, 122 bp, Homo sapiens
  misc_feature (61)..(62): /note="This region represents a CpG dinucleotide"
  misc_feature (61)..(61): /note="Nucleotide may be methylated to form 5-methylcytosine"
tgcccctgtaggctagattctaatgtccatgatctttggtttccttataatagcatctcacgttagagtcaggatgaagtgataaaatgcccaggacaatgtgatactcaatatgtagtagc

SEQ ID NO: 11418 - DNA, 122 bp, Homo sapiens
  misc_feature (61)..(62): /note="This region represents a CpG dinucleotide"
  misc_feature (61)..(61): /note="Nucleotide may be methylated to form 5-methylcytosine"
tctgccggttggtactttctactgtcttcaagacattctcaattctgttgagcctgtactcgcaatatgccttttcaaaggagagagagttattggctaacagtttggtgcaagtattgatg

SEQ ID NO: 11419 - DNA, 122 bp, Homo sapiens
  misc_feature (61)..(62): /note="This region represents a CpG dinucleotide"
  misc_feature (61)..(61): /note="Nucleotide may be methylated to form 5-methylcytosine"
atgcaatgacagatacagaagcaccttgacaaaaggcagacgttggagtgtgctatgagacgtggctctgttcaagtgggaaattatattaatatagagaggaattattaggctagcactga

SEQ ID NO: 11420 - DNA, 122 bp, Homo sapiens
  misc_feature (61)..(62): /note="This region represents a CpG dinucleotide"
  misc_feature (61)..(61): /note="Nucleotide may be methylated to form 5-methylcytosine"
agtcattagtttcattctacagctatacagagagctcatgtaaattcctgaaggctgcaccgcctacaagtggtggggctggagttcgcacgttgctcttgtgccctggagtgatggcagca

SEQ ID NO: 11421 - DNA, 122 bp, Homo sapiens
  misc_feature (61)..(62): /note="This region represents a CpG dinucleotide"
  misc_feature (61)..(61): /note="Nucleotide may be methylated to form 5-methylcytosine"
tatgactcgtgttttacatcctgtacttgagcaaacaatcttactgtgaatctctcaaatcgtatcatgagttcctcagactgttgatgtactaattaatacgtaaactactgacactgaaa

SEQ ID NO: 11422 - DNA, 122 bp, Homo sapiens
  misc_feature (61)..(62): /note="This region represents a CpG dinucleotide"
  misc_feature (61)..(61): /note="Nucleotide may be methylated to form 5-methylcytosine"
ctacagacaaagcctttttcctacggccttcacccttaattccgtaagatttttttcaaacgacttttgaagagatgtgactgaaaatgagaactgacttaacacagggaatctgagatttg

SEQ ID NO: 11423 - DNA, 122 bp, Homo sapiens
  misc_feature (61)..(62): /note="This region represents a CpG dinucleotide"
  misc_feature (61)..(61): /note="Nucleotide may be methylated to form 5-methylcytosine"
ccagtccagggtcagatcctgggctgatgccacctgagggcggggtgggggcgtggcctccgtgcacatgggagactccaggtgcaggagagggggaggtggacttcctcttggtcttccca

SEQ ID NO: 11424 - DNA, 122 bp, Homo sapiens
  misc_feature (61)..(62): /note="This region represents a CpG dinucleotide"
  misc_feature (61)..(61): /note="Nucleotide may be methylated to form 5-methylcytosine"
cttcatataaatctacatgtcaaaaaataatcctttgccagatcacgtatccagatttttcgtttggaaaatacgaacattactactacagaatatcaaactgaatacagccctgtcctgag

SEQ ID NO: 11425 - DNA, 122 bp, Homo sapiens
  misc_feature (61)..(62): /note="This region represents a CpG dinucleotide"
  misc_feature (61)..(61): /note="Nucleotide may be methylated to form 5-methylcytosine"
gggtctgatagagattaggtcccggggactaaagcatccccaaaccacccagagtgccctcgttgaataaatccgttctcctactcactccactaaaaagaggagggattgagggtgcagaa

SEQ ID NO: 11426 - DNA, 122 bp, Homo sapiens
  misc_feature (61)..(62): /note="This region represents a CpG dinucleotide"
  misc_feature (61)..(61): /note="Nucleotide may be methylated to form 5-methylcytosine"
gtcataggcggtggagttcctgtccaaggctgtggacagtccaaacatcaaggcagtggacgaggctgtgatcttgctccaggagatcggtatgtaggggctgggctgggctgggctgggga

SEQ ID NO: 11427 - DNA, 122 bp, Homo sapiens
  misc_feature (61)..(62): /note="This region represents a CpG dinucleotide"
  misc_feature (61)..(61): /note="Nucleotide may be methylated to form 5-methylcytosine"
tgactatatacctagaaaatcacagagatttaaattacaaatcaactagctacaatttcacgtccatatagttttcagaaattaaaagagctggtaataccaagtgttcataaagcaatgga

SEQ ID NO: 11428 - DNA, 122 bp, Homo sapiens
  misc_feature (61)..(62): /note="This region represents a CpG dinucleotide"
  misc_feature (61)..(61): /note="Nucleotide may be methylated to form 5-methylcytosine"
tcaggttctgtgctaagctcaggggatataaaaagaaataagtcactgcactcgccctcacggagcccacagtataactgggtagatagttctataaagagacaatgataataaaatagaat

SEQ ID NO: 11429 - DNA, 122 bp, Homo sapiens
  misc_feature (61)..(62): /note="This region represents a CpG dinucleotide"
  misc_feature (61)..(61): /note="Nucleotide may be methylated to form 5-methylcytosine"
atcaatcaaaagacacaggttgtgtttcaatcagaagccatttctgaagaggcacaggagcgtaggagagttgtgttaggcaatggaaaccaaactgagcctgaaatgaaagcctgggtcaa

SEQ ID NO: 11430 - DNA, 122 bp, Homo sapiens
  misc_feature (61)..(62): /note="This region represents a CpG dinucleotide"
  misc_feature (61)..(61): /note="Nucleotide may be methylated to form 5-methylcytosine"
gtggccgctgtggtggccacctagccggcaggtgcccacccaaggcaggacctggagcggcgccgttgcctgtgtctctcagcgccctctgcctcttctgcctcacccccgcccgcccgtcg

SEQ ID NO: 11431 - DNA, 122 bp, Homo sapiens
  misc_feature (61)..(62): /note="This region represents a CpG dinucleotide"
  misc_feature (61)..(61): /note="Nucleotide may be methylated to form 5-methylcytosine"
agttggctaacaactcgagccaaggcccagaggtggggatgagtttgctgccaaaggggacggctggcaggaagctactcagtgtgcttgttcgtctcgctcattaattgggcacaaagagc

SEQ ID NO: 11432 - DNA, 122 bp, Homo sapiens
  misc_feature (61)..(62): /note="This region represents a CpG dinucleotide"
  misc_feature (61)..(61): /note="Nucleotide may be methylated to form 5-methylcytosine"
gaattatgatttagtactaggttatttaaccacattgaaagacttcatctgaaagggcaacgtgaaaagtgttattatatgcagtataaagaagcatagggaaacattgagctctttattac

SEQ ID NO: 11433 - DNA, 122 bp, Homo sapiens
  misc_feature (61)..(62): /note="This region represents a CpG dinucleotide"
  misc_feature (61)..(61): /note="Nucleotide may be methylated to form 5-methylcytosine"
tattcatttatccttattctttgacatctactacaaacttctttctgtgcttcattcatccgtgcaactatatttatgaggtgttttgggcggcaggcggcgggggggtcgattaaaataaa

SEQ ID NO: 11434 - DNA, 122 bp, Homo sapiens
  misc_feature (61)..(62): /note="This region represents a CpG dinucleotide"
  misc_feature (61)..(61): /note="Nucleotide may be methylated to form 5-methylcytosine"
gccactcctcaaactgcctggcattggtggtaatctatggcaaagcacctctcctttttgcgttaccctctttgaagtgagtaacactatgtcttagagagccttcttttcatttgtgtttt

SEQ ID NO: 11435 - DNA, 122 bp, Homo sapiens
  misc_feature (61)..(62): /note="This region represents a CpG dinucleotide"
  misc_feature (61)..(61): /note="Nucleotide may be methylated to form 5-methylcytosine"
gcagagggattcccgaggtttgcggagcggatcggtaagggtgagccccgaacctgtcttcgctcagttccatagtcgacagcctccttacctactgcaagtgtccagaaaaacccgtttag

SEQ ID NO: 11436 - DNA, 122 bp, Homo sapiens
  misc_feature (61)..(62): /note="This region represents a CpG dinucleotide"
  misc_feature (61)..(61): /note="Nucleotide may be methylated to form 5-methylcytosine"
caaattacgcgcaatggaaacatcttagtcctcagagcaatcctgggtgcaaggcagaggcggctgttatcaggcctattacacaggtttagggtgaaacttgaaaatgtgggcgggaaagt

SEQ ID NO: 11437 - DNA, 122 bp, Homo sapiens
  misc_feature (61)..(62): /note="This region represents a CpG dinucleotide"
  misc_feature (61)..(61): /note="Nucleotide may be methylated to form 5-methylcytosine"
ggcctgcattccacctgatggctttccttctggcagctctctacaccctgcatcctgcaccgagagcactgctcaggctgcctgaggactgaaagttacagctactcctcccacgccatccc

SEQ ID NO: 11438 - DNA, 122 bp, Homo sapiens
  misc_feature (61)..(62): /note="This region represents a CpG dinucleotide"
  misc_feature (61)..(61): /note="Nucleotide may be methylated to form 5-methylcytosine"
gggagggtcaaaacattcaacaaggaactaactaaacccttattatggcaatttctctagcgtctttcttttcagcttgggaatctcttagctagtaaagtcatttatatcaaggctcttcg

SEQ ID NO: 11439 - DNA, 122 bp, Homo sapiens
  misc_feature (61)..(62): /note="This region represents a CpG dinucleotide"
  misc_feature (61)..(61): /note="Nucleotide may be methylated to form 5-methylcytosine"
catgatccgccaacctcggcctcccaaagtgctgggattacaggcatgagccaccgcgcccggacaggacatgggggtttctaaacaaggctcttcagtatcagctcattgtgagtcacaga

SEQ ID NO: 11440 - DNA, 122 bp, Homo sapiens
  misc_feature (61)..(62): /note="This region represents a CpG dinucleotide"
  misc_feature (61)..(61): /note="Nucleotide may be methylated to form 5-methylcytosine"
ctgatgggctgtgagtagtggtagtggtggcagtggcaacagtgactgttctacatctaacgggagggaaggtggtacttcaccactgatgtgccacagaagcttactcattttcctctttt

SEQ ID NO: 11441 - DNA, 122 bp, Homo sapiens
  misc_feature (61)..(62): /note="This region represents a CpG dinucleotide"
  misc_feature (61)..(61): /note="Nucleotide may be methylated to form 5-methylcytosine"
ccagggagccataaagagatgacctccgataacctgaatcaatatttccccattggggctcgggcccccgcagctgtcttcttgatcatctggcagatgccacacccacccttggccctccc

SEQ ID NO: 11442 - DNA, 122 bp, Homo sapiens
  misc_feature (61)..(62): /note="This region represents a CpG dinucleotide"
  misc_feature (61)..(61): /note="Nucleotide may be methylated to form 5-methylcytosine"
taattgttctccgttcgttgatatcaaagacagttgaaggaaatgaattttgaaacttcacggtgtgccaccctacagtactgccctgacccttacatccagcggtgagtttgaatgtgaca

SEQ ID NO: 11443 - DNA, 122 bp, Homo sapiens
  misc_feature (61)..(62): /note="This region represents a CpG dinucleotide"
  misc_feature (61)..(61): /note="Nucleotide may be methylated to form 5-methylcytosine"
gggcaagtttttatgtggtcatctgtctttatttctcttaggtgtatactttaggagtggcgttgctggattatatggtgcctctgtttaaccttttgaagaactgccagattgttttccaa

SEQ ID NO: 11444 - DNA, 122 bp, Homo sapiens
  misc_feature (61)..(62): /note="This region represents a CpG dinucleotide"
  misc_feature (61)..(61): /note="Nucleotide may be methylated to form 5-methylcytosine"
caggaaactaaaaaaccacaacacttaaaagacaacttcctgtgggatttttggtgtctgcggctcagaatgaaaaaagcattatgtgtgcaaaatctttacacattttagatagaactact

SEQ ID NO: 11445 - DNA, 122 bp, Homo sapiens
  misc_feature (61)..(62): /note="This region represents a CpG dinucleotide"
  misc_feature (61)..(61): /note="Nucleotide may be methylated to form 5-methylcytosine"
taacttaagcatgctaagcaaaaaataacaaacttagattgtaaagtatttcaaaaagtccgcaggagatataatctttccaaagttaattatatacatgaagcttggcctaactgtgctga

SEQ ID NO: 11446 - DNA, 122 bp, Homo sapiens
  misc_feature (61)..(62): /note="This region represents a CpG dinucleotide"
  misc_feature (61)..(61): /note="Nucleotide may be methylated to form 5-methylcytosine"
gagaaatccaagaaccctaaatgtataaggagtgaagcaatgttgaaatggacttacaaacggatgcagctatattctccagtggagacagccagtgccaacttttgtgcttattccaaatt

SEQ ID NO: 11447 - DNA, 122 bp, Homo sapiens
  misc_feature (61)..(62): /note="This region represents a CpG dinucleotide"
  misc_feature (61)..(61): /note="Nucleotide may be methylated to form 5-methylcytosine"
gcaggaccccacctcctccccgtctgcagtccatcctgaccctacagtccccagtctcctcgtcccatgcctccgtctccagctgctgccttgcctccagggatggccccttttctgtcccc

SEQ ID NO: 11448 - DNA, 122 bp, Homo sapiens
  misc_feature (61)..(62): /note="This region represents a CpG dinucleotide"
  misc_feature (61)..(61): /note="Nucleotide may be methylated to form 5-methylcytosine"
cagggcttggtgaggtgactcgcggtcgcgggtgactcgccggcaggacactgcctggaacgcctggagcgcctcccactgcagacgtctgtccgcctccagccgctctcctctgacggtca

SEQ ID NO: 11449 - DNA, 122 bp, Homo sapiens
  misc_feature (61)..(62): /note="This region represents a CpG dinucleotide"
  misc_feature (61)..(61): /note="Nucleotide may be methylated to form 5-methylcytosine"
gctgagagtgataagaagataacagcaagacagacagagtgagagcgacaggctgacttacgtaacctggtggaaagtgatacaggcagattcgctgatgggaaacaaacagaaagggagtc

SEQ ID NO: 11450 - DNA, 122 bp, Homo sapiens
  misc_feature (61)..(62): /note="This region represents a CpG dinucleotide"
  misc_feature (61)..(61): /note="Nucleotide may be methylated to form 5-methylcytosine"
actgagagcgagcagaactccaattccaccaatgggagttctagctcagggggcagctctcggccccagatagctcaaatgtcactttatgaacgacaagcagtgcaggtgagactcagctc

SEQ ID NO: 11451 - DNA, 122 bp, Homo sapiens
  misc_feature (61)..(62): /note="This region represents a CpG dinucleotide"
  misc_feature (61)..(61): /note="Nucleotide may be methylated to form 5-methylcytosine"
tgtgggaggggctgggcctgcatcttcagggagtgagtggctgggtgcatttcaaacatacgtatgtgtatttttacacagcagcgtggacatgggtatgatttgtggagttcttttgtagt

SEQ ID NO: 11452 - DNA, 122 bp, Homo sapiens
  misc_feature (61)..(62): /note="This region represents a CpG dinucleotide"
  misc_feature (61)..(61): /note="Nucleotide may be methylated to form 5-methylcytosine"
gactggagggaccgcggctgagacaggctgctgcaccaggcggccctggaccgccgcttccgcccctaagccgccctcccagcccaggtgacaggtcgccctacccagggagcatcgccctc

SEQ ID NO: 11453 - DNA, 122 bp, Homo sapiens
  misc_feature (61)..(62): /note="This region represents a CpG dinucleotide"
  misc_feature (61)..(61): /note="Nucleotide may be methylated to form 5-methylcytosine"
cctgttgattccttttaagcgtttaagtttttccgtgcctgggattgccttatgtgcaaccgccagcttctgtcctttgaaggttttcctaagatattttcctagtttaataggaagtgtgg

SEQ ID NO: 11454 - DNA, 122 bp, Homo sapiens
  misc_feature (61)..(62): /note="This region represents a CpG dinucleotide"
  misc_feature (61)..(61): /note="Nucleotide may be methylated to form 5-methylcytosine"
gaaatacaggaggaggctgttttacaatgagcatgagcatgtcagagcaaggttcagagacgcggagagatattaatatggagcctttgtttacatacagaagacaaggacgtcatgccaga

SEQ ID NO: 11455 - DNA, 122 bp, Homo sapiens
  misc_feature (61)..(62): /note="This region represents a CpG dinucleotide"
  misc_feature (61)..(61): /note="Nucleotide may be methylated to form 5-methylcytosine"
aaaagcagaaatgtgtattctctttttttgtttcgatgaccttgttcctgacttgttactcgtgacttgagagatcagagggctagaggactagaatttatagaggtgttttttttgtttgt

SEQ ID NO: 11456 - DNA, 122 bp, Homo sapiens
  misc_feature (61)..(62): /note="This region represents a CpG dinucleotide"
  misc_feature (61)..(61): /note="Nucleotide may be methylated to form 5-methylcytosine"
attaacttggcaaagccatacagcattgagcttgggaactaggatccaaggccaggggtgcgtaacttttcagtccacaattccggcctttacaccaggcagtattccaaagttaccacatc

SEQ ID NO: 11457 - DNA, 122 bp, Homo sapiens
  misc_feature (61)..(62): /note="This region represents a CpG dinucleotide"
  misc_feature (61)..(61): /note="Nucleotide may be methylated to form 5-methylcytosine"
gacatgatccttatgtgggttaagctgaggcccctgccccagtgacacagaggcctcaaacggcacagtgcaccttctgtccgaagcagccggcgaggcggcccgcgaacctctgacgtgct

SEQ ID NO: 11458 - DNA, 122 bp, Homo sapiens
  misc_feature (61)..(62): /note="This region represents a CpG dinucleotide"
  misc_feature (61)..(61): /note="Nucleotide may be methylated to form 5-methylcytosine"
gaaaaacaggagatgcatctaatatggacagggagtaggagaagtggcttgctgcaaccacggaaataatgccatggactgtcattcagatgttatagcaacattatgaaaacgctgtgagt

SEQ ID NO: 11459 - DNA, 122 bp, Homo sapiens
  misc_feature (61)..(62): /note="This region represents a CpG dinucleotide"
  misc_feature (61)..(61): /note="Nucleotide may be methylated to form 5-methylcytosine"
atcccaaacttaaacagtttttgaaactttcccaagccaaaggtgctactgtcaaccttacgcgatgcttttaggatgatccatgttttaaaaagtgctgcttagacaattgtttggttatt

SEQ ID NO: 11460 - DNA, 122 bp, Homo sapiens
  misc_feature (61)..(62): /note="This region represents a CpG dinucleotide"
  misc_feature (61)..(61): /note="Nucleotide may be methylated to form 5-methylcytosine"
ctgcctctgctgagtcatgcaggttgtccagggaagtgggggaaagtcagcagtcaaaggcgtcatgcagctcctatgcaaatcgaagggctgatctcattccaactgtgccccaaataaca

SEQ ID NO: 11461 - DNA, 122 bp, Homo sapiens
  misc_feature (61)..(62): /note="This region represents a CpG dinucleotide"
  misc_feature (61)..(61): /note="Nucleotide may be methylated to form 5-methylcytosine"
cagcttccagcagtcacacgactccagagggactggaaggtcaagggaagcatgtagaaccgcaggctgttcacgtggcttggaggaggagatgacccacccttaataaaacaccgtctgcc

SEQ ID NO: 11462 - DNA, 122 bp, Homo sapiens
  misc_feature (61)..(62): /note="This region represents a CpG dinucleotide"
  misc_feature (61)..(61): /note="Nucleotide may be methylated to form 5-methylcytosine"
ccttttcatctttgtggttctttctgtgggcccctgtgcccgtgatctgccatgagtcagcgtctaaggatcccccaggcctcctgtctgtaaattattaacacctctcctgtcctctgttt

SEQ ID NO: 11463 - DNA, 122 bp, Homo sapiens
  misc_feature (61)..(62): /note="This region represents a CpG dinucleotide"
  misc_feature (61)..(61): /note="Nucleotide may be methylated to form 5-methylcytosine"
ttgtgctacctcaagactttaagtcatgaaattcactgtgaactggattaggatcttacgcgaggggcataagtaaagcttttcagaaattcaaagctgactcagccagtgtagtagaaaca

SEQ ID NO: 11464 - DNA, 122 bp, Homo sapiens
  misc_feature (61)..(62): /note="This region represents a CpG dinucleotide"
  misc_feature (61)..(61): /note="Nucleotide may be methylated to form 5-methylcytosine"
ccctatgttggtaatactgaaatgatgttaaatttccctgatttgttcttgaatttcctacgtccatttaaatacatggataatagtttgtttttttcgaaaagaatatacacaaggcacta

SEQ ID NO: 11465 - DNA, 122 bp, Homo sapiens
  misc_feature (61)..(62): /note="This region represents a CpG dinucleotide"
  misc_feature (61)..(61): /note="Nucleotide may be methylated to form 5-methylcytosine"
cgaaagacattggaggaaatggagctgcgtattgagactcaaaagcagaccctaaatgctcgggatgaatccattaagaagcttctggaaatgttgcagagcaaaggactttctgccaaggc

SEQ ID NO: 11466 - DNA, 122 bp, Homo sapiens
  misc_feature (61)..(62): /note="This region represents a CpG dinucleotide"
  misc_feature (61)..(61): /note="Nucleotide may be methylated to form 5-methylcytosine"
gacttctaaaacttaaatatgcccatatgcaaagctatgactggtcagaatttttatctccgtatcatggacactaagattttttttaatcttgttcatggcatttcatattagtcacctac

SEQ ID NO: 11467 - DNA, 122 bp, Homo sapiens
  misc_feature (61)..(62): /note="This region represents a CpG dinucleotide"
  misc_feature (61)..(61): /note="Nucleotide may be methylated to form 5-methylcytosine"
aaccctctgtaaacactcaatgtgttctcaccttgttatcattcccaatgatgtcgaatgcgtggttgccctctccagtataaaagtttgatgcagctttgcctggatgtacctgtctataa

SEQ ID NO: 11468 - DNA, 122 bp, Homo sapiens
  misc_feature (61)..(62): /note="This region represents a CpG dinucleotide"
  misc_feature (61)..(61): /note="Nucleotide may be methylated to form 5-methylcytosine"
acttgagaatccctgatgatatttaagacagaaaaactacagaatctaatgcaaagtccacggccaaactgtgctgggatagggttgcctagtggtccattcatcattttttttttctgctt

SEQ ID NO: 11469 - DNA, 122 bp, Homo sapiens
  misc_feature (61)..(62): /note="This region represents a CpG dinucleotide"
  misc_feature (61)..(61): /note="Nucleotide may be methylated to form 5-methylcytosine"
gaggttggagggaataacagcaaaaataattgacattcttgggtccatcggtcggtgtgccgggcctgtgccaaggacttcacctgcccttcccattcaatattcaccaaaaaacctatgtg

SEQ ID NO: 11470 - DNA, 122 bp, Homo sapiens
  misc_feature (61)..(62): /note="This region represents a CpG dinucleotide"
  misc_feature (61)..(61): /note="Nucleotide may be methylated to form 5-methylcytosine"
ccaacctgggagacagagcaagattgtgtcaaaaatcaaaacaaaaaaaaaccccagcaacgcttgagacctgctcctgcaagtatttaactcacagaaaaggagatagcaccaggtaaaaa

SEQ ID NO: 11471 - DNA, 122 bp, Homo sapiens
  misc_feature (61)..(62): /note="This region represents a CpG dinucleotide"
  misc_feature (61)..(61): /note="Nucleotide may be methylated to form 5-methylcytosine"
tctcttgggtttttcagaatacccagaaatccaggttccactctttctggttttcttgttcgtctacacagtcactgtagtggggaacttgggcatgataataatcatcagactcaattcaa

SEQ ID NO: 11472 - DNA, 122 bp, Homo sapiens
  misc_feature (61)..(62): /note="This region represents a CpG dinucleotide"
  misc_feature (61)..(61): /note="Nucleotide may be methylated to form 5-methylcytosine"
tatggctttaaaaaaatctgataaagtttctcataaaggctcacccaggaaaataaataacgcaatgttacaaatacatgtccaagttgatgaagtatttatggatgtggctgaggacagaa

SEQ ID NO: 11473 - DNA, 122 bp, Homo sapiens
  misc_feature (61)..(62): /note="This region represents a CpG dinucleotide"
  misc_feature (61)..(61): /note="Nucleotide may be methylated to form 5-methylcytosine"
ggcccctgggctgggggagggagcaggagctttggaccccagccccccagctttggttcccgctgggaattcaggccctgtcaggctgtaggtcctctcgggagccctctgcctgccctact

SEQ ID NO: 11474 - DNA, 122 bp, Homo sapiens
  misc_feature (61)..(62): /note="This region represents a CpG dinucleotide"
  misc_feature (61)..(61): /note="Nucleotide may be methylated to form 5-methylcytosine"
tgaacatataagtaaatgcatgtcaaataaggaaatacactgaggacaccaggtttctcacgtttgtaaacaagtacaaaaaaggaaaaggcttgaaaaccccaaaatgctgaaacggatgt

SEQ ID NO: 11475 - DNA, 122 bp, Homo sapiens
  misc_feature (61)..(62): /note="This region represents a CpG dinucleotide"
  misc_feature (61)..(61): /note="Nucleotide may be methylated to form 5-methylcytosine"
ccctataagctcgccgtctgtccaggggagcccggaacgggtccagatttcacccggtggcggatctcgctgtggcctccaaatgttgtaactgagtgagttatagagaaatgccacactct

SEQ ID NO: 11476 - DNA, 122 bp, Homo sapiens
  misc_feature (61)..(62): /note="This region represents a CpG dinucleotide"
  misc_feature (61)..(61): /note="Nucleotide may be methylated to form 5-methylcytosine"
tataattgttctggtgagtgatgagcctgttgtgaccttctcccacttggctgctgaccacgtgagagggcagggctggtccagagtcctcacccgacctgagcgtccaactgcaactgtat

SEQ ID NO: 11477 - DNA, 122 bp, Homo sapiens
  misc_feature (61)..(62): /note="This region represents a CpG dinucleotide"
  misc_feature (61)..(61): /note="Nucleotide may be methylated to form 5-methylcytosine"
ttgggagattttgttttcagtaaggctgctagtttcttcactaggtgcatatccttggctcgttcactcttcttatcactaaaccaataaatataacaaattattacagaatgtgaaattat

SEQ ID NO: 11478 - DNA, 122 bp, Homo sapiens
  misc_feature (61)..(62): /note="This region represents a CpG dinucleotide"
  misc_feature (61)..(61): /note="Nucleotide may be methylated to form 5-methylcytosine"
gaaacaaaaaccctaacaatttacagttcaccctctttgatgtaaggtgcagtggggacacgaagcccaggcctctgagtaggatgtagttggattggcacagaaagcaaactcttctttct

SEQ ID NO: 11479 - DNA, 122 bp, Homo sapiens
  misc_feature (61)..(62): /note="This region represents a CpG dinucleotide"
  misc_feature (61)..(61): /note="Nucleotide may be methylated to form 5-methylcytosine"
ttgggttacagggaactgcaaacatgcaattagatcagagatacctacaggtgcacaagccggtcaaagtcacacgcagacacaggtgccggcacactgtcagactatagataggccagtca

SEQ ID NO: 11480 - DNA, 122 bp, Homo sapiens
  misc_feature (61)..(62): /note="This region represents a CpG dinucleotide"
  misc_feature (61)..(61): /note="Nucleotide may be methylated to form 5-methylcytosine"
gcgtaaatgacaagcatctgggaccctccccttccctgatccctgccaccaccactcaatcggccagataatcaattgtttctgaggtcactttcacataatcttggcaactttagttgttg

SEQ ID NO: 11481 - DNA, 122 bp, Homo sapiens
  misc_feature (61)..(62): /note="This region represents a CpG dinucleotide"
  misc_feature (61)..(61): /note="Nucleotide may be methylated to form 5-methylcytosine"
ttaagagtgcaggctttggagtcagagtgtctgcactcaaatccacgttctgtacatttgcgtaagatcacttgggctagctacttgacttatctgaaccttggcttctctctccttccgtt

SEQ ID NO: 11482 - DNA, 122 bp, Homo sapiens
  misc_feature (61)..(62): /note="This region represents a CpG dinucleotide"
  misc_feature (61)..(61): /note="Nucleotide may be methylated to form 5-methylcytosine"
gtaactctaccactaatcatttaatcttgagtttctgcttcttcttccagaatatgaaggcgttgactgtctcaagttctcttctgttctgaacagctattctacaaaagctcccattctag

SEQ ID NO: 11483 - DNA, 122 bp, Homo sapiens
  misc_feature (61)..(62): /note="This region represents a CpG dinucleotide"
  misc_feature (61)..(61): /note="Nucleotide may be methylated to form 5-methylcytosine"
agaatatgttatctgacccttctactgttacagtcaaggaatttcacttttatttgcttgcgtatctacgtttccaactagccaatgaataccttggaaaaatgttttttctcatttatttc

SEQ ID NO: 11484 - DNA, 122 bp, Homo sapiens
  misc_feature (61)..(62): /note="This region represents a CpG dinucleotide"
  misc_feature (61)..(61): /note="Nucleotide may be methylated to form 5-methylcytosine"
cacaggatttccttgtgattgatcctgaataaaatcaagctgagtatctgctgtgcccaacggacaatgaattgctggttatgcccagtccctaacctggagcaggctttcagccagttcca

SEQ ID NO: 11485 - DNA, 122 bp, Homo sapiens
  misc_feature (61)..(62): /note="This region represents a CpG dinucleotide"
  misc_feature (61)..(61): /note="Nucleotide may be methylated to form 5-methylcytosine"
gatttctcctttcctctgccttgttgttctatgtgggcccccagctgattggatggtgcccgcctacattgagggcagatctttcccactcggtccactgactcacatgccagtctcctctg

SEQ ID NO: 11486 - DNA, 122 bp, Homo sapiens
  misc_feature (61)..(62): /note="This region represents a CpG dinucleotide"
  misc_feature (61)..(61): /note="Nucleotide may be methylated to form 5-methylcytosine"
gctgggagtcgggttctgtgccactcaatgccagcaaagcacaagccgtccctgcgccttcgggagctttcattctaggctggtggcagattactcacaaaactcagatgcacacaaaaatg

SEQ ID NO: 11487 - DNA, 122 bp, Homo sapiens
  misc_feature (61)..(62): /note="This region represents a CpG dinucleotide"
  misc_feature (61)..(61): /note="Nucleotide may be methylated to form 5-methylcytosine"
cggaaccattctaagtgttttacatgtattaactcatttaattctctcaacaatcctaggcgagagatcacgtcacttgcttaagatgacacagtagcagaactaggattcaaacacaagca

SEQ ID NO: 11488 - DNA, 122 bp, Homo sapiens
  misc_feature (61)..(62): /note="This region represents a CpG dinucleotide"
  misc_feature (61)..(61): /note="Nucleotide may be methylated to form 5-methylcytosine"
ccatgctccatgggaatgcttgacgactccagatatcctataattaactgcagggcttgacgggggacagagaaactccaccgcatgtttatttttacaaagaggcagccgcacagaggttg

SEQ ID NO: 11489 - DNA, 122 bp, Homo sapiens
  misc_feature (61)..(62): /note="This region represents a CpG dinucleotide"
  misc_feature (61)..(61): /note="Nucleotide may be methylated to form 5-methylcytosine"
agagcaaacactgagttaaccaccttggaaaatagtgaggcagtttctttcaaagttaaacgtacacctctgctgtattctgagtgtctgtccccagcgttcgtatgttgaaaccctaaccc

SEQ ID NO: 11490 - DNA, 122 bp, Homo sapiens
  misc_feature (61)..(62): /note="This region represents a CpG dinucleotide"
  misc_feature (61)..(61): /note="Nucleotide may be methylated to form 5-methylcytosine"
taaacacttagaaaaatgtcgtaaccaagcacactgtaaaagcattgcacagccaggttccgtggcatttccctcttttggaggacccaggattcagtgaaaaagtaagtttttaattcttt

SEQ ID NO: 11491 - DNA, 122 bp, Homo sapiens
  misc_feature (61)..(62): /note="This region represents a CpG dinucleotide"
  misc_feature (61)..(61): /note="Nucleotide may be methylated to form 5-methylcytosine"
gtgtgatgaagtcagaaagatgctcaggagacagataatgaaaggctttagatgccattccgaggagtttaatcctaaagacattaagaaggaaggcccattgaagtgcataaggaatgatt

SEQ ID NO: 11492 - DNA, 122 bp, Homo sapiens
  misc_feature (61)..(62): /note="This region represents a CpG dinucleotide"
  misc_feature (61)..(61): /note="Nucleotide may be methylated to form 5-methylcytosine"
gagaggcacatggccttgacctccagccccaaggggaaacagccaggttgctgttggggccgcagatgtgcctggccttacttactctgcagctcagcctcctcccctgtggtgtcagggac

SEQ ID NO: 11493 - DNA, 122 bp, Homo sapiens
  misc_feature (61)..(62): /note="This region represents a CpG dinucleotide"
  misc_feature (61)..(61): /note="Nucleotide may be methylated to form 5-methylcytosine"
tacacataataattccgcaaaccctgttgagctcctacatttgccaggcactgtgctaggcgttggagggataacttggagagaaaactgacaaggttcctgctttcacggaggcgacagtc

SEQ ID NO: 11494 - DNA, 122 bp, Homo sapiens
  misc_feature (61)..(62): /note="This region represents a CpG dinucleotide"
  misc_feature (61)..(61): /note="Nucleotide may be methylated to form 5-methylcytosine"
catcaggaaacttatacagtcatggcagaaggggaagcaaaaacatccttcttcatgtggcggcagcaaggaaaagtgctgagccaaaggagcaaaagtcccttataaagccatcagatctt

SEQ ID NO: 11495 - DNA, 122 bp, Homo sapiens
  misc_feature (61)..(62): /note="This region represents a CpG dinucleotide"
  misc_feature (61)..(61): /note="Nucleotide may be methylated to form 5-methylcytosine"
ctctgtgccaggacgcactaggcacctagacttcggagaggagggcgccgaccccggccacggtgctatgggcatgtcacggggcagccctgagcagccaataacccccaaacaccctgccc

SEQ ID NO: 11496 - DNA, 122 bp, Homo sapiens
  misc_feature (61)..(62): /note="This region represents a CpG dinucleotide"
  misc_feature (61)..(61): /note="Nucleotide may be methylated to form 5-methylcytosine"
ggagaaaaaaaggatcgtctcagcatcaggctgacctgggtttcagtctagctttggctgcgtgccttggatagtaaattttcctccttgaaccttggcttcttcctccagggagaaaaacc

SEQ ID NO: 11497 - DNA, 122 bp, Homo sapiens
  misc_feature (61)..(62): /note="This region represents a CpG dinucleotide"
  misc_feature (61)..(61): /note="Nucleotide may be methylated to form 5-methylcytosine"
aaaaaggactactggctcagcaaatatttatcaagcactgaatacacattcctattatgccgtgatgttagtgtctcttattttcaatcttgatcaagataagaagtatcaacagatgtgtc

SEQ ID NO: 11498 - DNA, 122 bp, Homo sapiens
  misc_feature (61)..(62): /note="This region represents a CpG dinucleotide"
  misc_feature (61)..(61): /note="Nucleotide may be methylated to form 5-methylcytosine"
actcagataatcacattagttttgtcattaaaagatcccttttatagaaagtacctaaaccgcttaaaccacccagagaggttgcatacattatcaaacaccaagacaaacaaaagggattt

SEQ ID NO: 11499 - DNA, 122 bp, Homo sapiens
  misc_feature (61)..(62): /note="This region represents a CpG dinucleotide"
  misc_feature (61)..(61): /note="Nucleotide may be methylated to form 5-methylcytosine"
atgaacttttttccctaagctgatcattcaagtacactagatcccttctgaaataccaatcgtcagaaaacagaatttgacactagccacccacgagtttaaaggaccgctgcaagatgcat

SEQ ID NO: 11500 - DNA, 122 bp, Homo sapiens
  misc_feature (61)..(62): /note="This region represents a CpG dinucleotide"
  misc_feature (61)..(61): /note="Nucleotide may be methylated to form 5-methylcytosine"
gcgtctccctggaggggctgagtcgcagggtgtgtagggcaagtccgtggagggctgagtcgcagggtgtgcagggtgactccatggagggctgagttgcccgccgtggtcagatccctggg

SEQ ID NO: 11501 - DNA, 122 bp, Homo sapiens
  misc_feature (61)..(62): /note="This region represents a CpG dinucleotide"
  misc_feature (61)..(61): /note="Nucleotide may be methylated to form 5-methylcytosine"
tccaggctgagggaacagcctgggcaaaggccctggggcaggacagtgtctggtgtgtttcgggaacatggaggaggcatatgtggctggagtaaagccagcaagacagagagtagggggag

SEQ ID NO: 11502 - DNA, 122 bp, Homo sapiens
  misc_feature (61)..(62): /note="This region represents a CpG dinucleotide"
  misc_feature (61)..(61): /note="Nucleotide may be methylated to form 5-methylcytosine"
tgctccagccacgtcagactcccttgtcctccccacacagcaaccaatcctgagtgtccacggctccagaggtatggttgggaaccccctctgtgagttttcacagatgcatcatcctagca

SEQ ID NO: 11503 - DNA, 122 bp, Homo sapiens
  misc_feature (61)..(62): /note="This region represents a CpG dinucleotide"
  misc_feature (61)..(61): /note="Nucleotide may be methylated to form 5-methylcytosine"
cacatggtaggtgcttggcaaatatgtataaaaacatgccatgtaacaaaaaaggaggaacgaactgtgacctctgcccttaaggaaggtaagacttaacctaggagtagacaaacatccag

SEQ ID NO: 11504 - DNA, 122 bp, Homo sapiens
  misc_feature (61)..(62): /note="This region represents a CpG dinucleotide"
  misc_feature (61)..(61): /note="Nucleotide may be methylated to form 5-methylcytosine"
gtacgttttgacaaaagactgctcctcccctgcctcgcccttccaggtgctggtgaagaacgacgcccgccggacacgctccttctcgtggaccaagtcggtggagctggtgctgggcgaga

SEQ ID NO: 11505 - DNA, 122 bp, Homo sapiens
  misc_feature (61)..(62): /note="This region represents a CpG dinucleotide"
  misc_feature (61)..(61): /note="Nucleotide may be methylated to form 5-methylcytosine"
ggacggttcattagtcataactactataactgtacagcagagactgcagttttatctcatcgtacatctttgatcaagctgcctcaattctgcttcatcagcatatgaagttacattattgg

SEQ ID NO: 11506 - DNA, 122 bp, Homo sapiens
  misc_feature (61)..(62): /note="This region represents a CpG dinucleotide"
  misc_feature (61)..(61): /note="Nucleotide may be methylated to form 5-methylcytosine"
atacctaccagtttgtggttctgactacatcacctatgggaatgaatgtcacttgtgtaccgagagcttgtgagtacctcataagaagaaaatgagatctggagtcagtgctctctactaca

SEQ ID NO: 11507 - DNA, 122 bp, Homo sapiens
  misc_feature (61)..(62): /note="This region represents a CpG dinucleotide"
  misc_feature (61)..(61): /note="Nucleotide may be methylated to form 5-methylcytosine"
actgtcagtggaaagaagataattatcagcatttgtttttgtttctgacaaaagaatagccgctgggtatggtatctctgaaaacggcaagcttggtcatgtttctttatcttgaatttaca

SEQ ID NO: 11508 - DNA, 122 bp, Homo sapiens
  misc_feature (61)..(62): /note="This region represents a CpG dinucleotide"
  misc_feature (61)..(61): /note="Nucleotide may be methylated to form 5-methylcytosine"
acaagatgtactttcgacactgcccttccaaccagctgtagggactgaagtttgttgagtcgtccatactttatctatttttttttttttttttttgaggtggagtctcactctgtcaccag

SEQ ID NO: 11509 - DNA, 122 bp, Homo sapiens
  misc_feature (61)..(62): /note="This region represents a CpG dinucleotide"
  misc_feature (61)..(61): /note="Nucleotide may be methylated to form 5-methylcytosine"
ctggttaagggaaattaattgaggtaaattacggagagaaagcattgctccgccagacagcgtcaggccatggccagagcacagcagaaaagatttctacagttctataaaaccacaagacg

SEQ ID NO: 11510 - DNA, 122 bp, Homo sapiens
  misc_feature (61)..(62): /note="This region represents a CpG dinucleotide"
  misc_feature (61)..(61): /note="Nucleotide may be methylated to form 5-methylcytosine"
agagcactcttcagcccctgctgtcaccaaagccccacctcagttcttgcccttaggtaacgccaagatagcaaaatggaattttaccaaaccgctcttaggttccttccccaggagaccag

SEQ ID NO: 11511 - DNA, 122 bp, Homo sapiens
  misc_feature (61)..(62): /note="This region represents a CpG dinucleotide"
  misc_feature (61)..(61): /note="Nucleotide may be methylated to form 5-methylcytosine"
agaagcctcaaggataagaagagaaattccggggtggctgcctgttactcagcaagaaagcgaacactggcttgctggctcagcacttaacctgagatgaggatgtcctaacagcccttttt

SEQ ID NO: 11512 - DNA, 122 bp, Homo sapiens
  misc_feature (61)..(62): /note="This region represents a CpG dinucleotide"
  misc_feature (61)..(61): /note="Nucleotide may be methylated to form 5-methylcytosine"
ggcggggggggggggggcgtggaggcggggacagggcggccaggccggcgggggcggggccgccaccaggggaccggaggggaggggcgcgcggcctgggctggccggtgccgggaggaagg

SEQ ID NO: 11513 - DNA, 122 bp, Homo sapiens
  misc_feature (61)..(62): /note="This region represents a CpG dinucleotide"
  misc_feature (61)..(61): /note="Nucleotide may be methylated to form 5-methylcytosine"
cggagctgtgcgactgtgaccaagccacttgacctctctgtttcctggtgtgaagaaagccggcctgcttgccagacttggtcggccatagcttgaagggggtctttaagttaagacacagg

SEQ ID NO: 11514 - DNA, 122 bp, Homo sapiens
  misc_feature (61)..(62): /note="This region represents a CpG dinucleotide"
  misc_feature (61)..(61): /note="Nucleotide may be methylated to form 5-methylcytosine"
taggtcttggcagggagacaagggatcctagtctgtacccaagactcatctgagaggtgacgtcactgaacccggctggggaccattttatgcaaagtctatggagagcaggtttgcctcag

SEQ ID NO: 11515 - DNA, 122 bp, Homo sapiens
  misc_feature (61)..(62): /note="This region represents a CpG dinucleotide"
  misc_feature (61)..(61): /note="Nucleotide may be methylated to form 5-methylcytosine"
tggttaggattgaattattaataacagaactttgctgcaggattgcaggaatgactcttacgtggatggatccagcctctgattattgcttttgtctgtagcctagaggctgtcaagcaggg

SEQ ID NO: 11516 - DNA, 122 bp, Homo sapiens
  misc_feature (61)..(62): /note="This region represents a CpG dinucleotide"
  misc_feature (61)..(61): /note="Nucleotide may be methylated to form 5-methylcytosine"
gggcatctcaaatgagagggcagcatacatacatgtaattggttgcttttttctttccctcggcagtctgtaaaaaatgtgaaaatgctcctgcttctgcctagccattaaaaggcagtggc

SEQ ID NO: 11517 - DNA, 122 bp, Homo sapiens
  misc_feature (61)..(62): /note="This region represents a CpG dinucleotide"
  misc_feature (61)..(61): /note="Nucleotide may be methylated to form 5-methylcytosine"
tagaagtggaaatgcccagccctggttttcacatgcagttaaaagtttaccgaagagtttcgctgtaaagccaacatctggctgctcctgggctgtttccagggaattttatcaattcagcc

SEQ ID NO: 11518 - DNA, 122 bp, Homo sapiens
  misc_feature (61)..(62): /note="This region represents a CpG dinucleotide"
  misc_feature (61)..(61): /note="Nucleotide may be methylated to form 5-methylcytosine"
taactacacatttccagcaaaagtaaagaaatgatactcaatttcattattcaccacagacgccaagatcattctttagtctgattttagcctcacgtggtctcacccgaacatttgttttt

SEQ ID NO: 11519 - DNA, 122 bp, Homo sapiens
  misc_feature (61)..(62): /note="This region represents a CpG dinucleotide"
  misc_feature (61)..(61): /note="Nucleotide may be methylated to form 5-methylcytosine"
tgtgttgaaaaaaaaaaaagctgggggtcagggagcagatagaagaaataccttggccagcgcaactggaaagggaggagccaaaaggggaacactttcttgattgtcccagcctcattagg

SEQ ID NO: 11520 - DNA, 122 bp, Homo sapiens
  misc_feature (61)..(62): /note="This region represents a CpG dinucleotide"
  misc_feature (61)..(61): /note="Nucleotide may be methylated to form 5-methylcytosine"
tcagtaagttctcatcattagactgtaagcttcttgaggtcttagaagcttacagtctaacgtagcttagagctgtgctgtccaacacagtagctatgagtcacatgtggtgagtacaaatt

SEQ ID NO: 11521 - DNA, 122 bp, Homo sapiens
  misc_feature (61)..(62): /note="This region represents a CpG dinucleotide"
  misc_feature (61)..(61): /note="Nucleotide may be methylated to form 5-methylcytosine"
ggccagacttggggaaaattcaggtcacactgcaaggtagcatgtgttagggcctgcatccgtggtgcagggagtgccctaggaatgtggaagcgggagaactcagggcagatcagatgggc

SEQ ID NO: 11522 - DNA, 122 bp, Homo sapiens
  misc_feature (61)..(62): /note="This region represents a CpG dinucleotide"
  misc_feature (61)..(61): /note="Nucleotide may be methylated to form 5-methylcytosine"
caaagaacagcttctcacaaagtgcatggcacagtaaggtaagctgatgtgagagcagcacgtgaggccccactcaccctgggtggaacctagtgggtctctgggccaggggactctgtgga

SEQ ID NO: 11523 - DNA, 122 bp, Homo sapiens
  misc_feature (61)..(62): /note="This region represents a CpG dinucleotide"
  misc_feature (61)..(61): /note="Nucleotide may be methylated to form 5-methylcytosine"
attcgagtgtgctgacctctaggggggttagtccagtgcatggtctagaattgctcaaatcggccttttgaaaaaatgaatcatgtacaatgataaaggtgtggacaggaccacaagtaacg

SEQ ID NO: 11524 - DNA, 122 bp, Homo sapiens
  misc_feature (61)..(62): /note="This region represents a CpG dinucleotide"
  misc_feature (61)..(61): /note="Nucleotide may be methylated to form 5-methylcytosine"
tcctgtcctaccactgtttgtcttgctcattcctcaaacattgctgttctttcaacaagccgtgtttgttcctaccatctttgcacctgccctctgcctagaaagctcttctcctccatggt

SEQ ID NO: 11525 - DNA, 122 bp, Homo sapiens
  misc_feature (61)..(62): /note="This region represents a CpG dinucleotide"
  misc_feature (61)..(61): /note="Nucleotide may be methylated to form 5-methylcytosine"
tttcctgagaaaggaagtgaggtttggaaatcccaggcaggtcaccctgatgaggggcagcgttttgtaatcagcagtgacaaggccacagattccagctctgtgggtcacacacccaggag

SEQ ID NO: 11526 - DNA, 122 bp, Homo sapiens
  misc_feature (61)..(62): /note="This region represents a CpG dinucleotide"
  misc_feature (61)..(61): /note="Nucleotide may be methylated to form 5-methylcytosine"
tctgaaggacacagagtgctctaagaaagggacgatggggcagatccatgttcacaaacacgcccatgtgaattcactctcagatgtctcctcgtgtcagcacgctgggtgccagcacgctc

SEQ ID NO: 11527 - DNA, 122 bp, Homo sapiens
  misc_feature (61)..(62): /note="This region represents a CpG dinucleotide"
  misc_feature (61)..(61): /note="Nucleotide may be methylated to form 5-methylcytosine"
aagccaggaaggaaggaagcaaaccccagcagtgctgtacctggagggcgatgaatgagtcgcagaggctccctttctgagctgggattaggagttgataatggtcttgcaagtgcagttct

SEQ ID NO: 11528 - DNA, 122 bp, Homo sapiens
  misc_feature (61)..(62): /note="This region represents a CpG dinucleotide"
  misc_feature (61)..(61): /note="Nucleotide may be methylated to form 5-methylcytosine"
ccctcgtgtacattatgattaacagaaataagagaatacctgctcagctgcctgcttgatcgctgtctccagaatgtctatattctcgttcatgagattcaaggcatcctcctgagaaactg

SEQ ID NO: 11529 - DNA, 122 bp, Homo sapiens
  misc_feature (61)..(62): /note="This region represents a CpG dinucleotide"
  misc_feature (61)..(61): /note="Nucleotide may be methylated to form 5-methylcytosine"
ctgcctgggatgatattgctaagacattgccatgatgaggcagtttggcctttgttcccacggaaggtgatgttccttgcactttctcccagcagggtatgataaggatgttcctgtgcctt

SEQ ID NO: 11530 - DNA, 122 bp, Homo sapiens
  misc_feature (61)..(62): /note="This region represents a CpG dinucleotide"
  misc_feature (61)..(61): /note="Nucleotide may be methylated to form 5-methylcytosine"
ctcctgcttccctgccccacccctgctgccagtggtgcctctgtgcatggctcacgtggccgagggctagccactgcatgaggacaggcatcctcactgccctgcccagagtgcacataatc

SEQ ID NO: 11531 - DNA, 122 bp, Homo sapiens
  misc_feature (61)..(62): /note="This region represents a CpG dinucleotide"
  misc_feature (61)..(61): /note="Nucleotide may be methylated to form 5-methylcytosine"
tctccattcctcttaacagtcctgggtgggggaggggggagtatatttcctccaagttatcgatgggaaactgaagctcagagccgtcaaggccacccaagcaggaagtggctgtgaggctg

SEQ ID NO: 11532 - DNA, 122 bp, Homo sapiens
  misc_feature (61)..(62): /note="This region represents a CpG dinucleotide"
  misc_feature (61)..(61): /note="Nucleotide may be methylated to form 5-methylcytosine"
gccgccttgggaatgaatcacatcctgttctggaaacatgaaaggatgttctaaagagcacgtgacccattgctgggcttggtagcttggtcagaacttcatttgctatttattggaatttg

SEQ ID NO: 11533 - DNA, 122 bp, Homo sapiens
  misc_feature (61)..(62): /note="This region represents a CpG dinucleotide"
  misc_feature (61)..(61): /note="Nucleotide may be methylated to form 5-methylcytosine"
caaacgccaaccccatcctggtccagtcatctacctgggctctgcaataacagtggtgcacgagtgaaaaagtgagcagatgcaagctcccccagaacgtttcagtcccagagcagcttagt

SEQ ID NO: 11534 - DNA, 122 bp, Homo sapiens
  misc_feature (61)..(62): /note="This region represents a CpG dinucleotide"
  misc_feature (61)..(61): /note="Nucleotide may be methylated to form 5-methylcytosine"
tatatgaggcaacgagaaacgtccatgggcggagcgtcctcggcattatgtgagcggggtcgggatcaggactgaaaaggtgagacttgggactgggactttgaaaagctgcttaaggaact

SEQ ID NO: 11535 - DNA, 122 bp, Homo sapiens
  misc_feature (61)..(62): /note="This region represents a CpG dinucleotide"
  misc_feature (61)..(61): /note="Nucleotide may be methylated to form 5-methylcytosine"
gtgatgacaacagtgcccgcctctgcattaaatgtgatggtgtaggtaaagaacctgctccgtttctggcattggaagggtgcttagtcaatgctagctacacttgtatgataacagagttc

SEQ ID NO: 11536 - DNA, 122 bp, Homo sapiens
  misc_feature (61)..(62): /note="This region represents a CpG dinucleotide"
  misc_feature (61)..(61): /note="Nucleotide may be methylated to form 5-methylcytosine"
aatccactaaaactgtactgacctccttgccttttgccttctccatacttgtagaagaagcggagcctcgcaacatgcttccaaaatggcccctgccccaagattgctatttgcaaagtctc

SEQ ID NO: 11537 - DNA, 122 bp, Homo sapiens
  misc_feature (61)..(62): /note="This region represents a CpG dinucleotide"
  misc_feature (61)..(61): /note="Nucleotide may be methylated to form 5-methylcytosine"
ccttagcaataccctcccaagggccttcggatgtagttcaggggagtgaccaagagatgacgctattcttgttagtgcaagccagatgagctgggaaaaagaacatttcaccaaacagcttt

SEQ ID NO: 11538 - DNA, 122 bp, Homo sapiens
  misc_feature (61)..(62): /note="This region represents a CpG dinucleotide"
  misc_feature (61)..(61): /note="Nucleotide may be methylated to form 5-methylcytosine"
cagttgtcttgggtgcctgatcaaatcagtaactgaccaatcagtatggccaaaccattgcgtactggctgaatatcagattgggcgggaggccaaacagacaggcctctgggccatgtttc

SEQ ID NO: 11539 - DNA, 122 bp, Homo sapiens
  misc_feature (61)..(62): /note="This region represents a CpG dinucleotide"
  misc_feature (61)..(61): /note="Nucleotide may be methylated to form 5-methylcytosine"
gggcagaaaaggaaaggtaggctgtaggggacataaattacaaactggagtccctcaattcgtgagtggagattcacgtgtctattacagacaagccacattgtttcaggctcttatagtga

SEQ ID NO: 11540 - DNA, 122 bp, Homo sapiens
  misc_feature (61)..(62): /note="This region represents a CpG dinucleotide"
  misc_feature (61)..(61): /note="Nucleotide may be methylated to form 5-methylcytosine"
tatgccaccctcccctatggtggacagacaataaatgctgacaaaatgttgtgcaagttacgtgttcattgccaacaatcttgagacatggaaagctggtatctaatttttcattaaacaag

SEQ ID NO: 11541 - DNA, 122 bp, Homo sapiens
  misc_feature (61)..(62): /note="This region represents a CpG dinucleotide"
  misc_feature (61)..(61): /note="Nucleotide may be methylated to form 5-methylcytosine"
ggcataaaaatagacagttgttctgagaaacatatctgtttattcctagttcagtaacagcgcaatgagatcctaaattatgaggtactttttgtttatcttattgtctcattggcaaccag

SEQ ID NO: 11542 - DNA, 122 bp, Homo sapiens
  misc_feature (61)..(62): /note="This region represents a CpG dinucleotide"
  misc_feature (61)..(61): /note="Nucleotide may be methylated to form 5-methylcytosine"
ttattagcaagcatgctcagtgtttgactagcatcacctgaccaactttaaaagtattaacgagaatattcacaggctaattgaaagcactatgcagtctggtctcagagttccatactgct

SEQ ID NO: 11543 - DNA, 122 bp, Homo sapiens
  misc_feature (61)..(62): /note="This region represents a CpG dinucleotide"
  misc_feature (61)..(61): /note="Nucleotide may be methylated to form 5-methylcytosine"
tcaatgtaagttcactttatcaagtctgcatgaatattctcattccttcttcctgacccacgctgaattgttttatagcagaaggtcaaacagggtatgtgttctttctcactacagtatca

SEQ ID NO: 11544 - DNA, 122 bp, Homo sapiens
  misc_feature (61)..(62): /note="This region represents a CpG dinucleotide"
  misc_feature (61)..(61): /note="Nucleotide may be methylated to form 5-methylcytosine"
ttccctaaggagggtttatttaacatacttacaacattgtttactcagataaggaaacaccgagatgctaaaaaaatgattgtgcatgtatgtatgtgatatgcgtaagggtctagcttcct

SEQ ID NO: 11545 - DNA, 122 bp, Homo sapiens
  misc_feature (61)..(62): /note="This region represents a CpG dinucleotide"
  misc_feature (61)..(61): /note="Nucleotide may be methylated to form 5-methylcytosine"
agaccatttgtgtgtcttcagtctcagtgactttatgctctgggttcagcacttgagcttcgctcttatcaaaagctggcaccattaaagggcattcatcatcaataagacaataggacact

SEQ ID NO: 11546 - DNA, 122 bp, Homo sapiens
  misc_feature (61)..(62): /note="This region represents a CpG dinucleotide"
  misc_feature (61)..(61): /note="Nucleotide may be methylated to form 5-methylcytosine"
gccaggctcactggagtggaagcgtgcactctcatctgtgaggctaggctgttccctggccgtcacctcaccctttcatctctgcttacctgcatctggtgtcaagaatcagaatgggagag

SEQ ID NO: 11547 - DNA, 122 bp, Homo sapiens
  misc_feature (61)..(62): /note="This region represents a CpG dinucleotide"
  misc_feature (61)..(61): /note="Nucleotide may be methylated to form 5-methylcytosine"
gcgtttgcaggtcctttcttcacaggtttgaaccgtgtagttaatgtggcagacacataacgctgtgctaaaacattctcatggcttattttcactggattcacagtactagagtcaacagc

SEQ ID NO: 11548 - DNA, 122 bp, Homo sapiens
  misc_feature (61)..(62): /note="This region represents a CpG dinucleotide"
  misc_feature (61)..(61): /note="Nucleotide may be methylated to form 5-methylcytosine"
caataaaagatgtaggatttgaattagaattcttgctactgaatctgtgttcttaaccaccgctttctagagagaaagaggacaaagaaggcaagtcagttctcagccctgagaattccacc

SEQ ID NO: 11549 - DNA, 122 bp, Homo sapiens
  misc_feature (61)..(62): /note="This region represents a CpG dinucleotide"
  misc_feature (61)..(61): /note="Nucleotide may be methylated to form 5-methylcytosine"
tcatgaaaagcaggaaagccaggatctcagagctactgcaaaagttccttctccaccagacgagcaccaagaagctgagaatgctgtttcctcaggtaaacgtggaataaatggtatgtcaa

SEQ ID NO: 11550 - DNA, 122 bp, Homo sapiens
  misc_feature (61)..(62): /note="This region represents a CpG dinucleotide"
  misc_feature (61)..(61): /note="Nucleotide may be methylated to form 5-methylcytosine"
ggggagggagcaaccctgactgtgggtcgatagacgaaaatttctccctgtcctcttgctcgtaaaatgtttgtggccaacatattgcacaacattcccagagaggccacaaaaggcagtgc

SEQ ID NO: 11551 - DNA, 122 bp, Homo sapiens
  misc_feature (61)..(62): /note="This region represents a CpG dinucleotide"
  misc_feature (61)..(61): /note="Nucleotide may be methylated to form 5-methylcytosine"
gcatgtgctccccgcccccgagaggcctgcgtcatgcggtctcgcccgctctgcgccaggcgtcctgctaacgtgtcctggagggactctcagttcctcccgcccgcatcctgcgcgggaac

SEQ ID NO: 11552 - DNA, 122 bp, Homo sapiens
  misc_feature (61)..(62): /note="This region represents a CpG dinucleotide"
  misc_feature (61)..(61): /note="Nucleotide may be methylated to form 5-methylcytosine"
cagacgccacgtcctatatctcccgcaacacggtcgccatttttggtcgccatttttggtcgccattctgttggtactaaggtgttgtggttggtagaagcttaagtgagagcatcgcgagt

SEQ ID NO: 11553 - DNA, 122 bp, Homo sapiens
  misc_feature (61)..(62): /note="This region represents a CpG dinucleotide"
  misc_feature (61)..(61): /note="Nucleotide may be methylated to form 5-methylcytosine"
acagagtaaatccaggatttcctctccaagcagtgagtaaatgtcatctatgtaagtactcgttattcctgttgttgacttgatttacacagaaaaaaaaatcgtacctgaaaaatacattt

SEQ ID NO: 11554 - DNA, 122 bp, Homo sapiens
  misc_feature (61)..(62): /note="This region represents a CpG dinucleotide"
  misc_feature (61)..(61): /note="Nucleotide may be methylated to form 5-methylcytosine"
aagcactgtgcatgtgcccgaggtaagaaatcagaaaccattttctcacaacaatttaaacgttgctgttttttgttactggaagtacaaacttgaagaagtagcttaatgaagatgtcatt

SEQ ID NO: 11555 - DNA, 122 bp, Homo sapiens
  misc_feature (61)..(62): /note="This region represents a CpG dinucleotide"
  misc_feature (61)..(61): /note="Nucleotide may be methylated to form 5-methylcytosine"
ctccacgcctaattaagtcagatctgtccaagttctcgtaacagtatacaaatcctttctcgctctcagcagtttgtaattatgtattcgggtcagtctccttactagacggtaagctctat

SEQ ID NO: 11556 - DNA, 122 bp, Homo sapiens
  misc_feature (61)..(62): /note="This region represents a CpG dinucleotide"
  misc_feature (61)..(61): /note="Nucleotide may be methylated to form 5-methylcytosine"
tgcccgcagccatgatgatccgattggggatggggattactggggcatcttctcactctgcgacggcgcccgcggtgggcagggggtggtgcccagggggagcaaaaaagtaaattgcaggg

SEQ ID NO: 11557 - DNA, 122 bp, Homo sapiens
  misc_feature (61)..(62): /note="This region represents a CpG dinucleotide"
  misc_feature (61)..(61): /note="Nucleotide may be methylated to form 5-methylcytosine"
tgttggtgttttttttttttttaccccccttttttatttattatttttttgcacattgatcggatccttgggaacgagagaaaaaagaaacccaaactcacgcgtgcagaagatctcccccc

SEQ ID NO: 11558 - DNA, 122 bp, Homo sapiens
  misc_feature (61)..(62): /note="This region represents a CpG dinucleotide"
  misc_feature (61)..(61): /note="Nucleotide may be methylated to form 5-methylcytosine"
acctcaggtgatccacccacctcagcctcccaaagtgctgggattacaggtgtgagccatcgtgcccagccaagacagactttcaatacacaggaaatggtgagtcccttagaggtttctga

SEQ ID NO: 11559 - DNA, 122 bp, Homo sapiens
  misc_feature (61)..(62): /note="This region represents a CpG dinucleotide"
  misc_feature (61)..(61): /note="Nucleotide may be methylated to form 5-methylcytosine"
atacagtatgcatacctacagagtcagcaccacatggatgccaccaagatttataacttgcgccctctggagcagtggcccaacctgcacctggtcctgcttgagccacagctagggtgacg

SEQ ID NO: 11560 - DNA, 122 bp, Homo sapiens
  misc_feature (61)..(62): /note="This region represents a CpG dinucleotide"
  misc_feature (61)..(61): /note="Nucleotide may be methylated to form 5-methylcytosine"
aacaggaatctgggtttgacatccatagcatctattaaatatcacaatacaaacttcctacgtctttaaccttatcccgtcttctccctcactttgccaagatttgaacttcctgcagattt

SEQ ID NO: 11561 - DNA, 122 bp, Homo sapiens
  misc_feature (61)..(62): /note="This region represents a CpG dinucleotide"
  misc_feature (61)..(61): /note="Nucleotide may be methylated to form 5-methylcytosine"
ttaaatgctgagggcagagacttcctctttctctttatatccttacccccacccccaccccgtggtgaccagcagtgttcaatacatgtgtgtttatttacttgtgggtgcttggaaacaat

SEQ ID NO: 11562 - DNA, 122 bp, Homo sapiens
  misc_feature (61)..(62): /note="This region represents a CpG dinucleotide"
  misc_feature (61)..(61): /note="Nucleotide may be methylated to form 5-methylcytosine"
ctttgtttttcagtgtagatgataattgcaggagactgatgtagtcctcagcacaggccacgaagagactgttagaaggaaagtggaggaagattgattattctgatgactcttcaccatgt

SEQ ID NO: 11563 - DNA, 122 bp, Homo sapiens
  misc_feature (61)..(62): /note="This region represents a CpG dinucleotide"
  misc_feature (61)..(61): /note="Nucleotide may be methylated to form 5-methylcytosine"
aatggagtccaaaggaagtctatgagcagggttaaagttatgctggaagtcaggaaccaccggaacaggttgggaaaagagcagaaagttgaaactgttaagagctcatggttagtgtcctg

SEQ ID NO: 11564 - DNA, 122 bp, Homo sapiens
  misc_feature (61)..(62): /note="This region represents a CpG dinucleotide"
  misc_feature (61)..(61): /note="Nucleotide may be methylated to form 5-methylcytosine"
gggttgggaaagcttgtctacctttacctaagagattctttaatctgcatgttcatctcacgtatgttgacaaaacaaccatcagcttggaggggtgtggggagaaagaagcactatgggag

SEQ ID NO: 11565 - DNA, 122 bp, Homo sapiens
  misc_feature (61)..(62): /note="This region represents a CpG dinucleotide"
  misc_feature (61)..(61): /note="Nucleotide may be methylated to form 5-methylcytosine"
ctctccaaactttccccgtattggcacactacttgtatatctgtgtttctaacagctgcacgtatgctgtaattacaatgatccaagaaataaaaaaacactgagtaacctcctgacttgag

SEQ ID NO: 11566 - DNA, 122 bp, Homo sapiens
  misc_feature (61)..(62): /note="This region represents a CpG dinucleotide"
  misc_feature (61)..(61): /note="Nucleotide may be methylated to form 5-methylcytosine"
aaggtaggctgataaggcaaatctgttagaaaacccttggtaagtaagtacctcagatgacgtctgtagatttggtttttatccagttagaataaattaaggttaaagaacatactacgtta

SEQ ID NO: 11567 - DNA, 122 bp, Homo sapiens
  misc_feature (61)..(62): /note="This region represents a CpG dinucleotide"
  misc_feature (61)..(61): /note="Nucleotide may be methylated to form 5-methylcytosine"
tttgggaaggaaggaacacgcaaaaatttttaccttcttctttcaattggacactatggacggaaatccaggagagctgaccttggtaagaattcctactttcttccatcatttattaggcc

SEQ ID NO: 11568 - DNA, 122 bp, Homo sapiens
  misc_feature (61)..(62): /note="This region represents a CpG dinucleotide"
  misc_feature (61)..(61): /note="Nucleotide may be methylated to form 5-methylcytosine"
ttggccttttggtgccagttgcttcagggcttgacccagcaggtgagctgtagctgagcccgtctatagctgtggtggctcctgcctggggtagatgtagacacttttccagttgcaaactc

SEQ ID NO: 11569 - DNA, 122 bp, Homo sapiens
  misc_feature (61)..(62): /note="This region represents a CpG dinucleotide"
  misc_feature (61)..(61): /note="Nucleotide may be methylated to form 5-methylcytosine"
aatgtgaattgccttctatgtttgcagacacttccgcttcttgaaaaacagcctgaaactcgttatgaaatctgaaatgccttatattcactttcctacccctccttgtgttggaagacatt

SEQ ID NO: 11570 - DNA, 122 bp, Homo sapiens
  misc_feature (61)..(62): /note="This region represents a CpG dinucleotide"
  misc_feature (61)..(61): /note="Nucleotide may be methylated to form 5-methylcytosine"
tgttagattcggtgcttttttttacagatgagattgtaaagtgagcctgtaagtgatttacggctcacttgtgatttgcttaaaacatgtgtcaccacgggaagggtgatgtactttctttt

SEQ ID NO: 11571 - DNA, 122 bp, Homo sapiens
  misc_feature (61)..(62): /note="This region represents a CpG dinucleotide"
  misc_feature (61)..(61): /note="Nucleotide may be methylated to form 5-methylcytosine"
tcagtaaatacttttctacttacacaagattcatgtaaccagatctgtttggagactgatcgtgatttatattagactaaaagatcttaactcaaaagcatgttttgcatcatttgtctaga

SEQ ID NO: 11572 - DNA, 122 bp, Homo sapiens
  misc_feature (61)..(62): /note="This region represents a CpG dinucleotide"
  misc_feature (61)..(61): /note="Nucleotide may be methylated to form 5-methylcytosine"
ctcctgtggactacatctcccagaatgcctcgtatttgccttccagttggacttagccaacgggaggcacccagaagaggttagcagttgggaggaaagatagctcacggtatttcttctca

SEQ ID NO: 11573 - DNA, 122 bp, Homo sapiens
  misc_feature (61)..(62): /note="This region represents a CpG dinucleotide"
  misc_feature (61)..(61): /note="Nucleotide may be methylated to form 5-methylcytosine"
ttagcaggagcttttcggtaacgaccctgcacaccacctcccctccccgcacccccaaggcgcatcgctgatgctgactgtcacggtcatgctggtaggacccccaggcgcagacacgggga

SEQ ID NO: 11574 - DNA, 122 bp, Homo sapiens
  misc_feature (61)..(62): /note="This region represents a CpG dinucleotide"
  misc_feature (61)..(61): /note="Nucleotide may be methylated to form 5-methylcytosine"
ttcaagcaaagcctgatgagctggtccatgtctcctctgatccctgtcagccctgacctgcgctggctcttcacaaatggttaggaaggagactagaacagaaattatatccaacccccaac

SEQ ID NO: 11575 - DNA, 122 bp, Homo sapiens
  misc_feature (61)..(62): /note="This region represents a CpG dinucleotide"
  misc_feature (61)..(61): /note="Nucleotide may be methylated to form 5-methylcytosine"
ttcaggggctctccacacctcttccctgggcccgcctggaaccaccctttttcttgatcacgttttctgacctaggccggtcacaaagtttgactctgagggttgtgagcaatagcaggagt

SEQ ID NO: 11576 - DNA, 122 bp, Homo sapiens
  misc_feature (61)..(62): /note="This region represents a CpG dinucleotide"
  misc_feature (61)..(61): /note="Nucleotide may be methylated to form 5-methylcytosine"
cataatagatattcagtaaatattaaacagatgtatgaatcagacagtcctggtcgtctacgtatctttatctactgagagttttgtgggtttttttgtttatttttttgagacagaatctc

SEQ ID NO: 11577 - DNA, 122 bp, Homo sapiens
  misc_feature (61)..(62): /note="This region represents a CpG dinucleotide"
  misc_feature (61)..(61): /note="Nucleotide may be methylated to form 5-methylcytosine"
taggttatgtaatttataatgataaaaatgtcattggtggaccagtgcctttcatcagtccgatcatggcttctctccttagtgagaatgatcagaaggctgctgggtgggtacagagtcag

SEQ ID NO: 11578 - DNA, 122 bp, Homo sapiens
  misc_feature (61)..(62): /note="This region represents a CpG dinucleotide"
  misc_feature (61)..(61): /note="Nucleotide may be methylated to form 5-methylcytosine"
gtgaactgcacaagcatttttttgtccccatgcgtcctacctggcagtacaggctggtcacgcacgccctgtaagaccagtggccagcctccatactttctgtcacaccttcaaagtgacac

SEQ ID NO: 11579 - DNA, 122 bp, Homo sapiens
  misc_feature (61)..(62): /note="This region represents a CpG dinucleotide"
  misc_feature (61)..(61): /note="Nucleotide may be methylated to form 5-methylcytosine"
caccctttgaagtaagggtggtgagacagaaataaggaaaagttgtaaagagggatacttcgaaaggaataaaagagactgatgagaggaagatgcaatggcttagggttggtgatgggaag

SEQ ID NO: 11580 - DNA, 122 bp, Homo sapiens
  misc_feature (61)..(62): /note="This region represents a CpG dinucleotide"
  misc_feature (61)..(61): /note="Nucleotide may be methylated to form 5-methylcytosine"
cagaaagggcactaaaactcccgaacatcttcctagagcaactgcaactccaaagtcaagcgtctggttacgtgacacagaggtcagccagctgcagccaaatccccacctggatgtccagg

SEQ ID NO: 11581 - DNA, 122 bp, Homo sapiens
  misc_feature (61)..(62): /note="This region represents a CpG dinucleotide"
  misc_feature (61)..(61): /note="Nucleotide may be methylated to form 5-methylcytosine"
gcatatgagctgagaggaatctgtgatttttatgcagcgctgaatgtcatcaaaaggcttcgaggaagagtttcctgagtttccttgatgttcgcggcgcttactgttactttcacacttag

SEQ ID NO: 11582 - DNA, 122 bp, Homo sapiens
  misc_feature (61)..(62): /note="This region represents a CpG dinucleotide"
  misc_feature (61)..(61): /note="Nucleotide may be methylated to form 5-methylcytosine"
caagcgggtacctcacaaaactccaggcaaaagaatgaatgatagagcactcaccaatagcgagtggagaagagtattttgtcgaagtttgcaaaccaatctttgggagccagaggtgggaa

SEQ ID NO: 11583 - DNA, 122 bp, Homo sapiens
  misc_feature (61)..(62): /note="This region represents a CpG dinucleotide"
  misc_feature (61)..(61): /note="Nucleotide may be methylated to form 5-methylcytosine"
attcataaactgtcagttgtccatgacgtgctctctgatcctctcagaaaatgtattattcgttcttgagacttcactaacagtcattatcagaacaatattgtcagtatatttttcaacac

SEQ ID NO: 11584 - DNA, 122 bp, Homo sapiens
  misc_feature (61)..(62): /note="This region represents a CpG dinucleotide"
  misc_feature (61)..(61): /note="Nucleotide may be methylated to form 5-methylcytosine"
cccttcttaaatcctgggattttgcctgagaattctgaagcagttttattagtgtccgaacgacttccccactgcaagctttggaaaataaagtcacttttcttctattacaccccatccct

SEQ ID NO: 11585 - DNA, 122 bp, Homo sapiens
  misc_feature (61)..(62): /note="This region represents a CpG dinucleotide"
  misc_feature (61)..(61): /note="Nucleotide may be methylated to form 5-methylcytosine"
aggcttcatcttaggtgaggaggcaggagagacaccctcccttcacttgtgccatccccacgctttgtccttaagctgtagtggtcccaggagataacctgtttacagcagcccattcagta

SEQ ID NO: 11586 - DNA, 122 bp, Homo sapiens
  misc_feature (61)..(62): /note="This region represents a CpG dinucleotide"
  misc_feature (61)..(61): /note="Nucleotide may be methylated to form 5-methylcytosine"
cctttgtcacaatgtttttcaatccggtgaagcaaactgtccaattagagccagggtctccggcttccatctttgccgacgtttaattaacatgctcctcttggcagctgctgacaagttcc

SEQ ID NO: 11587 - DNA, 122 bp, Homo sapiens
  misc_feature (61)..(62): /note="This region represents a CpG dinucleotide"
  misc_feature (61)..(61): /note="Nucleotide may be methylated to form 5-methylcytosine"
ggtcacagcctggaggaatctaaggacataacaactgagtgcaatgtgagatcctcgattcgatcttggagaagaaagaggacgttaagagaaatattgacaaaattcaaataaggtctgca

SEQ ID NO: 11588 - DNA, 122 bp, Homo sapiens
  misc_feature (61)..(62): /note="This region represents a CpG dinucleotide"
  misc_feature (61)..(61): /note="Nucleotide may be methylated to form 5-methylcytosine"
tgggacccagccgctccggccccccacccccagagacggcccaggcccccttattagcagcgtgagaacagacagacacaggcaggtcccaagctgcccacagcagaggaaagacctggatg

SEQ ID NO: 11589 - DNA, 122 bp, Homo sapiens
  misc_feature (61)..(62): /note="This region represents a CpG dinucleotide"
  misc_feature (61)..(61): /note="Nucleotide may be methylated to form 5-methylcytosine"
ttacgttctttaatgtcctggttatcttctccctaccgcttttatctgaacctttcctttcgtctctactaacttgtctctctgcagctcaatctggattatatttccaacagtttgtcctc

SEQ ID NO: 11590 - DNA, 122 bp, Homo sapiens
  misc_feature (61)..(62): /note="This region represents a CpG dinucleotide"
  misc_feature (61)..(61): /note="Nucleotide may be methylated to form 5-methylcytosine"
gggcagctccaggctaaggagtcaacacgcagctcgagcccttggcccttgaacatggagcgctttacagacctggagctgagtcaaggcacgtttcccaagattttggggctcccctctca

SEQ ID NO: 11591 - DNA, 122 bp, Homo sapiens
  misc_feature (61)..(62): /note="This region represents a CpG dinucleotide"
  misc_feature (61)..(61): /note="Nucleotide may be methylated to form 5-methylcytosine"
tctcaaactcaggcaatcctcccacctcgacttccctaagtgctaggattacagccacaacgcccggccaaaaggaacttttaagcatacagtaaaatagtagctcatagaaccaggaagaa

SEQ ID NO: 11592 - DNA, 122 bp, Homo sapiens
  misc_feature (61)..(62): /note="This region represents a CpG dinucleotide"
  misc_feature (61)..(61): /note="Nucleotide may be methylated to form 5-methylcytosine"
acctgtgggtcacagtcctcaggatatgttgtaactcatttaaccctcaaaatcaccttccgaggtatgagcagagttattcaccctgctcagaaaactggtgttgagaaatgttcagaaac

SEQ ID NO: 11593 - DNA, 122 bp, Homo sapiens
  misc_feature (61)..(62): /note="This region represents a CpG dinucleotide"
  misc_feature (61)..(61): /note="Nucleotide may be methylated to form 5-methylcytosine"
taagtcaagccatatatggtcatgattatttgttggacacacactaagcatgtgggactgcgtttatcattagggagataccatggctgtccttatttacttcttcaatctcatctcatagc

SEQ ID NO: 11594 - DNA, 122 bp, Homo sapiens
  misc_feature (61)..(62): /note="This region represents a CpG dinucleotide"
  misc_feature (61)..(61): /note="Nucleotide may be methylated to form 5-methylcytosine"
aggctatgactacttgttcgtggcatgcactctagttctgctgtgacctttgtacctgtgcgagtttgggaagtaggaacttctgtatttgacgaccatttcccttgttcctggcacagtgc

SEQ ID NO: 11595 - DNA, 122 bp, Homo sapiens
  misc_feature (61)..(62): /note="This region represents a CpG dinucleotide"
  misc_feature (61)..(61): /note="Nucleotide may be methylated to form 5-methylcytosine"
ccttgcatggccttgcccaatgcactgccatctgcctgcatgtggaaactatgcaccctccgcctcctctttcatatcagagtgtcacctctcatagtccctttctgactagttttctgaca

SEQ ID NO: 11596 - DNA, 122 bp, Homo sapiens
  misc_feature (61)..(62): /note="This region represents a CpG dinucleotide"
  misc_feature (61)..(61): /note="Nucleotide may be methylated to form 5-methylcytosine"
ggcctccccctgccctccagatctgggatgagggtcgggcctggcgaagcttctccaacccgcccgacttgttcacagcctaccggccacagccacgccacctctggagtcagcctaatgcc

SEQ ID NO: 11597 - DNA, 122 bp, Homo sapiens
  misc_feature (61)..(62): /note="This region represents a CpG dinucleotide"
  misc_feature (61)..(61): /note="Nucleotide may be methylated to form 5-methylcytosine"
tgaagtttaattatggacacatttcagttcaaagtgctaaacaggtgaagcagagtagcacggaactagaaaatctagaaaactaggaaaatcaagtaagttacaaaattaagggagatgat

SEQ ID NO: 11598 - DNA, 122 bp, Homo sapiens
  misc_feature (61)..(62): /note="This region represents a CpG dinucleotide"
  misc_feature (61)..(61): /note="Nucleotide may be methylated to form 5-methylcytosine"
gggagtgacatgggaacagatatcttgaaatcttagaaaagtattttttccggttgtaaacgtcctatatgtttactctaaaactgtggggaatggaaaaattcagaaagaatgtttttatc

SEQ ID NO: 11599 - DNA, 122 bp, Homo sapiens
  misc_feature (61)..(62): /note="This region represents a CpG dinucleotide"
  misc_feature (61)..(61): /note="Nucleotide may be methylated to form 5-methylcytosine"
gtcccttcgtgggcgggaatcacagcaagggcggtcgcggccacgtggccaggccaggcccgcacccactatcgcccaggaggcgccgctaacagcgggtctcagccacgggcctctgaagc

SEQ ID NO: 11600 - DNA, 122 bp, Homo sapiens
  misc_feature (61)..(62): /note="This region represents a CpG dinucleotide"
  misc_feature (61)..(61): /note="Nucleotide may be methylated to form 5-methylcytosine"
gtaaacacttcctgctaatcagatagacctgaaactgattttggagggtggcagggaagccgccactgaagttttaacagcatctgcagtgaaaggcaggaatttagttgcagtggggatat

SEQ ID NO: 11601 - DNA, 122 bp, Homo sapiens
  misc_feature (61)..(62): /note="This region represents a CpG dinucleotide"
  misc_feature (61)..(61): /note="Nucleotide may be methylated to form 5-methylcytosine"
gatggtaactggtaaacaaaagcacagagacattctgaggtagaggaatgcatttgtaagcgtacaactgtttgctcttttcaggaacgtggaagtatgctcggtcatacaatgagaggaag

SEQ ID NO: 11602 - DNA, 122 bp, Homo sapiens
  misc_feature (61)..(62): /note="This region represents a CpG dinucleotide"
  misc_feature (61)..(61): /note="Nucleotide may be methylated to form 5-methylcytosine"
cagatgtgtttctggttgcaatgcaatctgaaagtatctgtggtttttattagggacaaacggacaaagtcccaggtcctgtggttgtcttcattaataattgagggaatggtaattatcag

SEQ ID NO: 11603 - DNA, 122 bp, Homo sapiens
  misc_feature (61)..(62): /note="This region represents a CpG dinucleotide"
  misc_feature (61)..(61): /note="Nucleotide may be methylated to form 5-methylcytosine"
tctaatagcaagagcttccctggaccgagtttggtaaaaagaagaaggggaagataaggccgaatgaggaaatacaaacacaaagataagtcatattaccaggaagcagtctactggtacaa

SEQ ID NO: 11604 - DNA, 122 bp, Homo sapiens
  misc_feature (61)..(62): /note="This region represents a CpG dinucleotide"
  misc_feature (61)..(61): /note="Nucleotide may be methylated to form 5-methylcytosine"
cagcccgatcccaggaacaatttgagagtgtcattcaacccagacaatcctgcacagacacgggggagctggcaattgtaccctccatggtgtcactctcctggccatgagtgacaggtggc

SEQ ID NO: 11605 - DNA, 122 bp, Homo sapiens
  misc_feature (61)..(62): /note="This region represents a CpG dinucleotide"
  misc_feature (61)..(61): /note="Nucleotide may be methylated to form 5-methylcytosine"
ataaagaacaatagtatccatagctttttttcaccagaaaatatactcccaaccttttttcgaggcagatcttgatcaacattaacatgggatacagtatgtggaaaagcagtagttgataa

SEQ ID NO: 11606 - DNA, 122 bp, Homo sapiens
  misc_feature (61)..(62): /note="This region represents a CpG dinucleotide"
  misc_feature (61)..(61): /note="Nucleotide may be methylated to form 5-methylcytosine"
atcctcatttattgctgataggaatgtctaatggtgcagccactttaaaaaacagtttatcggttcctcaatgttgaacatcgagtcaacagcatttaaaagcaaacttaaatggtgttaaa

SEQ ID NO: 11607 - DNA, 122 bp, Homo sapiens
  misc_feature (61)..(62): /note="This region represents a CpG dinucleotide"
  misc_feature (61)..(61): /note="Nucleotide may be methylated to form 5-methylcytosine"
tgggagcccgaagctgggtaggcccaggcgccgggagagcggagggatggatgctgcgctcgcaaaggtgatgaaatggcagcagcatcagcaccacgcactctgactcatcactgacaacc

SEQ ID NO: 11608 - DNA, 122 bp, Homo sapiens
  misc_feature (61)..(62): /note="This region represents a CpG dinucleotide"
  misc_feature (61)..(61): /note="Nucleotide may be methylated to form 5-methylcytosine"
ttttcataaaaatgaaaaacaatttgaccaaaaattgtgtcagaaataactttcacataccgaaagcttgcctacatgttaaaagcatttgcaagagtacacatttttttttttttcctgag

SEQ ID NO: 11609 - DNA, 122 bp, Homo sapiens
  misc_feature (61)..(62): /note="This region represents a CpG dinucleotide"
  misc_feature (61)..(61): /note="Nucleotide may be methylated to form 5-methylcytosine"
atgcgattgtggcaagttgctttgcttctgagcgtcaggcctcttgtctgtagaatggaccgttcctcggggctgcagggcagatgggaaacggagaaagggggctcttgtcctacgggctc

SEQ ID NO: 11610 - DNA, 122 bp, Homo sapiens
  misc_feature (61)..(62): /note="This region represents a CpG dinucleotide"
  misc_feature (61)..(61): /note="Nucleotide may be methylated to form 5-methylcytosine"
gggcctgaattctgctaacatgtaggtgtagctaaaggataaccagccattcccctccaccgcccccagcttgcctttttataatcccttgctactcatgagtcatgtggccagaggtcaca

SEQ ID NO: 11611 - DNA, 122 bp, Homo sapiens
  misc_feature (61)..(62): /note="This region represents a CpG dinucleotide"
  misc_feature (61)..(61): /note="Nucleotide may be methylated to form 5-methylcytosine"
atgaagagcagagctttgctgctagagctgaatcagagcaacaccccttaccttttagggcgtatgatttatttactgctgggtctccggtatctaatatagtgcctggcacttggtaggtg

SEQ ID NO: 11612 - DNA, 122 bp, Homo sapiens
  misc_feature (61)..(62): /note="This region represents a CpG dinucleotide"
  misc_feature (61)..(61): /note="Nucleotide may be methylated to form 5-methylcytosine"
ctctggggggcagagcagcaggggaggaagctgacaagctgaactgcgtccaggccgggacggcgtgaaagacagacaggagcatctagttttgactcagtcaacaatggggaccaggtgca

SEQ ID NO: 11613 - DNA, 122 bp, Homo sapiens
  misc_feature (61)..(62): /note="This region represents a CpG dinucleotide"
  misc_feature (61)..(61): /note="Nucleotide may be methylated to form 5-methylcytosine"
atgtctgacttaaactgtgcattgtcctttaccctctgacatatagagcaaaaatgattacgtttctctaaacatgtgaccttgctttggcacagacttgacatcttactcaacttctttcc

SEQ ID NO: 11614 - DNA, 122 bp, Homo sapiens
  misc_feature (61)..(62): /note="This region represents a CpG dinucleotide"
  misc_feature (61)..(61): /note="Nucleotide may be methylated to form 5-methylcytosine"
agccctgccccttcacagccggaagtagggtggccaggaacactgagcagaaagagaaagcgcgtggccctgatgccatgaggcgctgcagctgctgcaccagcctctcacaggcttcttgc

SEQ ID NO: 11615 - DNA, 122 bp, Homo sapiens
  misc_feature (61)..(62): /note="This region represents a CpG dinucleotide"
  misc_feature (61)..(61): /note="Nucleotide may be methylated to form 5-methylcytosine"
aatgttgcgtgacaatcttagacaccttcgaggggtgtcttcctgtgtttgcactgtgcacgttacacagttgtgtgcatgccagcaccgacaaagcccccatgtccctttgctgagcagtt

SEQ ID NO: 11616 - DNA, 122 bp, Homo sapiens
  misc_feature (61)..(62): /note="This region represents a CpG dinucleotide"
  misc_feature (61)..(61): /note="Nucleotide may be methylated to form 5-methylcytosine"
aagtgcagcagagttagagcctgggctggactgtcggtggggtagagtctaagttgtttccggtctgagccttcaagttgctgggctgtccttggcgtggcgagtcccaggagaaccagtga

SEQ ID NO: 11617 - DNA, 122 bp, Homo sapiens
  misc_feature (61)..(62): /note="This region represents a CpG dinucleotide"
  misc_feature (61)..(61): /note="Nucleotide may be methylated to form 5-methylcytosine"
ctgggattcagtggtccactctgactccttcaggagacagctgcagggtgtgtcagggtccgtgaactttgccggggactgagaagaccagatgatcagacagtgccctgcagatggggcac

SEQ ID NO: 11618 - DNA, 122 bp, Homo sapiens
  misc_feature (61)..(62): /note="This region represents a CpG dinucleotide"
  misc_feature (61)..(61): /note="Nucleotide may be methylated to form 5-methylcytosine"
aagcagacaaggtggtggtcaatctgaaaacctgacacacaaggcacgaggaactcatagcgtaagcatctcattgccccattccttttactgtaaggagtgctaaagtaaagttgtcataa

SEQ ID NO: 11619 - DNA, 122 bp, Homo sapiens
  misc_feature (61)..(62): /note="This region represents a CpG dinucleotide"
  misc_feature (61)..(61): /note="Nucleotide may be methylated to form 5-methylcytosine"
aagtatttgaaacatgggcagcagcaaagagttttcattgtttgttcacccaaatctttacgacaacagagaagaatgcattatggatacactaaattctgaactatgaaatctaagctgtg

SEQ ID NO: 11620 - DNA, 122 bp, Homo sapiens
  misc_feature (61)..(62): /note="This region represents a CpG dinucleotide"
  misc_feature (61)..(61): /note="Nucleotide may be methylated to form 5-methylcytosine"
tcttgggatcaaagaaaagaatcaaaattactgaggaatttggaaaaggaagaggcatgacgtgggaacgctaatcccataagagctattaatcatggaccccactcagggaccaggatgct

SEQ ID NO: 11621 - DNA, 122 bp, Homo sapiens
  misc_feature (61)..(62): /note="This region represents a CpG dinucleotide"
  misc_feature (61)..(61): /note="Nucleotide may be methylated to form 5-methylcytosine"
tgttttgaaagcattaccaacaactgcgctatgaaacctgtgttgcctcaagacacttttcgttaatgtttttacttgggggtgatagtttaatatcataacttgatagtaatatcgtaact

SEQ ID NO: 11622 - DNA, 122 bp, Homo sapiens
  misc_feature (61)..(62): /note="This region represents a CpG dinucleotide"
  misc_feature (61)..(61): /note="Nucleotide may be methylated to form 5-methylcytosine"
ttctgggctacacacatgccccacccattcccacgatccctttggtcacacagaagaggacggaaccattgttttatcttggtaaagtcagccctgaacagaagacctggcacaaactcagc

SEQ ID NO: 11623 - DNA, 122 bp, Homo sapiens
  misc_feature (61)..(62): /note="This region represents a CpG dinucleotide"
  misc_feature (61)..(61): /note="Nucleotide may be methylated to form 5-methylcytosine"
tgctgcctaccacaccctgtaccggtgggtcttttgcagcatttgtaaatattccctgagcgccaactctgggccacaggccaggtacacctgtgaagccctagttcctatatgatgcgggg

SEQ ID NO: 11624 - DNA, 122 bp, Homo sapiens
  misc_feature (61)..(62): /note="This region represents a CpG dinucleotide"
  misc_feature (61)..(61): /note="Nucleotide may be methylated to form 5-methylcytosine"
ctgctgaatgcatgtcctcatccttgtataaagatgagtgcttgaatgagctgggcagagcgacacaaagtgcccggcacaaggtaaaggttttgacaatagaggcagggccttcctcccca

SEQ ID NO: 11625 - DNA, 122 bp, Homo sapiens
  misc_feature (61)..(62): /note="This region represents a CpG dinucleotide"
  misc_feature (61)..(61): /note="Nucleotide may be methylated to form 5-methylcytosine"
cgaaatacttctcttgaaatctttcagcttaaataatgaacctttagtcacacagtcactcgtatggctatttttctttggtttaaggcggtcatcaccaaccagtgtgtgtttgcactctg

SEQ ID NO: 11626 - DNA, 122 bp, Homo sapiens
  misc_feature (61)..(62): /note="This region represents a CpG dinucleotide"
  misc_feature (61)..(61): /note="Nucleotide may be methylated to form 5-methylcytosine"
gaaatcacccgtcttctgcgtcgctcaggctgggagctgtggaccggagctgttcctattcggccatcttggctcctcgcagttcattgtttgtggggttaattggaagcagctgcagcagg

SEQ ID NO: 11627 - DNA, 122 bp, Homo sapiens
  misc_feature (61)..(62): /note="This region represents a CpG dinucleotide"
  misc_feature (61)..(61): /note="Nucleotide may be methylated to form 5-methylcytosine"
aagaaggtgaatgaggttcacgaatctagagtctgaaggatttggcccggaactagagggcgggacacataccaaatttgaggagaccagctgtggttagtgatgtggcatgggaccggagg

SEQ ID NO: 11628 - DNA, 122 bp, Homo sapiens
  misc_feature (61)..(62): /note="This region represents a CpG dinucleotide"
  misc_feature (61)..(61): /note="Nucleotide may be methylated to form 5-methylcytosine"
ataactgataaaatctgcatccttggccttccaacaacctttacaccagcagatggtgggcgtaaagatgtcattcatcatttatttacaatgggttttatttattctagtgtcaacagctg

SEQ ID NO: 11629 - DNA, 122 bp, Homo sapiens
  misc_feature (61)..(62): /note="This region represents a CpG dinucleotide"
  misc_feature (61)..(61): /note="Nucleotide may be methylated to form 5-methylcytosine"
ttatgcaatgtttccttctgttccttcatcttgatttatttttgtgggttaagcctttggcgggagggaaaaaaggtttatttgttacactccagaggagaaagaacttgaaggaggaaata

SEQ ID NO: 11630 - DNA, 122 bp, Homo sapiens
  misc_feature (61)..(62): /note="This region represents a CpG dinucleotide"
  misc_feature (61)..(61): /note="Nucleotide may be methylated to form 5-methylcytosine"
cgtagaacaagttcaagcttggctggctaggagattgatggacacacacacacatacacacgcacacacagacacacatacaatcagacaaggcattcagtttgacaggaagatgagttaaa

SEQ ID NO: 11631 - DNA, 122 bp, Homo sapiens
  misc_feature (61)..(62): /note="This region represents a CpG dinucleotide"
  misc_feature (61)..(61): /note="Nucleotide may be methylated to form 5-methylcytosine"
tttctcctgagagggaccttgtacatatcaatatacattgtttccagagtctgtttctaccgtgtgttgttatgactcaaagaagtaaaatgctagatctctaatgtggcgtaaatcattgt

SEQ ID NO: 11632 - DNA, 122 bp, Homo sapiens
  misc_feature (61)..(62): /note="This region represents a CpG dinucleotide"
  misc_feature (61)..(61): /note="Nucleotide may be methylated to form 5-methylcytosine"
ttaatgctctggcaaaatgcaaatttttttcttagtttaggttttgctgtggtctgaaaacgccctataaataaaagaacagagaccaggggtctagttcagactaagcctttaacgtttta

SEQ ID NO: 11633 - DNA, 122 bp, Homo sapiens
  misc_feature (61)..(62): /note="This region represents a CpG dinucleotide"
  misc_feature (61)..(61): /note="Nucleotide may be methylated to form 5-methylcytosine"
gccggggacggtttcgggtcgggactccggcttcgggaacgggcctctggaaacctgcgacgtcagtccttacccgcccgcggctgccgcggaccgtcccacccccaaacccgtagaagccc

SEQ ID NO: 11634 - DNA, 122 bp, Homo sapiens
  misc_feature (61)..(62): /note="This region represents a CpG dinucleotide"
  misc_feature (61)..(61): /note="Nucleotide may be methylated to form 5-methylcytosine"
acactcctctgtgaatcatgacagctcagctgggaaatgcagaactgtatcataagagggcgagatcatgggagtgagacaatgatgaggcctatgacattggaaggtggtgagttcatcat

SEQ ID NO: 11635 - DNA, 122 bp, Homo sapiens
  misc_feature (61)..(62): /note="This region represents a CpG dinucleotide"
  misc_feature (61)..(61): /note="Nucleotide may be methylated to form 5-methylcytosine"
gagctgacaaatagaaaggcctgctgtcttaggaatacgtcatcagcataacatgcagagcggtggattacagagtggaggggagtggaatgatggtggcctgggagacggcgatgttccca

SEQ ID NO: 11636 - DNA, 122 bp, Homo sapiens
  misc_feature (61)..(62): /note="This region represents a CpG dinucleotide"
  misc_feature (61)..(61): /note="Nucleotide may be methylated to form 5-methylcytosine"
acgcacacaatggaagacatcactgtgcttgtgaaacctgtgttgagagcagacagatggcggttatcaaatactttggcactcatacacaggagacagttacatctcagaggagtgtaact

SEQ ID NO: 11637 - DNA, 122 bp, Homo sapiens
  misc_feature (61)..(62): /note="This region represents a CpG dinucleotide"
  misc_feature (61)..(61): /note="Nucleotide may be methylated to form 5-methylcytosine"
caggtactctcctgcccttctccaacaaggaagtaaataaatagacttttaactcaggaacggggtgttggagcaggggaaccctccccttggagttagtaattaagtctcatgttaaaaac

SEQ ID NO: 11638 - DNA, 122 bp, Homo sapiens
  misc_feature (61)..(62): /note="This region represents a CpG dinucleotide"
  misc_feature (61)..(61): /note="Nucleotide may be methylated to form 5-methylcytosine"
tccccagggatggcaatctggtgttcctgtgtgcatagagcagtgaagatgaattgaaaacgcttgagataaattaggaatggctaagttaaaattgtctctgctccagactctctcatctg

SEQ ID NO: 11639 - DNA, 122 bp, Homo sapiens
  misc_feature (61)..(62): /note="This region represents a CpG dinucleotide"
  misc_feature (61)..(61): /note="Nucleotide may be methylated to form 5-methylcytosine"
tttttagctgctagcttgaggaataatattcaaggccgtcctgtggactcccttggaactcgttccttccatgatggcacacttacactgttctattgttgttgcctatttacttgtctgta

SEQ ID NO: 11640 - DNA, 122 bp, Homo sapiens
  misc_feature (61)..(62): /note="This region represents a CpG dinucleotide"
  misc_feature (61)..(61): /note="Nucleotide may be methylated to form 5-methylcytosine"
ctccaaggtgagcaaaaattatgacaaatcatttacaacaaccttatatcaatgtgtcctcgcggcctctcgtgtgctttccttttacgaacatctcggccttctaatcttgaatgctgtct

SEQ ID NO: 11641 - DNA, 122 bp, Homo sapiens
  misc_feature (61)..(62): /note="This region represents a CpG dinucleotide"
  misc_feature (61)..(61): /note="Nucleotide may be methylated to form 5-methylcytosine"
gtatttggagtgagtcacctaacgcctaacactaacttatgaaatggacctgatttcagacgtcagggaagaaactggtaatctgaagcttcttttattggcaataggggctaccagtagag

SEQ ID NO: 11642 - DNA, 122 bp, Homo sapiens
  misc_feature (61)..(62): /note="This region represents a CpG dinucleotide"
  misc_feature (61)..(61): /note="Nucleotide may be methylated to form 5-methylcytosine"
cgtgtgacctctgaggagacaaggtactgttgctatcctcagtcatagacgatgcaaccacggctcagggaccatgagctcccttccctcagctcacacagaagacccaggttcaattcctg

SEQ ID NO: 11643 - DNA, 122 bp, Homo sapiens
  misc_feature (61)..(62): /note="This region represents a CpG dinucleotide"
  misc_feature (61)..(61): /note="Nucleotide may be methylated to form 5-methylcytosine"
ttatttaatccctacagcaatcctgctaatactgtccccattgtacagatggggacaatgcgaatccaagagaataacttctccaagaacacatggctaaatcaaagtaaagggattgaaaa

SEQ ID NO: 11644 - DNA, 122 bp, Homo sapiens
  misc_feature (61)..(62): /note="This region represents a CpG dinucleotide"
  misc_feature (61)..(61): /note="Nucleotide may be methylated to form 5-methylcytosine"
tccctgatcaatgttctttctcatttccaggtctcacattgcctttagtcgtcagttcctcggcctttctttgtctttcatgaccttgatatctgtgaacagtcctggtcaggtattgtgca

SEQ ID NO: 11645 - DNA, 122 bp, Homo sapiens
  misc_feature (61)..(62): /note="This region represents a CpG dinucleotide"
  misc_feature (61)..(61): /note="Nucleotide may be methylated to form 5-methylcytosine"
ttgccccactgcgcatgtcccttgcagtcaaaggtcctgccctacttttcctaacacacacgcacacacacaccctttccggttccttctcctcggagcaggtaaattacttggctcaggtt

SEQ ID NO: 11646 - DNA, 122 bp, Homo sapiens
  misc_feature (61)..(62): /note="This region represents a CpG dinucleotide"
  misc_feature (61)..(61): /note="Nucleotide may be methylated to form 5-methylcytosine"
ggcagacagaattccacatgtggaatccatgtgatgccacatacagtagagggctgcagtcgtttcctgaagaggtgaatggcatgctgatacaagcagggattgactaaagctagtcagaa

SEQ ID NO: 11647 - DNA, 122 bp, Homo sapiens
  misc_feature (61)..(62): /note="This region represents a CpG dinucleotide"
  misc_feature (61)..(61): /note="Nucleotide may be methylated to form 5-methylcytosine"
gggaggagaagtcgcctctgagtcgtgaagagagatcagctcagcaccacatggatcccacgctaactgtgcagggatactaaagtgaagatccagtgaaagggtgaatctcaaagcatcct

SEQ ID NO: 11648 - DNA, 122 bp, Homo sapiens
  misc_feature (61)..(62): /note="This region represents a CpG dinucleotide"
  misc_feature (61)..(61): /note="Nucleotide may be methylated to form 5-methylcytosine"
gcagaagggcagtgatgaataaatcaccctcagcacaccttctaaagagcactggggtggcgtcagccacttcaccacatgacctgggcttctgtgacccttgggagaagtcatgtctgcct

SEQ ID NO: 11649 - DNA, 122 bp, Homo sapiens
  misc_feature (61)..(62): /note="This region represents a CpG dinucleotide"
  misc_feature (61)..(61): /note="Nucleotide may be methylated to form 5-methylcytosine"
tagccaccttatacaacaggtactacagtattatctctagtacagatgatgaaatacaggcgcagaagttaaggaatctgaccaagctcacactgccagtgacttgtggagccagaactgtg

SEQ ID NO: 11650 - DNA, 122 bp, Homo sapiens
  misc_feature (61)..(62): /note="This region represents a CpG dinucleotide"
  misc_feature (61)..(61): /note="Nucleotide may be methylated to form 5-methylcytosine"
gaggtggctactgagagaggctcctctgcctgtggaaagaagaaggaacaaaaggaaagacgagggaacaaaaggaaagatgaagaacaaaaggaaagactgtcttgtagtttgagtgccag

SEQ ID NO: 11651 - DNA, 122 bp, Homo sapiens
  misc_feature (61)..(62): /note="This region represents a CpG dinucleotide"
  misc_feature (61)..(61): /note="Nucleotide may be methylated to form 5-methylcytosine"
atgatagcaggtatccttttcttgttcctgactttaatagggaggcttctaatgattcatcgttggaaattatgtttgtggggttttagggcataggctaaatggtacaagaagactccaaa

SEQ ID NO: 11652 - DNA, 122 bp, Homo sapiens
  misc_feature (61)..(62): /note="This region represents a CpG dinucleotide"
  misc_feature (61)..(61): /note="Nucleotide may be methylated to form 5-methylcytosine"
gggtttgtttgtttttaaacctgaagaattgggataatctgtttcctcacagaatcattacgcagatgcaatacagttaatgaaggtaacatggcacataggaagagcacaatacacgtcag

SEQ ID NO: 11653 - DNA, 122 bp, Homo sapiens
  misc_feature (61)..(62): /note="This region represents a CpG dinucleotide"
  misc_feature (61)..(61): /note="Nucleotide may be methylated to form 5-methylcytosine"
gagcatctcgatgttagaaaccacgccactatttttagtgtgtgtccttgtgcttctgcacgatgagtcagggttctcttttaaaaaatacttggcattcctcagaagaaagataaacacat

SEQ ID NO: 11654 - DNA, 122 bp, Homo sapiens
  misc_feature (61)..(62): /note="This region represents a CpG dinucleotide"
  misc_feature (61)..(61): /note="Nucleotide may be methylated to form 5-methylcytosine"
cagcactttatttcttttcagtcctttaatcctaatgccagggccttactcataaagcttcgtaaatctgtggccactgaaatatcctctctccacctgccaataacttcttaaacacacat

SEQ ID NO: 11655 - DNA, 122 bp, Homo sapiens
  misc_feature (61)..(62): /note="This region represents a CpG dinucleotide"
  misc_feature (61)..(61): /note="Nucleotide may be methylated to form 5-methylcytosine"
gtattaattctcatagtagcaataataggaaatctgtttgtgttgtatatgagttaataacgatatgttcaaatgggtggactcagtagttgattcaggtggagagaaatagatcctttcag

SEQ ID NO: 11656 - DNA, 122 bp, Homo sapiens
  misc_feature (61)..(62): /note="This region represents a CpG dinucleotide"
  misc_feature (61)..(61): /note="Nucleotide may be methylated to form 5-methylcytosine"
ggtttgtctggcctggacagtgagcttactgttgtcacctccaggttgccctgggagaaccgggtctagagcaggacctgtcaccatttccaacaccatttctcttctgaaagggtgcctaa

SEQ ID NO: 11657 - DNA, 122 bp, Homo sapiens
  misc_feature (61)..(62): /note="This region represents a CpG dinucleotide"
  misc_feature (61)..(61): /note="Nucleotide may be methylated to form 5-methylcytosine"
ttctggctcccaagtcctagactgaggattatgctctcttccctggggacatttcaaggacggacactgcagagaaaggtttcagggatcacctttgccatgtgtttctggttctcggtgtc

SEQ ID NO: 11658 - DNA, 122 bp, Homo sapiens
  misc_feature (61)..(62): /note="This region represents a CpG dinucleotide"
  misc_feature (61)..(61): /note="Nucleotide may be methylated to form 5-methylcytosine"
ttgacatttagggagaaataacctttcctgaagctcattagaaacaagctgtcaccaatgcgtcaccacctaactggtgagtcagttcgcaagtttcattttcttcatctcaaaaatgaaag

SEQ ID NO: 11659 - DNA, 122 bp, Homo sapiens
  misc_feature (61)..(62): /note="This region represents a CpG dinucleotide"
  misc_feature (61)..(61): /note="Nucleotide may be methylated to form 5-methylcytosine"
cgtctgagggacggaactggctcagagggatcaggtcagcggttggagacccctcccctccgttagatcagcggctggagacccctccgcggcctgagcgtctgtcccagccggaggggcgg

SEQ ID NO: 11660 - DNA, 122 bp, Homo sapiens
  misc_feature (61)..(62): /note="This region represents a CpG dinucleotide"
  misc_feature (61)..(61): /note="Nucleotide may be methylated to form 5-methylcytosine"
ctggggacagggattaataaaaattgacatcactgtaggaatatattttttaaaagcccacgttttgtgaaaagatgaattaaaaaacccaagacccagcattcgggattgaaagtgcccgt

SEQ ID NO: 11661 - DNA, 122 bp, Homo sapiens
  misc_feature (61)..(62): /note="This region represents a CpG dinucleotide"
  misc_feature (61)..(61): /note="Nucleotide may be methylated to form 5-methylcytosine"
tttgcatggagcagcagtgcattagctactttcaaaacatctgactgatcccagattacacgagacaaaggcctggatcctttgcctttagacaggtgcataatagtgtgaattttctgaaa

SEQ ID NO: 11662 - DNA, 122 bp, Homo sapiens
  misc_feature (61)..(62): /note="This region represents a CpG dinucleotide"
  misc_feature (61)..(61): /note="Nucleotide may be methylated to form 5-methylcytosine"
gtttcctctttgctctctctgccacgcttgaacaacttgccaaggatgccatctctcttacgtccgccgtggtgctccggattctgactcattcggacgaacgggtcggggtcgcggaacct

SEQ ID NO: 11663 - DNA, 122 bp, Homo sapiens
  misc_feature (61)..(62): /note="This region represents a CpG dinucleotide"
  misc_feature (61)..(61): /note="Nucleotide may be methylated to form 5-methylcytosine"
aagagtacacaaagagatgacctgacttctaacctcaacgcaaacatttaaaacatgactcgtacactggtaaaaggtaatatctcctttccttagagtactagaacattccattttactcc

SEQ ID NO: 11664 - DNA, 122 bp, Homo sapiens
  misc_feature (61)..(62): /note="This region represents a CpG dinucleotide"
  misc_feature (61)..(61): /note="Nucleotide may be methylated to form 5-methylcytosine"
tcccatagacacactgcccctccacccatgcagtgctctccctgcctccctctgccccttcgccaacctggaaagctccccccacaggcccactccgtgtccccagccccttctcccctctg

SEQ ID NO: 11665 - DNA, 122 bp, Homo sapiens
  misc_feature (61)..(62): /note="This region represents a CpG dinucleotide"
  misc_feature (61)..(61): /note="Nucleotide may be methylated to form 5-methylcytosine"
ttttattggaacatagctcatttgtttacatattgtctacagctgctatcctcttacaagcgttgactagctgtgacagagaatgtatgtgcaaaacctaaagcatttactatctggcgctt

SEQ ID NO: 11666 - DNA, 122 bp, Homo sapiens
  misc_feature (61)..(62): /note="This region represents a CpG dinucleotide"
  misc_feature (61)..(61): /note="Nucleotide may be methylated to form 5-methylcytosine"
tctcaataaacaaattccctctaactgtataatcctatttctttctgctgtaggcctgagcgtttgtctggtttgttattcaaatgaagcatgactcatttaggatttaccagcttgctccg

SEQ ID NO: 11667 - DNA, 122 bp, Homo sapiens
  misc_feature (61)..(62): /note="This region represents a CpG dinucleotide"
  misc_feature (61)..(61): /note="Nucleotide may be methylated to form 5-methylcytosine"
ttataaaataaaagccttctatcccagtgcatgaaatttctttccatttaatcaaattatcgtttttattccttacgaaaggccatgaagttttgtgtattcttgcttagattacttcctag

SEQ ID NO: 11668 - DNA, 122 bp, Homo sapiens
  misc_feature (61)..(62): /note="This region represents a CpG dinucleotide"
  misc_feature (61)..(61): /note="Nucleotide may be methylated to form 5-methylcytosine"
aagaagttggagtcccagagatgtttgctttccctatagaaattaaagatagtatcttcacgtatgtccctgagttgtctttcagaggcttggaccccctaactgaggaccccccaaactga

SEQ ID NO: 11669 - DNA, 122 bp, Homo sapiens
  misc_feature (61)..(62): /note="This region represents a CpG dinucleotide"
  misc_feature (61)..(61): /note="Nucleotide may be methylated to form 5-methylcytosine"
aaccaccccgctccccacgcacggagcctcgcagtggctcgagctgagaatcaaagcggccgatccagggcctggtgactccaccagacaggaaatacagaggcttctagcaatctgctctg

SEQ ID NO: 11670 - DNA, 122 bp, Homo sapiens
  misc_feature (61)..(62): /note="This region represents a CpG dinucleotide"
  misc_feature (61)..(61): /note="Nucleotide may be methylated to form 5-methylcytosine"
tgtcaattcccttcctccatttacacctcttcctgcagaagtatgtttgtggtttttacccgtcacgggactgtttactttggagaaacgtcttctgtggactttgtatggggtttgtagtt

SEQ ID NO: 11671 - DNA, 122 bp, Homo sapiens
  misc_feature (61)..(62): /note="This region represents a CpG dinucleotide"
  misc_feature (61)..(61): /note="Nucleotide may be methylated to form 5-methylcytosine"
cgcaatccttcctgtgaggatgggcgccttcgggtgttgaagcctgagtggtttcggggccgggacgtcctagatctgggctgcaatgtgggccatctgaccctgagcattgcctgcaagtg

SEQ ID NO: 11672 - DNA, 122 bp, Homo sapiens
  misc_feature (61)..(62): /note="This region represents a CpG dinucleotide"
  misc_feature (61)..(61): /note="Nucleotide may be methylated to form 5-methylcytosine"
ttcaatatcctcccagtcagggaggaaagcgttgactttaaacaattacaggctaacaaacgcaagtgctaaatatgtttttgagagtatggaaaaggctactcccagacaccgcccagttg

SEQ ID NO: 11673 - DNA, 122 bp, Homo sapiens
  misc_feature (61)..(62): /note="This region represents a CpG dinucleotide"
  misc_feature (61)..(61): /note="Nucleotide may be methylated to form 5-methylcytosine"
aatgatgtgcacaaaaatacaaatgtggccttgtgttcctggtgcttaacactaggaaaacgctgactggccttggggaaggaagaagacttattaccaactcttaacatcaattgggaata

SEQ ID NO: 11674 - DNA, 122 bp, Homo sapiens
  misc_feature (61)..(62): /note="This region represents a CpG dinucleotide"
  misc_feature (61)..(61): /note="Nucleotide may be methylated to form 5-methylcytosine"
caggcccgggcagcgacctcttgctgttcagcaaaaagcaaacattcaaagcagtccctgcgggctcagcgtggcgaccatgagcgcacgtttgtgtgccggctgactctcctcctcgcata

SEQ ID NO: 11675 - DNA, 122 bp, Homo sapiens
  misc_feature (61)..(62): /note="This region represents a CpG dinucleotide"
  misc_feature (61)..(61): /note="Nucleotide may be methylated to form 5-methylcytosine"
catagtgaccgttctcctagggaaagcttttcacacattcaaatctgttgctacaggcagcgttcgtgcacacacaaacagatccaagtaagcggtggctgcaacccagtcctgagtcaatg

SEQ ID NO: 11676 - DNA, 122 bp, Homo sapiens
  misc_feature (61)..(62): /note="This region represents a CpG dinucleotide"
  misc_feature (61)..(61): /note="Nucleotide may be methylated to form 5-methylcytosine"
ttattttaagctttattattactattttatttattttattttattttccttccacacacccgtttccaccctggagaggccagatgagccagactccagggaggcctagaagtgggcaaggg

SEQ ID NO: 11677 - DNA, 122 bp, Homo sapiens
  misc_feature (61)..(62): /note="This region represents a CpG dinucleotide"
  misc_feature (61)..(61): /note="Nucleotide may be methylated to form 5-methylcytosine"
atggccatttcctttgtaatcatcccgtggtttttggtattagccttgataccactcatacgctctgggcaccagctttgagacactgtctgcagaccagtgtgcttacttcattgaaaatg

SEQ ID NO: 11678 - DNA, 122 bp, Homo sapiens
  misc_feature (61)..(62): /note="This region represents a CpG dinucleotide"
  misc_feature (61)..(61): /note="Nucleotide may be methylated to form 5-methylcytosine"
caaaacaaaacaaacaaacaaaaaaacagttacaagtatgtgctgtggtgttgaggtcgacgtagctctaatgcaagatgtcatgaggtgcagaataaagacattttgatagtcaccgtaaa

SEQ ID NO: 11679 - DNA, 122 bp, Homo sapiens
  misc_feature (61)..(62): /note="This region represents a CpG dinucleotide"
  misc_feature (61)..(61): /note="Nucleotide may be methylated to form 5-methylcytosine"
caaatgaccaaaataatgcagagagccactaagtggcttatcaaggtcgcacatgtagtacgtggcagggcttggatttaaaccaagtagtctgactcaagagttcattttctatgctgaca

SEQ ID NO: 11680 - DNA, 122 bp, Homo sapiens
  misc_feature (61)..(62): /note="This region represents a CpG dinucleotide"
  misc_feature (61)..(61): /note="Nucleotide may be methylated to form 5-methylcytosine"
cttttttttttttttttttgagacggagtctcactctgtcgccaggctggagtgcagtggcgcgatctcatgattatttgagggagccttccttggagctcagcacatgtaagggcagaccc

SEQ ID NO: 11681 - DNA, 122 bp, Homo sapiens
  misc_feature (61)..(62): /note="This region represents a CpG dinucleotide"
  misc_feature (61)..(61): /note="Nucleotide may be methylated to form 5-methylcytosine"
cgaggtgcactccactgccccctgaaattgccatcagagcattgtttcataatctatgttcgtctgttccctctacaagcttgtgagtggcttgattttccacttccttgtgcacgggggtc

SEQ ID NO: 11682 - DNA, 122 bp, Homo sapiens
  misc_feature (61)..(62): /note="This region represents a CpG dinucleotide"
  misc_feature (61)..(61): /note="Nucleotide may be methylated to form 5-methylcytosine"
tgccttttgttggaattatatcaggaaactttctttcgaagctgccacaggttctttctgcgtatagttgccccagcttgagctgcatgcattgaaggaaatggcccatggctgactgagtg

SEQ ID NO: 11683 - DNA, 122 bp, Homo sapiens
  misc_feature (61)..(62): /note="This region represents a CpG dinucleotide"
  misc_feature (61)..(61): /note="Nucleotide may be methylated to form 5-methylcytosine"
ctttgtactttgtggcctgaattgcagctgctcagcctatgggaattacccgcattctgacgtttgccatgaataatgtacttagcatgaaatgagttcctcaatcttatcaggtatttggc

SEQ ID NO: 11684 - DNA, 122 bp, Homo sapiens
  misc_feature (61)..(62): /note="This region represents a CpG dinucleotide"
  misc_feature (61)..(61): /note="Nucleotide may be methylated to form 5-methylcytosine"
cgctgtttggggtggaaatcctctaacccgctgggcctgtgcgccagggctgagcaacagcgcggagccgtgcatctgtcgggggcgggacgcggcagcagggctgtgagggctgcgttttc

SEQ ID NO: 11685 - DNA, 122 bp, Homo sapiens
  misc_feature (61)..(62): /note="This region represents a CpG dinucleotide"
  misc_feature (61)..(61): /note="Nucleotide may be methylated to form 5-methylcytosine"
acccgggctgggctctactacctgtactgtcaggtaagccccatctggctgcatgggtaacgcagtaagagagtggcgaagggtttgccaggagagtgggggacaagctacagggctgggag

SEQ ID NO: 11686 - DNA, 122 bp, Homo sapiens
  misc_feature (61)..(62): /note="This region represents a CpG dinucleotide"
  misc_feature (61)..(61): /note="Nucleotide may be methylated to form 5-methylcytosine"
caaaaccttttgattctactcatcccctggttaataatttccagtttacccagcaggctacgtaacatcccctttcctgggaaagaatttctgtgccccggctggcagtgaactggtcccct

SEQ ID NO: 11687 - DNA, 122 bp, Homo sapiens
  misc_feature (61)..(62): /note="This region represents a CpG dinucleotide"
  misc_feature (61)..(61): /note="Nucleotide may be methylated to form 5-methylcytosine"
taatttcgggctcaggggagaaatggaagtcaaagaatctcataaacacagctgcgatgacgaaccctttcacgggaaggaacatgcgagcccagaaaagtctctcctggtcttgggatgga

SEQ ID NO: 11688 - DNA, 122 bp, Homo sapiens
  misc_feature (61)..(62): /note="This region represents a CpG dinucleotide"
  misc_feature (61)..(61): /note="Nucleotide may be methylated to form 5-methylcytosine"
tgcaaaaaagagcattttgaatgataagcacaattgaaagcctaaggcaagactttaaagcgcagtgggaactgcttagtcattagcctgtatgtgctgctgccacttcaagtttgcaagaa

SEQ ID NO: 11689 - DNA, 122 bp, Homo sapiens
  misc_feature (61)..(62): /note="This region represents a CpG dinucleotide"
  misc_feature (61)..(61): /note="Nucleotide may be methylated to form 5-methylcytosine"
atcttaagcggggaaaaaagtgaatgtaaaggaatgtacaagttttatggtgctcatatgcgatgcctataatgtgtttatataacacttgatgttttcattgattgctaccaggaattaaa

SEQ ID NO: 11690 - DNA, 122 bp, Homo sapiens
  misc_feature (61)..(62): /note="This region represents a CpG dinucleotide"
  misc_feature (61)..(61): /note="Nucleotide may be methylated to form 5-methylcytosine"
aatcagatcttattcctgtttctccatactaggcataattattttcaaagctatacaatacgaagtttatcagtcttatctgtttgccataacatcattatgaattttctcttttaaaaatg

SEQ ID NO: 11691 - DNA, 122 bp, Homo sapiens
  misc_feature (61)..(62): /note="This region represents a CpG dinucleotide"
  misc_feature (61)..(61): /note="Nucleotide may be methylated to form 5-methylcytosine"
gcaaacgtgatctggggcagactgggtggcaccccccccgctccatcaaaaatagattctcggatggacaacagcagcagccaatcagggactggggagggggcgggatcaacctcggcccg

SEQ ID NO: 11692 - DNA, 122 bp, Homo sapiens
  misc_feature (61)..(62): /note="This region represents a CpG dinucleotide"
  misc_feature (61)..(61): /note="Nucleotide may be methylated to form 5-methylcytosine"
attcaggaatgaaaaggaacaaatgttcttttctgtcatgctccacaataaaaatcgaagcgaatgtttgccgcacattcacatgggcctgttggattataatggcactacccttgtcagag

SEQ ID NO: 11693 - DNA, 122 bp, Homo sapiens
  misc_feature (61)..(62): /note="This region represents a CpG dinucleotide"
  misc_feature (61)..(61): /note="Nucleotide may be methylated to form 5-methylcytosine"
ctacacacaatgacaggcaccttctatattgagtgagtgtcgccggccgtcctagtgctccgctccttagcaccccagaaagcaccgtcccctgctccgagcacccaaggcactccctgtgg

SEQ ID NO: 11694 - DNA, 122 bp, Homo sapiens
  misc_feature (61)..(62): /note="This region represents a CpG dinucleotide"
  misc_feature (61)..(61): /note="Nucleotide may be methylated to form 5-methylcytosine"
aaaaaaaaaaaggaaaatattttctagcacataaacttgaaattttcttggagatgtggacgtggggagcactaatgattaatcaaacaattcaggaatgaaaaagctattaagaagctttt

SEQ ID NO: 11695 - DNA, 122 bp, Homo sapiens
  misc_feature (61)..(62): /note="This region represents a CpG dinucleotide"
  misc_feature (61)..(61): /note="Nucleotide may be methylated to form 5-methylcytosine"
tcaattaggtcattcctagttgctctctcacttgcaaccaaatgaacccaaattggggggcgggctggaggcagagggctgactcccgtggcttcctggccacctcgtgcctgtgtgaacag

SEQ ID NO: 11696 - DNA, 122 bp, Homo sapiens
  misc_feature (61)..(62): /note="This region represents a CpG dinucleotide"
  misc_feature (61)..(61): /note="Nucleotide may be methylated to form 5-methylcytosine"
aacctatgtttagctccaggataaggaagccttggaaacaggattgtgtgagtaagagcccggagttaggattcaagtaaactgagcattaatcccacatgtgtcactgtcttgctgtgtga

SEQ ID NO: 11697 - DNA, 122 bp, Homo sapiens
  misc_feature (61)..(62): /note="This region represents a CpG dinucleotide"
  misc_feature (61)..(61): /note="Nucleotide may be methylated to form 5-methylcytosine"
gtaaaggaaatagtatctattcaaccatgtcctccagacatttacaacttatactgatgacgtagctccctttcattagggtctttcctatatgatttttattttcttttttgctgagatag

SEQ ID NO: 11698 - DNA, 122 bp, Homo sapiens
  misc_feature (61)..(62): /note="This region represents a CpG dinucleotide"
  misc_feature (61)..(61): /note="Nucleotide may be methylated to form 5-methylcytosine"
gtctggatggtttacacagacacggtgagagacgttacccggacgcaaaagagtacacagcgtgtgataccgttccatgtacagtcatacgttgcttaacgacgggctgtgttctgagaaat

SEQ ID NO: 11699 - DNA, 122 bp, Homo sapiens
  misc_feature (61)..(62): /note="This region represents a CpG dinucleotide"
  misc_feature (61)..(61): /note="Nucleotide may be methylated to form 5-methylcytosine"
ggaatttgccaagatctgaaattcttcagcagcacctttgcacatgacacatgaactgaacgcgtggagagcagcagtaagcatcacaataacagaatagttttttggtgcatctaatacaa

SEQ ID NO: 11700 - DNA, 122 bp, Homo sapiens
  misc_feature (61)..(62): /note="This region represents a CpG dinucleotide"
  misc_feature (61)..(61): /note="Nucleotide may be methylated to form 5-methylcytosine"
tcatcacttccaaacagttcttacctaagacatgcctcatccttggtaatcacactttcacgatcctatttcttttttctgtttgtttgtttgttttgttttttaaacggagtctcactctg

SEQ ID NO: 11701 - DNA, 122 bp, Homo sapiens
  misc_feature (61)..(62): /note="This region represents a CpG dinucleotide"
  misc_feature (61)..(61): /note="Nucleotide may be methylated to form 5-methylcytosine"
aaaccctgagtgtgccataccattcttcccagcaacttttactttgttgactttgttggccgaggatttcctaatcacattgttgttttcctggcagttcccaaaccagatctagattctta

SEQ ID NO: 11702 - DNA, 122 bp, Homo sapiens
  misc_feature (61)..(62): /note="This region represents a CpG dinucleotide"
  misc_feature (61)..(61): /note="Nucleotide may be methylated to form 5-methylcytosine"
ccgagacattagaacgagatctcaaatgcctagaacaactgactgctgtacgtgtcttcacgtttttgttccttacatacctttgtttttagttactttcgttccttatttacctttgtttt

SEQ ID NO: 11703 - DNA, 122 bp, Homo sapiens
  misc_feature (61)..(62): /note="This region represents a CpG dinucleotide"
  misc_feature (61)..(61): /note="Nucleotide may be methylated to form 5-methylcytosine"
ccagatagagcacagtaaaaaacagttctctaaacctatgctgtccaatatggcaacacacgagtggctagtggcttcagtattggacagaacagccccagatcatttctattatagcagaa

SEQ ID NO: 11704 - DNA, 122 bp, Homo sapiens
  misc_feature (61)..(62): /note="This region represents a CpG dinucleotide"
  misc_feature (61)..(61): /note="Nucleotide may be methylated to form 5-methylcytosine"
tttcagagatggggcagcaggttctcccaggaggagcctgtcagtcccaatgggcgggcacgtggcaaatgaggtggcagggtgcagggtgagggcagattagagttcagtagttgagtctg

SEQ ID NO: 11705 - DNA, 122 bp, Homo sapiens
  misc_feature (61)..(62): /note="This region represents a CpG dinucleotide"
  misc_feature (61)..(61): /note="Nucleotide may be methylated to form 5-methylcytosine"
aagtactttataaatattaggtcatgtaatctgcataataaccctatgaggtaagtactacgattgtcttctgtcactggctcagggtcacactagtacatggcagaacaaaggtcaaactc

SEQ ID NO: 11706 - DNA, 122 bp, Homo sapiens
  misc_feature (61)..(62): /note="This region represents a CpG dinucleotide"
  misc_feature (61)..(61): /note="Nucleotide may be methylated to form 5-methylcytosine"
atatggctgagagagaaagaaagtgcctccacctaagtgtgcaagaccccaacaggcagccgacctcccagctttaccgattgctccaggatcaggcccagtcctggctgcactgagctgtg

SEQ ID NO: 11707 - DNA, 122 bp, Homo sapiens
  misc_feature (61)..(62): /note="This region represents a CpG dinucleotide"
  misc_feature (61)..(61): /note="Nucleotide may be methylated to form 5-methylcytosine"
ggctggaagaatctttgtccatacagaattgtgatcagactcctggtgctactacatttccgtgctgttggccattacccaggagggctatagcagggtcagaaagacgttagggaaaagag

SEQ ID NO: 11708 - DNA, 122 bp, Homo sapiens
  misc_feature (61)..(62): /note="This region represents a CpG dinucleotide"
  misc_feature (61)..(61): /note="Nucleotide may be methylated to form 5-methylcytosine"
tgaattttttccatctggaattttatttgatgattagtctagcatcgtaatggtgtccttcgtgttgacgtgaaaacccagtcttccttcagttcatttcccgtttattagggatgcaaaac

SEQ ID NO: 11709 - DNA, 122 bp, Homo sapiens
  misc_feature (61)..(62): /note="This region represents a CpG dinucleotide"
  misc_feature (61)..(61): /note="Nucleotide may be methylated to form 5-methylcytosine"
ggcagaggaatatctaattgtgagtgtgagtgcgtgtgtgactgtgagtgtgagccagcccgtcagtgtgaatgtttgagagagcctctctgtatgtgcctgggggagggtgtgaggtgtgg

SEQ ID NO: 11710 - DNA, 122 bp, Homo sapiens
  misc_feature (61)..(62): /note="This region represents a CpG dinucleotide"
  misc_feature (61)..(61): /note="Nucleotide may be methylated to form 5-methylcytosine"
ggtactaaggttagcgaaaacactgcattccaacacgcgagagccacccaggcagggatgcgtcgcggaaaacacctctcacagcgctctgcagtgacaaggagcatctctgtgtggaaatg

SEQ ID NO: 11711 - DNA, 122 bp, Homo sapiens
  misc_feature (61)..(62): /note="This region represents a CpG dinucleotide"
  misc_feature (61)..(61): /note="Nucleotide may be methylated to form 5-methylcytosine"
gtatctatgcccaggctgtaaaagattggaatctttgctcatggagcctgggagctgccacgtaagagcctgtattcaaaaagagctggctgagcccagccttcagccatttctgctaaggt

SEQ ID NO: 11712 - DNA, 122 bp, Homo sapiens
  misc_feature (61)..(62): /note="This region represents a CpG dinucleotide"
  misc_feature (61)..(61): /note="Nucleotide may be methylated to form 5-methylcytosine"
tcggggggaagcctttgcaagaaaattgcatacaaggctttgtaacgatcaagtgctaatcgatggaaatgttaaggtagattaacatatatgcagttatattgatcacattggtccaacca

SEQ ID NO: 11713 - DNA, 122 bp, Homo sapiens
  misc_feature (61)..(62): /note="This region represents a CpG dinucleotide"
  misc_feature (61)..(61): /note="Nucleotide may be methylated to form 5-methylcytosine"
tatattaatattactatcttcttttaatctcccacagtgtccatgcgttatcaggccctacgtgaattgatcaaaggatctttgcctgagagttgacagaggctccaaattccttgctgtct

SEQ ID NO: 11714 - DNA, 122 bp, Homo sapiens
  misc_feature (61)..(62): /note="This region represents a CpG dinucleotide"
  misc_feature (61)..(61): /note="Nucleotide may be methylated to form 5-methylcytosine"
gcgtaggttcgagcatatggtaactggaacagaaaccaagtgttccagctgcccaaatggcgagagagggagagagggagagagggagagagggagggagggagggagggaagatcacagct

SEQ ID NO: 11715 - DNA, 122 bp, Homo sapiens
  misc_feature (61)..(62): /note="This region represents a CpG dinucleotide"
  misc_feature (61)..(61): /note="Nucleotide may be methylated to form 5-methylcytosine"
attgatgaatcaggtcaaccacatttgaaccacatttaattgatggataaccagacattacgtgcctcttgctgtgatacaataggaagtatagagcatcatatatagagtatccttgccta

SEQ ID NO: 11716 - DNA, 122 bp, Homo sapiens
  misc_feature (61)..(62): /note="This region represents a CpG dinucleotide"
  misc_feature (61)..(61): /note="Nucleotide may be methylated to form 5-methylcytosine"
tcagtatttgcctaacaataagcatttcccagcctggagggagggcaggcttctaacgggcgaggcacctgccctgccaccatttccctgtggtcagtcatgtcctgttccccacctcatgg

SEQ ID NO: 11717 - DNA, 122 bp, Homo sapiens
  misc_feature (61)..(62): /note="This region represents a CpG dinucleotide"
  misc_feature (61)..(61): /note="Nucleotide may be methylated to form 5-methylcytosine"
tggcctctgatctttgaacatttccatagtgcacccgacacgtcgggcccggtcatagcccggcgcagcccctcgctcactcaggaacatctgctacagcatttaccacgttaatagattag

SEQ ID NO: 11718 - DNA, 122 bp, Homo sapiens
  misc_feature (61)..(62): /note="This region represents a CpG dinucleotide"
  misc_feature (61)..(61): /note="Nucleotide may be methylated to form 5-methylcytosine"
gtgatcctttcctcctgctgtttgttttggtctgtccctttcaggcaggagacttcactccgtgtctaatgaccttgcctgtctgtcccgagaatgggacactctcaaacatgcttgactga

SEQ ID NO: 11719 - DNA, 122 bp, Homo sapiens
  misc_feature (61)..(62): /note="This region represents a CpG dinucleotide"
  misc_feature (61)..(61): /note="Nucleotide may be methylated to form 5-methylcytosine"
gagacagaaccattcactcccctggaaaggggcctgaagccagggagccaagtggtctggcgtggtgggtcccaccccaaggagcccagcaagttaagatccactagcttgaaattgtcgct

SEQ ID NO: 11720 - DNA, 122 bp, Homo sapiens
  misc_feature (61)..(62): /note="This region represents a CpG dinucleotide"
  misc_feature (61)..(61): /note="Nucleotide may be methylated to form 5-methylcytosine"
tataatactctttcccaacatttttggctgcatactccttaatgcctcttcaaaagataacgatttggtaattttttttacaggaaatggcatggaatgagaagtcagtaaaaccttgtttc

SEQ ID NO: 11721 - DNA, 122 bp, Homo sapiens
  misc_feature (61)..(62): /note="This region represents a CpG dinucleotide"
  misc_feature (61)..(61): /note="Nucleotide may be methylated to form 5-methylcytosine"
ctgtaaacaccactgcacttggaccagccagcagccgaattttcctaataaaagttgacacgcttttttaaaatttggtgacttggtaggaaggaaaactattatttatatttggaaaagaa

SEQ ID NO: 11722 - DNA, 122 bp, Homo sapiens
  misc_feature (61)..(62): /note="This region represents a CpG dinucleotide"
  misc_feature (61)..(61): /note="Nucleotide may be methylated to form 5-methylcytosine"
tggctggtagaacccatttcactttgaattctgcccagaaaccacaggaggatcagtccacggaagagaaaaatctaattggttacagggacttagcatctgcccagaagacattcatgccc

SEQ ID NO: 11723 - DNA, 122 bp, Homo sapiens
  misc_feature (61)..(62): /note="This region represents a CpG dinucleotide"
  misc_feature (61)..(61): /note="Nucleotide may be methylated to form 5-methylcytosine"
gaggtgcaaagatgagacactggatcaagaccagggagacaagcctagggcgtacactcacgtagcaaaacacatcaggctatacagtggaaggaagctgaagggcaaaaggtagctcatta

SEQ ID NO: 11724 - DNA, 122 bp, Homo sapiens
  misc_feature (61)..(62): /note="This region represents a CpG dinucleotide"
  misc_feature (61)..(61): /note="Nucleotide may be methylated to form 5-methylcytosine"
ccatgtttttaggggattctgtgctttcccacctaaaaatcatagcactgattcctgtcacggtgctaggcaggagagggtcataccaggtcagaaacacttcttcttctgtgtgcacccat

SEQ ID NO: 11725 - DNA, 122 bp, Homo sapiens
  misc_feature (61)..(62): /note="This region represents a CpG dinucleotide"
  misc_feature (61)..(61): /note="Nucleotide may be methylated to form 5-methylcytosine"
ggtgtgttggttccaccattctctccaattttgaatcagtcttggaactggaaagagcctcgggggtgaattataccgattacctccctctttctcctccttcccccgaaattcatgtgcgg

SEQ ID NO: 11726 - DNA, 122 bp, Homo sapiens
  misc_feature (61)..(62): /note="This region represents a CpG dinucleotide"
  misc_feature (61)..(61): /note="Nucleotide may be methylated to form 5-methylcytosine"
caatctctacgattgttctgagaattagatgaggaaacacctacaaaacaattattatcgcggccagcacatggcaaaagcattgtttgctagcatggcaaaaagaagacaaccatagtgga

SEQ ID NO: 11727 - DNA, 122 bp, Homo sapiens
  misc_feature (61)..(62): /note="This region represents a CpG dinucleotide"
  misc_feature (61)..(61): /note="Nucleotide may be methylated to form 5-methylcytosine"
acatcgggaatggtgtctatgtgtccactggcctgcagcaaggacccagttccctgccagcgccagtatgctatccctaagctgtgcccataagccccagtgggaggctggatactgggcaa

SEQ ID NO: 11728 - DNA, 122 bp, Homo sapiens
  misc_feature (61)..(62): /note="This region represents a CpG dinucleotide"
  misc_feature (61)..(61): /note="Nucleotide may be methylated to form 5-methylcytosine"
gttaggcctgagcagggcagcccttcaaatgcaattcaatgctgctgagagggaaacgaacggagtccatcccagccgtggagtaaatggactgattaacggcaaagctaacagtaataaat

SEQ ID NO: 11729 - DNA, 122 bp, Homo sapiens
  misc_feature (61)..(62): /note="This region represents a CpG dinucleotide"
  misc_feature (61)..(61): /note="Nucleotide may be methylated to form 5-methylcytosine"
cgctatcgagccggcaggtgatgggtccggccgtctgggttctgtgggtgctaatgtagccggaaatccggcgcgatcgatggctgagacccagagcagagcagggaccgctggccccggtc

SEQ ID NO: 11730 - DNA, 122 bp, Homo sapiens
  misc_feature (61)..(62): /note="This region represents a CpG dinucleotide"
  misc_feature (61)..(61): /note="Nucleotide may be methylated to form 5-methylcytosine"
ctgctatgtgccagggcctgtgctacgcagtgggataacaggggagaacaagacaggcagcgtgcctgccttcaaagaggcttctttctattgtggggagacagacagtaaatacttttaag

SEQ ID NO: 11731 - DNA, 122 bp, Homo sapiens
  misc_feature (61)..(62): /note="This region represents a CpG dinucleotide"
  misc_feature (61)..(61): /note="Nucleotide may be methylated to form 5-methylcytosine"
cagaggaatgcctcttcaggcacataaacatttttgcatactccatgttagtcaataaaccgtttcataagggttctttgaggacatctgacttcaaagggaaaaaattcataattcagaca

SEQ ID NO: 11732 - DNA, 122 bp, Homo sapiens
  misc_feature (61)..(62): /note="This region represents a CpG dinucleotide"
  misc_feature (61)..(61): /note="Nucleotide may be methylated to form 5-methylcytosine"
cactggctcggtgcccagcagaaaatatttaagttgccacctttggtcctttaactgtgccgtctcactcagggtaaaccgtgcaactcctttctttcatgacgtttgaaaggggaaattaa

SEQ ID NO: 11733 - DNA, 122 bp, Homo sapiens
  misc_feature (61)..(62): /note="This region represents a CpG dinucleotide"
  misc_feature (61)..(61): /note="Nucleotide may be methylated to form 5-methylcytosine"
tttaatagaagctaagtgattcacccttaataacatggttcattgtcgggtaaattaagacgctgaaatacttcagcccttaggcatattaagagcataaagccagtggggtcttctgtgtt

SEQ ID NO: 11734 - DNA, 122 bp, Homo sapiens
  misc_feature (61)..(62): /note="This region represents a CpG dinucleotide"
  misc_feature (61)..(61): /note="Nucleotide may be methylated to form 5-methylcytosine"
ttcccaccctgggttctggtactgctcccaggctgtgtggcattgactagagtgcttcaacggcccactggccccacacagctggtgcctggggcccagggtggatccatgagtttgggcaa

SEQ ID NO: 11735 - DNA, 122 bp, Homo sapiens
  misc_feature (61)..(62): /note="This region represents a CpG dinucleotide"
  misc_feature (61)..(61): /note="Nucleotide may be methylated to form 5-methylcytosine"
acctgttcctggggaaaccagaataaaggctcttgctcccgctgtcccgactgaccctgccgctcccccatgtggcctggcatggtggagcacacactctcctgtcctgggaactgtctcag

SEQ ID NO: 11736 - DNA, 122 bp, Homo sapiens
  misc_feature (61)..(62): /note="This region represents a CpG dinucleotide"
  misc_feature (61)..(61): /note="Nucleotide may be methylated to form 5-methylcytosine"
caagcctcagcccccgcccatttcctcagggacatgctccctgacccagagcagagatcacgttctttgttatacagtttcagagtacagtagtcctttattagagagcatttgattcagtt

SEQ ID NO: 11737 - DNA, 122 bp, Homo sapiens
  misc_feature (61)..(62): /note="This region represents a CpG dinucleotide"
  misc_feature (61)..(61): /note="Nucleotide may be methylated to form 5-methylcytosine"
caaggctaggaaaggggaagtaacttgcccaaggtcatgcaattaataagtggaagaagccgcctggagctcaggtctctggaacagcaaagacacaagctcactgcactgtaatgtaaacg

SEQ ID NO: 11738 - DNA, 122 bp, Homo sapiens
  misc_feature (61)..(62): /note="This region represents a CpG dinucleotide"
  misc_feature (61)..(61): /note="Nucleotide may be methylated to form 5-methylcytosine"
agtaacaaggtgctgggaccaatcaggaacttgtcttctcaggaacgtacctgtttattgcgtggatgggggggggtggggcacaggacagccgtgcacaggcgtagtagtcaccaatagac

SEQ ID NO: 11739 - DNA, 122 bp, Homo sapiens
  misc_feature (61)..(62): /note="This region represents a CpG dinucleotide"
  misc_feature (61)..(61): /note="Nucleotide may be methylated to form 5-methylcytosine"
taaccagcactggggacagcggcacgcaggtggccggggttggcgaacagccactgcagccgcgcctgcggccgggaagcgagcattttcgcgccctgcacacccagcagccgcaggaggcg

SEQ ID NO: 11740 - DNA, 122 bp, Homo sapiens
  misc_feature (61)..(62): /note="This region represents a CpG dinucleotide"
  misc_feature (61)..(61): /note="Nucleotide may be methylated to form 5-methylcytosine"
tgaaactgcacatcgtaatatacacattcagagcgggctattggctaaatgaaggcaatgcgtgtggaagtctgatttgccaccttcagggcaggcgtcttatatcctaattcagaaagatg

SEQ ID NO: 11741 - DNA, 122 bp, Homo sapiens
  misc_feature (61)..(62): /note="This region represents a CpG dinucleotide"
  misc_feature (61)..(61): /note="Nucleotide may be methylated to form 5-methylcytosine"
aagtgaaatagagctgatgtatccagaggttatgttgctagaggtgagatcagttacctacgtgcaactgaaatttcaaacttctgttcagcagggacgtgagtggacaatggtgactgata

SEQ ID NO: 11742 - DNA, 122 bp, Homo sapiens
  misc_feature (61)..(62): /note="This region represents a CpG dinucleotide"
  misc_feature (61)..(61): /note="Nucleotide may be methylated to form 5-methylcytosine"
aacaagtgcatcagccatcggggagtgtgagaggaattaatgaaacactgaaagcattgccgatagtcagcatgaatttggagtggacacagaagtatgaaatggaaaatagccccacccca

SEQ ID NO: 11743 - DNA, 122 bp, Homo sapiens
  misc_feature (61)..(62): /note="This region represents a CpG dinucleotide"
  misc_feature (61)..(61): /note="Nucleotide may be methylated to form 5-methylcytosine"
gcaaaccaatttctatttgctgactattctccagggcttttaaaagcaaataaaatgtaccggaaactgttttccaaatgacaacaaagaatacatctcctactctctcttctcccccaaca

SEQ ID NO: 11744 - DNA, 122 bp, Homo sapiens
  misc_feature (61)..(62): /note="This region represents a CpG dinucleotide"
  misc_feature (61)..(61): /note="Nucleotide may be methylated to form 5-methylcytosine"
tatgggcttacagacctgagccaccgtgtccagccggttgactctctgattagcctttcacggaatatacagtttacctgtgacaaaggtagaggaatagtcacttatgcctttgtctggct

SEQ ID NO: 11745 - DNA, 122 bp, Homo sapiens
  misc_feature (61)..(62): /note="This region represents a CpG dinucleotide"
  misc_feature (61)..(61): /note="Nucleotide may be methylated to form 5-methylcytosine"
atactctatccaaacatgatctgagaacactcttgtggttttaaggttatatgggacctccgtttcacctttgctttcacttgacaaaagaaggaacaacttctctccatggttaatactac

SEQ ID NO: 11746 - DNA, 122 bp, Homo sapiens
  misc_feature (61)..(62): /note="This region represents a CpG dinucleotide"
  misc_feature (61)..(61): /note="Nucleotide may be methylated to form 5-methylcytosine"
aattgtttttgttgttattgttttaatagaatttcatagtcttatctagcaatttcaaatcgctggaaagagtcatctttgttatataaataaccatgtagactgttttaatgttattgttt

SEQ ID NO: 11747 - DNA, 122 bp, Homo sapiens
  misc_feature (61)..(62): /note="This region represents a CpG dinucleotide"
  misc_feature (61)..(61): /note="Nucleotide may be methylated to form 5-methylcytosine"
tttgagttggtagtgacagcatcattttcaccagtggctccagtgaccttccagtcccagcggagccatctgaggtcacccagcctgctttgagctagtagctttatgactggcaaagaaat

SEQ ID NO: 11748 - DNA, 122 bp, Homo sapiens
  misc_feature (61)..(62): /note="This region represents a CpG dinucleotide"
  misc_feature (61)..(61): /note="Nucleotide may be methylated to form 5-methylcytosine"
gtctaagtgtgattaaatttcattaaggtgtataagcctctaattattacataactggcacgtctgacttttgctatcatttgaggattctactgtatataagtttcatctaacattggcat

SEQ ID NO: 11749 - DNA, 122 bp, Homo sapiens
  misc_feature (61)..(62): /note="This region represents a CpG dinucleotide"
  misc_feature (61)..(61): /note="Nucleotide may be methylated to form 5-methylcytosine"
cagtcatcctaataaagcagcatggtcacaggatgagccagcctgaatctgcagcttcttcgtgcaaaacctgagtttctgtgtctctttaattaaaacgatttgcagctcttcattccttt

SEQ ID NO: 11750 - DNA, 122 bp, Homo sapiens
  misc_feature (61)..(62): /note="This region represents a CpG dinucleotide"
  misc_feature (61)..(61): /note="Nucleotide may be methylated to form 5-methylcytosine"
gctaaatttcttttagctgaggcactcttgctacattggcattttaatgttcttggaacccgtatggacaaagagttgaaagaaacatatactcattttaatataaatttttctatcttata

SEQ ID NO: 11751 - DNA, 122 bp, Homo sapiens
  misc_feature (61)..(62): /note="This region represents a CpG dinucleotide"
  misc_feature (61)..(61): /note="Nucleotide may be methylated to form 5-methylcytosine"
gggtcctccgggtgatgaggagccgctggagggccctgagctgcacgtgctaatgattaacgccccgtccgtgctggccggtttctcaaatgcctcctgacgattgcgcacagccggacatc

SEQ ID NO: 11752 - DNA, 122 bp, Homo sapiens
  misc_feature (61)..(62): /note="This region represents a CpG dinucleotide"
  misc_feature (61)..(61): /note="Nucleotide may be methylated to form 5-methylcytosine"
tgtgcaagaagcaatgaggttttgagcacggttttttaccactttatgaatcaaccttcccgcctcctcttcccccccccatctctggagtcctcatagttttctctttaaaatcatttgta

SEQ ID NO: 11753 - DNA, 122 bp, Homo sapiens
  misc_feature (61)..(62): /note="This region represents a CpG dinucleotide"
  misc_feature (61)..(61): /note="Nucleotide may be methylated to form 5-methylcytosine"
atgatgcagaagtgatccgtggacatgagaactttccccatttctgacattttctattttcgtttctgctttttctgaacttaaataagacactgtgttctgctgacaagaaaaaaaaatac

SEQ ID NO: 11754 - DNA, 122 bp, Homo sapiens
  misc_feature (61)..(62): /note="This region represents a CpG dinucleotide"
  misc_feature (61)..(61): /note="Nucleotide may be methylated to form 5-methylcytosine"
agattgcccatcaggtcactgtgggtgtgacagccactggctccagaagctcagtcctggcggcagctgtcaaaccaacacccacatagcctgcaagcagagggcaggcggggcagtttgta

SEQ ID NO: 11755 - DNA, 122 bp, Homo sapiens
  misc_feature (61)..(62): /note="This region represents a CpG dinucleotide"
  misc_feature (61)..(61): /note="Nucleotide may be methylated to form 5-methylcytosine"
aatatcaattttaccttgcttgtgattttgtgggttagaaatacatgaaggactcgggtgcgtgactcatcagctgaagtagctgggactagaggatcaattttcaagaaggcttattcact

SEQ ID NO: 11756 - DNA, 122 bp, Homo sapiens
  misc_feature (61)..(62): /note="This region represents a CpG dinucleotide"
  misc_feature (61)..(61): /note="Nucleotide may be methylated to form 5-methylcytosine"
tgggaccgctgcatcccagctcttgcaccagctgaggccaaggtgggtgaccttagggttcgaatgtgaatctggctcagggcctggaagaaataactgaccacacatgggaatgaatgggt

SEQ ID NO: 11757 - DNA, 122 bp, Homo sapiens
  misc_feature (61)..(62): /note="This region represents a CpG dinucleotide"
  misc_feature (61)..(61): /note="Nucleotide may be methylated to form 5-methylcytosine"
tttttttttttaaagaatttttttttggccgcgcgtggtggctcaacgcctgtaatctcccgggttcaagtgattctcctgcctcagcctcccaagtagctgggaactacaggcgcgtgcca

SEQ ID NO: 11758 - DNA, 122 bp, Homo sapiens
  misc_feature (61)..(62): /note="This region represents a CpG dinucleotide"
  misc_feature (61)..(61): /note="Nucleotide may be methylated to form 5-methylcytosine"
tctactcttcagtccagttacatctcaggtatcagaattatcagaatggacttccttttgcgtggtcatgtatttccatagcaacctgaagggggggaaaaagatattttaaaatcacccta

SEQ ID NO: 11759 - DNA, 122 bp, Homo sapiens
  misc_feature (61)..(62): /note="This region represents a CpG dinucleotide"
  misc_feature (61)..(61): /note="Nucleotide may be methylated to form 5-methylcytosine"
tgagtccagagctaggggatgggccaaaacgcagtggtggcaaacagacccctgggtggtcgctaaagacatgatcttctgtcctagagagaacctcctcacacagtgctgtccagcaccca

SEQ ID NO: 11760 - DNA, 122 bp, Homo sapiens
  misc_feature (61)..(62): /note="This region represents a CpG dinucleotide"
  misc_feature (61)..(61): /note="Nucleotide may be methylated to form 5-methylcytosine"
tcccctttttaataggggtggggctaatgcctgcagcacagctcatgttcccagctcagacgaggtgaagatatgacaggtttgagaagagtaaattcccagcagcccagcgccactcccgg

SEQ ID NO: 11761 - DNA, 122 bp, Homo sapiens
  misc_feature (61)..(62): /note="This region represents a CpG dinucleotide"
  misc_feature (61)..(61): /note="Nucleotide may be methylated to form 5-methylcytosine"
actgtaataccttcctcagttgttttccaatttaccacccccttcctaggaaaatccacacgccttaatgaattgctacagtcattagcaaagggagtaagttttgatgtttgtcttgtctg

SEQ ID NO: 11762 - DNA, 122 bp, Homo sapiens
  misc_feature (61)..(62): /note="This region represents a CpG dinucleotide"
  misc_feature (61)..(61): /note="Nucleotide may be methylated to form 5-methylcytosine"
gtagcatccgcaaagtaattagcataatgtttcacaaaagtaggcactcgacgaatttgtcgttagctcatttcctcttgtattctatagaacacagatttcagcatgctaacaaaattaac

SEQ ID NO: 11763 - DNA, 122 bp, Homo sapiens
  misc_feature (61)..(62): /note="This region represents a CpG dinucleotide"
  misc_feature (61)..(61): /note="Nucleotide may be methylated to form 5-methylcytosine"
acagtgcacaaccggctgggccagcccatccagcatagagatgtgaaaacctgtccaggtcgctggtgtatagccagaacaatggcacggggcagggcaaagatgctcacccaggtctcagg

SEQ ID NO: 11764 - DNA, 122 bp, Homo sapiens
  misc_feature (61)..(62): /note="This region represents a CpG dinucleotide"
  misc_feature (61)..(61): /note="Nucleotide may be methylated to form 5-methylcytosine"
cggccggcacccctccctccgcacctgagcctgcctgtcaccagccggcacccctccctccgcaccttcacggtgtccaggttcttgccctggaagttcacatctgtctcgtggttcatggg

SEQ ID NO: 11765 - DNA, 122 bp, Homo sapiens
  misc_feature (61)..(62): /note="This region represents a CpG dinucleotide"
  misc_feature (61)..(61): /note="Nucleotide may be methylated to form 5-methylcytosine"
attttttgcctccttgcatgtgtgattactcacattaaaaatagctttgtaagagaaaaacgatgtgaaatttatgttttaggtcaatatgttggggatttctgagctgtttttcatttgta

SEQ ID NO: 11766 - DNA, 122 bp, Homo sapiens
  misc_feature (61)..(62): /note="This region represents a CpG dinucleotide"
  misc_feature (61)..(61): /note="Nucleotide may be methylated to form 5-methylcytosine"
atcccagctctgccattttctaaattactctcctaaccttttatggcctgtgttctcaaccgtcaaaggggaaaaataatagtacctgtcttatagggtagttaggaacacaaaaagctctt

SEQ ID NO: 11767 - DNA, 122 bp, Homo sapiens
  misc_feature (61)..(62): /note="This region represents a CpG dinucleotide"
  misc_feature (61)..(61): /note="Nucleotide may be methylated to form 5-methylcytosine"
ctcattcatctctggattataagcaaaaagctctgtctccccaggaagcccagaagccaccgaggaaagttctcagtgaatgaacaggagtcatagctgtcctccacctccctgctcatgac

SEQ ID NO: 11768 - DNA, 122 bp, Homo sapiens
  misc_feature (61)..(62): /note="This region represents a CpG dinucleotide"
  misc_feature (61)..(61): /note="Nucleotide may be methylated to form 5-methylcytosine"
tattgtttctactgccctggtggtgattcattttaattccacttctgacaatttctcctccgtacaaggcactgtcctgaaacagctggtaaattctaagaggtcacaggacctaatctgtt

SEQ ID NO: 11769 - DNA, 122 bp, Homo sapiens
  misc_feature (61)..(62): /note="This region represents a CpG dinucleotide"
  misc_feature (61)..(61): /note="Nucleotide may be methylated to form 5-methylcytosine"
ccctcaggccgtcttgtcagactctgagagcggcgtccagctgagcggctctgagcgcaccgcggatgcttccaacggcagcctgcgggggctctcgggccagcggaccccgtccccaccgc

SEQ ID NO: 11770 - DNA, 122 bp, Homo sapiens
  misc_feature (61)..(62): /note="This region represents a CpG dinucleotide"
  misc_feature (61)..(61): /note="Nucleotide may be methylated to form 5-methylcytosine"
ctcagggtcattgccgttggcctgaagcaggagcggcaggacatcgaagcggcctctaggcggtttccagccctgctgtatgcatatctgcaagcagacccggccaggtaatgccactgtac

SEQ ID NO: 11771 - DNA, 122 bp, Homo sapiens
  misc_feature (61)..(62): /note="This region represents a CpG dinucleotide"
  misc_feature (61)..(61): /note="Nucleotide may be methylated to form 5-methylcytosine"
ttgacaaaaatctctttaaacaccaatgagtcaaagcctgggatctggagaaattgatgacgtctgcagctataggtaaaacatctttcaggactattggcagggactttaatgcttttgca

SEQ ID NO: 11772 - DNA, 122 bp, Homo sapiens
  misc_feature (61)..(62): /note="This region represents a CpG dinucleotide"
  misc_feature (61)..(61): /note="Nucleotide may be methylated to form 5-methylcytosine"
cgataggtgacatttactgagcacttactatgagtcagcctctatcctaagggctttatccgtactctaatcctatgataatagtattgttttacagatgagaaagcagagtcttagaatag

SEQ ID NO: 11773 - DNA, 122 bp, Homo sapiens
  misc_feature (61)..(62): /note="This region represents a CpG dinucleotide"
  misc_feature (61)..(61): /note="Nucleotide may be methylated to form 5-methylcytosine"
ttatgattatattaggtcatgcctgtcctcttgcttctggcctgaactaattcacttacacgtgcctataaggtgatcgaggtgacccaatgatcttcttttagccacaatacctattccat

SEQ ID NO: 11774 - DNA, 122 bp, Homo sapiens
  misc_feature (61)..(62): /note="This region represents a CpG dinucleotide"
  misc_feature (61)..(61): /note="Nucleotide may be methylated to form 5-methylcytosine"
actttgtaaatgactgattcctaagcccaatattgaatgcttagtacgtgacaatctctgcgctgagaattccacatgcctcacttcagctcatctgagtgtcagcgctacatagggaagtt

SEQ ID NO: 11775 - DNA, 122 bp, Homo sapiens
  misc_feature (61)..(62): /note="This region represents a CpG dinucleotide"
  misc_feature (61)..(61): /note="Nucleotide may be methylated to form 5-methylcytosine"
gaaagctctgcagccatggccacagccagagatgcagcacagagcctccaggtgaggacacgctgcccctaccctgacacgtgcacccagcaccggacccaccaccagagggcactcctgct

SEQ ID NO: 11776 - DNA, 122 bp, Homo sapiens
  misc_feature (61)..(62): /note="This region represents a CpG dinucleotide"
  misc_feature (61)..(61): /note="Nucleotide may be methylated to form 5-methylcytosine"
cagacactccttgggatcactcacagctcaatttttatggcatttgttttacaaatactgcgttactgtggaggaaagaagtggggacatgcacagcatatttattttttctatatccaaag

SEQ ID NO: 11777 - DNA, 122 bp, Homo sapiens
  misc_feature (61)..(62): /note="This region represents a CpG dinucleotide"
  misc_feature (61)..(61): /note="Nucleotide may be methylated to form 5-methylcytosine"
agttcaaaagataaacaataagttgctctctacttgtagaagctgagggaaagctgatcacgagctaggtcaggttagccagctctgataccacaacttgtggtgaagtcagcagcacaaat

SEQ ID NO: 11778 - DNA, 122 bp, Homo sapiens
  misc_feature (61)..(62): /note="This region represents a CpG dinucleotide"
  misc_feature (61)..(61): /note="Nucleotide may be methylated to form 5-methylcytosine"
tgcaatacagcacttgcataataaacagcccgggctgagccaaagcacagaaaacaccagcgccacagaaggccactgtggggcagcctctcaacctcgagttctgttaaataaaaaataaa

SEQ ID NO: 11779 - DNA, 122 bp, Homo sapiens
  misc_feature (61)..(62): /note="This region represents a CpG dinucleotide"
  misc_feature (61)..(61): /note="Nucleotide may be methylated to form 5-methylcytosine"
atccatgaggcaccacccactgaaatcaggcatctccatccaggatcgcatgggacagcacgtttctgacccagcctgtggctctgctccttccacaagcacttggggccaggcccatccac

SEQ ID NO: 11780 - DNA, 122 bp, Homo sapiens
  misc_feature (61)..(62): /note="This region represents a CpG dinucleotide"
  misc_feature (61)..(61): /note="Nucleotide may be methylated to form 5-methylcytosine"
atcagagatgtggaaataataggcgcgtgtatatgtaagtatgagatattcatctcacagcgcctgtcatgtaggaggtgatttaaaattattaaaggaaggaaaacagtatcctgtcccag

SEQ ID NO: 11781 - DNA, 122 bp, Homo sapiens
  misc_feature (61)..(62): /note="This region represents a CpG dinucleotide"
  misc_feature (61)..(61): /note="Nucleotide may be methylated to form 5-methylcytosine"
aaacttgagacttgtgactaattgtcacagcattccaggtcaaggaagcagccaattcctcgttctaaggcaggaagtcgtgttggggatggcagtaagagtgagtggagcagagtgagcac

SEQ ID NO: 11782 - DNA, 122 bp, Homo sapiens
  misc_feature (61)..(62): /note="This region represents a CpG dinucleotide"
  misc_feature (61)..(61): /note="Nucleotide may be methylated to form 5-methylcytosine"
tccgtgcagtgaagatatattaggcaaatgactgtttcctataatctttccttttttttccgtttcactttatgttttatgtttcctgataaagtagatttgatcatgcaaacacatacaac

SEQ ID NO: 11783 - DNA, 122 bp, Homo sapiens
  misc_feature (61)..(62): /note="This region represents a CpG dinucleotide"
  misc_feature (61)..(61): /note="Nucleotide may be methylated to form 5-methylcytosine"
tctcttgccctacagtgacatgctctgcctccacatagagtgtaggtgtatgaataaccacgtgcttagccagtcgtgtattcaagcactgaaagcaggttatttttgttgcataatgtcat

SEQ ID NO: 11784 - DNA, 122 bp, Homo sapiens
  misc_feature (61)..(62): /note="This region represents a CpG dinucleotide"
  misc_feature (61)..(61): /note="Nucleotide may be methylated to form 5-methylcytosine"
tccttacacacaaaaggctcagtgcattaaatatttgcctatcacctgtgtgctgtgtaccgtggccatgcctcgctctgcactatgaacaactcagacctgtcccttcacggtctgattag

SEQ ID NO: 11785 - DNA, 122 bp, Homo sapiens
  misc_feature (61)..(62): /note="This region represents a CpG dinucleotide"
  misc_feature (61)..(61): /note="Nucleotide may be methylated to form 5-methylcytosine"
ctctgtcaaggggagtcactgggacggtgtaggatcagccttcagagcctgctgcctgaccgtagaggaggaacctgcacacaccctgctgttttagttcacgagcagctatcaaagcctgt

SEQ ID NO: 11786 - DNA, 122 bp, Homo sapiens
  misc_feature (61)..(62): /note="This region represents a CpG dinucleotide"
  misc_feature (61)..(61): /note="Nucleotide may be methylated to form 5-methylcytosine"
ctctggaacccacagcacttaaatttatgaatggtttgaaccaccaacctattatgcaagcgtaacctaatgttctttgaatataagcactaggtaaacaagaaaatattgccacatgcatt

SEQ ID NO: 11787 - DNA, 122 bp, Homo sapiens
  misc_feature (61)..(62): /note="This region represents a CpG dinucleotide"
  misc_feature (61)..(61): /note="Nucleotide may be methylated to form 5-methylcytosine"
gacagacttagtataatattcttgacttaggactattttacttatctctctaactggcaccgaattaactttttatagcctgagtacaggaatgccccatggtgtttttgttttgttttgtt

SEQ ID NO: 11788 - DNA, 122 bp, Homo sapiens
  misc_feature (61)..(62): /note="This region represents a CpG dinucleotide"
  misc_feature (61)..(61): /note="Nucleotide may be methylated to form 5-methylcytosine"
attgaaacctagctcttgctgtgttcctggaaaacattatttcattcttccgagcttcagcgttttcatctgtaccaaataaggagtaatatatatatcacaaagatactgcacatgttaaa

SEQ ID NO: 11789 - DNA, 122 bp, Homo sapiens
  misc_feature (61)..(62): /note="This region represents a CpG dinucleotide"
  misc_feature (61)..(61): /note="Nucleotide may be methylated to form 5-methylcytosine"
cctcctcactgctcttgcctccgggcatgggaacgatgccgtctgctcgtctgcctgagacgctttctactccactccgagagtaggaggtcagccggggccaaatgacatggtggacatca

SEQ ID NO: 11790 - DNA, 122 bp, Homo sapiens
  misc_feature (61)..(62): /note="This region represents a CpG dinucleotide"
  misc_feature (61)..(61): /note="Nucleotide may be methylated to form 5-methylcytosine"
tcaagacaattgatattcttcctccctactgaacctgggctactgtctataataagtcatcgtgaaaagaggtggggtacaaaggaatataaataaaccaccgacacctcccagaccctgga

SEQ ID NO: 11791 - DNA, 122 bp, Homo sapiens
  misc_feature (61)..(62): /note="This region represents a CpG dinucleotide"
  misc_feature (61)..(61): /note="Nucleotide may be methylated to form 5-methylcytosine"
aggcgcggctctctggtcgcaagccgcctgttctcagaatacagctggctgtgttgtaatcgcacgctgatctcacaataaataacgtgtgcatggaacgtgccttcagatgagcgtgaatt

SEQ ID NO: 11792 - DNA, 122 bp, Homo sapiens
  misc_feature (61)..(62): /note="This region represents a CpG dinucleotide"
  misc_feature (61)..(61): /note="Nucleotide may be methylated to form 5-methylcytosine"
tgaaaataatcaacaggaaggagcagcgggggaggaaaaaggcagagaaacccctggcaacgaggagacaaatgaagttctgggtgcttgaagccatggagacagtaactcaaatggtttga

SEQ ID NO: 11793 - DNA, 122 bp, Homo sapiens
  misc_feature (61)..(62): /note="This region represents a CpG dinucleotide"
  misc_feature (61)..(61): /note="Nucleotide may be methylated to form 5-methylcytosine"
tttcaaccctttatttacaatctttctgtgtctctgtgttttagacacagctcttgtaaacggtatatattttagttttgcattatttatttatttatttatttttgagagagggtgtcagt

SEQ ID NO: 11794 - DNA, 122 bp, Homo sapiens
  misc_feature (61)..(62): /note="This region represents a CpG dinucleotide"
  misc_feature (61)..(61): /note="Nucleotide may be methylated to form 5-methylcytosine"
tggttttgaactcctgatccgcccacctcagctgggattataggtgtgagccaccgcgcccggccaggtgttcttcatcagactgcagggacacctccagcaattgctgcatggttcctggg

SEQ ID NO: 11795 - DNA, 122 bp, Homo sapiens
  misc_feature (61)..(62): /note="This region represents a CpG dinucleotide"
  misc_feature (61)..(61): /note="Nucleotide may be methylated to form 5-methylcytosine"
ctgccccacacatgcaggcaggaggaggcagccccacaggcccctctgccccacctggcacggacacatccagccagcaaacactgagcatctgtcacgtgtggagcactgtcctggaaaca

SEQ ID NO: 11796 - DNA, 122 bp, Homo sapiens
  misc_feature (61)..(62): /note="This region represents a CpG dinucleotide"
  misc_feature (61)..(61): /note="Nucleotide may be methylated to form 5-methylcytosine"
aaaaacaattgaaatccatcccttacgcacagatcagcatctgtcctggtttttgggtcacgtgctctctggccactcctcccgagcatgctccctcctggaacccagccacctgctgagag

SEQ ID NO: 11797 - DNA, 122 bp, Homo sapiens
  misc_feature (61)..(62): /note="This region represents a CpG dinucleotide"
  misc_feature (61)..(61): /note="Nucleotide may be methylated to form 5-methylcytosine"
agcacagggaccgtgcgtcctgctctctgctgcatctcccagccagtatacaccacggtacgtcataagccctcaacaaatatttgttgaatggaacagacgtgatcacaatatgtgctcct

SEQ ID NO: 11798 - DNA, 122 bp, Homo sapiens
  misc_feature (61)..(62): /note="This region represents a CpG dinucleotide"
  misc_feature (61)..(61): /note="Nucleotide may be methylated to form 5-methylcytosine"
aagatttaatatccttaccacccttttacaaatctataataaagaaggcatgcaacctatcgttaaaaatgagtaatataaaaatgagtaacataagagttgatcctttcatagttcatatg

SEQ ID NO: 11799 - DNA, 122 bp, Homo sapiens
  misc_feature (61)..(62): /note="This region represents a CpG dinucleotide"
  misc_feature (61)..(61): /note="Nucleotide may be methylated to form 5-methylcytosine"
ctctttcttaggcttgtctctgaagctcaactttaaggttcttttcttgagagattttctcgttctattctaggggaactcagcatcttgtctatgcttttgttatttgaacaaataatggc

SEQ ID NO: 11800 - DNA, 122 bp, Homo sapiens
  misc_feature (61)..(62): /note="This region represents a CpG dinucleotide"
  misc_feature (61)..(61): /note="Nucleotide may be methylated to form 5-methylcytosine"
aaatgcgtgatgcttttgatgtttcaacagaatattgtttctaagattatgtatcttgcacgtttggcacttgagggggtgctcatcttttgattccgctattgaggtagaggcgggacggg

SEQ ID NO: 11801 - DNA, 122 bp, Homo sapiens
  misc_feature (61)..(62): /note="This region represents a CpG dinucleotide"
  misc_feature (61)..(61): /note="Nucleotide may be methylated to form 5-methylcytosine"
acgcaccgtctgcagtcaggaagtcccaggcggcgtgcaaggcggttgcggcgtgcgggccgccgacctgcggagtgcgcgggttgggctaggggctgtccctggagcgccgggtggccctg

SEQ ID NO: 11802 - DNA, 122 bp, Homo sapiens
  misc_feature (61)..(62): /note="This region represents a CpG dinucleotide"
  misc_feature (61)..(61): /note="Nucleotide may be methylated to form 5-methylcytosine"
acacctctttctgtgggtgtggagggaggggactgagcaaagcctcagggaggccacatacgttctcagcgccatgcttggctggtgactggtcatgcaccattggcagggcctggagcacg

SEQ ID NO: 11803 - DNA, 122 bp, Homo sapiens
  misc_feature (61)..(62): /note="This region represents a CpG dinucleotide"
  misc_feature (61)..(61): /note="Nucleotide may be methylated to form 5-methylcytosine"
tattatgtaaatatttgaaaaaaactgctcttttcaattgcaagaaggcaaactgtaaaacgcatattgtgtggcagcatagatttactgtttcaaattggatgatgcaggcaaaagtactt

SEQ ID NO: 11804 - DNA, 122 bp, Homo sapiens
  misc_feature (61)..(62): /note="This region represents a CpG dinucleotide"
  misc_feature (61)..(61): /note="Nucleotide may be methylated to form 5-methylcytosine"
aagaaaattctcctgataaaacaacagctcgatccaaattgtgcttctccccagaattcacgcctctccctaggagaagagttgaggaactgtacagaaaagggcggcttcgttagaccgct

SEQ ID NO: 11805 - DNA, 122 bp, Homo sapiens
  misc_feature (61)..(62): /note="This region represents a CpG dinucleotide"
  misc_feature (61)..(61): /note="Nucleotide may be methylated to form 5-methylcytosine"
aacctatcttgttaccctgtagtcacttctcatccttgtcagtatgtgtggagcatttcacgcaattgtgatcattaaactcatactggtttctgttctgcgtttttcagttaacatcaaat

SEQ ID NO: 11806 - DNA, 122 bp, Homo sapiens
  misc_feature (61)..(62): /note="This region represents a CpG dinucleotide"
  misc_feature (61)..(61): /note="Nucleotide may be methylated to form 5-methylcytosine"
cctgctttcagtccctgaatagcaaaggctatgccttggccatcgctgctggaagagacacggctcagtgttggatgaatgtcctgactgttttcgccccagagaatgaaaggcgccaaccg

SEQ ID NO: 11807 - DNA, 122 bp, Homo sapiens
  misc_feature (61)..(62): /note="This region represents a CpG dinucleotide"
  misc_feature (61)..(61): /note="Nucleotide may be methylated to form 5-methylcytosine"
gcatgatgccacctgaaagacacttggtgttctttgagcaaggcaggtgaccaactgagtcgctctacataagcagctgagactaacacagttggaatgcaaaacagacatcatttcataaa

SEQ ID NO: 11808 - DNA, 122 bp, Homo sapiens
  misc_feature (61)..(62): /note="This region represents a CpG dinucleotide"
  misc_feature (61)..(61): /note="Nucleotide may be methylated to form 5-methylcytosine"
ggtcgcagagcattgtgttcgtgtggaggacacgcgaggactcttggaagtgctttttggcggggtagtgcagtgtgttccgggcggacgggcgtcagtttacgtgtgcgtttctcatcctt

SEQ ID NO: 11809 - DNA, 122 bp, Homo sapiens
  misc_feature (61)..(62): /note="This region represents a CpG dinucleotide"
  misc_feature (61)..(61): /note="Nucleotide may be methylated to form 5-methylcytosine"
atcctttcctttgaaaggccaccagtctccctccttccctcgagcaggaggaccgcagagcgcaccctgacggaagcgttcacactcaagtgtttatggttgcgtgtcttcttgcacaggga

SEQ ID NO: 11810 - DNA, 122 bp, Homo sapiens
  misc_feature (61)..(62): /note="This region represents a CpG dinucleotide"
  misc_feature (61)..(61): /note="Nucleotide may be methylated to form 5-methylcytosine"
ccctggttcatattctagcttagaaatagttcacatagttctgtgtagacataatatttacgggaaccagagatgggtggattctgatagtggcttgtggaatagtctccagtgcagtcaaa

SEQ ID NO: 11811 - DNA, 122 bp, Homo sapiens
  misc_feature (61)..(62): /note="This region represents a CpG dinucleotide"
  misc_feature (61)..(61): /note="Nucleotide may be methylated to form 5-methylcytosine"
gttagagaccagcctggccaacatggcaaaattctgtctctattaaaacaaaaaattagccgggcttggtggagggcgcctgtaatctgagttactcaggaggctgagggaggagaatcgct

SEQ ID NO: 11812 - DNA, 122 bp, Homo sapiens
  misc_feature (61)..(62): /note="This region represents a CpG dinucleotide"
  misc_feature (61)..(61): /note="Nucleotide may be methylated to form 5-methylcytosine"
gcgagaatcacttgtagtgagccgagattgcgccactgcactccagcctgggtgacagagcgagactctgtcaggagaacgaaagaatgaacaaatgaaagaaggagaaagagagagagaaa

SEQ ID NO: 11813 - DNA, 122 bp, Homo sapiens
  misc_feature (61)..(62): /note="This region represents a CpG dinucleotide"
  misc_feature (61)..(61): /note="Nucleotide may be methylated to form 5-methylcytosine"
atgatgaggcatatcaggaactatgtaatcttgtaatacttctgctgcaaaacctcctgacgttctgaatgaacagtcacatgcagcctcttcagtgcaaaactgagctcataagaaagtaa

SEQ ID NO: 11814 - DNA, 122 bp, Homo sapiens
  misc_feature (61)..(62): /note="This region represents a CpG dinucleotide"
  misc_feature (61)..(61): /note="Nucleotide may be methylated to form 5-methylcytosine"
gtgcactggccatcagagatgtatttggtggaacgcagttcccggcaacccacttgaacccgagctgcaggaaacaaaaaagaatgtgcatcagagaaaaaatgcaaatgaagaccttttaa

SEQ ID NO: 11815 - DNA, 122 bp, Homo sapiens
  misc_feature (61)..(62): /note="This region represents a CpG dinucleotide"
  misc_feature (61)..(61): /note="Nucleotide may be methylated to form 5-methylcytosine"
gatggtggctggcaggtccatggcgtgaccagctttgtttctgcctttggctgcaacacccgcaggaagcccacggtgttcactcgagtctccgccttcattgactggattgaggaggtgag

SEQ ID NO: 11816 - DNA, 122 bp, Homo sapiens
  misc_feature (61)..(62): /note="This region represents a CpG dinucleotide"
  misc_feature (61)..(61): /note="Nucleotide may be methylated to form 5-methylcytosine"
aattgtggatagcaaccaaggctggtgactcatcacatacacaccccccctccccccgcacgctcttacagagagacttgaacttaaagaggcatcgagaggcagctggctccatccgtggg

SEQ ID NO: 11817 - DNA, 122 bp, Homo sapiens
  misc_feature (61)..(62): /note="This region represents a CpG dinucleotide"
  misc_feature (61)..(61): /note="Nucleotide may be methylated to form 5-methylcytosine"
tatgagcaaatgaatgagtgaatggatgaataaacaaacgctaagttgaatggatgataacgtaacccaggctcaagtcaagagcatttaattgaggaaacaggagaagagccagaagataa

SEQ ID NO: 11818 - DNA, 122 bp, Homo sapiens
  misc_feature (61)..(62): /note="This region represents a CpG dinucleotide"
  misc_feature (61)..(61): /note="Nucleotide may be methylated to form 5-methylcytosine"
ttgctctcccctccccccatactcctaccctttgccccctaattttattttgttttccctcgttgtgatcaattttaaaagacagttctcaagcagcacaaaacggtgtaacttatgcccct

SEQ ID NO: 11819 - DNA, 122 bp, Homo sapiens
  misc_feature (61)..(62): /note="This region represents a CpG dinucleotide"
  misc_feature (61)..(61): /note="Nucleotide may be methylated to form 5-methylcytosine"
tactgacatggtttcctttctgtatcccatcagtgttagacacaggtacctatcagaatacggcatatcctgaattatctaagacaaggaagtgaagagcggaatcactgactttcccaact

SEQ ID NO: 11820 - DNA, 122 bp, Homo sapiens
  misc_feature (61)..(62): /note="This region represents a CpG dinucleotide"
  misc_feature (61)..(61): /note="Nucleotide may be methylated to form 5-methylcytosine"
gacctccctctgcagtgcttgttacaaactaggtcttccggcaggctctgtggtgttcaccgtggccagacccaggccattaactgatttactgttttcaaagaacactgttcatggggtgg

SEQ ID NO: 11821 - DNA, 122 bp, Homo sapiens
  misc_feature (61)..(62): /note="This region represents a CpG dinucleotide"
  misc_feature (61)..(61): /note="Nucleotide may be methylated to form 5-methylcytosine"
aaaaaaaaaaaaaaaaatcagaaaatgttatttattgatcttcgtggtggatctgcttggcgtgtttcctatcaggcatttgggcaccctgggctgccaggatcctctttagaaccccacct

SEQ ID NO: 11822 - DNA, 122 bp, Homo sapiens
  misc_feature (61)..(62): /note="This region represents a CpG dinucleotide"
  misc_feature (61)..(61): /note="Nucleotide may be methylated to form 5-methylcytosine"
gaagatgtgcaggcaggtgaaacctgatccccgtggccattgtagagaccaagaacaacacggaatgtttacacagtggtttgattttaatagacagaagggctgagtttaagacagcaaaa

SEQ ID NO: 11823 - DNA, 122 bp, Homo sapiens
  misc_feature (61)..(62): /note="This region represents a CpG dinucleotide"
  misc_feature (61)..(61): /note="Nucleotide may be methylated to form 5-methylcytosine"
ccgggcaaggaggtctggatgctgagggcggtccctgaggggcgggcggggcccgaccggcgctctgtgtggccgaggccatgaagccgcagccgcccggctaggccccgggcggctctagc

SEQ ID NO: 11824 - DNA, 122 bp, Homo sapiens
  misc_feature (61)..(62): /note="This region represents a CpG dinucleotide"
  misc_feature (61)..(61): /note="Nucleotide may be methylated to form 5-methylcytosine"
agagcaagactatgataatgccaacgtcagcaacaccagaggataaacctctggtttaggcgccttcctccttatgcctggcccttctccaacagctctctctctactaggtctcagccatc

SEQ ID NO: 11825 - DNA, 122 bp, Homo sapiens
  misc_feature (61)..(62): /note="This region represents a CpG dinucleotide"
  misc_feature (61)..(61): /note="Nucleotide may be methylated to form 5-methylcytosine"
gggctcattcaaatgaacacctggactttgtcaaaagaagagttattgtcagaataaagacgctgcttataaaatgctagggttccctgtgtggagccaagaagatttcttctttctttaag

SEQ ID NO: 11826 - DNA, 122 bp, Homo sapiens
  misc_feature (61)..(62): /note="This region represents a CpG dinucleotide"
  misc_feature (61)..(61): /note="Nucleotide may be methylated to form 5-methylcytosine"
tgcaattgcttttgaagacttagtcatgaatacttcccccaacactgatatccagaatggcgtttcctggatttttttttttctaggattctgatagtctgagatcttacattcaagtcttt

SEQ ID NO: 11827 - DNA, 122 bp, Homo sapiens
  misc_feature (61)..(62): /note="This region represents a CpG dinucleotide"
  misc_feature (61)..(61): /note="Nucleotide may be methylated to form 5-methylcytosine"
aaaattaaaaatagtcttccccagtgacctttagttatcttctctgtatttgcctggggtcgttcttgaaatgcctgcgtgacttgcgattatgaaatgttagtatgccaacataagatagc

SEQ ID NO: 11828 - DNA, 122 bp, Homo sapiens
  misc_feature (61)..(62): /note="This region represents a CpG dinucleotide"
  misc_feature (61)..(61): /note="Nucleotide may be methylated to form 5-methylcytosine"
atttttttcagggcctgaaattatgctttcatgttctcatgccaaagaaaggtaagttcgcgtgagcctgggatctgtcctgccataggaattcttcacaggaactcttcacaggatttctg

SEQ ID NO: 11829 - DNA, 122 bp, Homo sapiens
  misc_feature (61)..(62): /note="This region represents a CpG dinucleotide"
  misc_feature (61)..(61): /note="Nucleotide may be methylated to form 5-methylcytosine"
cagttatgcaaccctctcccttcctgcagaacttgcattcctcacttaccaaattatgtacggagcacctaccagggccaggtcttgtgctaggctctagaaagttggtggccagacaaaaa

SEQ ID NO: 11830 - DNA, 122 bp, Homo sapiens
  misc_feature (61)..(62): /note="This region represents a CpG dinucleotide"
  misc_feature (61)..(61): /note="Nucleotide may be methylated to form 5-methylcytosine"
aagtagagctttcaggcacatgcaatcttaaggaggtgggcaaggcaacagtatctgaggcggagatggaaaaccagggatccgaaggaaaggaatagcaggtttataaaaggacaagtaaa

SEQ ID NO: 11831 - DNA, 122 bp, Homo sapiens
  misc_feature (61)..(62): /note="This region represents a CpG dinucleotide"
  misc_feature (61)..(61): /note="Nucleotide may be methylated to form 5-methylcytosine"
acctaattattaagagcattaaacattagaagattgccacccttcgtactggctgcagatcgtttgtcttacttgtcaaacacaagttcgtttttgacactgatttcttaaatttccgctga

SEQ ID NO: 11832 - DNA, 122 bp, Homo sapiens
  misc_feature (61)..(62): /note="This region represents a CpG dinucleotide"
  misc_feature (61)..(61): /note="Nucleotide may be methylated to form 5-methylcytosine"
gcgctttattctgtagttctcctagcaatctggtgagctccactctacagataaggaaatcgaggccaaggacagctaaagaagcgaggtgcgcaaggtgcccaggtccgaagtgtttccgc

SEQ ID NO: 11833 - DNA, 122 bp, Homo sapiens
  misc_feature (61)..(62): /note="This region represents a CpG dinucleotide"
  misc_feature (61)..(61): /note="Nucleotide may be methylated to form 5-methylcytosine"
aaactgccaattgcgagagtgcagcgtgtccccattccagccctgccggagcaaaacaaacgcaagtcgcgaggggagcagaggcggcccgggggcgtgcgcatgtgtgcgggtgtgcctgt

SEQ ID NO: 11834 - DNA, 122 bp, Homo sapiens
  misc_feature (61)..(62): /note="This region represents a CpG dinucleotide"
  misc_feature (61)..(61): /note="Nucleotide may be methylated to form 5-methylcytosine"
tataccatatagctgccttgtgagacatttctgtgaaattagacattgaactaaagcatacgaagcacagaggcaagaatggaagaaaggtactaacctgctcaggtttttactaaaagatc

SEQ ID NO: 11835 - DNA, 122 bp, Homo sapiens
  misc_feature (61)..(62): /note="This region represents a CpG dinucleotide"
  misc_feature (61)..(61): /note="Nucleotide may be methylated to form 5-methylcytosine"
attctcattttacatacatggcaactaaagcatgaggagttgaagcgcatgcctaggccacgaagcatgcaagagctaacatcaaccttcacacctatgcactttgatgctgaccctgggtt

SEQ ID NO: 11836 - DNA, 122 bp, Homo sapiens
  misc_feature (61)..(62): /note="This region represents a CpG dinucleotide"
  misc_feature (61)..(61): /note="Nucleotide may be methylated to form 5-methylcytosine"
tttactctgcataatcaccacccgtgaggtagctacttttgttagcttcatttacatatacggaaatgtcattctgaaagggtaactgaccctactaataaatggcagaaccaggattacct

SEQ ID NO: 11837 - DNA, 122 bp, Homo sapiens
  misc_feature (61)..(62): /note="This region represents a CpG dinucleotide"
  misc_feature (61)..(61): /note="Nucleotide may be methylated to form 5-methylcytosine"
atcctccactcacactggctctttgtggtatccttcatggttttccctaagcccctgacacgttgctttttctactctggagaaacagagacccactccacttttcactgggtggtcttcaa

SEQ ID NO: 11838 - DNA, 122 bp, Homo sapiens
  misc_feature (61)..(62): /note="This region represents a CpG dinucleotide"
  misc_feature (61)..(61): /note="Nucleotide may be methylated to form 5-methylcytosine"
tttccaacatatgatgtaaaaccaatgaatcacagtaactaactcaaataagtgaccctgcgtcattcctattatgagaacaggccatctgctcattgtcctcgaaagctaaacactgctcc

SEQ ID NO: 11839 - DNA, 122 bp, Homo sapiens
  misc_feature (61)..(62): /note="This region represents a CpG dinucleotide"
  misc_feature (61)..(61): /note="Nucleotide may be methylated to form 5-methylcytosine"
gcgcgcgcgggagtcaggggtcacggcggcgtaggctgtggcgggaaacgctgtttgaagcgggtgagtagaggggaaaaagggagttcggggcagtgggcctggtagggaacggggcttga

SEQ ID NO: 11840 - DNA, 122 bp, Homo sapiens
  misc_feature (61)..(62): /note="This region represents a CpG dinucleotide"
  misc_feature (61)..(61): /note="Nucleotide may be methylated to form 5-methylcytosine"
gaaacaaaaggctcagcttgacagtgtctgcgtttttgcgtcacccagctctttgttccacgcctgctccaaagcctattaatttgtcagatggtcttctcgggaaagataaagttgctata

SEQ ID NO: 11841 - DNA, 122 bp, Homo sapiens
  misc_feature (61)..(62): /note="This region represents a CpG dinucleotide"
  misc_feature (61)..(61): /note="Nucleotide may be methylated to form 5-methylcytosine"
tttgacccacagtcttccaaagtctgaattttactgactgcacattcatgttgcaattcacgtccctacatcctctgtatttattgcatattggctgctggttccggaggcttggtcagcct

SEQ ID NO: 11842 - DNA, 122 bp, Homo sapiens
  misc_feature (61)..(62): /note="This region represents a CpG dinucleotide"
  misc_feature (61)..(61): /note="Nucleotide may be methylated to form 5-methylcytosine"
gagagttgcaccttgagcgggaactgcagagggttttaatggcaccagctccaaacatttcgcccacagcgtctgcagtcctccactgcggaaggcagaataaacgccccaagggtgtccac

SEQ ID NO: 11843 - DNA, 122 bp, Homo sapiens
  misc_feature (61)..(62): /note="This region represents a CpG dinucleotide"
  misc_feature (61)..(61): /note="Nucleotide may be methylated to form 5-methylcytosine"
aagatttgggagcatgggggcatagggagtgaacaggcaaaatatatttttggcttttctcggtacatgtaggcagttacctctgtctatataaggctggcctgacctcaaggcccacaaca

SEQ ID NO: 11844 - DNA, 122 bp, Homo sapiens
  misc_feature (61)..(62): /note="This region represents a CpG dinucleotide"
  misc_feature (61)..(61): /note="Nucleotide may be methylated to form 5-methylcytosine"
taggtggtaatggcagtctccaccttgagaggatgcacctgtgactgtgaacatagtagccgctcttgttgtcattccagctctgacgttttcaagtagcacgagttttccttagtgtcaag

SEQ ID NO: 11845 - DNA, 122 bp, Homo sapiens
  misc_feature (61)..(62): /note="This region represents a CpG dinucleotide"
  misc_feature (61)..(61): /note="Nucleotide may be methylated to form 5-methylcytosine"
gttctaaccttaaatgttgtaagagggatggaggagaatctttcaagttgaacaaactgccgcttgtctgtctagcgttaggagacatttgtccactgtctcatcccattgtcttcaaattg

SEQ ID NO: 11846 - DNA, 122 bp, Homo sapiens
  misc_feature (61)..(62): /note="This region represents a CpG dinucleotide"
  misc_feature (61)..(61): /note="Nucleotide may be methylated to form 5-methylcytosine"
gagtttgaggcttgtaagtgcgcagtgatggtaaaccgccgctgtactccagactggcaacgtagtgagaccctgtctctttaaaaaaaaaaaaaaaaaaaaaaaaagatgagaggtaacac

SEQ ID NO: 11847 - DNA, 122 bp, Homo sapiens
  misc_feature (61)..(62): /note="This region represents a CpG dinucleotide"
  misc_feature (61)..(61): /note="Nucleotide may be methylated to form 5-methylcytosine"
ccaccagtggtccccttcctttgtattgttgtttctgatctcattttgctcatcccaggacgtgcttaagccaaatgctttgcttttctggagagatgaaatagaggagagccattcatgaa

SEQ ID NO: 11848 - DNA, 122 bp, Homo sapiens
  misc_feature (61)..(62): /note="This region represents a CpG dinucleotide"
  misc_feature (61)..(61): /note="Nucleotide may be methylated to form 5-methylcytosine"
tttgtggtgacatgagagccactagcggacagagactggggagaaggattgatcagctggcgcattagccccaagatgcaggtgaatttgggaacagaaagagggccaaatgagatgtttgt

SEQ ID NO: 11849 - DNA, 122 bp, Homo sapiens
  misc_feature (61)..(62): /note="This region represents a CpG dinucleotide"
  misc_feature (61)..(61): /note="Nucleotide may be methylated to form 5-methylcytosine"
ttccagggtgggggctgtttgccaggtacgtgggggtggggcacgcttcccagtgttctgcgtctgtcctcacaatggccctcaaggtcaggcagcactgaccgcattctaccattgaggaa

SEQ ID NO: 11850 - DNA, 122 bp, Homo sapiens
  misc_feature (61)..(62): /note="This region represents a CpG dinucleotide"
  misc_feature (61)..(61): /note="Nucleotide may be methylated to form 5-methylcytosine"
gaatttgaaaagacaaggagtcttcagttaacaatagaccttaagaaaagagaataaagacgcagtgtgagtttttctgtttgggaattccatggtttgctgacacctttattcaggagcca

SEQ ID NO: 11851 - DNA, 122 bp, Homo sapiens
  misc_feature (61)..(62): /note="This region represents a CpG dinucleotide"
  misc_feature (61)..(61): /note="Nucleotide may be methylated to form 5-methylcytosine"
ctttgagtctatgtaatatgatcagtaccttcactttcgttttctcttgtaattatgaaacgagtgtgacaattctgcccatgacacctcagagtctgttaccaaagtcactgaaaacatca

SEQ ID NO: 11852 - DNA, 122 bp, Homo sapiens
  misc_feature (61)..(62): /note="This region represents a CpG dinucleotide"
  misc_feature (61)..(61): /note="Nucleotide may be methylated to form 5-methylcytosine"
aaattctacaattgaaacccaagttctgaattctaagttctaccttccgagttcctgttacgtgtctgtctcctgcccctaaatctttcctggctcccatccctttccccagcccctctggg

SEQ ID NO: 11853 - DNA, 122 bp, Homo sapiens
  misc_feature (61)..(62): /note="This region represents a CpG dinucleotide"
  misc_feature (61)..(61): /note="Nucleotide may be methylated to form 5-methylcytosine"
acaaaagtaaatcattgaaatgtagtcattctcttaatcatctaatggttttattacttacgtatagacaaatgcacacagggcaccctgttgtcttcagtaaggtcattgagtaatcatta

SEQ ID NO: 11854 - DNA, 122 bp, Homo sapiens
  misc_feature (61)..(62): /note="This region represents a CpG dinucleotide"
  misc_feature (61)..(61): /note="Nucleotide may be methylated to form 5-methylcytosine"
gggagaagaaacatgacagtgatgaaaagaaaacaaggtccgtggctggtgacaaccagacgttaccaacagcagcatcaggaggtttctgttcgatggatggttcattttcatccaagaat

SEQ ID NO: 11855 - DNA, 122 bp, Homo sapiens
  misc_feature (61)..(62): /note="This region represents a CpG dinucleotide"
  misc_feature (61)..(61): /note="Nucleotide may be methylated to form 5-methylcytosine"
ttctaagtccctttcacatatattatttcatctgggcctcacatcactgtgcatctgctacgtaactatggcagttcagcaggtcacacattctttcttcttaataatttttatttcagcta

SEQ ID NO: 11856 - DNA, 122 bp, Homo sapiens
  misc_feature (61)..(62): /note="This region represents a CpG dinucleotide"
  misc_feature (61)..(61): /note="Nucleotide may be methylated to form 5-methylcytosine"
catcccaaattgaaaataacctaaacagagaacagataaataaactttgatacatttatacgaccagatactacatggcagtggctctaactgctgatgattttgcccccccactccacctc

SEQ ID NO: 11857 - DNA, 122 bp, Homo sapiens
  misc_feature (61)..(62): /note="This region represents a CpG dinucleotide"
  misc_feature (61)..(61): /note="Nucleotide may be methylated to form 5-methylcytosine"
catctgcaaatagtgatacttctccctcctttccaatttgtgtatctccataatacatctcgtgactctagctgagttggctaatgccccagaacaatgtagataacattggcaatcaaggt

SEQ ID NO: 11858 - DNA, 122 bp, Homo sapiens
  misc_feature (61)..(62): /note="This region represents a CpG dinucleotide"
  misc_feature (61)..(61): /note="Nucleotide may be methylated to form 5-methylcytosine"
agctccaggagccccaaggacggcgaagggcagcctggagttggggggcgtcagcgagggcgcgggcaggggagagaggcgcccctggaagtggagccggcctggacagaggcagggttcgg

SEQ ID NO: 11859 - DNA, 122 bp, Homo sapiens
  misc_feature (61)..(62): /note="This region represents a CpG dinucleotide"
  misc_feature (61)..(61): /note="Nucleotide may be methylated to form 5-methylcytosine"
tgtcggtgagcgtcttggtcttaaacttcattccaggtgcggtcgacagctgtaggatcacgtaagggtcggcctcactcactgccaaggttaaggaagtcttcgtgagggagtactcccca

SEQ ID NO: 11860 - DNA, 122 bp, Homo sapiens
  misc_feature (61)..(62): /note="This region represents a CpG dinucleotide"
  misc_feature (61)..(61): /note="Nucleotide may be methylated to form 5-methylcytosine"
agggactgtggggcactgatgacaatgtggcccttcatcaccaaggagctggctgggcctcgtgagagctggtggaaagaaagcaggatgtctctggccctcctgtcttcctagacttgaag

SEQ ID NO: 11861 - DNA, 122 bp, Homo sapiens
  misc_feature (61)..(62): /note="This region represents a CpG dinucleotide"
  misc_feature (61)..(61): /note="Nucleotide may be methylated to form 5-methylcytosine"
ctcagtacccatccctcctccatgagggccaccctgatttatttcccccttgctggcctccgccccacactgcccagggccactatgagcatgacctgtcatgcttggttgaccataactga

SEQ ID NO: 11862 - DNA, 122 bp, Homo sapiens
  misc_feature (61)..(62): /note="This region represents a CpG dinucleotide"
  misc_feature (61)..(61): /note="Nucleotide may be methylated to form 5-methylcytosine"
tcctacagctctttgttggttgttttgctggcactcaccaggaagcagagttcaccctggcggaagaggtttgagccctctccagcgcaggcagctgtgttcaggacctctggagaatgcag

SEQ ID NO: 11863 - DNA, 122 bp, Homo sapiens
  misc_feature (61)..(62): /note="This region represents a CpG dinucleotide"
  misc_feature (61)..(61): /note="Nucleotide may be methylated to form 5-methylcytosine"
gggggtcagggcagagggaggcagtgtccctgctgggcctgtagaggaagctgagggctgcgtataccctggccagcagcccaggaagcctgagcatgtaatgaaaagattgcatctcctcg

SEQ ID NO: 11864 - DNA, 122 bp, Homo sapiens
  misc_feature (61)..(62): /note="This region represents a CpG dinucleotide"
  misc_feature (61)..(61): /note="Nucleotide may be methylated to form 5-methylcytosine"
gcctgccttggcctcccaaagtggtgggattatagccatgaatcactgtgcctggcctttcgtaataattttcttgaactaaaatttgggattaggccaggcatggtggctcacacctataa

SEQ ID NO: 11865 - DNA, 122 bp, Homo sapiens
  misc_feature (61)..(62): /note="This region represents a CpG dinucleotide"
  misc_feature (61)..(61): /note="Nucleotide may be methylated to form 5-methylcytosine"
ttcttacctgaagtttcctggaggaactttaacagcactcatttgacattaggaagaagccgaatgtaaataaatcctaggtggataagcataatataatgagtaatatgatcttaaatgga

SEQ ID NO: 11866 - DNA, 122 bp, Homo sapiens
  misc_feature (61)..(62): /note="This region represents a CpG dinucleotide"
  misc_feature (61)..(61): /note="Nucleotide may be methylated to form 5-methylcytosine"
gcctggtgggaccagtgccagagctgggaggggagtgagggctgtgattcctacaaagtgcggaggcacccaaaacagagtctagagcaggactctggatcagacacacccaggttctagtt

SEQ ID NO: 11867 - DNA, 122 bp, Homo sapiens
  misc_feature (61)..(62): /note="This region represents a CpG dinucleotide"
  misc_feature (61)..(61): /note="Nucleotide may be methylated to form 5-methylcytosine"
tgcaagagtttcaaagttctgtcacagatagaaatctccagctcttgactccagactaggcgccagctgataaacaaacaatttaagtcaagagctggagaattcccagctttttcatttaa

SEQ ID NO: 11868 - DNA, 122 bp, Homo sapiens
  misc_feature (61)..(62): /note="This region represents a CpG dinucleotide"
  misc_feature (61)..(61): /note="Nucleotide may be methylated to form 5-methylcytosine"
gttagctcatcaattactcaatgcccaggatgaacaatgaaaactcccatcagaatctgtcgtaatggaactgagacaacgaagcaagggacagagagagccacggtgttgctccagacggg

SEQ ID NO: 11869 - DNA, 122 bp, Homo sapiens
  misc_feature (61)..(62): /note="This region represents a CpG dinucleotide"
  misc_feature (61)..(61): /note="Nucleotide may be methylated to form 5-methylcytosine"
taccctaggtgagaccagtagaagaacccagctcagattacaaaactatgagcaaacaaacggttgttattcaagtaaagctcactaaagctcttcatgacaaacgggtatagtcatggggg

SEQ ID NO: 11870 - DNA, 122 bp, Homo sapiens
  misc_feature (61)..(62): /note="This region represents a CpG dinucleotide"
  misc_feature (61)..(61): /note="Nucleotide may be methylated to form 5-methylcytosine"
agaatttataaacaggaaaacattttcttcgggttatttctggaaatctcttccaaacatcggagttttcttctaacttaagtctcttcccacctccttcccaggggatctgctgaagggtg

SEQ ID NO: 11871 - DNA, 122 bp, Homo sapiens
  misc_feature (61)..(62): /note="This region represents a CpG dinucleotide"
  misc_feature (61)..(61): /note="Nucleotide may be methylated to form 5-methylcytosine"
gacttttcttttttctttcttctctttttttctctttttctttttttcttttttttgagacggagtctcgctctgttgcccaggctagagtgcagtggcacgatctcgactcactgcaacct

SEQ ID NO: 11872 - DNA, 122 bp, Homo sapiens
  misc_feature (61)..(62): /note="This region represents a CpG dinucleotide"
  misc_feature (61)..(61): /note="Nucleotide may be methylated to form 5-methylcytosine"
cttgaactccatttcacagtttctggttttcacagcctttaggcaaacacaattcaaacccgttactatgcttgaaaagatctgtttcagaaactgttacacaaacagagaagctagcacac

SEQ ID NO: 11873 - DNA, 122 bp, Homo sapiens
  misc_feature (61)..(62): /note="This region represents a CpG dinucleotide"
  misc_feature (61)..(61): /note="Nucleotide may be methylated to form 5-methylcytosine"
gttttgatgaagtcattgatcctcagtttccatttctgtaaaatggggctaacattctctcgctttcagggtttatgtgagggtccactgaagtgctttaggtgagagttccctataaactg

SEQ ID NO: 11874 - DNA, 122 bp, Homo sapiens
  misc_feature (61)..(62): /note="This region represents a CpG dinucleotide"
  misc_feature (61)..(61): /note="Nucleotide may be methylated to form 5-methylcytosine"
agctctttctaattcagaactgaggtcataattcaatctgtgattgacctcagagccaagcggattttgcttaagccatgccctgacttagtatcatggcacaaacccagatcaatagagaa

SEQ ID NO: 11875 - DNA, 122 bp, Homo sapiens
  misc_feature (61)..(62): /note="This region represents a CpG dinucleotide"
  misc_feature (61)..(61): /note="Nucleotide may be methylated to form 5-methylcytosine"
gttggtagtggggaacctgatttatagcctttgcctatatctgtggtgtaaatattctgacgttggccaacttcaaatacactataatagaatatcttcacctcatagatgcagtggatata

SEQ ID NO: 11876 - DNA, 122 bp, Homo sapiens
  misc_feature (61)..(62): /note="This region represents a CpG dinucleotide"
  misc_feature (61)..(61): /note="Nucleotide may be methylated to form 5-methylcytosine"
aattggaggtgactaagatgccagtaaaccaagtccctctgaggcagtgtggtcagatcacgtgggaagcttgttatctaaacactctctggcacccataagcctgcggacttatagtgcag

SEQ ID NO: 11877 - DNA, 122 bp, Homo sapiens
  misc_feature (61)..(62): /note="This region represents a CpG dinucleotide"
  misc_feature (61)..(61): /note="Nucleotide may be methylated to form 5-methylcytosine"
atcattagttttgcattatgggagagagtcatggcacagcatctttggatatttaatgtccgatgctctttgatgtaacagactcctctagaaataaaactacgttggaaatgtatactatt

SEQ ID NO: 11878 - DNA, 122 bp, Homo sapiens
  misc_feature (61)..(62): /note="This region represents a CpG dinucleotide"
  misc_feature (61)..(61): /note="Nucleotide may be methylated to form 5-methylcytosine"
tattttgatttacagacttgaaactattttcctacattttcttccattttaattctttcacgtgtgactaaattttagcatcaagtgctgatgaagaattaaataaaatacttgaaatagaa

SEQ ID NO: 11879 - DNA, 122 bp, Homo sapiens
  misc_feature (61)..(62): /note="This region represents a CpG dinucleotide"
  misc_feature (61)..(61): /note="Nucleotide may be methylated to form 5-methylcytosine"
atcccagttcttcttctttctggctctgcaacctggggtgagtggcctactttgtacctccgtttccactttcagagcctgcctatgacagcatttacttaatagcattggtgagcagagtc

SEQ ID NO: 11880 - DNA, 122 bp, Homo sapiens
  misc_feature (61)..(62): /note="This region represents a CpG dinucleotide"
  misc_feature (61)..(61): /note="Nucleotide may be methylated to form 5-methylcytosine"
tctcttccaggaacatgctcacaggcacatccagaaataacattttaccagccatctgggcgtcccttaaccccgtccagcagacacataaaattaaccctcatgtatacctaggagtggaa

SEQ ID NO: 11881 - DNA, 122 bp, Homo sapiens
  misc_feature (61)..(62): /note="This region represents a CpG dinucleotide"
  misc_feature (61)..(61): /note="Nucleotide may be methylated to form 5-methylcytosine"
ggcatgccgacatagtgaaacttccataaaaacccaaaacttctgagttcagagagctcccgggttggtgaacacatcaaggtgccgggagggtggtgcaccctgagagggaatggaagctc

SEQ ID NO: 11882 - DNA, 122 bp, Homo sapiens
  misc_feature (61)..(62): /note="This region represents a CpG dinucleotide"
  misc_feature (61)..(61): /note="Nucleotide may be methylated to form 5-methylcytosine"
ctgaagggacaaagctgtttttagtggggagactccccgtggagggtgaaatttgcattgcgtgcttggagagtggcaagttaatgcttcctggcagcaccaggaagccgcaggtacctgtg

SEQ ID NO: 11883 - DNA, 122 bp, Homo sapiens
  misc_feature (61)..(62): /note="This region represents a CpG dinucleotide"
  misc_feature (61)..(61): /note="Nucleotide may be methylated to form 5-methylcytosine"
ggctgggatttaggattgtgcgagcttatggtccccccaaccccaacatcattgaaattacgtgtctgttcaaagccttgggactgagtctcccagctcaaccagcagggcctgcaagaagg

SEQ ID NO: 11884 - DNA, 122 bp, Homo sapiens
  misc_feature (61)..(62): /note="This region represents a CpG dinucleotide"
  misc_feature (61)..(61): /note="Nucleotide may be methylated to form 5-methylcytosine"
ggcaggtgtactgaatccgcacttatgtttctttctctttttaactgggccttgtactaccgctgccataaacaatagctttggtgtcagccaaccaaagacagggtcaaattctcttttca

SEQ ID NO: 11885 - DNA, 122 bp, Homo sapiens
  misc_feature (61)..(62): /note="This region represents a CpG dinucleotide"
  misc_feature (61)..(61): /note="Nucleotide may be methylated to form 5-methylcytosine"
ctgtctatgctcagggcagcctgcgtgcagcgacgccgcctccagagcgcaccccctgggcgggagccaggagaataaggagaaaacctgaacagggcctctgtggctaaaggaggccagaa

SEQ ID NO: 11886 - DNA, 122 bp, Homo sapiens
  misc_feature (61)..(62): /note="This region represents a CpG dinucleotide"
  misc_feature (61)..(61): /note="Nucleotide may be methylated to form 5-methylcytosine"
tgaggtaatgtatgtaaagcaccgagtcaggtgcctgatacgcagtaggtgcttagcaaacggtagctaatactatcatcattgtcattgttattgtgacacccatgagcccacagacagag

SEQ ID NO: 11887 - DNA, 122 bp, Homo sapiens
  misc_feature (61)..(62): /note="This region represents a CpG dinucleotide"
  misc_feature (61)..(61): /note="Nucleotide may be methylated to form 5-methylcytosine"
gcgccctcagtgtggacagctgggcttcaaactcacttcagagccgccgtgtgggggtggcgcctctgagggcttgaggttattttcttgtgcggtttctctctcctggcctaggtttttct

SEQ ID NO: 11888 - DNA, 122 bp, Homo sapiens
  misc_feature (61)..(62): /note="This region represents a CpG dinucleotide"
  misc_feature (61)..(61): /note="Nucleotide may be methylated to form 5-methylcytosine"
ctgccatcttcactgagattaactcattcttgcaaagtgtcaagcattccccttccttctcggctggtggagtcacggagcacagggctctgcagaagaagtggcctgtggataatgagaaa

SEQ ID NO: 11889 - DNA, 122 bp, Homo sapiens
  misc_feature (61)..(62): /note="This region represents a CpG dinucleotide"
  misc_feature (61)..(61): /note="Nucleotide may be methylated to form 5-methylcytosine"
gaaaaagtaaggcacattcccaggaaattactttgctaggtctgactcacaaggcagtttcgtggactgataatacctttctcctctatcttgtaccaaactcatttaaaaacgacctttgc

SEQ ID NO: 11890 - DNA, 122 bp, Homo sapiens
  misc_feature (61)..(62): /note="This region represents a CpG dinucleotide"
  misc_feature (61)..(61): /note="Nucleotide may be methylated to form 5-methylcytosine"
tgaactcttggcctcaagcaattcccccacctcggcctctcaaagggctaggattataggcgtgagacaccacgcccagctgttctgcaaattaaatatttctgtgcaattcttagcataac

SEQ ID NO: 11891 - DNA, 122 bp, Homo sapiens
  misc_feature (61)..(62): /note="This region represents a CpG dinucleotide"
  misc_feature (61)..(61): /note="Nucleotide may be methylated to form 5-methylcytosine"
aggaagcaaaagtgggcatggattctgaggtcaggcaggcctgcattcaaatcctgtctccgtccttaagtagctgtgtgaccttgggcgtgttggttaacctctctgcacctgtttcctcc

SEQ ID NO: 11892 - DNA, 122 bp, Homo sapiens
  misc_feature (61)..(62): /note="This region represents a CpG dinucleotide"
  misc_feature (61)..(61): /note="Nucleotide may be methylated to form 5-methylcytosine"
atcaataggtcttatacaataggataagagctacagagtctggggacccgggggttctgacggcacaggaaagagggtgactaactttatcttgaaatcctcaggaacgctctggagaggat

SEQ ID NO: 11893 - DNA, 122 bp, Homo sapiens
  misc_feature (61)..(62): /note="This region represents a CpG dinucleotide"
  misc_feature (61)..(61): /note="Nucleotide may be methylated to form 5-methylcytosine"
caaagtgatagtaaatgcattaagtgcttcatgagaaactctagagtcacagagacaggccgtcctccatctggatgtcactaggacataatgcatgctctctggctcacactgaggacaac

SEQ ID NO: 11894 - DNA, 122 bp, Homo sapiens
  misc_feature (61)..(62): /note="This region represents a CpG dinucleotide"
  misc_feature (61)..(61): /note="Nucleotide may be methylated to form 5-methylcytosine"
tacaggaaaccagtacagttaaccaggaaaggcctgagtaaacaggtctgcaaatacctgcggacagagtgtaaatagatctatatcaagcagttttagagttaggctactcagagatttaa

SEQ ID NO: 11895 - DNA, 122 bp, Homo sapiens
  misc_feature (61)..(62): /note="This region represents a CpG dinucleotide"
  misc_feature (61)..(61): /note="Nucleotide may be methylated to form 5-methylcytosine"
aaaggggaaaagcccctcacaaaaccatcacatctcatgagaacttacaatcatgagaaccgcatggggaaccacactatgattcaatcacctcccaggaggtccctcccctaacacgtggg

SEQ ID NO: 11896 - DNA, 122 bp, Homo sapiens
  misc_feature (61)..(62): /note="This region represents a CpG dinucleotide"
  misc_feature (61)..(61): /note="Nucleotide may be methylated to form 5-methylcytosine"
acacagctaggcaaggaatgtgccgggactcaaaatgactggattcagattagcagggggcggggagagcagcccaggatggggagaaggcaggagcaaggcaggctgctcctggtgtcctt

SEQ ID NO: 11897 - DNA, 122 bp, Homo sapiens
  misc_feature (61)..(62): /note="This region represents a CpG dinucleotide"
  misc_feature (61)..(61): /note="Nucleotide may be methylated to form 5-methylcytosine"
acaatcaccatgggagggtctttgtagcacagttctgtcaggaaatacaatcatatattgcgtaacaataggaagagggagggagaaatgtgtcattaggtgattctgtcattgtttgctca

SEQ ID NO: 11898 - DNA, 122 bp, Homo sapiens
  misc_feature (61)..(62): /note="This region represents a CpG dinucleotide"
  misc_feature (61)..(61): /note="Nucleotide may be methylated to form 5-methylcytosine"
ttgtaagagcaccactttggtgaggtgacgcacacacaaacaaaattctaggaaatgatacgagttttgcctaaataggggtaatttttagataaactggtgaggttttacacctgtttaaa

SEQ ID NO: 11899 - DNA, 122 bp, Homo sapiens
  misc_feature (61)..(62): /note="This region represents a CpG dinucleotide"
  misc_feature (61)..(61): /note="Nucleotide may be methylated to form 5-methylcytosine"
gctggcctacgagtctgacgggatcgtggtttccaacgacacataccgtgacctccaaggcgagcggcaggagtggaagcgcttcatcgaggagcggctgctcatgtactccttcgtcaatg

SEQ ID NO: 11900 - DNA, 122 bp, Homo sapiens
  misc_feature (61)..(62): /note="This region represents a CpG dinucleotide"
  misc_feature (61)..(61): /note="Nucleotide may be methylated to form 5-methylcytosine"
ttttacttcccgcccgccaagttcctgcgccacccaatcccctcgcggcccagactccctcggggcccgccccttcgcgcgtcattagcaattccgccatcttgaagtgactctgtcgggga

SEQ ID NO: 11901 - DNA, 122 bp, Homo sapiens
  misc_feature (61)..(62): /note="This region represents a CpG dinucleotide"
  misc_feature (61)..(61): /note="Nucleotide may be methylated to form 5-methylcytosine"
tgagtcacatatggacaggaatagccacatgttgtctattaatttggattttgctttccacggtcagttatgcctgctatgacatggtatgaaatggggatcagccattcaaagaatccaaa

SEQ ID NO: 11902 - DNA, 122 bp, Homo sapiens
  misc_feature (61)..(62): /note="This region represents a CpG dinucleotide"
  misc_feature (61)..(61): /note="Nucleotide may be methylated to form 5-methylcytosine"
gtcctccctgctaagcccttcattctgaatttctaaaagtaaggggatgtggtgtgtgaccgtgacacggtgaccaagtctgggaagctggctcccctggccacgctctgccgtgtctgcca

SEQ ID NO: 11903 - DNA, 122 bp, Homo sapiens
  misc_feature (61)..(62): /note="This region represents a CpG dinucleotide"
  misc_feature (61)..(61): /note="Nucleotide may be methylated to form 5-methylcytosine"
tggaaaataaaatttatatttctaactttgttttccctaagtcaaatgagatgcatacaacgtatctcttggtcagcattaagatgaatgggtgaattgatgaatgaatgaatgagaggttg

SEQ ID NO: 11904 - DNA, 122 bp, Homo sapiens
  misc_feature (61)..(62): /note="This region represents a CpG dinucleotide"
  misc_feature (61)..(61): /note="Nucleotide may be methylated to form 5-methylcytosine"
taggcaccagtggggagagtcaagctttctcaggaagatggagatctgtttggtgcttcacgttcctgtgtaacatgaacatagggaaggccaataggcagcctgaaacctagaagaaagtc

SEQ ID NO: 11905 - DNA, 122 bp, Homo sapiens
  misc_feature (61)..(62): /note="This region represents a CpG dinucleotide"
  misc_feature (61)..(61): /note="Nucleotide may be methylated to form 5-methylcytosine"
gaagtcttgacaagggctggacaatccagaggctggacaatgtcactaaacactcaggtccgttctgtctctgctctgctaaacacaatgtcagctccattccaaggttgttttccatgtgg

SEQ ID NO: 11906 - DNA, 122 bp, Homo sapiens
  misc_feature (61)..(62): /note="This region represents a CpG dinucleotide"
  misc_feature (61)..(61): /note="Nucleotide may be methylated to form 5-methylcytosine"
acagtctctcgcctcaaagatctccgccattagtggtagccatttaagaaaacagaattacgatgaataatgatttgaagccaaaaagtcaaaatatcttatttcgcaactgtaattgctgg

SEQ ID NO: 11907 - DNA, 122 bp, Homo sapiens
  misc_feature (61)..(62): /note="This region represents a CpG dinucleotide"
  misc_feature (61)..(61): /note="Nucleotide may be methylated to form 5-methylcytosine"
ctgtcatttcatactggtcaattctgctgcttgcaacagatgtaggaaaggattttatggcgagtagattttaaaactgctgtattctcaacacctacacaatgcctggtgcattacaagag

SEQ ID NO: 11908 - DNA, 122 bp, Homo sapiens
  misc_feature (61)..(62): /note="This region represents a CpG dinucleotide"
  misc_feature (61)..(61): /note="Nucleotide may be methylated to form 5-methylcytosine"
gtggtcctggccatgtgctaaatgtgcatgaatttctgacacctaaaatagccccggacacgggacacagtgccaggaagctcctgttcaacatctcagcaactggtagcttcagggctgag

SEQ ID NO: 11909 - DNA, 122 bp, Homo sapiens
  misc_feature (61)..(62): /note="This region represents a CpG dinucleotide"
  misc_feature (61)..(61): /note="Nucleotide may be methylated to form 5-methylcytosine"
tttctccaaagctgagagagatcctttcactatttacatcattcagccctcaagactagacgcactgtattttgttaacaaaacaaggccatatacccaggcgtcagtggctgtcccctctg

SEQ ID NO: 11910 - DNA, 122 bp, Homo sapiens
  misc_feature (61)..(62): /note="This region represents a CpG dinucleotide"
  misc_feature (61)..(61): /note="Nucleotide may be methylated to form 5-methylcytosine"
gagacagatccggtaggactgtgaaagccatggtaagaagctgggaacgtatcccaagtacgttggaaagctgctggaaacttttaagcagggaagttatacaatctgatttacattttgaa

SEQ ID NO: 11911 - DNA, 122 bp, Homo sapiens
  misc_feature (61)..(62): /note="This region represents a CpG dinucleotide"
  misc_feature (61)..(61): /note="Nucleotide may be methylated to form 5-methylcytosine"
cgcctgcccaaagctctggcctgggccttctttccagagtcctgagtgtagcaagccacacgaacaaatctcaaaggaacttaaaaaggatttgttggctggaaatgggggatctggggtag

SEQ ID NO: 11912 - DNA, 122 bp, Homo sapiens
  misc_feature (61)..(62): /note="This region represents a CpG dinucleotide"
  misc_feature (61)..(61): /note="Nucleotide may be methylated to form 5-methylcytosine"
atgaaaaaaaaatcttcaaagtatatttaggtcaatttttaaataaagtaatatttagtgcgatggttacactcagtcgtaggtcaattgatctttagattaaaaggtaaataatataattc

SEQ ID NO: 11913 - DNA, 122 bp, Homo sapiens
  misc_feature (61)..(62): /note="This region represents a CpG dinucleotide"
  misc_feature (61)..(61): /note="Nucleotide may be methylated to form 5-methylcytosine"
caaagttggacacatgggtcatgatttctaagctcctagattcctgcttaatctgcctttcgaatcatagggctttctggtatcttcagagctgtttccaggtgctctcagtagacagagtt

SEQ ID NO: 11914 - DNA, 122 bp, Homo sapiens
  misc_feature (61)..(62): /note="This region represents a CpG dinucleotide"
  misc_feature (61)..(61): /note="Nucleotide may be methylated to form 5-methylcytosine"
tataaagacatcagctcctgggctgcccctctattccagagtgttgatgaatgtgtggctcgcccacactgcctgattcataagcacattagtgctgactcaccgacaactgagagaaaaaa

SEQ ID NO: 11915 - DNA, 122 bp, Homo sapiens
  misc_feature (61)..(62): /note="This region represents a CpG dinucleotide"
  misc_feature (61)..(61): /note="Nucleotide may be methylated to form 5-methylcytosine"
cagatgagttctgatttacaagtctgccaggctggcctgtgagcctctgggcagagttcccgtcccatgcattgctgtagcctcagttcctccacatagtaaatgcccaagtacctatagaa

SEQ ID NO: 11916 - DNA, 122 bp, Homo sapiens
  misc_feature (61)..(62): /note="This region represents a CpG dinucleotide"
  misc_feature (61)..(61): /note="Nucleotide may be methylated to form 5-methylcytosine"
agcagatctaaaacttccctggctcaagtccttcctcagtgaaacattccgcccaggccacgccactcactaagtttagagttcttccttgaaacttagacagttggggccatacaatctga

SEQ ID NO: 11917 - DNA, 122 bp, Homo sapiens
  misc_feature (61)..(62): /note="This region represents a CpG dinucleotide"
  misc_feature (61)..(61): /note="Nucleotide may be methylated to form 5-methylcytosine"
aaagagatgcagagataaacacaatcacatcaaagggctgattcctccactttctaatagcggaataatcaataagaaagatggttaagataagattccgctcctatcgtatgcctttcttt

SEQ ID NO: 11918 - DNA, 122 bp, Homo sapiens
  misc_feature (61)..(62): /note="This region represents a CpG dinucleotide"
  misc_feature (61)..(61): /note="Nucleotide may be methylated to form 5-methylcytosine"
atcctgggcccccgcccctgtaattcacgtcccctgaggatgtccttggaccccttcattcgttcatgattccccaagcctgaatacctcccagcctggaagcagtttcccatccagttggc

SEQ ID NO: 11919 - DNA, 122 bp, Homo sapiens
  misc_feature (61)..(62): /note="This region represents a CpG dinucleotide"
  misc_feature (61)..(61): /note="Nucleotide may be methylated to form 5-methylcytosine"
cgatggattgtttcaggccaggcccactgcttgctgtactttaatgtcattgctgcttatcgccttctctgcagccttgttgacactcctgacaacaagtgtttgtctttggcttctagggc

SEQ ID NO: 11920 - DNA, 122 bp, Homo sapiens
  misc_feature (61)..(62): /note="This region represents a CpG dinucleotide"
  misc_feature (61)..(61): /note="Nucleotide may be methylated to form 5-methylcytosine"
gtgtattgacaagggagccactctctggttagtactgggccaacaaagcttggcttttgacgtctataaaaatcagtttaggtctttccttacctagatattaggttgtaaggaatctttaa

SEQ ID NO: 11921 - DNA, 122 bp, Homo sapiens
  misc_feature (61)..(62): /note="This region represents a CpG dinucleotide"
  misc_feature (61)..(61): /note="Nucleotide may be methylated to form 5-methylcytosine"
ctatttaaaccacttttacatgtgtttgcattttttttcctaaaagaaacctttaggatccgaacaaggtttaatgtgttagtcattgggatccagatagaaaggcaggactgttgtttgaa

SEQ ID NO: 11922 - DNA, 122 bp, Homo sapiens
  misc_feature (61)..(62): /note="This region represents a CpG dinucleotide"
  misc_feature (61)..(61): /note="Nucleotide may be methylated to form 5-methylcytosine"
ctcactgatctccagctgcctctggatgcggcctttgcagcgctcgcggtagtcggactgcgtggcgttgtactccgacatgacctccacaaactttctggacagcgtggagtgctgggggc

SEQ ID NO: 11923 - DNA, 122 bp, Homo sapiens
  misc_feature (61)..(62): /note="This region represents a CpG dinucleotide"
  misc_feature (61)..(61): /note="Nucleotide may be methylated to form 5-methylcytosine"
attgttcgttttccctaaagataagctggtggaagaaggcaccaatgttaccatttgttacgtttctaggaacattcaaaataatgtatcctgttatttggaagggaaacagattcatggag

SEQ ID NO: 11924 - DNA, 122 bp, Homo sapiens
  misc_feature (61)..(62): /note="This region represents a CpG dinucleotide"
  misc_feature (61)..(61): /note="Nucleotide may be methylated to form 5-methylcytosine"
cttaatatttgttgctctcttacaggctatacaaaatgtccttccttttctttactgtatcgcccggctagaatataagcaggacagatttctgtgtcagtattgttcattgctgaatcccc

SEQ ID NO: 11925 - DNA, 122 bp, Homo sapiens
  misc_feature (61)..(62): /note="This region represents a CpG dinucleotide"
  misc_feature (61)..(61): /note="Nucleotide may be methylated to form 5-methylcytosine"
actgtccaatatccatgcttatgttttctctaacaattagaaacatggcttgagatgtaccgcaaatgaaaatattcttcaacatactaaatttcacattataatggctagctcagtactaa

SEQ ID NO: 11926 - DNA, 122 bp, Homo sapiens
  misc_feature (61)..(62): /note="This region represents a CpG dinucleotide"
  misc_feature (61)..(61): /note="Nucleotide may be methylated to form 5-methylcytosine"
aactgttaggaaattacaggcttgggctgatcattaacatactgtactctacaaggcacacgttacctttcaaagcagatgaaattctaacctgaattctggcaagattctttgatcatttg

SEQ ID NO: 11927 - DNA, 122 bp, Homo sapiens
  misc_feature (61)..(62): /note="This region represents a CpG dinucleotide"
  misc_feature (61)..(61): /note="Nucleotide may be methylated to form 5-methylcytosine"
tacccaggctccttagggaactgtttcatacagttctacaaataggatcaatgattatcacggttcagtgatcttacatgcgaaaagagtaattcagtggaagttccacagaatcagttcaa

SEQ ID NO: 11928 - DNA, 122 bp, Homo sapiens
  misc_feature (61)..(62): /note="This region represents a CpG dinucleotide"
  misc_feature (61)..(61): /note="Nucleotide may be methylated to form 5-methylcytosine"
cagcaggtctttttccagaaagaagggaatgagccaccccaagcaacagctcctgacactcgtgttctgagaaattctgagaaacagctgcaatatctgcctccttaattgtacctggagcc

SEQ ID NO: 11929 - DNA, 122 bp, Homo sapiens
  misc_feature (61)..(62): /note="This region represents a CpG dinucleotide"
  misc_feature (61)..(61): /note="Nucleotide may be methylated to form 5-methylcytosine"
gctgatctgatgcattcatatttgacataccagttaaaggaagtagttagaaatgatgtacgtataaaagaaaagtagaataataatacaacaggcgcctctgtcctcaaccccagaactca

SEQ ID NO: 11930 - DNA, 122 bp, Homo sapiens
  misc_feature (61)..(62): /note="This region represents a CpG dinucleotide"
  misc_feature (61)..(61): /note="Nucleotide may be methylated to form 5-methylcytosine"
agccacagagccagaccacacaatgcacactggttggaatctgctgggcaggtatctccccgtctgtccaggcaagccaaatcaaataaggccctgagttaaaaaggaaggaaaagtaacag

SEQ ID NO: 11931 - DNA, 122 bp, Homo sapiens
  misc_feature (61)..(62): /note="This region represents a CpG dinucleotide"
  misc_feature (61)..(61): /note="Nucleotide may be methylated to form 5-methylcytosine"
gccattcagaaggaagtggctggtccgtggcggggtggggcctgcctcctggactgaggacgccactctgaagtggagtcttcagatgttggaggaggacagttcgggggggcagtgcgtgc

SEQ ID NO: 11932 - DNA, 122 bp, Homo sapiens
  misc_feature (61)..(62): /note="This region represents a CpG dinucleotide"
  misc_feature (61)..(61): /note="Nucleotide may be methylated to form 5-methylcytosine"
gactatggggattacatttcaagatgagatttgggtggggacacaaatcctaccatatcacgaggtgatctcactagatcctctagaagcctgagtgccttgcagggctagagaagggaaca

SEQ ID NO: 11933 - DNA, 122 bp, Homo sapiens
  misc_feature (61)..(62): /note="This region represents a CpG dinucleotide"
  misc_feature (61)..(61): /note="Nucleotide may be methylated to form 5-methylcytosine"
ggtagccaatgggaagaggtgatcaggagcgggtagccaatgggaagaggtgatcaggagcgggtagccaatgggaagagcacttctgagtgatcaccaaagcagtttctttagtggtcttt

SEQ ID NO: 11934 - DNA, 122 bp, Homo sapiens
  misc_feature (61)..(62): /note="This region represents a CpG dinucleotide"
  misc_feature (61)..(61): /note="Nucleotide may be methylated to form 5-methylcytosine"
gacgaaggcttcctgtggtttgggttgatgtatctctctgtcttgcaacactgagttccccgttgtctgggcggaagccagtcagacggaagcccggcttctgtggtgcctgccctggtggc

SEQ ID NO: 11935 - DNA, 122 bp, Homo sapiens
  misc_feature (61)..(62): /note="This region represents a CpG dinucleotide"
  misc_feature (61)..(61): /note="Nucleotide may be methylated to form 5-methylcytosine"
gcttttatgcccttggctgggtgtgacggaaaggggcagggacagacaaaacttggagtgcggtcccagctgtagaatgccagtctggcagacataacaaaagtgagcacttcttcgctttt

SEQ ID NO: 11936 - DNA, 122 bp, Homo sapiens
  misc_feature (61)..(62): /note="This region represents a CpG dinucleotide"
  misc_feature (61)..(61): /note="Nucleotide may be methylated to form 5-methylcytosine"
tttaagcctgtctctctggaacccagagcccacatttgcaatgagccctagaggctcttacgagttggaagcggtcacttgatattgatttagggcccttgggtttctggaagcatgccaaa

SEQ ID NO: 11937 - DNA, 122 bp, Homo sapiens
  misc_feature (61)..(62): /note="This region represents a CpG dinucleotide"
  misc_feature (61)..(61): /note="Nucleotide may be methylated to form 5-methylcytosine"
tctgtggttacccagagctgaatccttgctctgtcctttgcagccgaaacctttaagtctcggcctccttatctataacataggtttactattacagaccctatagggctgtggtgaaggtt

SEQ ID NO: 11938 - DNA, 122 bp, Homo sapiens
  misc_feature (61)..(62): /note="This region represents a CpG dinucleotide"
  misc_feature (61)..(61): /note="Nucleotide may be methylated to form 5-methylcytosine"
tttgtttttgagacagattctagctctgttgcccaggctgagtgcagtggcatcttggctcgctgcaaactccacctctcgcgttcaagcaattaacctgcctcagcctcccaagtagctgg

SEQ ID NO: 11939 - DNA, 122 bp, Homo sapiens
  misc_feature (61)..(62): /note="This region represents a CpG dinucleotide"
  misc_feature (61)..(61): /note="Nucleotide may be methylated to form 5-methylcytosine"
tgctaactatctttatgttcagagctcattcagtacagggtgttctccaggataaaacctcgggactctctctccaaccggccctgtcccttgggtgactacctgaggcttctctttacctt

SEQ ID NO: 11940 - DNA, 122 bp, Homo sapiens
  misc_feature (61)..(62): /note="This region represents a CpG dinucleotide"
  misc_feature (61)..(61): /note="Nucleotide may be methylated to form 5-methylcytosine"
tcggttcctttcccaggagccacactcgaagtcacaagagccttgacatgttgcggtgaccgcctgctgccggggctgactggcttgtgaccccggcacctggaggcctgtctcagatccaa

SEQ ID NO: 11941 - DNA, 122 bp, Homo sapiens
  misc_feature (61)..(62): /note="This region represents a CpG dinucleotide"
  misc_feature (61)..(61): /note="Nucleotide may be methylated to form 5-methylcytosine"
tttggcatgctatgtctatcagcctgtggtaacccttaggcattttatttctacaggaaacgatgatggtgaggacaacatgtggtgacccacaggaacataatcatgttaactcctgactc

SEQ ID NO: 11942 - DNA, 122 bp, Homo sapiens
  misc_feature (61)..(62): /note="This region represents a CpG dinucleotide"
  misc_feature (61)..(61): /note="Nucleotide may be methylated to form 5-methylcytosine"
ttatttatttatttaattcctcttctccctcaaagcacaatctgctgtatgttaaaggggcggggaagctgctgactttgcagtagcgcatacttactcacgcaattttccattctggctga

SEQ ID NO: 11943 - DNA, 122 bp, Homo sapiens
  misc_feature (61)..(62): /note="This region represents a CpG dinucleotide"
  misc_feature (61)..(61): /note="Nucleotide may be methylated to form 5-methylcytosine"
catctatcaaaattacaggcgcttagactctttgacctggcaatttcatttccaggaattcgttctatggatatccttgcacatgtaggaaatgttgtgtgcataagatcagttattacagc

SEQ ID NO: 11944 - DNA, 122 bp, Homo sapiens
  misc_feature (61)..(62): /note="This region represents a CpG dinucleotide"
  misc_feature (61)..(61): /note="Nucleotide may be methylated to form 5-methylcytosine"
catcacattctccttcaccaggtcatcctaaagcacatacctttgcgctggtgggccatccgcctggatgagtattgtttcatcggataagcttccagagccataaaaggttcagaatttta

SEQ ID NO: 11945 - DNA, 122 bp, Homo sapiens
  misc_feature (61)..(62): /note="This region represents a CpG dinucleotide"
  misc_feature (61)..(61): /note="Nucleotide may be methylated to form 5-methylcytosine"
gatctttttgctaaggtgtaggacgtcttaatgagcagttgaaaaaacaaacaaaaacctcgaagagttacatggcttagggattggggtataattgaaaaatagccagagttgagaagttt

SEQ ID NO: 11946 - DNA, 122 bp, Homo sapiens
  misc_feature (61)..(62): /note="This region represents a CpG dinucleotide"
  misc_feature (61)..(61): /note="Nucleotide may be methylated to form 5-methylcytosine"
aggagtgtggcgtaattagttcatgcagctgtactcactgagctcctgctctagccctagcggtgttctaagctctagctggctcattagatgcagtgagtgtagcaatcagggaaggttac

SEQ ID NO: 11947 - DNA, 122 bp, Homo sapiens
  misc_feature (61)..(62): /note="This region represents a CpG dinucleotide"
  misc_feature (61)..(61): /note="Nucleotide may be methylated to form 5-methylcytosine"
ggccacattttgagaaactgagctaaaatctccttttaccactcacaaattgaaattggccgcttcatgtcttgtcatctatgctttgttgtgttgagtcagtgtagctgacacaggcttct

SEQ ID NO: 11948 - DNA, 122 bp, Homo sapiens
  misc_feature (61)..(62): /note="This region represents a CpG dinucleotide"
  misc_feature (61)..(61): /note="Nucleotide may be methylated to form 5-methylcytosine"
tttgctcttttgggcctgggatgctaacagtttcctgttcttgctggttccagatgcattcgtattccttgaagattcccttactactgtgtacacttctgaaagcagtcccttattaaaat

SEQ ID NO: 11949 - DNA, 122 bp, Homo sapiens
  misc_feature (61)..(62): /note="This region represents a CpG dinucleotide"
  misc_feature (61)..(61): /note="Nucleotide may be methylated to form 5-methylcytosine"
ttttacagatccctggcatgtttttctgaccctcactggagttcagtatgagacagaccacgctacaaagagattcctgatctaactctaggctgttcatgagtgttagacacacagtgtga

SEQ ID NO: 11950 - DNA, 122 bp, Homo sapiens
  misc_feature (61)..(62): /note="This region represents a CpG dinucleotide"
  misc_feature (61)..(61): /note="Nucleotide may be methylated to form 5-methylcytosine"
aaacaaataactgaggcagtgggacacgactcatgagggctctcaccaggaagcagctgacgtctatgagcaggacagtggggatgccaccaaaggtgaccccctggagcacggtgctgttt

SEQ ID NO: 11951 - DNA, 122 bp, Homo sapiens
  misc_feature (61)..(62): /note="This region represents a CpG dinucleotide"
  misc_feature (61)..(61): /note="Nucleotide may be methylated to form 5-methylcytosine"
aagctgacagtatgtaaaaattattctaagtgcttatttaaaaagcataatctccgaactcgtgaatcagaatctcttgggtgtggggctggatcgcacttttgacaaaggctccccagtag

SEQ ID NO: 11952 - DNA, 122 bp, Homo sapiens
  misc_feature (61)..(62): /note="This region represents a CpG dinucleotide"
  misc_feature (61)..(61): /note="Nucleotide may be methylated to form 5-methylcytosine"
tccccttcctccacccttttgtgtgattcaggtcctcagtgattggatgatacctgctcacgtggtggagaccatctgctttactcagtctactaatgcaaatgctaatctcttccagaaac

SEQ ID NO: 11953 - DNA, 122 bp, Homo sapiens
  misc_feature (61)..(62): /note="This region represents a CpG dinucleotide"
  misc_feature (61)..(61): /note="Nucleotide may be methylated to form 5-methylcytosine"
tcacaggaacctaaccctgtaacttccctaagagcaaatgctctgtgtttgctaattcagcgtttgtggtgacttcgagatgtagactctgtgaatagtgagaattgacttatgtaccctgc

SEQ ID NO: 11954 - DNA, 122 bp, Homo sapiens
  misc_feature (61)..(62): /note="This region represents a CpG dinucleotide"
  misc_feature (61)..(61): /note="Nucleotide may be methylated to form 5-methylcytosine"
gaggctcctggtagccccagagctttccatatcatcttggcaaagcccttttcctccatccgtccatcagcagggctgtgagtgtggcaaggtgagatgacagatttccaggcaagggctgc

SEQ ID NO: 11955 - DNA, 122 bp, Homo sapiens
  misc_feature (61)..(62): /note="This region represents a CpG dinucleotide"
  misc_feature (61)..(61): /note="Nucleotide may be methylated to form 5-methylcytosine"
caaacaatctcaacggggaaaatgcccaacaagaaaacgaaggaggggagcaggcccccacgcagaatgaagaagaatcccgccatttgggagggggtgaaggccagaagcctggaggaaat

SEQ ID NO: 11956 - DNA, 122 bp, Homo sapiens
  misc_feature (61)..(62): /note="This region represents a CpG dinucleotide"
  misc_feature (61)..(61): /note="Nucleotide may be methylated to form 5-methylcytosine"
agtagatggatgggatctatttggatgaaatgcgatctgttttccccaggctgggggtggcggggggcgctctaccctgtgtgatgtgtgtgtttccacttctggccatgtggggcctgaag

SEQ ID NO: 11957 - DNA, 122 bp, Homo sapiens
  misc_feature (61)..(62): /note="This region represents a CpG dinucleotide"
  misc_feature (61)..(61): /note="Nucleotide may be methylated to form 5-methylcytosine"
gacgtcacactgaccacaaaagcttatatttcctgctactaaatacacagcccctgctgacgaagtgatcattacagagagagcttgttctgccgaggtcaccccaaagtggggatgaaggc

SEQ ID NO: 11958 - DNA, 122 bp, Homo sapiens
  misc_feature (61)..(62): /note="This region represents a CpG dinucleotide"
  misc_feature (61)..(61): /note="Nucleotide may be methylated to form 5-methylcytosine"
atgagatgtgactcagcagcccttccctttctagatgatctgcagattttctggtgttgtcgtcttttgtcctggggccagtttggagtggctgtctctactcatcctggccccgttggctg

SEQ ID NO: 11959 - DNA, 122 bp, Homo sapiens
  misc_feature (61)..(62): /note="This region represents a CpG dinucleotide"
  misc_feature (61)..(61): /note="Nucleotide may be methylated to form 5-methylcytosine"
ggctgtgattacaaatagccccaaatcttagtggtttattacacaatggcttatttctcacgcatatgacttgtctgtcgcaagacatctgggggctctgctacatatctcctctctcaggg

SEQ ID NO: 11960 - DNA, 122 bp, Homo sapiens
  misc_feature (61)..(62): /note="This region represents a CpG dinucleotide"
  misc_feature (61)..(61): /note="Nucleotide may be methylated to form 5-methylcytosine"
agtcctcaaacacaaattattttactaatttactgagcagacatttctggagagcccactcggtgctgggcactgttgcaggcatgggggtagtgatggggtgacagtggaggctgctgcgc

SEQ ID NO: 11961 - DNA, 122 bp, Homo sapiens
  misc_feature (61)..(62): /note="This region represents a CpG dinucleotide"
  misc_feature (61)..(61): /note="Nucleotide may be methylated to form 5-methylcytosine"
tttccaaaagagagggacttggggcacagaatctctggcaggtgggggagaaacggctaccgtcaccccactgggcaccgcatgaataacccagatgtcggcgaaggggagcccctggtttc

SEQ ID NO: 11962 - DNA, 122 bp, Homo sapiens
  misc_feature (61)..(62): /note="This region represents a CpG dinucleotide"
  misc_feature (61)..(61): /note="Nucleotide may be methylated to form 5-methylcytosine"
ctctaacttccaccctaagataaactctgattccttctttgtttagcccacagaagctcacggattactcctgtgttgcctaacaactccaaggaaattagaactcctttccaggaactctc

SEQ ID NO: 11963 - DNA, 122 bp, Homo sapiens
  misc_feature (61)..(62): /note="This region represents a CpG dinucleotide"
  misc_feature (61)..(61): /note="Nucleotide may be methylated to form 5-methylcytosine"
gtgactccagtagcagctcccacgctgaaatcagaaaatgaaatctatgcaattcctctgcgatttcctttagccactcccatgtatcattgacctcattaaaatgcttctagaagaaatag

SEQ ID NO: 11964 - DNA, 122 bp, Homo sapiens
  misc_feature (61)..(62): /note="This region represents a CpG dinucleotide"
  misc_feature (61)..(61): /note="Nucleotide may be methylated to form 5-methylcytosine"
ttgtcttattatttagtcataaaaactgatatttgtaatagaaaatagattgtgtatttgcgaggtactttgcttattatctgcatagcattctttaatgaagttacaattttcaatgagag

SEQ ID NO: 11965 - DNA, 122 bp, Homo sapiens
  misc_feature (61)..(62): /note="This region represents a CpG dinucleotide"
  misc_feature (61)..(61): /note="Nucleotide may be methylated to form 5-methylcytosine"
ctgtatccactttaccgacaataaaagcataaagacagggctaatccccagcctggccagcgggcgtctaaatgaagggacatgtgccatgctggttaaatattttgaaggccaggtgtggt

SEQ ID NO: 11966 - DNA, 122 bp, Homo sapiens
  misc_feature (61)..(62): /note="This region represents a CpG dinucleotide"
  misc_feature (61)..(61): /note="Nucleotide may be methylated to form 5-methylcytosine"
ctctatgcctttacccaatcagttttgaaaacatattttattttcttttttttctccatgcgtgacctgctattgtcaatggccatttggaattcccaaaggattggtagaggtatgcagtt

SEQ ID NO: 11967 - DNA, 122 bp, Homo sapiens
  misc_feature (61)..(62): /note="This region represents a CpG dinucleotide"
  misc_feature (61)..(61): /note="Nucleotide may be methylated to form 5-methylcytosine"
gatcacacagctagtaaaactaaaactaaactcggctaatcaggctctaaagtctgtgcccgtagcctcacaatatgctgcccattgaaatcagacagacagatgagatgtggtatgacctc

SEQ ID NO: 11968 - DNA, 122 bp, Homo sapiens
  misc_feature (61)..(62): /note="This region represents a CpG dinucleotide"
  misc_feature (61)..(61): /note="Nucleotide may be methylated to form 5-methylcytosine"
aattatttgatgagacacaaaagcgttgaattcaaaagcacaggcccttttttccccactcgttttgctgctaggaaattcactcagcaaatatttatcaagtatgcaccatgtgccagaca

SEQ ID NO: 11969 - DNA, 122 bp, Homo sapiens
  misc_feature (61)..(62): /note="This region represents a CpG dinucleotide"
  misc_feature (61)..(61): /note="Nucleotide may be methylated to form 5-methylcytosine"
aagaatgggtgtataaatacctccactctttcctcccttgggtgagataactctgaggcacgtgtttgacattgcttcatggagttccccagcaggattaagttccagttgccctcagtggt

SEQ ID NO: 11970 - DNA, 122 bp, Homo sapiens
  misc_feature (61)..(62): /note="This region represents a CpG dinucleotide"
  misc_feature (61)..(61): /note="Nucleotide may be methylated to form 5-methylcytosine"
ggcactgtgctagcccactctggctcatttaatcctctcctaagaagagaggagacacagcgtccccatttgacagatgcagaaagaggttccacaggtgtgccttgattctgtcctaaaac

SEQ ID NO: 11971 - DNA, 122 bp, Homo sapiens
  misc_feature (61)..(62): /note="This region represents a CpG dinucleotide"
  misc_feature (61)..(61): /note="Nucleotide may be methylated to form 5-methylcytosine"
attttatttgaagaagatgacaactttgtggctttgtacttactcgctcttccagatcaacgacagagaataattggccattctgtagatggcttcacgagagaagaacttacaacccatgt

SEQ ID NO: 11972 - DNA, 122 bp, Homo sapiens
  misc_feature (61)..(62): /note="This region represents a CpG dinucleotide"
  misc_feature (61)..(61): /note="Nucleotide may be methylated to form 5-methylcytosine"
tcacggtgctatgattcttgtgctcctggaacatgcaaaggtagcagatgcaggtctggtcggtctggcagaagagctccatcgtcttgccatgcacgggacacttgcgggcctcaaagtcc

SEQ ID NO: 11973 - DNA, 122 bp, Homo sapiens
  misc_feature (61)..(62): /note="This region represents a CpG dinucleotide"
  misc_feature (61)..(61): /note="Nucleotide may be methylated to form 5-methylcytosine"
aagttcccagaggtctctaaagtcaagttcttcatccttatggccaggcatagtggctcacgcctgtaatcccagcactttgggagaccaaggtgggtggatcacctgaggtcaggagttcg

SEQ ID NO: 11974 - DNA, 122 bp, Homo sapiens
  misc_feature (61)..(62): /note="This region represents a CpG dinucleotide"
  misc_feature (61)..(61): /note="Nucleotide may be methylated to form 5-methylcytosine"
ctatatttcccagataaaatattccttttaaactaatatgtttatccgtgttgagaagttcgtggtcatgtagtcacatatattcattttgaacaggaaatctttgaatgtcagtttcaggg

SEQ ID NO: 11975 - DNA, 122 bp, Homo sapiens
  misc_feature (61)..(62): /note="This region represents a CpG dinucleotide"
  misc_feature (61)..(61): /note="Nucleotide may be methylated to form 5-methylcytosine"
agggaccagttctgtcctggtcactgctgtatccccagctctagataaggcctgagacatcgtaggagtgccagggatctttggttactgagaaaacgagcagctagatcaaggttcccaac

SEQ ID NO: 11976 - DNA, 122 bp, Homo sapiens
  misc_feature (61)..(62): /note="This region represents a CpG dinucleotide"
  misc_feature (61)..(61): /note="Nucleotide may be methylated to form 5-methylcytosine"
aagctgcctgtggtcaccctgaacttgttgtgcctttaagagttgggcatgctggccaggcgcggtggctcatgcctgtaatcccagcacttcgggaggccgaggcgggtggatcacgaggt

SEQ ID NO: 11977 - DNA, 122 bp, Homo sapiens
  misc_feature (61)..(62): /note="This region represents a CpG dinucleotide"
  misc_feature (61)..(61): /note="Nucleotide may be methylated to form 5-methylcytosine"
aacatggtgaaagcccatttctgctaaaaatacaaaaaattagcagggcgtggtggcacacgcctgtagtcccagatactcaggacagtgaggcagaagaatcgcttgaacctgggaggcgg

SEQ ID NO: 11978 - DNA, 122 bp, Homo sapiens
  misc_feature (61)..(62): /note="This region represents a CpG dinucleotide"
  misc_feature (61)..(61): /note="Nucleotide may be methylated to form 5-methylcytosine"
ataaaagcaaggacaatatttccttgcaagtccacaaatcaccatcataagcaaggcaatcgtgaataaactgagctggactgcatagcctctttggcagttgctagtatttaaatatggat

SEQ ID NO: 11979 - DNA, 122 bp, Homo sapiens
  misc_feature (61)..(62): /note="This region represents a CpG dinucleotide"
  misc_feature (61)..(61): /note="Nucleotide may be methylated to form 5-methylcytosine"
tctttcggagttcaatcttcaggaacagtcctaggctgaagatgatgatgccagccaacacggagaaccagttcatgagccagagcccttgggccaacttgacccgcttcttctggtcaaac

SEQ ID NO: 11980 - DNA, 122 bp, Homo sapiens
  misc_feature (61)..(62): /note="This region represents a CpG dinucleotide"
  misc_feature (61)..(61): /note="Nucleotide may be methylated to form 5-methylcytosine"
tgttccacccagacccatacaatcaaatgtgttgactcttggttctgtgagtcttatcaccgacccaaaggacaacatctgttcatcagcatgtagtgtagcatgactaggtattggatgaa

SEQ ID NO: 11981 - DNA, 122 bp, Homo sapiens
  misc_feature (61)..(62): /note="This region represents a CpG dinucleotide"
  misc_feature (61)..(61): /note="Nucleotide may be methylated to form 5-methylcytosine"
gttcttaatcttattcgttccctctttgtttatcacaaagctttgttggacaaaaaaaagcgagcaccaggtacggatggggatgtctctataaccaggctgctagaccctgtttgaacctg

SEQ ID NO: 11982 - DNA, 122 bp, Homo sapiens
  misc_feature (61)..(62): /note="This region represents a CpG dinucleotide"
  misc_feature (61)..(61): /note="Nucleotide may be methylated to form 5-methylcytosine"
ctggccccttgccccacagggtgttcgtctgtgaaggggtggagtcggtgggggggtcagcgggggagggactgttgaagacaggtctccacacacagctccagcagccacatttgcaacct

SEQ ID NO: 11983 - DNA, 122 bp, Homo sapiens
  misc_feature (61)..(62): /note="This region represents a CpG dinucleotide"
  misc_feature (61)..(61): /note="Nucleotide may be methylated to form 5-methylcytosine"
aaaaggcctagtgaggcacttgggaactagcaacattataaaagtttcactacactgggtcgtaagagggatgtgtagaaggaagggcatagctagaatccaatgagagctgcaaccaagaa

SEQ ID NO: 11984 - DNA, 122 bp, Homo sapiens
  misc_feature (61)..(62): /note="This region represents a CpG dinucleotide"
  misc_feature (61)..(61): /note="Nucleotide may be methylated to form 5-methylcytosine"
gagcctctcgtttcctcatttgtaatatgtgatcagaaatctgtcattctcggcctgccgcggtggctcactgctataatcccagcattttgggaggccaaggcaggcagatcacttgaggt

SEQ ID NO: 11985 - DNA, 122 bp, Homo sapiens
  misc_feature (61)..(62): /note="This region represents a CpG dinucleotide"
  misc_feature (61)..(61): /note="Nucleotide may be methylated to form 5-methylcytosine"
gactttggggttgtatttaatacagctcttgtgatattcttatggaaatgataatccttacgggctaaatggcagaaaaatcaggaagatacatgactaagtaaatacgcctaataatgcag

SEQ ID NO: 11986 - DNA, 122 bp, Homo sapiens
  misc_feature (61)..(62): /note="This region represents a CpG dinucleotide"
  misc_feature (61)..(61): /note="Nucleotide may be methylated to form 5-methylcytosine"
ttgtcaccacagacagccagaaggtcaagcagctggcctccaccttgcttccttctggtgcgcatatataggagcctgattagcatgtagaatcctagcagaatgggagtctttgaaatagg

SEQ ID NO: 11987 - DNA, 122 bp, Homo sapiens
  misc_feature (61)..(62): /note="This region represents a CpG dinucleotide"
  misc_feature (61)..(61): /note="Nucleotide may be methylated to form 5-methylcytosine"
cttgccatgtctctctagcgccctctactgagaagctttgcatcgtgctcactcgaaaaacgctgaaaggaattctgtggtttaatcacagagcatgttttgaagggtaaattgggagctga

SEQ ID NO: 11988 - DNA, 122 bp, Homo sapiens
  misc_feature (61)..(62): /note="This region represents a CpG dinucleotide"
  misc_feature (61)..(61): /note="Nucleotide may be methylated to form 5-methylcytosine"
gagtaaaacctcacagttggttaaggggcagagtcaggcttgccacagaagcctgcttctcgatgcagtgggctgcccccactctttagctgccttattttcctagtctcacaaaatctgtt

SEQ ID NO: 11989 - DNA, 122 bp, Homo sapiens
  misc_feature (61)..(62): /note="This region represents a CpG dinucleotide"
  misc_feature (61)..(61): /note="Nucleotide may be methylated to form 5-methylcytosine"
ttttcagctcacttcaagggtacctgaagcgaattggcaccaaagcagcagctgtattgccgcagttctagcttcaccttcacgatgtttcccttggtcaaaagcgcactaaatcgtctcca

SEQ ID NO: 11990 - DNA, 122 bp, Homo sapiens
  misc_feature (61)..(62): /note="This region represents a CpG dinucleotide"
  misc_feature (61)..(61): /note="Nucleotide may be methylated to form 5-methylcytosine"
tttgagagttgataacttcccaaaaggagtcatactacacagttttgcactggtttctggcgaaatttgctgtttaatgatcataattttaaaggccttttattgccctcaacaaatgtaac

SEQ ID NO: 11991 - DNA, 122 bp, Homo sapiens
  misc_feature (61)..(62): /note="This region represents a CpG dinucleotide"
  misc_feature (61)..(61): /note="Nucleotide may be methylated to form 5-methylcytosine"
gccgtgatttatcggcggctcctcctcgccagggcccacggcaggaggagttcaaacacccgcgagaaaagccacccgctattgatcctcgcgtcaggcctcccaagcgctggcgggcattc

SEQ ID NO: 11992 - DNA, 122 bp, Homo sapiens
  misc_feature (61)..(62): /note="This region represents a CpG dinucleotide"
  misc_feature (61)..(61): /note="Nucleotide may be methylated to form 5-methylcytosine"
tggttaggacaattgcacaatggcgctccggagactgcttcattcccagaggtttggtggcgtttgtggctgctgcagccctggtctgccggacggggccatacatcatcgtgtcattttac

SEQ ID NO: 11993 - DNA, 122 bp, Homo sapiens
  misc_feature (61)..(62): /note="This region represents a CpG dinucleotide"
  misc_feature (61)..(61): /note="Nucleotide may be methylated to form 5-methylcytosine"
cccactcttgacacgtggggattattacaatccaagatgagatttgggtggggacacagccgaagtatatcaccaggctctgctaagcactgaaggccatagtgcttgttcatagcttcctt

SEQ ID NO: 11994 - DNA, 122 bp, Homo sapiens
  misc_feature (61)..(62): /note="This region represents a CpG dinucleotide"
  misc_feature (61)..(61): /note="Nucleotide may be methylated to form 5-methylcytosine"
gacaggctccattgcaaatgtcctgacaaactatgagctgtttctcaatcatgttatcagcggtgcaaaatccagtgtcagcacacagccactgccaggagacagtgtgagcaccaacacac

SEQ ID NO: 11995 - DNA, 122 bp, Homo sapiens
  misc_feature (61)..(62): /note="This region represents a CpG dinucleotide"
  misc_feature (61)..(61): /note="Nucleotide may be methylated to form 5-methylcytosine"
gggattcatttctagaagagttaaaggtttggcccggatccacttggatcacaccaaacacgacttccatcatattctgaaagatgataatgcagagagtctataagcataaaactggaatt

SEQ ID NO: 11996 - DNA, 122 bp, Homo sapiens
  misc_feature (61)..(62): /note="This region represents a CpG dinucleotide"
  misc_feature (61)..(61): /note="Nucleotide may be methylated to form 5-methylcytosine"
tttttttcctgcatgaatagtgactatttgtataaatgtatagagggtaattcaaagctacgaaacttgatgaagtcactcccagagtgaatgtggatagaaaaaggaagaggtctaagtat

SEQ ID NO: 11997 - DNA, 122 bp, Homo sapiens
  misc_feature (61)..(62): /note="This region represents a CpG dinucleotide"
  misc_feature (61)..(61): /note="Nucleotide may be methylated to form 5-methylcytosine"
attcccagacacctcagaaagggggcagcagatcaatatttttgatagggcttagagatgcgtttttaccagcagggagtcaatatgaaggtatgagaagatagaaaaaagggatgtggaga

SEQ ID NO: 11998 - DNA, 122 bp, Homo sapiens
  misc_feature (61)..(62): /note="This region represents a CpG dinucleotide"
  misc_feature (61)..(61): /note="Nucleotide may be methylated to form 5-methylcytosine"
agcctttgcatagctcctttcttggcatctgggctctgaaagctgacagtgctctaactgcgccacagggaggaggagggacagagagagccaaaggcagcaaaggggcaagcatcctggga

SEQ ID NO: 11999 - DNA, 122 bp, Homo sapiens
  misc_feature (61)..(62): /note="This region represents a CpG dinucleotide"
  misc_feature (61)..(61): /note="Nucleotide may be methylated to form 5-methylcytosine"
cattacatttcaggccctgcaaatgcctaatggttataagggccctgagatcttcaaatgcgtactatagtagaagagcaaaggatcgttctggggataagggcgcacacggcacttggaaa

SEQ ID NO: 12000 - DNA, 122 bp, Homo sapiens
  misc_feature (61)..(62): /note="This region represents a CpG dinucleotide"
  misc_feature (61)..(61): /note="Nucleotide may be methylated to form 5-methylcytosine"
gcgagagggtcacactcccgtaggctccggagctgcagccctacccaccaggcgtccccgcggcctctagaatattgtagaatcttcccaagagcccccgcgggaaggaggcccgccccctc

SEQ ID NO: 12001 - DNA, 122 bp, Homo sapiens
  misc_feature (61)..(62): /note="This region represents a CpG dinucleotide"
  misc_feature (61)..(61): /note="Nucleotide may be methylated to form 5-methylcytosine"
ttagaggtttggccttcttgggaagtgtcacaatgctgagtctaaaactgcaacagttaccgtgtccaagtcatgcaactctaaaggaggatggacggtcacatttgtgtccttcagtatca

SEQ ID NO: 12002 - DNA, 122 bp, Homo sapiens
  misc_feature (61)..(62): /note="This region represents a CpG dinucleotide"
  misc_feature (61)..(61): /note="Nucleotide may be methylated to form 5-methylcytosine"
cattggcaccagtaaggttttgaggagctggcaggcttcaactgataagtgagggtggtgcgtaaacccagtctgagagttgcagcaggtcgtctcagtagtcgttagacaaaactggtttc

SEQ ID NO: 12003 - DNA, 122 bp, Homo sapiens
  misc_feature (61)..(62): /note="This region represents a CpG dinucleotide"
  misc_feature (61)..(61): /note="Nucleotide may be methylated to form 5-methylcytosine"
catgcccgttgagcagctgaatcccgttctggacgaggtgcgtctccccgtctggaaccacgtctggcaaggggagagtctggggtctgctactgagttcgtcttgtgctttctgtttttgt

SEQ ID NO: 12004 - DNA, 122 bp, Homo sapiens
  misc_feature (61)..(62): /note="This region represents a CpG dinucleotide"
  misc_feature (61)..(61): /note="Nucleotide may be methylated to form 5-methylcytosine"
gaggatggcccaagcccaggtccctggcatggtggggcaggggcctgagtcacagcctggcgtgaccctgcccagtccccaggaatggccagctcgtccagaggtgagacccaggtcaacaa

SEQ ID NO: 12005 - DNA, 122 bp, Homo sapiens
  misc_feature (61)..(62): /note="This region represents a CpG dinucleotide"
  misc_feature (61)..(61): /note="Nucleotide may be methylated to form 5-methylcytosine"
tagtagaagccttgggtagtgagttgagaacatggccattagaagatcacctgtcaataccgaataaatgatgatttctaagcttgttagaggaaaaaagcaaaacaaattgtcataggtct

SEQ ID NO: 12006 - DNA, 122 bp, Homo sapiens
  misc_feature (61)..(62): /note="This region represents a CpG dinucleotide"
  misc_feature (61)..(61): /note="Nucleotide may be methylated to form 5-methylcytosine"
ggttgaatccaccatgccctaggagttagctaggggatgagctggggaagaggactcagtcgtttgatgcctgaccttgaaatatgtccaggtgataatttgagcattattccaagtgtttc

SEQ ID NO: 12007 - DNA, 122 bp, Homo sapiens
  misc_feature (61)..(62): /note="This region represents a CpG dinucleotide"
  misc_feature (61)..(61): /note="Nucleotide may be methylated to form 5-methylcytosine"
gaaccgagcctcagaatctactcaccccagccagtcaccaccgatttggccaactgggcacgcaggtggaaacctacctgttggcctgtctggcgctaccacccacagacccatgctggtgg

SEQ ID NO: 12008 - DNA, 122 bp, Homo sapiens
  misc_feature (61)..(62): /note="This region represents a CpG dinucleotide"
  misc_feature (61)..(61): /note="Nucleotide may be methylated to form 5-methylcytosine"
cttgatgaacttcctcttcttctcatgtctccggtaggccacgtgcatggccactaggagcgctggcgtggacacgaagatcagctgcagggcccatagccggatgtgggagatggggaagt

SEQ ID NO: 12009 - DNA, 122 bp, Homo sapiens
  misc_feature (61)..(62): /note="This region represents a CpG dinucleotide"
  misc_feature (61)..(61): /note="Nucleotide may be methylated to form 5-methylcytosine"
tctcttcctccaaccccacacacaacggtaaccctgtgagccctttagaccaaacgcgaacgcacatctcagttgcaaggaggacttgttactatgcacatcactgggcccactcccaagag

SEQ ID NO: 12010 - DNA, 122 bp, Homo sapiens
  misc_feature (61)..(62): /note="This region represents a CpG dinucleotide"
  misc_feature (61)..(61): /note="Nucleotide may be methylated to form 5-methylcytosine"
atacatgcccttctaaactgtgctttcaggagactgggcattgtgctcctttcctcctcacggtccaggatggtaacaaagtgacctcggaagccacatattgagatggcataacccctgtc

SEQ ID NO: 12011 - DNA, 122 bp, Homo sapiens
  misc_feature (61)..(62): /note="This region represents a CpG dinucleotide"
  misc_feature (61)..(61): /note="Nucleotide may be methylated to form 5-methylcytosine"
aaaggttctttgacttgcttaagtgcttcccagatgtgtccaacatgggcggaggcacatcgtgaggtcctggagtgtgcctgtgattcagcacctgttccctttttggaggacttatttgc

SEQ ID NO: 12012 - DNA, 122 bp, Homo sapiens
  misc_feature (61)..(62): /note="This region represents a CpG dinucleotide"
  misc_feature (61)..(61): /note="Nucleotide may be methylated to form 5-methylcytosine"
ttgctttgttttgttttgtttaattcagggttcaggagatctaagtatttgcagtggacacgaagccattggagaagaaaagactgaagatgcacaaaggaaaagagtataaaggaaatggg

SEQ ID NO: 12013 - DNA, 122 bp, Homo sapiens
  misc_feature (61)..(62): /note="This region represents a CpG dinucleotide"
  misc_feature (61)..(61): /note="Nucleotide may be methylated to form 5-methylcytosine"
tgcacagatattagacatggagaaatagggtgggcccttccagacaatgggcataatgcacgcagaaagactgaaaagtattgaaatgttggggaaatagaacttcaaagaggatggagcaa

SEQ ID NO: 12014 - DNA, 122 bp, Homo sapiens
  misc_feature (61)..(62): /note="This region represents a CpG dinucleotide"
  misc_feature (61)..(61): /note="Nucleotide may be methylated to form 5-methylcytosine"
actcttccatgcaacaagttagatgaatctcgcagataaagtcagacaaaagaatccagacgcaaaagagcatgcacagtatggagttcaaaaacaggcaaaagtcatctatggagacagaa

SEQ ID NO: 12015 - DNA, 122 bp, Homo sapiens
  misc_feature (61)..(62): /note="This region represents a CpG dinucleotide"
  misc_feature (61)..(61): /note="Nucleotide may be methylated to form 5-methylcytosine"
catcaggtgtgacaggacacacagaaatggtgattgtgtgcaaaccacaatgaacacaaccgttgaaagaatgaaaagttcagcacaaacttcagcatggaagaaatataatcccagaacag

SEQ ID NO: 12016 - DNA, 122 bp, Homo sapiens
  misc_feature (61)..(62): /note="This region represents a CpG dinucleotide"
  misc_feature (61)..(61): /note="Nucleotide may be methylated to form 5-methylcytosine"
gtgtgtgtctgatatcctgacatgtcctacagttcagtccaggaaatatattttctggcacgccttcgagacagagttgtagcatatggactcaattcaacttcagactcttagattattag

SEQ ID NO: 12017 - DNA, 122 bp, Homo sapiens
  misc_feature (61)..(62): /note="This region represents a CpG dinucleotide"
  misc_feature (61)..(61): /note="Nucleotide may be methylated to form 5-methylcytosine"
ctacgtggctgttcagaggctccctccctgctgaatgctgaataggaagtgagtgctgctcgctccgcagctttccgcagtaaggaggaggggggaagggggctcaatcccgccccttcccc

SEQ ID NO: 12018 - DNA, 122 bp, Homo sapiens
  misc_feature (61)..(62): /note="This region represents a CpG dinucleotide"
  misc_feature (61)..(61): /note="Nucleotide may be methylated to form 5-methylcytosine"
gctgccgcctcctcgtcagcttccagctcgtgtctggtgcggagcagaggcttcctacttcgtcgacgttcctgaatgaggtcatcatctggtgtaggcctgaaaacaacccgattaggtag

SEQ ID NO: 12019 - DNA, 122 bp, Homo sapiens
  misc_feature (61)..(62): /note="This region represents a CpG dinucleotide"
  misc_feature (61)..(61): /note="Nucleotide may be methylated to form 5-methylcytosine"
gtattttagttagattgcttattcactcatatgttcaagcctagcataaccaacacttcacgtatctttggatgggtaagaaaaaagagtgttggtccctctcccttgcagatgttatagcc

SEQ ID NO: 12020 - DNA, 122 bp, Homo sapiens
  misc_feature (61)..(62): /note="This region represents a CpG dinucleotide"
  misc_feature (61)..(61): /note="Nucleotide may be methylated to form 5-methylcytosine"
ttcagctcaggttttctgactaaggagataaaaacatctcctggactatttatttttttccgtgacctaacccaaggactttgcactgggttggaccaatgcaggcagctcttgaggccttc

SEQ ID NO: 12021 - DNA, 122 bp, Homo sapiens
  misc_feature (61)..(62): /note="This region represents a CpG dinucleotide"
  misc_feature (61)..(61): /note="Nucleotide may be methylated to form 5-methylcytosine"
ctctcagcatggtttggcattactgcctgttatttcgaatgccagcactgaggagctccacgttatactttccaacaccaggagtttccttctaccatgaggatatggcaggacaggtgtta

SEQ ID NO: 12022 - DNA, 122 bp, Homo sapiens
  misc_feature (61)..(62): /note="This region represents a CpG dinucleotide"
  misc_feature (61)..(61): /note="Nucleotide may be methylated to form 5-methylcytosine"
ataaataagaggcctgggctgatctggggcctgaaaagattaagtcatgagagtatctaacgagagatttagtgctaagtgaactaggaccaaagcagcatcccatggaggaatcaaattat

SEQ ID NO: 12023 - DNA, 122 bp, Homo sapiens
  misc_feature (61)..(62): /note="This region represents a CpG dinucleotide"
  misc_feature (61)..(61): /note="Nucleotide may be methylated to form 5-methylcytosine"
gagattgtgactcagatgacactttcagaaacatgttccaggtggtaagccactagagggcgaggactctgactgcctggctcaccactgcaatgccaatgcctagcacagaatagctggat

SEQ ID NO: 12024 - DNA, 122 bp, Homo sapiens
  misc_feature (61)..(62): /note="This region represents a CpG dinucleotide"
  misc_feature (61)..(61): /note="Nucleotide may be methylated to form 5-methylcytosine"
gtacagtctttctgtgtaggtattaatgtaatgacaatttaaatacaggctgcacagatacgatttgaaaagaggagaaatttaccattggtagagggttggatttatctggaaggtgaatt

SEQ ID NO: 12025 - DNA, 122 bp, Homo sapiens
  misc_feature (61)..(62): /note="This region represents a CpG dinucleotide"
  misc_feature (61)..(61): /note="Nucleotide may be methylated to form 5-methylcytosine"
ggaaggagctgctgtgttttctttgcttaatctggccttgccccacagagaaaacacatgcgtagcctccatcctgtttgtaaagagggcggtcagctactcgaagttgctcgcctggaaaa

SEQ ID NO: 12026 - DNA, 122 bp, Homo sapiens
  misc_feature (61)..(62): /note="This region represents a CpG dinucleotide"
  misc_feature (61)..(61): /note="Nucleotide may be methylated to form 5-methylcytosine"
gacccatgaccatgctcagaggcagccttgcagctgctgcccagtcctgtgggctgcagccgcgtctccctgagctgcctgtcaagccagtggtacatttcattccctccccattgactcac

SEQ ID NO: 12027 - DNA, 122 bp, Homo sapiens
  misc_feature (61)..(62): /note="This region represents a CpG dinucleotide"
  misc_feature (61)..(61): /note="Nucleotide may be methylated to form 5-methylcytosine"
caacaacaaaaaagactcaaacagctatttgtacaccagcattcatagtagcattatgcacgatagctgaaaggtggaaacaactcacatgttcatcagtggataaatggataaacaaaatg

SEQ ID NO: 12028 - DNA, 122 bp, Homo sapiens
  misc_feature (61)..(62): /note="This region represents a CpG dinucleotide"
  misc_feature (61)..(61): /note="Nucleotide may be methylated to form 5-methylcytosine"
acgtctgaatcatctgcagacattaagtcagcaacagtagtaagaatgtcctccagatctcgccctcaaaccagcaggaacggtggcttctgatagcttggtagaaatgcaaactcaggccc

SEQ ID NO: 12029 - DNA, 122 bp, Homo sapiens
  misc_feature (61)..(62): /note="This region represents a CpG dinucleotide"
  misc_feature (61)..(61): /note="Nucleotide may be methylated to form 5-methylcytosine"
tatataatatatattatatatatgtatatacatattttcctcattagtgggatggagtaacgctgagctgggcaaaagaaaggtccgaatttgcctggtaatattgccacaacttgaaagtg

SEQ ID NO: 12030 - DNA, 122 bp, Homo sapiens
  misc_feature (61)..(62): /note="This region represents a CpG dinucleotide"
  misc_feature (61)..(61): /note="Nucleotide may be methylated to form 5-methylcytosine"
ttctttttgtttctaaacttgggatgttaatttttaagtggtgtgaaaatttttaagtggcgtctattcattatttcattaaatatttattgagtgactttgtgggtaattaagatattcat

SEQ ID NO: 12031 - DNA, 122 bp, Homo sapiens
  misc_feature (61)..(62): /note="This region represents a CpG dinucleotide"
  misc_feature (61)..(61): /note="Nucleotide may be methylated to form 5-methylcytosine"
aattccatgaaatttatttcaaacataacaacagtaatctcttgcacatacatcatctcgcgtaatctttacaacatccacacgcaggaaaggaatgcatgaaaagtacaagttctgttttt

SEQ ID NO: 12032 - DNA, 122 bp, Homo sapiens
  misc_feature (61)..(62): /note="This region represents a CpG dinucleotide"
  misc_feature (61)..(61): /note="Nucleotide may be methylated to form 5-methylcytosine"
ggttccccaggccagcacctgggcaaaggtctgggcagctcagcccagagaactcactaacgtgagaacatgataaaacttactcactatcatgagaacaggatagaacttactatcatgag

SEQ ID NO: 12033 - DNA, 122 bp, Homo sapiens
  misc_feature (61)..(62): /note="This region represents a CpG dinucleotide"
  misc_feature (61)..(61): /note="Nucleotide may be methylated to form 5-methylcytosine"
cctatcaccgtgggcaggagtattctgaataccaaaacgattttgaaatttcaggctatacggccaacattgaaggtgtctgcattcaactggccctgtgaaagcttcagtctttttcatcg

SEQ ID NO: 12034 - DNA, 122 bp, Homo sapiens
  misc_feature (61)..(62): /note="This region represents a CpG dinucleotide"
  misc_feature (61)..(61): /note="Nucleotide may be methylated to form 5-methylcytosine"
ggtcttggtggctacagtgaacatgtcttccgtgagaggcagcagtagataagctggtgacgtaaatagatgagaaatcaaaggacccagataaaggcctggaatctgtcatcactttgcta

SEQ ID NO: 12035 - DNA, 122 bp, Homo sapiens
  misc_feature (61)..(62): /note="This region represents a CpG dinucleotide"
  misc_feature (61)..(61): /note="Nucleotide may be methylated to form 5-methylcytosine"
gatttcaaacaagcctgagatgagagatcccacattcagccttgagcaactgagggttgacggttgtgtgtgctgacatctgtctgtctacctgttgattatgtaaagtagtcgtccacagt

SEQ ID NO: 12036 - DNA, 122 bp, Homo sapiens
  misc_feature (61)..(62): /note="This region represents a CpG dinucleotide"
  misc_feature (61)..(61): /note="Nucleotide may be methylated to form 5-methylcytosine"
accacttgctctgcaattgtataaggagtatggggaagaatgtctcctgatactgtcaaacggccaactagaagctgttagggtaagatagaactttccgaaagatgctcttctcctccact

SEQ ID NO: 12037 - DNA, 122 bp, Homo sapiens
  misc_feature (61)..(62): /note="This region represents a CpG dinucleotide"
  misc_feature (61)..(61): /note="Nucleotide may be methylated to form 5-methylcytosine"
tttgactagccaggaaaagaacctctccctgtgtgcaaacagaatcttttcttcacatcacgttattaaaactgacaacatcctgtaatctgttataagcccatcttcctctccccttatgt

SEQ ID NO: 12038 - DNA, 122 bp, Homo sapiens
  misc_feature (61)..(62): /note="This region represents a CpG dinucleotide"
  misc_feature (61)..(61): /note="Nucleotide may be methylated to form 5-methylcytosine"
ctttcttggaccacatgtcctggtgttcagaggctcctgagagcctggggctcagtaggccgtctcatagcccctctaacccaggtgagaaaacaggtcccagtgggtccctaacccatgct

SEQ ID NO: 12039 - DNA, 122 bp, Homo sapiens
  misc_feature (61)..(62): /note="This region represents a CpG dinucleotide"
  misc_feature (61)..(61): /note="Nucleotide may be methylated to form 5-methylcytosine"
ctggctagggctgtggcaaacagggtgccattaggagtgcagcgcgagtggctgccagcccgttcacaacaccacatgtgcggtgctctcagcccaaggggccctctgggagctgacaggaa

SEQ ID NO: 12040 - DNA, 122 bp, Homo sapiens
  misc_feature (61)..(62): /note="This region represents a CpG dinucleotide"
  misc_feature (61)..(61): /note="Nucleotide may be methylated to form 5-methylcytosine"
gggaaagtcctctctaagcaaacatatggacacgtggatcagtctctgctcctccacgggcgcctcctaaggcagtgtgccctttaccaaaaacacaacgttttcacacctattttaatttt

SEQ ID NO: 12041 - DNA, 122 bp, Homo sapiens
  misc_feature (61)..(62): /note="This region represents a CpG dinucleotide"
  misc_feature (61)..(61): /note="Nucleotide may be methylated to form 5-methylcytosine"
ctttaaaccttctcaggttcacccacatgaaacggctgtgctgagtgtgctgccggtgcccggggagcttctctgactgtgacccggcagaggcttctgtggcggtgcatgagcggccctac

SEQ ID NO: 12042 - DNA, 122 bp, Homo sapiens
  misc_feature (61)..(62): /note="This region represents a CpG dinucleotide"
  misc_feature (61)..(61): /note="Nucleotide may be methylated to form 5-methylcytosine"
gccggaacctccatcattcttgtgggtaaccacttgctacaacaaatgaccatgacctaccgtgggaggctggagaaatcttgcatttacttgtccgtgtatgccattttctcagttatcat

SEQ ID NO: 12043 - DNA, 122 bp, Homo sapiens
  misc_feature (61)..(62): /note="This region represents a CpG dinucleotide"
  misc_feature (61)..(61): /note="Nucleotide may be methylated to form 5-methylcytosine"
ggggcgagctgagctcgggcagagcctgcgcggctcagggacggtcactgtgtcctcacacgggcagaacgggctctgaaaacagccattaccagccattggctccattttccctggcgctg

SEQ ID NO: 12044 - DNA, 122 bp, Homo sapiens
  misc_feature (61)..(62): /note="This region represents a CpG dinucleotide"
  misc_feature (61)..(61): /note="Nucleotide may be methylated to form 5-methylcytosine"
ccaactccacagccaatgagctgtttgggtaaccccaagaccccactcccacacagcctacggccagcaaaggcatgcaggcaggattctagaaccttggcccggctttgggttgctgcctt

SEQ ID NO: 12045 - DNA, 122 bp, Homo sapiens
  misc_feature (61)..(62): /note="This region represents a CpG dinucleotide"
  misc_feature (61)..(61): /note="Nucleotide may be methylated to form 5-methylcytosine"
agttttcctaaaacataagcacactggttaagccagcaggttaactctgtggctctgacacgcccagtgtgcattcctgaccctgacacatcacacaagctgatgcctccccggacactcct

SEQ ID NO: 12046 - DNA, 122 bp, Homo sapiens
  misc_feature (61)..(62): /note="This region represents a CpG dinucleotide"
  misc_feature (61)..(61): /note="Nucleotide may be methylated to form 5-methylcytosine"
cttagggactgggaagtggcgttttctccaaccagcagctcttgggaggttgtgggggggcgggggggggggggcggtgcgggggcaaacccgtggctggggcgcttttctggcagaaaggg

SEQ ID NO: 12047 - DNA, 122 bp, Homo sapiens
  misc_feature (61)..(62): /note="This region represents a CpG dinucleotide"
  misc_feature (61)..(61): /note="Nucleotide may be methylated to form 5-methylcytosine"
tcacttcccatggagtggagaaaagcatgctgctctatatttgttccctacaacaggaagcgtgaaaacaggatttgctgccacatgtcaagtactcatgtgcctgtagaagaaaggggcca

SEQ ID NO: 12048 - DNA, 122 bp, Homo sapiens
  misc_feature (61)..(62): /note="This region represents a CpG dinucleotide"
  misc_feature (61)..(61): /note="Nucleotide may be methylated to form 5-methylcytosine"
aatgagtcagtaccaccctgctcttcatggcctctctgaggtcagcacctccaggatatccgttcacccaaccaggcagaggcaaggagtttagaaagtgaaattaactatggggtatacct

SEQ ID NO: 12049 - DNA, 122 bp, Homo sapiens
  misc_feature (61)..(62): /note="This region represents a CpG dinucleotide"
  misc_feature (61)..(61): /note="Nucleotide may be methylated to form 5-methylcytosine"
gagccagtggcctgccgtctcccagcactctgctattccaaggcctctgctctgacggttcgaaaagggatggtccctgtttctgatgccaattgcacggttttgtcttaacctttcttttt

SEQ ID NO: 12050 - DNA, 122 bp, Homo sapiens
  misc_feature (61)..(62): /note="This region represents a CpG dinucleotide"
  misc_feature (61)..(61): /note="Nucleotide may be methylated to form 5-methylcytosine"
atacctctaaatgttctctatgagcatgaccaactgattattgagattggcaggtgctagcgcccttcaatcagcttctcattgctgcacaatctggcttttctcttcttttcacagaatat

SEQ ID NO: 12051 - DNA, 122 bp, Homo sapiens
  misc_feature (61)..(62): /note="This region represents a CpG dinucleotide"
  misc_feature (61)..(61): /note="Nucleotide may be methylated to form 5-methylcytosine"
tggagagaattagtcaattcttcctggacattcgggagcttctgggtggagggaagactgcgaagcagaaacaaacagaaatcctagagaggcagtcatctgagcattcgtcacaggggcac

SEQ ID NO: 12052 - DNA, 122 bp, Homo sapiens
  misc_feature (61)..(62): /note="This region represents a CpG dinucleotide"
  misc_feature (61)..(61): /note="Nucleotide may be methylated to form 5-methylcytosine"
ttcagaaaccaaagttacacagctgtgaagtcaagattctaactcagtttttttgcttcgcggtataagctttgaatcaccttgcagtacttaaagctgcagcttcaagtgaatcatgataa

SEQ ID NO: 12053 - DNA, 122 bp, Homo sapiens
  misc_feature (61)..(62): /note="This region represents a CpG dinucleotide"
  misc_feature (61)..(61): /note="Nucleotide may be methylated to form 5-methylcytosine"
agtcactgagacaagatcaacttgtagatatgttccccttccttattgagatataacttacgtagagtgaagtgcctaaaatgtaactggctaatctgtatacgtgtatacgtccatgcaac

SEQ ID NO: 12054 - DNA, 122 bp, Homo sapiens
  misc_feature (61)..(62): /note="This region represents a CpG dinucleotide"
  misc_feature (61)..(61): /note="Nucleotide may be methylated to form 5-methylcytosine"
tggtgggctagcctgggaacctaaccatgtggacagacattctcatggaaagcagcctttcgcagtgcccactctgtgtcagctggaaacgccccacaccagccagcactttacacatgctg

SEQ ID NO: 12055 - DNA, 122 bp, Homo sapiens
  misc_feature (61)..(62): /note="This region represents a CpG dinucleotide"
  misc_feature (61)..(61): /note="Nucleotide may be methylated to form 5-methylcytosine"
tgtttttgcttcctcttcattcacttgaaaaaccaacttccttcagtaatattcattcaacgtcatttttgatgagattaatatttgccagacgctttcaaacaccaaggatacagtagtga

SEQ ID NO: 12056 - DNA, 122 bp, Homo sapiens
  misc_feature (61)..(62): /note="This region represents a CpG dinucleotide"
  misc_feature (61)..(61): /note="Nucleotide may be methylated to form 5-methylcytosine"
tgattgtaattcctccagtgttcataatttgtcttggaagctcagctgtattttacatgacgtgttttctgtagaattcctgagtacttgctcttgggatctgagccaagtgcacacaatag

SEQ ID NO: 12057 - DNA, 122 bp, Homo sapiens
  misc_feature (61)..(62): /note="This region represents a CpG dinucleotide"
  misc_feature (61)..(61): /note="Nucleotide may be methylated to form 5-methylcytosine"
agtatgacagtcacttaaataggaagtagataacttgctgtgataactagaaagcatcatcgttagatgaaggatgaaggcaccatgaagtgcttggacaaagagagtcagaaatgcatggt

SEQ ID NO: 12058 - DNA, 122 bp, Homo sapiens
  misc_feature (61)..(62): /note="This region represents a CpG dinucleotide"
  misc_feature (61)..(61): /note="Nucleotide may be methylated to form 5-methylcytosine"
tcttatgaggaaatctgtaggtgtttatgaggcagcaaatgccaaccagagaggaggaagcgctcagcaggaatgccataatagataatcctcacacatagtggagaacaaagggaggaatg

SEQ ID NO: 12059 - DNA, 122 bp, Homo sapiens
  misc_feature (61)..(62): /note="This region represents a CpG dinucleotide"
  misc_feature (61)..(61): /note="Nucleotide may be methylated to form 5-methylcytosine"
ctgtccagctagtgcctttctcagtgcctaatccaggatgtgcactcaaacctttttctccgggatgcatgaatgagagcaagtaaacaacttcagttcttttttcttttctttttttttaa

SEQ ID NO: 12060 - DNA, 122 bp, Homo sapiens
  misc_feature (61)..(62): /note="This region represents a CpG dinucleotide"
  misc_feature (61)..(61): /note="Nucleotide may be methylated to form 5-methylcytosine"
actctcttaactttagactgtctaattactcctcaaatgcactaagcagattctggccttcgctcttggtatcaccacatagctatgtgatttgtttccttactgtctccagatttctgcta

SEQ ID NO: 12061 - DNA, 122 bp, Homo sapiens
  misc_feature (61)..(62): /note="This region represents a CpG dinucleotide"
  misc_feature (61)..(61): /note="Nucleotide may be methylated to form 5-methylcytosine"
ggagacccttgctcatccctcctgctcctctaggaagccagacagagttggtcgcggtcccgtgactgtcactcagctgacacagccgcgcccggctcaccctccccctcctcttcagggtt

SEQ ID NO: 12062 - DNA, 122 bp, Homo sapiens
  misc_feature (61)..(62): /note="This region represents a CpG dinucleotide"
  misc_feature (61)..(61): /note="Nucleotide may be methylated to form 5-methylcytosine"
gggggcggggctgtcactccccaggagctgacccctgtcacctgtgcttagaagtgtctccgggaggcacagtgttttatcagtgttatctacaagcattttacagtgtagtttgttttttt

SEQ ID NO: 12063 - DNA, 122 bp, Homo sapiens
  misc_feature (61)..(62): /note="This region represents a CpG dinucleotide"
  misc_feature (61)..(61): /note="Nucleotide may be methylated to form 5-methylcytosine"
ttttcacatctctggaatctgataaagttgtgacccaataactagagagagcatgcattgcggagaataatgagtataaaaggtctgggtaaaagccagaggacaggaagctggatgcttat

SEQ ID NO: 12064 - DNA, 122 bp, Homo sapiens
  misc_feature (61)..(62): /note="This region represents a CpG dinucleotide"
  misc_feature (61)..(61): /note="Nucleotide may be methylated to form 5-methylcytosine"
atctgggaaatgtagtctgactggaaggtgactcatacagctaaaattcagggaagaaggcgagaatggataatggaaaacaaataggaatctctgtcacagtcagaagtcgaactgggatt

SEQ ID NO: 12065 - DNA, 122 bp, Homo sapiens
  misc_feature (61)..(62): /note="This region represents a CpG dinucleotide"
  misc_feature (61)..(61): /note="Nucleotide may be methylated to form 5-methylcytosine"
aaaaagccgggccacattctgctcagccaacatgttcccagaggaatgtgatttaacttccgcttttcacacagtcagaagcaacaccatagacctgtagggaaggtgatggccgcctggga

SEQ ID NO: 12066 - DNA, 122 bp, Homo sapiens
  misc_feature (61)..(62): /note="This region represents a CpG dinucleotide"
  misc_feature (61)..(61): /note="Nucleotide may be methylated to form 5-methylcytosine"
cattggaccacccccactcttattcctaaaacgaatctgaaaataattagcttgctttaacgggaagaatgaatgttagggaaccaccctgctgaactccattttgctgtcggctctgaata

SEQ ID NO: 12067 - DNA, 122 bp, Homo sapiens
  misc_feature (61)..(62): /note="This region represents a CpG dinucleotide"
  misc_feature (61)..(61): /note="Nucleotide may be methylated to form 5-methylcytosine"
cttcagacacatttggtacatccagaaatagatccaagaaatggggtggttgagtgggtccgcacgaaatgcttgattatgtcagcaacacccaacactgtctgttttccatttgttggttt

SEQ ID NO: 12068 - DNA, 122 bp, Homo sapiens
  misc_feature (61)..(62): /note="This region represents a CpG dinucleotide"
  misc_feature (61)..(61): /note="Nucleotide may be methylated to form 5-methylcytosine"
taagaccttttgagcctaggcccaaaactagcacaaaagctgtcatattcgcagttgatacggtctggctgtgtccccagccaaatctcaacttgaattgtatctcccagaattcccgtgtg

SEQ ID NO: 12069 - DNA, 122 bp, Homo sapiens
  misc_feature (61)..(62): /note="This region represents a CpG dinucleotide"
  misc_feature (61)..(61): /note="Nucleotide may be methylated to form 5-methylcytosine"
ccagggttgctgcttatcattctacaatccacagggcagctttccaaagaatttgctggccgcaaataccaacaggtctgagattaagaaaccctgttctagatgaatatacaccaaacttt

SEQ ID NO: 12070 - DNA, 122 bp, Homo sapiens
  misc_feature (61)..(62): /note="This region represents a CpG dinucleotide"
  misc_feature (61)..(61): /note="Nucleotide may be methylated to form 5-methylcytosine"
ttcttttgccaccacaggtattaaagcaccacatggtgacaagtgaatcacaaacacacgcgtacaggcacacccaagcacacagtgcctagaaacagctttttgttgtaaagtgtccaccc

SEQ ID NO: 12071 - DNA, 122 bp, Homo sapiens
  misc_feature (61)..(62): /note="This region represents a CpG dinucleotide"
  misc_feature (61)..(61): /note="Nucleotide may be methylated to form 5-methylcytosine"
ctcctggagccggagccagctcggcactggaaccggcgtcctctggtggcagagagagagcgctactggcgattttcggaccgaatcggcacgctcgtcagatccaagcaggcgggactggc

SEQ ID NO: 12072 - DNA, 122 bp, Homo sapiens
  misc_feature (61)..(62): /note="This region represents a CpG dinucleotide"
  misc_feature (61)..(61): /note="Nucleotide may be methylated to form 5-methylcytosine"
ctctgccggggagcgccagactcagatgaaaggtattatgacattcgagatgaataatgacgtaagaaggacttactctattgtatatcacggtgcagtatcaaaacattttgtcccatgag

SEQ ID NO: 12073 - DNA, 122 bp, Homo sapiens
  misc_feature (61)..(62): /note="This region represents a CpG dinucleotide"
  misc_feature (61)..(61): /note="Nucleotide may be methylated to form 5-methylcytosine"
caggaagtgttggagattaacctgcaagtacaccaaccacagaccatatcctggaaattacgtaggtttttttgtttttttagagacagggtctcgctatgttgcccaggctggtctcaaac

SEQ ID NO: 12074 - DNA, 122 bp, Homo sapiens
  misc_feature (61)..(62): /note="This region represents a CpG dinucleotide"
  misc_feature (61)..(61): /note="Nucleotide may be methylated to form 5-methylcytosine"
ctttggctgcgcggacttgttgcggtggctgggttgtgggtcctccggcgccgagggacccgagcttcctgggtacccggcaggctgcccgcccgctgggggctgggaaggggcgtgccaat

SEQ ID NO: 12075 - DNA, 122 bp, Homo sapiens
  misc_feature (61)..(62): /note="This region represents a CpG dinucleotide"
  misc_feature (61)..(61): /note="Nucleotide may be methylated to form 5-methylcytosine"
gaacacgtagctttgctaagagaagcatgaaatgtgagtagccacaaaccttaacaatcacgagaaccaacagcaaggaacagatagcaagtattcacaggagaccgtggatagggtcccat

SEQ ID NO: 12076 - DNA, 122 bp, Homo sapiens
  misc_feature (61)..(62): /note="This region represents a CpG dinucleotide"
  misc_feature (61)..(61): /note="Nucleotide may be methylated to form 5-methylcytosine"
tgcagtgccagcctcattaggtcggcctgcgtggtcctctgaaatgtacagttctgttgtcgtcactgtgtataaacagaacaaggagagaactgccttattcctgggcactggccttttta

SEQ ID NO: 12077 - DNA, 122 bp, Homo sapiens
  misc_feature (61)..(62): /note="This region represents a CpG dinucleotide"
  misc_feature (61)..(61): /note="Nucleotide may be methylated to form 5-methylcytosine"
agactttaagggaagtggcagcttctgccttggtctctgggagccctgagtcactcactccgtaagaagactgactggagagaccacatggagattacgtggggaagggagaagggcacact

SEQ ID NO: 12078 - DNA, 122 bp, Homo sapiens
  misc_feature (61)..(62): /note="This region represents a CpG dinucleotide"
  misc_feature (61)..(61): /note="Nucleotide may be methylated to form 5-methylcytosine"
gaacgccagcatccatacttttaaccactatgctgtgctctctctcatcatgagtcatgacgatgatcacgttagattgtgttagatgatgttagatcatgagtcatgatctaacatctagc

SEQ ID NO: 12079 - DNA, 122 bp, Homo sapiens
  misc_feature (61)..(62): /note="This region represents a CpG dinucleotide"
  misc_feature (61)..(61): /note="Nucleotide may be methylated to form 5-methylcytosine"
tacctcggcttagtcatctatagaataggagtaatagtggtatatacttgacagagatgtcgcattaaataattcatgtgaagtactccaagcagttgctgctttctcataagccttcgata

SEQ ID NO: 12080 - DNA, 122 bp, Homo sapiens
  misc_feature (61)..(62): /note="This region represents a CpG dinucleotide"
  misc_feature (61)..(61): /note="Nucleotide may be methylated to form 5-methylcytosine"
tggctggggacaaaaggctctggtggtgtatgagtcatcagcctgggactgctcatggcccggtctttgttcattactgctgttagcacacattctgttatacaagtaactatgacaatgcc

SEQ ID NO: 12081 - DNA, 122 bp, Homo sapiens
  misc_feature (61)..(62): /note="This region represents a CpG dinucleotide"
  misc_feature (61)..(61): /note="Nucleotide may be methylated to form 5-methylcytosine"
atggtacactaaaaatgagtgagatgacagtaaatgtgacagctcctgtctgtcatcagtcgtcttgccaccagaggacacagcccactcattctgagatgcggttcctcaaaatatctttt

SEQ ID NO: 12082 - DNA, 122 bp, Homo sapiens
  misc_feature (61)..(62): /note="This region represents a CpG dinucleotide"
  misc_feature (61)..(61): /note="Nucleotide may be methylated to form 5-methylcytosine"
ctggtccagaaacccaacacaaattcccctcagccacactcagggctccagtgcaattcacgtcttgcaaaatgactcctctaaccagctgaccagctcaccagacaggcctagacaagttt

SEQ ID NO: 12083 - DNA, 122 bp, Homo sapiens
  misc_feature (61)..(62): /note="This region represents a CpG dinucleotide"
  misc_feature (61)..(61): /note="Nucleotide may be methylated to form 5-methylcytosine"
acatgtcttgttttccccactagaccataagccacaagggggagggactcttgtcttatccgtcgtcattattcctgctgcttattgaaggtgttgcctgccacagagaagacctcagtaaa

SEQ ID NO: 12084 - DNA, 122 bp, Homo sapiens
  misc_feature (61)..(62): /note="This region represents a CpG dinucleotide"
  misc_feature (61)..(61): /note="Nucleotide may be methylated to form 5-methylcytosine"
gctgcgtcccgcgtggggcagcagaaggtccctaggcgcggggaggccatgggctgtgttcgcggacgcggctcgggtgtgccaggaccccgccggcctgcctgggtcatgtgctgggcggg

SEQ ID NO: 12085 - DNA, 122 bp, Homo sapiens
  misc_feature (61)..(62): /note="This region represents a CpG dinucleotide"
  misc_feature (61)..(61): /note="Nucleotide may be methylated to form 5-methylcytosine"
cttgtggctgcttctgcagataagctgttcggtgacctccatatttctaaatactgtggccgtattgctgtttcggtttttcagtttcaggtattatctagtgactttctgatagggaagtg

SEQ ID NO: 12086 - DNA, 122 bp, Homo sapiens
  misc_feature (61)..(62): /note="This region represents a CpG dinucleotide"
  misc_feature (61)..(61): /note="Nucleotide may be methylated to form 5-methylcytosine"
ctgatcaccatggcaacacacaggggtgggtactgtggtttctctgcctgaagacgcactcgtcaaagactacttggtgttacagaattctggtgcagtgaagcaacagttctgggacatat

SEQ ID NO: 12087 - DNA, 122 bp, Homo sapiens
  misc_feature (61)..(62): /note="This region represents a CpG dinucleotide"
  misc_feature (61)..(61): /note="Nucleotide may be methylated to form 5-methylcytosine"
agaggttctggatcagagccaaagggtgagctcagcaatggtcactacaagcctgatgaccgagaagatctaggtgagagaggagaagagctccaaagctggggctgagaggaacagaaaaa

SEQ ID NO: 12088 - DNA, 122 bp, Homo sapiens
  misc_feature (61)..(62): /note="This region represents a CpG dinucleotide"
  misc_feature (61)..(61): /note="Nucleotide may be methylated to form 5-methylcytosine"
tccaaagtgttgggattataagcatgagccaccatgcccagcccccatgtcctttctaatcgtcagagatcagatgactcagagatatacaaaggagaacaaaagcaaataaatcaccaggc

SEQ ID NO: 12089 - DNA, 122 bp, Homo sapiens
  misc_feature (61)..(62): /note="This region represents a CpG dinucleotide"
  misc_feature (61)..(61): /note="Nucleotide may be methylated to form 5-methylcytosine"
agtgtttatgatagccagttccattgtgctgtccttgagcctaagtgtaactcttaaggccggaaaagtctgtgtaaagctcatagaagagaagaaattgagcagagttgtcttagagcatt

SEQ ID NO: 12090 - DNA, 122 bp, Homo sapiens
  misc_feature (61)..(62): /note="This region represents a CpG dinucleotide"
  misc_feature (61)..(61): /note="Nucleotide may be methylated to form 5-methylcytosine"
acaaagcaggttgtaggcaaatgctacctattcaatgaaggccattttttctgacctcaccgtagctgctgccttgactcaccagagaattacagtgagtacaggtgaaaggaaagcaggaa

SEQ ID NO: 12091 - DNA, 122 bp, Homo sapiens
  misc_feature (61)..(62): /note="This region represents a CpG dinucleotide"
  misc_feature (61)..(61): /note="Nucleotide may be methylated to form 5-methylcytosine"
gctcccagagacatgcaccacaagggctgtggaccaatgtcctttcctctaacccctctccgctgcctcctgactgcaaaacacccatttctcccttgggagggtggggactctggctgatg

SEQ ID NO: 12092 - DNA, 122 bp, Homo sapiens
  misc_feature (61)..(62): /note="This region represents a CpG dinucleotide"
  misc_feature (61)..(61): /note="Nucleotide may be methylated to form 5-methylcytosine"
ctccagaaaaaaacatttggtttctaatgaggcctggaatcttattcttgacctggggagcggaatccctttttgcagtactcccgggccctctgttggggcctccccttcctctccagggt

SEQ ID NO: 12093 - DNA, 122 bp, Homo sapiens
  misc_feature (61)..(62): /note="This region represents a CpG dinucleotide"
  misc_feature (61)..(61): /note="Nucleotide may be methylated to form 5-methylcytosine"
ccccttatgacccctcgtcttttcctttttctgtcctacataactagcttattttcaatccgcttgtgggttgacgggcctgattggttaaaaacatcaggctgcagctagagcttaaactc

SEQ ID NO: 12094 - DNA, 122 bp, Homo sapiens
  misc_feature (61)..(62): /note="This region represents a CpG dinucleotide"
  misc_feature (61)..(61): /note="Nucleotide may be methylated to form 5-methylcytosine"
cccagggcgctgccagagccctgccggctaagggatggggaaacaaacaggtactcggtccgctctttaagtcccctacgtattttccgggagggctgaacggaaccacaatgtttttctag

SEQ ID NO: 12095 - DNA, 122 bp, Homo sapiens
  misc_feature (61)..(62): /note="This region represents a CpG dinucleotide"
  misc_feature (61)..(61): /note="Nucleotide may be methylated to form 5-methylcytosine"
aagactgttccttgaatttcccaattcaaaagcctcggtagagctgagggatgcttgatacgtcaacacagaccacaaaaggcagggcttttctaaagagattataattatatctacctttt

SEQ ID NO: 12096 - DNA, 122 bp, Homo sapiens
  misc_feature (61)..(62): /note="This region represents a CpG dinucleotide"
  misc_feature (61)..(61): /note="Nucleotide may be methylated to form 5-methylcytosine"
agacgtcataaaaggaaaagaatggaaaattttggaaaggaagttttctgagaccatttacgtgacaaagaagtcaggaaaatgtggcattgttgtgattatcttcatcatttcaggatctg

SEQ ID NO: 12097 - DNA, 122 bp, Homo sapiens
  misc_feature (61)..(62): /note="This region represents a CpG dinucleotide"
  misc_feature (61)..(61): /note="Nucleotide may be methylated to form 5-methylcytosine"
ggggcaggtcttagaccactagatgaaattagatacctttcccatgtgaggagtgtttcacgcaggcttatctccagtggcataatgtgtgctgtgtagccaggcctttccgcagcaccaga

SEQ ID NO: 12098 - DNA, 122 bp, Homo sapiens
  misc_feature (61)..(62): /note="This region represents a CpG dinucleotide"
  misc_feature (61)..(61): /note="Nucleotide may be methylated to form 5-methylcytosine"
tggacatgtttcctgtgatctaaatctgatgtaaggaaatgacaattgtgaaagacccagcgtgagagaatctgatgggagggtgggtcatcagggaccagctggcctggctgatgatgtat

SEQ ID NO: 12099 - DNA, 122 bp, Homo sapiens
  misc_feature (61)..(62): /note="This region represents a CpG dinucleotide"
  misc_feature (61)..(61): /note="Nucleotide may be methylated to form 5-methylcytosine"
gcaggagctgtggtagctcacccacactgcaatccatctgctgactcaacttgctagtatcgggcagcagccaggaccacagctcctccagctcctttgtgaccttttccttcagcttcttc

SEQ ID NO: 12100 - DNA, 122 bp, Homo sapiens
  misc_feature (61)..(62): /note="This region represents a CpG dinucleotide"
  misc_feature (61)..(61): /note="Nucleotide may be methylated to form 5-methylcytosine"
caaatagagcaggattgtaatcacagctactattttttgggcatgttaggacttttcacacgttatgtttagtcttttccatcatcctgtggtagggcagatattattttcctcttcacttt

SEQ ID NO: 12101 - DNA, 122 bp, Homo sapiens
  misc_feature (61)..(62): /note="This region represents a CpG dinucleotide"
  misc_feature (61)..(61): /note="Nucleotide may be methylated to form 5-methylcytosine"
aactcatctacttattttcatagtttcctgttagtgtaaaacaaatatgactccctcatacgaatatttaaagtgttgtagcaacctggagtgacggcaacacaagaattttgtaggattca

SEQ ID NO: 12102 - DNA, 122 bp, Homo sapiens
  misc_feature (61)..(62): /note="This region represents a CpG dinucleotide"
  misc_feature (61)..(61): /note="Nucleotide may be methylated to form 5-methylcytosine"
aggaggaggtaggagacagataacggaacaggtcaggacccctccattcccctatacatacgcataaatacaaacacagacacacccgagtgaatgacagggaccatcaggggacagattga

SEQ ID NO: 12103 - DNA, 122 bp, Homo sapiens
  misc_feature (61)..(62): /note="This region represents a CpG dinucleotide"
  misc_feature (61)..(61): /note="Nucleotide may be methylated to form 5-methylcytosine"
tgtacccttgagctctgtgcatacagtcttctccgtattttggatcactttccattggcacgatgtttgatcaaaatgctccctttccctgatcccggtgaggtgtaaccatgggtcacatt

SEQ ID NO: 12104 - DNA, 122 bp, Homo sapiens
  misc_feature (61)..(62): /note="This region represents a CpG dinucleotide"
  misc_feature (61)..(61): /note="Nucleotide may be methylated to form 5-methylcytosine"
cctggagagattacaaaggcccaactcttcctgttgtgtagagaacagaaccaattggtacgcacttggcaggccagagtttacattagccatgcagtaaagagtgaagaattctgacaggg

SEQ ID NO: 12105 - DNA, 122 bp, Homo sapiens
  misc_feature (61)..(62): /note="This region represents a CpG dinucleotide"
  misc_feature (61)..(61): /note="Nucleotide may be methylated to form 5-methylcytosine"
cgctggtgtggtttgtgagtaatccacaagtgatcacagtcagagcaacatctactccagcgaattcagggatgtctgtcccctgccccagtgactaatggcatttcaactgtcagattagg

SEQ ID NO: 12106 - DNA, 122 bp, Homo sapiens
  misc_feature (61)..(62): /note="This region represents a CpG dinucleotide"
  misc_feature (61)..(61): /note="Nucleotide may be methylated to form 5-methylcytosine"
ccgttttaaggtggttagtcatctgctaaattggctgaaatgcggattacccagttccttcgtcgtacagagttgcattctgaggagtggggctcggggatacagcccccagaaattctgaa

SEQ ID NO: 12107 - DNA, 122 bp, Homo sapiens
  misc_feature (61)..(62): /note="This region represents a CpG dinucleotide"
  misc_feature (61)..(61): /note="Nucleotide may be methylated to form 5-methylcytosine"
aaaatcttcaccacaatctgggtaatgaaaatacctgtcactccaaaagtttcctagtgtcgctttgtaatcctcccttctgctccactccccatccgcagataatcactggttttgactaa

SEQ ID NO: 12108 - DNA, 122 bp, Homo sapiens
  misc_feature (61)..(62): /note="This region represents a CpG dinucleotide"
  misc_feature (61)..(61): /note="Nucleotide may be methylated to form 5-methylcytosine"
cctgagtcttcatcagagcgttcaggcacttacggatacacttggagccgctggattgtgcgtgcagtggggtctgtgctcaaagagtgcagcttcgtgggggcagatgtgtcagtgcacct

SEQ ID NO: 12109 - DNA, 122 bp, Homo sapiens
  misc_feature (61)..(62): /note="This region represents a CpG dinucleotide"
  misc_feature (61)..(61): /note="Nucleotide may be methylated to form 5-methylcytosine"
aataatggaagctacagtcttatccagttcctttcaactatttacatagaataagccctccgaacgtgaggatgaattattgttcaacctatccacactaaacatcaaaaagccaacttagc

SEQ ID NO: 12110 - DNA, 122 bp, Homo sapiens
  misc_feature (61)..(62): /note="This region represents a CpG dinucleotide"
  misc_feature (61)..(61): /note="Nucleotide may be methylated to form 5-methylcytosine"
ggtatgcagtaggctaaaccatctaggtttatccaagtgctttctacacaatgatgaaatcgtttaatgataacatttcacagaatgtatcaccatgagatgatatatgactgtattctact

SEQ ID NO: 12111 - DNA, 122 bp, Homo sapiens
  misc_feature (61)..(62): /note="This region represents a CpG dinucleotide"
  misc_feature (61)..(61): /note="Nucleotide may be methylated to form 5-methylcytosine"
tactatccatatcacattttggcacgttctttcctacttatttttttgtgtgcatacatacgtagtttgcttaaacaaacataacctccttttcaatgggcagttcagtagaggcaattaat

SEQ ID NO: 12112 - DNA, 122 bp, Homo sapiens
  misc_feature (61)..(62): /note="This region represents a CpG dinucleotide"
  misc_feature (61)..(61): /note="Nucleotide may be methylated to form 5-methylcytosine"
gccaactttctctgatttctcattggccagaagtgtggcctatgctctgcctaacccaatcgccagcaagggaattaggccatgatgattggcttagaccagtcaaaatttgccctctggaa

SEQ ID NO: 12113 - DNA, 122 bp, Homo sapiens
  misc_feature (61)..(62): /note="This region represents a CpG dinucleotide"
  misc_feature (61)..(61): /note="Nucleotide may be methylated to form 5-methylcytosine"
aaagaaagcctaccttccctgaaaccattctgtgaccagaaatgggagtagttaaagctccgtgactacatcattctctgatcggttactttcattcaatgttataacactccttgctgtaa

SEQ ID NO: 12114 - DNA, 122 bp, Homo sapiens
  misc_feature (61)..(62): /note="This region represents a CpG dinucleotide"
  misc_feature (61)..(61): /note="Nucleotide may be methylated to form 5-methylcytosine"
aaagtggcttgaggtctcagaggcagctctctcagcctgtaccctccatcctttcattcacgtccatgtagacattatcactcagggaagtgagtgttccatactggggaagtccccttggg

SEQ ID NO: 12115 - DNA, 122 bp, Homo sapiens
  misc_feature (61)..(62): /note="This region represents a CpG dinucleotide"
  misc_feature (61)..(61): /note="Nucleotide may be methylated to form 5-methylcytosine"
ggactatatagctaattgtgtgttttatgggatgtcttaatgaggaaaagcaccacatctcgtcatcatgtcacttctgttgtgtcttgttaaagtgacctcattcacaaagcaaatgctga

SEQ ID NO: 12116 - DNA, 122 bp, Homo sapiens
  misc_feature (61)..(62): /note="This region represents a CpG dinucleotide"
  misc_feature (61)..(61): /note="Nucleotide may be methylated to form 5-methylcytosine"
tatattcctgtcagccccactaaaatgtcagttcagtggccgggtgtggtagctcacgaccgtaatcccagcactttgggaggccgaggcagatggatcacctgagaggtcagaagttcgag

SEQ ID NO: 12117 - DNA, 122 bp, Homo sapiens
  misc_feature (61)..(62): /note="This region represents a CpG dinucleotide"
  misc_feature (61)..(61): /note="Nucleotide may be methylated to form 5-methylcytosine"
acatgtgtcatggtggttttctgcacagattaacccatcacctaggtattatgcccagcacgcattagctatttttcctgatactctccccctcacccaccatgtccatgtgttctcactgt

SEQ ID NO: 12118 - DNA, 122 bp, Homo sapiens
  misc_feature (61)..(62): /note="This region represents a CpG dinucleotide"
  misc_feature (61)..(61): /note="Nucleotide may be methylated to form 5-methylcytosine"
caatctaaagtctatggtttaatctcttacttaaatacattcatttgcatttgagtaactcgacagtgatgcagggcaggcgacccccggaaactggggtttagcccacgagggttattggc

SEQ ID NO: 12119 - DNA, 122 bp, Homo sapiens
  misc_feature (61)..(62): /note="This region represents a CpG dinucleotide"
  misc_feature (61)..(61): /note="Nucleotide may be methylated to form 5-methylcytosine"
agctaaagggtgcctcttactggacggcaaacgaatgacagcgtttatttcaagtaaacgcgatccaggcatgggatatataaataattacatatatgtataaataattatatatatatata

SEQ ID NO: 12120 - DNA, 122 bp, Homo sapiens
  misc_feature (61)..(62): /note="This region represents a CpG dinucleotide"
  misc_feature (61)..(61): /note="Nucleotide may be methylated to form 5-methylcytosine"
cttggcctttgggctgcgtgtgtctggcatgcagcgtggtgtgctgatcatctctgcctccgcgtgtcttggggactcagtgagagcaaatgggaaggttctctgctgatggggcagttgtg

SEQ ID NO: 12121 - DNA, 122 bp, Homo sapiens
  misc_feature (61)..(62): /note="This region represents a CpG dinucleotide"
  misc_feature (61)..(61): /note="Nucleotide may be methylated to form 5-methylcytosine"
caatcagattagaatcaaatctctagaatctaatctatataaaacaaaacataagttggtcgttaagcaccaaaactgaccactaagcagttttcgattgtcaatacctggttatagtcagg

SEQ ID NO: 12122 - DNA, 122 bp, Homo sapiens
  misc_feature (61)..(62): /note="This region represents a CpG dinucleotide"
  misc_feature (61)..(61): /note="Nucleotide may be methylated to form 5-methylcytosine"
tggttttttttccccaatttttaaaagatcattcatttaaaaattttagatttagctgggcgtggtggcttatgcctgttatggtttgaattgtcttccccacaaaagatgtggaaggctgg

SEQ ID NO: 12123 - DNA, 122 bp, Homo sapiens
  misc_feature (61)..(62): /note="This region represents a CpG dinucleotide"
  misc_feature (61)..(61): /note="Nucleotide may be methylated to form 5-methylcytosine"
agaaacaactatcaacttcaaattatttgggtttaccttataaactccatcttagcgaaccgtcagtatgaacagtaagacagtacgaaaagtagttgcatttactgagcacctactatgtg

SEQ ID NO: 12124 - DNA, 122 bp, Homo sapiens
  misc_feature (61)..(62): /note="This region represents a CpG dinucleotide"
  misc_feature (61)..(61): /note="Nucleotide may be methylated to form 5-methylcytosine"
cactctcactcattttgagacagagtgagaccctgtttcaaaataaaagatggttattcacgttgcaaaactaatttgcaaaacgattcatcaaaaggtttctcaaatagcagctctatttc

SEQ ID NO: 12125 - DNA, 122 bp, Homo sapiens
  misc_feature (61)..(62): /note="This region represents a CpG dinucleotide"
  misc_feature (61)..(61): /note="Nucleotide may be methylated to form 5-methylcytosine"
agctgagggacaccaaaacctgccttgtcacgtccccgccctgggttcccatggttgagtcgctctcactcacaagctgtgtggcttggggcaagggcttaacttgccaggcctctctttcc

SEQ ID NO: 12126 - DNA, 122 bp, Homo sapiens
  misc_feature (61)..(62): /note="This region represents a CpG dinucleotide"
  misc_feature (61)..(61): /note="Nucleotide may be methylated to form 5-methylcytosine"
aaaggcagaactgtgattacttttgccccaaactaatagaacaaaaatcagtgtcactcacgttatacaaagtaaaaatattcaaaatattaataacaataaaaaatagaattatatggatg

SEQ ID NO: 12127 - DNA, 122 bp, Homo sapiens
  misc_feature (61)..(62): /note="This region represents a CpG dinucleotide"
  misc_feature (61)..(61): /note="Nucleotide may be methylated to form 5-methylcytosine"
ctgcagggtttcagcttggcagccaggctctgaactgcagtgctgtcaggcaggtgaacccgctggcaccacaatccagaaaacatatctcctgattcctcaggtgttctacacgtttgaat

SEQ ID NO: 12128 - DNA, 122 bp, Homo sapiens
  misc_feature (61)..(62): /note="This region represents a CpG dinucleotide"
  misc_feature (61)..(61): /note="Nucleotide may be methylated to form 5-methylcytosine"
cctggccaggatggagttcttgtcacaacaaggactcggggcatcttcaggaccagcaagcgtggagatggggtggggtctggcccagacttcagacatggcagaaggctctgaaaacgaag

SEQ ID NO: 12129 - DNA, 122 bp, Homo sapiens
  misc_feature (61)..(62): /note="This region represents a CpG dinucleotide"
  misc_feature (61)..(61): /note="Nucleotide may be methylated to form 5-methylcytosine"
gatgtgtgagagggaggtacagtgggtcccgggtaggctgcaggggtgtgtgcgcgcgaacgtgttgggtccgggagactgagagtgtgtgtgcaagatttcgggagggagctttttctccg

SEQ ID NO: 12130 - DNA, 122 bp, Homo sapiens
  misc_feature (61)..(62): /note="This region represents a CpG dinucleotide"
  misc_feature (61)..(61): /note="Nucleotide may be methylated to form 5-methylcytosine"
gcatgcataaaattcttaaaacagcttagcaactctgatttctgtgtgtgttgttgttgtcgtcattattatcaagcatatatgctataccacattttggatagcagagaaggaaggggaaa

SEQ ID NO: 12131 - DNA, 122 bp, Homo sapiens
  misc_feature (61)..(62): /note="This region represents a CpG dinucleotide"
  misc_feature (61)..(61): /note="Nucleotide may be methylated to form 5-methylcytosine"
agacctcaaaacgtcatctgaagcaataaagaaaggactaacattcctgcacctcagtcacgggctccgaaggtatcagtgggattagagcacagtaaataacagatgctcatcagaatgag

SEQ ID NO: 12132 - DNA, 122 bp, Homo sapiens
  misc_feature (61)..(62): /note="This region represents a CpG dinucleotide"
  misc_feature (61)..(61): /note="Nucleotide may be methylated to form 5-methylcytosine"
ccgacagaagtaaccgttccacttggcatggaatgtgtccctcagatacttccttgatagcggtgggtcccttgaccacttgataattcctagctcagaaactcagcggtcagggaggctct

SEQ ID NO: 12133 - DNA, 122 bp, Homo sapiens
  misc_feature (61)..(62): /note="This region represents a CpG dinucleotide"
  misc_feature (61)..(61): /note="Nucleotide may be methylated to form 5-methylcytosine"
tcaatccacatgcttcttccccagacctccttaactgcaattttgcagtcttgctcttcacgagtccctgagcaatcagctgaactgttcactactgcctgggattcctgacctcaggccac

SEQ ID NO: 12134 - DNA, 122 bp, Homo sapiens
  misc_feature (61)..(62): /note="This region represents a CpG dinucleotide"
  misc_feature (61)..(61): /note="Nucleotide may be methylated to form 5-methylcytosine"
gcagtcccaccccgggcccttcccagtccatctccagcccatccgatgcagcggctgacacgccagcatggcagattagttggctatcttaaggctctttgagaaaggcaaatgcggataag

SEQ ID NO: 12135 - DNA, 122 bp, Homo sapiens
  misc_feature (61)..(62): /note="This region represents a CpG dinucleotide"
  misc_feature (61)..(61): /note="Nucleotide may be methylated to form 5-methylcytosine"
tgtgaaaagcaaacagttctgcagtccacttcaaggcagcctgacatctgctctggacagcggtctgagtcatttgtgaattggcaggctttgttcctagaagcctagctagagccagggct

SEQ ID NO: 12136 - DNA, 122 bp, Homo sapiens
  misc_feature (61)..(62): /note="This region represents a CpG dinucleotide"
  misc_feature (61)..(61): /note="Nucleotide may be methylated to form 5-methylcytosine"
ggcatgtagctccttttcctgcaataacacagctgcctccttcccagtacaattttgtcccgtctcctgtatgcccaagaaccatacaaacaagtaaagatgtacggcagaatttgcagtca

SEQ ID NO: 12137 - DNA, 122 bp, Homo sapiens
  misc_feature (61)..(62): /note="This region represents a CpG dinucleotide"
  misc_feature (61)..(61): /note="Nucleotide may be methylated to form 5-methylcytosine"
tgtcatatcccaggtgctgaagagagaatagggatccggcgagatgagggaggagacatacgttaggaagcacaaatgcctagaagagtcatgctaataaggcacctgtagtgagcattttc

SEQ ID NO: 12138 - DNA, 122 bp, Homo sapiens
  misc_feature (61)..(62): /note="This region represents a CpG dinucleotide"
  misc_feature (61)..(61): /note="Nucleotide may be methylated to form 5-methylcytosine"
ctgccacaggaagccttgaggtctgggatgcttgggacggtgtggtgatctgggtgcagacggcttggaactagcctaacaagtcaggcctgttgccagtgacagagacccacctgcgcaga

SEQ ID NO: 12139 - DNA, 122 bp, Homo sapiens
  misc_feature (61)..(62): /note="This region represents a CpG dinucleotide"
  misc_feature (61)..(61): /note="Nucleotide may be methylated to form 5-methylcytosine"
ttggtaatttgggtacaccaagtctccagttaatgatagataatcagcctttgggtcattcggtcattctcttattacaaacccctcctgctctctctgatctcctttcaaactaaatttca

SEQ ID NO: 12140 - DNA, 122 bp, Homo sapiens
  misc_feature (61)..(62): /note="This region represents a CpG dinucleotide"
  misc_feature (61)..(61): /note="Nucleotide may be methylated to form 5-methylcytosine"
tatatatctggagacattcagctctgtacacacagataagccttaagcttgcagagactgcgtagtattcagttgtccccataccacaatgtgctgtgtctgtcccctattaatggacgtgg

SEQ ID NO: 12141 - DNA, 122 bp, Homo sapiens
  misc_feature (61)..(62): /note="This region represents a CpG dinucleotide"
  misc_feature (61)..(61): /note="Nucleotide may be methylated to form 5-methylcytosine"
agaagggctgctacaactgaagggatttgtgagctcaaaatccctcctgctatctctctacgagcaagtgcaaaaactgctgacatttgttcttgtgtgtgaaaccagttttgaagttacaa

SEQ ID NO: 12142 - DNA, 122 bp, Homo sapiens
  misc_feature (61)..(62): /note="This region represents a CpG dinucleotide"
  misc_feature (61)..(61): /note="Nucleotide may be methylated to form 5-methylcytosine"
gcactcaagtaagcaatgacagccagctagacatcaaaatccatgttctcacttcatggccgtacagataaatttcatttcctagcctctcttgcagttagatgtgggcatatgactaagct

SEQ ID NO: 12143 - DNA, 122 bp, Homo sapiens
  misc_feature (61)..(62): /note="This region represents a CpG dinucleotide"
  misc_feature (61)..(61): /note="Nucleotide may be methylated to form 5-methylcytosine"
tgccatcttcatataagagctacttttcacctttgcagtttcctttgtggttcctgtgctcgtgtatgtatatatatatatttagagtattgcaatttttctgtttcttagtttcttttact

SEQ ID NO: 12144 - DNA, 122 bp, Homo sapiens
  misc_feature (61)..(62): /note="This region represents a CpG dinucleotide"
  misc_feature (61)..(61): /note="Nucleotide may be methylated to form 5-methylcytosine"
tatacaggtttgtagcctaggagtaacagactataccatacagcttagatgtgtagtaggcggtaccatgtagtttgtataagtacactctatgatgtttgcactatgatgaaattgcgtaa

SEQ ID NO: 12145 - DNA, 122 bp, Homo sapiens
  misc_feature (61)..(62): /note="This region represents a CpG dinucleotide"
  misc_feature (61)..(61): /note="Nucleotide may be methylated to form 5-methylcytosine"
tccttgagagatcatttcctggatgtggacttcaagatccaggcttttccttcagtgctgcgtgggctctccgctgcctcccctgtcatccggggctgcgtgtcgtgagctgcgcccgtctt

SEQ ID NO: 12146 - DNA, 122 bp, Homo sapiens
  misc_feature (61)..(62): /note="This region represents a CpG dinucleotide"
  misc_feature (61)..(61): /note="Nucleotide may be methylated to form 5-methylcytosine"
gtttttctgctttgttgttgattaattcttcccctgacctgtatactggctttgcacagacgaggggtttcaccagtcagcctggctgggagttctagaccctctcaaatggtttcaaatct

SEQ ID NO: 12147 - DNA, 122 bp, Homo sapiens
  misc_feature (61)..(62): /note="This region represents a CpG dinucleotide"
  misc_feature (61)..(61): /note="Nucleotide may be methylated to form 5-methylcytosine"
ttttaaaaattaggtatgtattacaaaaatgcacacgcacgctctacagtttcataatgccgtcaagtctgcttcttggtaccacttggttagtgcatccgaatcacaggactaaggcttgc

SEQ ID NO: 12148 - DNA, 122 bp, Homo sapiens
  misc_feature (61)..(62): /note="This region represents a CpG dinucleotide"
  misc_feature (61)..(61): /note="Nucleotide may be methylated to form 5-methylcytosine"
gggtgtctcctatgttgaaatcaagggagtgaatgttgattttaatgcctggtttgtaaacgcttgggaaagggattactacaggccagttttgattcatactatgtcatgcctgaaaaaaa

SEQ ID NO: 12149 - DNA, 122 bp, Homo sapiens
  misc_feature (61)..(62): /note="This region represents a CpG dinucleotide"
  misc_feature (61)..(61): /note="Nucleotide may be methylated to form 5-methylcytosine"
accatgattgatgaagacgaaggtgtacccataaatatgggaatgcaccaagatttatagcggttaaaacaatagaaactgccaacaatgtagtaatgctgagagagataagttgcattaac

SEQ ID NO: 12150 - DNA, 122 bp, Homo sapiens
  misc_feature (61)..(62): /note="This region represents a CpG dinucleotide"
  misc_feature (61)..(61): /note="Nucleotide may be methylated to form 5-methylcytosine"
ggccctagcccaggggccgcatagcctggactctgacagcctcctgtaggaattctgatccgcaggtgagggtccatgcagattctctgctgtgtttctgggaggcgaggagttggcaggag

SEQ ID NO: 12151 - DNA, 122 bp, Homo sapiens
  misc_feature (61)..(62): /note="This region represents a CpG dinucleotide"
  misc_feature (61)..(61): /note="Nucleotide may be methylated to form 5-methylcytosine"
agagggcaaggtgtgactcaaccaactttatccagtgcaagcactttgtaggattagctccgagagccctatggggtaggcacagctgtcactgttttagagatgagaaaattgaggtgcaa

SEQ ID NO: 12152 - DNA, 122 bp, Homo sapiens
  misc_feature (61)..(62): /note="This region represents a CpG dinucleotide"
  misc_feature (61)..(61): /note="Nucleotide may be methylated to form 5-methylcytosine"
gaagttaatggttcaatcataaagttgtttatgttgaacttgcttaagatacttgggtaacgattgaaggacattttaggaagagcactcaaaatgcagtggattggagaaaaacagaacta

SEQ ID NO: 12153 - DNA, 122 bp, Homo sapiens
  misc_feature (61)..(62): /note="This region represents a CpG dinucleotide"
  misc_feature (61)..(61): /note="Nucleotide may be methylated to form 5-methylcytosine"
gacctcaagtgattcacccgcctcagcctcccacagtgtggtgattacagatgtgagccacggcacctggcccacttgtaatacttttaatgcttttgctttatgttggcttttccatgatc

SEQ ID NO: 12154 - DNA, 122 bp, Homo sapiens
  misc_feature (61)..(62): /note="This region represents a CpG dinucleotide"
  misc_feature (61)..(61): /note="Nucleotide may be methylated to form 5-methylcytosine"
ttaaacacagacaacacttactctgagtgtcctcacacaccagctgtgtggctaagatgacgcaaatctctaacagtgtttgaacactataaatcattccataaaggtaaaataaataattt

SEQ ID NO: 12155 - DNA, 122 bp, Homo sapiens
  misc_feature (61)..(62): /note="This region represents a CpG dinucleotide"
  misc_feature (61)..(61): /note="Nucleotide may be methylated to form 5-methylcytosine"
ggcctatctcacagccacagcatagtattttcttttttttcttgctgtgactgcaccttacgccatagatggcatccaggacgcagagcagtcagtatttaggtactgtttttcacattcct

SEQ ID NO: 12156 - DNA, 122 bp, Homo sapiens
  misc_feature (61)..(62): /note="This region represents a CpG dinucleotide"
  misc_feature (61)..(61): /note="Nucleotide may be methylated to form 5-methylcytosine"
gaactgaccaaaatctagatcacagattcatggagtataaaaagctgactttcccaggcccgtcttttcctgggggcagtctccctttggcccgatgccctggcccaccctatatggtgggt

SEQ ID NO: 12157 - DNA, 122 bp, Homo sapiens
  misc_feature (61)..(62): /note="This region represents a CpG dinucleotide"
  misc_feature (61)..(61): /note="Nucleotide may be methylated to form 5-methylcytosine"
actatgattatcttccttctgcatattaggaaactgagagaggatacgtgacttacccaacgtcacaaggctaacaagtgttggtacaggaatttggacccaggtccatgtgactccagacc

SEQ ID NO: 12158 - DNA, 122 bp, Homo sapiens
  misc_feature (61)..(62): /note="This region represents a CpG dinucleotide"
  misc_feature (61)..(61): /note="Nucleotide may be methylated to form 5-methylcytosine"
ttcccttcctgaagaactagtccaaaagtcattatgaaaccaactttgcaaaattatgaccgtgaaagaaatcagacctaaccgaccctatcttgcttctaacccttaagctgccctggttc

SEQ ID NO: 12159 - DNA, 122 bp, Homo sapiens
  misc_feature (61)..(62): /note="This region represents a CpG dinucleotide"
  misc_feature (61)..(61): /note="Nucleotide may be methylated to form 5-methylcytosine"
gtcagtcatttcagcattgcttttcctatgaccttagtagcccttgtctgcttgatctcacgccgtttgaattttgctagctgccaccttcaaccacttccctctgttttttattttcactt

SEQ ID NO: 12160 - DNA, 122 bp, Homo sapiens
  misc_feature (61)..(62): /note="This region represents a CpG dinucleotide"
  misc_feature (61)..(61): /note="Nucleotide may be methylated to form 5-methylcytosine"
aagtgacttcctacagctgcccagctggcacatggcacagccagaatagaatcctgctcacgggattccaaatccaaaactctcccagtaacaacaatggtggtggccacagcaacaccaat

SEQ ID NO: 12161 - DNA, 122 bp, Homo sapiens
  misc_feature (61)..(62): /note="This region represents a CpG dinucleotide"
  misc_feature (61)..(61): /note="Nucleotide may be methylated to form 5-methylcytosine"
ctatattcacacagttgtgactgtggacacgcaaaatgcctgaggccctgcgtccaatcccggaagcacagttcctgggaggagtcacttctataatagccgtatcttccctcctcgaggct

SEQ ID NO: 12162 - DNA, 122 bp, Homo sapiens
  misc_feature (61)..(62): /note="This region represents a CpG dinucleotide"
  misc_feature (61)..(61): /note="Nucleotide may be methylated to form 5-methylcytosine"
cccgctccccggagccccggcaccggcgctggccgactaccacgagtgcacggcctgccgcgtgagcttccacagcctcgaggcctacctggcgcacaagaagtactcgtgccccgctgcgc

SEQ ID NO: 12163 - DNA, 122 bp, Homo sapiens
  misc_feature (61)..(62): /note="This region represents a CpG dinucleotide"
  misc_feature (61)..(61): /note="Nucleotide may be methylated to form 5-methylcytosine"
ttatctcatttacacttaacctattatcatggatttaaaactattacatggcttatgtcacgtactagtattaacctcatgaggtaggtactatcattttccccattttatggctgaggaat

SEQ ID NO: 12164 - DNA, 122 bp, Homo sapiens
  misc_feature (61)..(62): /note="This region represents a CpG dinucleotide"
  misc_feature (61)..(61): /note="Nucleotide may be methylated to form 5-methylcytosine"
tgactcccctggttctcacaggcgctcagggaccgggtgggaggaggagaggaggaggtgcggagattccctccgtcagaaaagaaaaagggttcaggaagcgaggcagcaggaggaggggt

SEQ ID NO: 12165 - DNA, 122 bp, Homo sapiens
  misc_feature (61)..(62): /note="This region represents a CpG dinucleotide"
  misc_feature (61)..(61): /note="Nucleotide may be methylated to form 5-methylcytosine"
gattgaattcctagtatgaattgtgtgagagctttaataaaaatatctttgcagttcttacgggttttgataagctgacattgcacgtgctcaagaaaatgaaggtgataatttacagcaca

SEQ ID NO: 12166 - DNA, 122 bp, Homo sapiens
  misc_feature (61)..(62): /note="This region represents a CpG dinucleotide"
  misc_feature (61)..(61): /note="Nucleotide may be methylated to form 5-methylcytosine"
ttttctttaaaacatttttgcgggcctgaggtacagaatacaccatgcctgctgggcaagcgggctccggttccaggaaatccttcggtccccagcaaactaggccagttagttgttctgtt

SEQ ID NO: 12167 - DNA, 122 bp, Homo sapiens
  misc_feature (61)..(62): /note="This region represents a CpG dinucleotide"
  misc_feature (61)..(61): /note="Nucleotide may be methylated to form 5-methylcytosine"
cagagacagaggaaggggaggcacgggggcggggggcggggttagcgcagtgcctggacacgcccactgccccgaggaggccccgcccacaatctccgggccagcctgcagggaggacccgc

SEQ ID NO: 12168 - DNA, 122 bp, Homo sapiens
  misc_feature (61)..(62): /note="This region represents a CpG dinucleotide"
  misc_feature (61)..(61): /note="Nucleotide may be methylated to form 5-methylcytosine"
cacacaccccctcacattcacacatataggttcacaatcacactccgttacagacacacacgcagagtgatacacatctttggaaacacactccaggcagagacgcactgtctcttacacac

SEQ ID NO: 12169 - DNA, 122 bp, Homo sapiens
  misc_feature (61)..(62): /note="This region represents a CpG dinucleotide"
  misc_feature (61)..(61): /note="Nucleotide may be methylated to form 5-methylcytosine"
atttgtttttatctcttattcactgacatggcttgtttctgtgtccccacccaaatctcacgtcaaattgtagtccccagtgttagtcacctggtgggaggtgactgaagtatggaggtgga

SEQ ID NO: 12170 - DNA, 122 bp, Homo sapiens
  misc_feature (61)..(62): /note="This region represents a CpG dinucleotide"
  misc_feature (61)..(61): /note="Nucleotide may be methylated to form 5-methylcytosine"
gatttcacccattgtcctatgaagcccttttcctaatctgggatctgattcacaatcacacgtggcatttagttgtcatgtttccctggtccccgttaatctggaatagtctctccatcttc

SEQ ID NO: 12171 - DNA, 122 bp, Homo sapiens
  misc_feature (61)..(62): /note="This region represents a CpG dinucleotide"
  misc_feature (61)..(61): /note="Nucleotide may be methylated to form 5-methylcytosine"
gaatccagccccttggcatgggacctggagcctcgactacacagcatcttctgggtctggcgtctgccagcacctgatctctttcctcattcccagctttgtgacacttctcaacttgcggc

SEQ ID NO: 12172 - DNA, 122 bp, Homo sapiens
  misc_feature (61)..(62): /note="This region represents a CpG dinucleotide"
  misc_feature (61)..(61): /note="Nucleotide may be methylated to form 5-methylcytosine"
ttactataaaagtagagaaaagaagatactgttttaaaaatatatggtatagcactgttacgtgaattgatttcttaccttttggagccgcatgatgtcgctgtctaccatgaagttatagc

SEQ ID NO: 12173 - DNA, 122 bp, Homo sapiens
  misc_feature (61)..(62): /note="This region represents a CpG dinucleotide"
  misc_feature (61)..(61): /note="Nucleotide may be methylated to form 5-methylcytosine"
agtatattaggataagaggccctaccctttcccatctcacttcctcatagaaatctcctacgactgatcaagatggtcatgcctcagttcaaactggacagggtcttagaatgtgacctctc

SEQ ID NO: 12174 - DNA, 122 bp, Homo sapiens
  misc_feature (61)..(62): /note="This region represents a CpG dinucleotide"
  misc_feature (61)..(61): /note="Nucleotide may be methylated to form 5-methylcytosine"
acattttatatgctacctgcccactagtcacttaatagctgtcttggttatcagattgaccgtcactgtattgcagtgcttgtgtttaaccctcattttacttaataatggccctaaagtgc

SEQ ID NO: 12175 - DNA, 122 bp, Homo sapiens
  misc_feature (61)..(62): /note="This region represents a CpG dinucleotide"
  misc_feature (61)..(61): /note="Nucleotide may be methylated to form 5-methylcytosine"
gccactcctggggaagggcacaagcagcagtcacacgtcgcactgaagtggctggatggacgccagagagtccagaggcaggtgagggggtgtcccccagaccatgagctccagagaacagg

SEQ ID NO: 12176 - DNA, 122 bp, Homo sapiens
  misc_feature (61)..(62): /note="This region represents a CpG dinucleotide"
  misc_feature (61)..(61): /note="Nucleotide may be methylated to form 5-methylcytosine"
ctgcagtgtctcactgagcaccctaagcactcacccgtcaccctctggttccttggggcccggtgctggccttggaacactggtcccagtactcaggcagtccaggaaatagtctgtttggc

SEQ ID NO: 12177 - DNA, 122 bp, Homo sapiens
  misc_feature (61)..(62): /note="This region represents a CpG dinucleotide"
  misc_feature (61)..(61): /note="Nucleotide may be methylated to form 5-methylcytosine"
accacgccaggcagccaggccagaactcaccacaccaggaagccaggccaggagtcaccacgccaggcagccagggcactgagcgcatgacctatgctgactcatttaatcctcctgaccac

SEQ ID NO: 12178 - DNA, 122 bp, Homo sapiens
  misc_feature (61)..(62): /note="This region represents a CpG dinucleotide"
  misc_feature (61)..(61): /note="Nucleotide may be methylated to form 5-methylcytosine"
ggaatgcaaatccgtgtctcccagcccagacctaatgagtcacaaactctggctggagcacgaagtatgtgtttgaataaattctccaggtgattttgatgcacgcagcatgctaacattta

SEQ ID NO: 12179 - DNA, 122 bp, Homo sapiens
  misc_feature (61)..(62): /note="This region represents a CpG dinucleotide"
  misc_feature (61)..(61): /note="Nucleotide may be methylated to form 5-methylcytosine"
gaaggccaggaagaccaaaggagtcattcagacttttctgaattcttccttcatgtcaggcgctgtcctaggtgctgaatatagaatggtgatcaaaatagtcaaaaaatccctgccctcca

SEQ ID NO: 12180 - DNA, 122 bp, Homo sapiens
  misc_feature (61)..(62): /note="This region represents a CpG dinucleotide"
  misc_feature (61)..(61): /note="Nucleotide may be methylated to form 5-methylcytosine"
tcatttcctgaatatcctatggcaaccaccccctcaccctacatgcagctgccagggatccgtggatgcctcaatatagacatgactcagaagagaaaacttttgagtcccatttatataca

SEQ ID NO: 12181 - DNA, 122 bp, Homo sapiens
  misc_feature (61)..(62): /note="This region represents a CpG dinucleotide"
  misc_feature (61)..(61): /note="Nucleotide may be methylated to form 5-methylcytosine"
ccttgccagcagattctgagttttggcttcccccagctttgctcagtgacatgatgagtccgaatcatttctacagattccccagagacaggagccagcttttactttttctcttgcagcat

SEQ ID NO: 12182 - DNA, 122 bp, Homo sapiens
  misc_feature (61)..(62): /note="This region represents a CpG dinucleotide"
  misc_feature (61)..(61): /note="Nucleotide may be methylated to form 5-methylcytosine"
acacacacacccttccgggacatagatagtggtagagtgagtgactgtccactccatgcccgagcaggtctccaggcattcagagcacctgcttgcctggttcagcagcctgagtcacccca

SEQ ID NO: 12183 - DNA, 122 bp, Homo sapiens
  misc_feature (61)..(62): /note="This region represents a CpG dinucleotide"
  misc_feature (61)..(61): /note="Nucleotide may be methylated to form 5-methylcytosine"
gggggctgcccgcggggggttgggtcattgtcttttagaatttgggagcctttgaaaagccgtgggccctcccaccgctattgtgcgggggaagatgtagcagcttcttctccgaaccaacc

SEQ ID NO: 12184 - DNA, 122 bp, Homo sapiens
  misc_feature (61)..(62): /note="This region represents a CpG dinucleotide"
  misc_feature (61)..(61): /note="Nucleotide may be methylated to form 5-methylcytosine"
gtcaacacctggcttcacattctagatctctttgcctgtctgtcttctgccgcatgagagcgtgagctctgtgagggcagggacttgtgtgaactggattgcaccccagtgcctggaacagg

SEQ ID NO: 12185 - DNA, 122 bp, Homo sapiens
  misc_feature (61)..(62): /note="This region represents a CpG dinucleotide"
  misc_feature (61)..(61): /note="Nucleotide may be methylated to form 5-methylcytosine"
taaaaataattgcaggcaccaaagttataaacagggaaggcaggatgctagctggaaatgcgcagcactagggagctaatttgttgttacagattatatatctgcaccctgcttggagaagt

SEQ ID NO: 12186 - DNA, 122 bp, Homo sapiens
  misc_feature (61)..(62): /note="This region represents a CpG dinucleotide"
  misc_feature (61)..(61): /note="Nucleotide may be methylated to form 5-methylcytosine"
agtggggtgtctttgtgtggggaactgactgatgctactttcagggatgacaatagctgccgaaaagttcgagatggatgaaggtttgttattccatcatgattttgctcccaggtttaatg

SEQ ID NO: 12187 - DNA, 122 bp, Homo sapiens
  misc_feature (61)..(62): /note="This region represents a CpG dinucleotide"
  misc_feature (61)..(61): /note="Nucleotide may be methylated to form 5-methylcytosine"
atttagcattatagccataggcctgggctggcagtggtaagacttaatgctctatgagctcggatggggtggagaaggtttgttatgtccatgccagctggattccattctaatcaaagact

SEQ ID NO: 12188 - DNA, 122 bp, Homo sapiens
  misc_feature (61)..(62): /note="This region represents a CpG dinucleotide"
  misc_feature (61)..(61): /note="Nucleotide may be methylated to form 5-methylcytosine"
atttcagttgccacatccataaaatgggatcatagcaggactactggtgtcacagagttacgtgaggtttaaataagttaccttaaaggacttagtacagtacctggtatactatgtggctt

SEQ ID NO: 12189 - DNA, 122 bp, Homo sapiens
  misc_feature (61)..(62): /note="This region represents a CpG dinucleotide"
  misc_feature (61)..(61): /note="Nucleotide may be methylated to form 5-methylcytosine"
accatgttggccaggatggtctagatcgcttgactttgtgatccacccaccttggcctcccgaagtactgggaattacagatgtgagccaccacacccggccaagaccattgttcttaagca

SEQ ID NO: 12190 - DNA, 122 bp, Homo sapiens
  misc_feature (61)..(62): /note="This region represents a CpG dinucleotide"
  misc_feature (61)..(61): /note="Nucleotide may be methylated to form 5-methylcytosine"
ggtcttctccgtgagcaggcactccagcaggtacagaatcgtttggatcaccgtgatctccggcactggcgtgatcttcttgaacccaaagcgcaacttgtccaggcacgtgggcaggtact

SEQ ID NO: 12191 - DNA, 122 bp, Homo sapiens
  misc_feature (61)..(62): /note="This region represents a CpG dinucleotide"
  misc_feature (61)..(61): /note="Nucleotide may be methylated to form 5-methylcytosine"
tacacagacagtactctctctacatggaagtaaattagaaatcagtaaatgagagatacacgtcaaatccacaagtacctgttacagcagcacgtagactaatattggaacgatacagagat

SEQ ID NO: 12192 - DNA, 122 bp, Homo sapiens
  misc_feature (61)..(62): /note="This region represents a CpG dinucleotide"
  misc_feature (61)..(61): /note="Nucleotide may be methylated to form 5-methylcytosine"
gaggagctgcggcgcgcccctctcaccgcgattgttcacttgccaggcgccacgtgtgggcgacgtcactgggctttatgctttcatcgccgctatctgcctacgtgagctgctctcctccc

SEQ ID NO: 12193 - DNA, 122 bp, Homo sapiens
  misc_feature (61)..(62): /note="This region represents a CpG dinucleotide"
  misc_feature (61)..(61): /note="Nucleotide may be methylated to form 5-methylcytosine"
tgagtcagcttctgatagctgagcctcaaaacctcaggtgtctctctcttccatcatttacgcaagagtgagaggttaggtcagaccctcattggcacaattgttttagctcagtggttgat

SEQ ID NO: 12194 - DNA, 122 bp, Homo sapiens
  misc_feature (61)..(62): /note="This region represents a CpG dinucleotide"
  misc_feature (61)..(61): /note="Nucleotide may be methylated to form 5-methylcytosine"
caggggtggagtgggcggtgcttgcgccaagagggtgagcctgagtgtgggcggggcgtgcgataagaggctcgctcggtagcgctcttcgcagagccgtatttgtgcgctacgccgcagcc

SEQ ID NO: 12195 - DNA, 122 bp, Homo sapiens
  misc_feature (61)..(62): /note="This region represents a CpG dinucleotide"
  misc_feature (61)..(61): /note="Nucleotide may be methylated to form 5-methylcytosine"
aaggatgaaacacagagtggattacgcaaggtgaatctggtcagcccgggcctgaggtcacgtctgactcccagcaatggtgttttgcttggagacttctactgccctcttggcccctctgt

SEQ ID NO: 12196 - DNA, 122 bp, Homo sapiens
  misc_feature (61)..(62): /note="This region represents a CpG dinucleotide"
  misc_feature (61)..(61): /note="Nucleotide may be methylated to form 5-methylcytosine"
ctcaagcaatccgctcacgtcaacctccccaaatgctgggattacaggcgtgagccaccgcgccaggcctgagtaatcctaatcacaggattttaaaaagaaacttcctgcgccacccatta

SEQ ID NO: 12197 - DNA, 122 bp, Homo sapiens
  misc_feature (61)..(62): /note="This region represents a CpG dinucleotide"
  misc_feature (61)..(61): /note="Nucleotide may be methylated to form 5-methylcytosine"
catcactgaaattacagctttcttctttttaaaactggtatttgttataaaactaaagagcgaatcaagaaaagcataattattactgattattacaggattattactgaaaaagaaatgta

SEQ ID NO: 12198 - DNA, 122 bp, Homo sapiens
  misc_feature (61)..(62): /note="This region represents a CpG dinucleotide"
  misc_feature (61)..(61): /note="Nucleotide may be methylated to form 5-methylcytosine"
ctacagccacgcggcaggccagggcaccggcctctactccaccttcacctacatgaaccccgctcagcgccccatgtacacccccatcgccgacacctctggggtcccttccatcccgcaga

SEQ ID NO: 12199 - DNA, 122 bp, Homo sapiens
  misc_feature (61)..(62): /note="This region represents a CpG dinucleotide"
  misc_feature (61)..(61): /note="Nucleotide may be methylated to form 5-methylcytosine"
gaaggaaaagaaagtagttcaagctgacgatcagttagatcagttcttacaatggagacacgtttaccatctggcatctttcagcatctaagggagacagatctgcctggagatagggagtc

SEQ ID NO: 12200 - DNA, 122 bp, Homo sapiens
  misc_feature (61)..(62): /note="This region represents a CpG dinucleotide"
  misc_feature (61)..(61): /note="Nucleotide may be methylated to form 5-methylcytosine"
gctccccagcctgtgtagattctgctgtaagtgactcttctctgaaagactggcgcgaggcggctgcttctgactcctgtttcagtttaccctctgtgtgaaatctgtaactatccagcttc

SEQ ID NO: 12201 - DNA, 122 bp, Homo sapiens
  misc_feature (61)..(62): /note="This region represents a CpG dinucleotide"
  misc_feature (61)..(61): /note="Nucleotide may be methylated to form 5-methylcytosine"
gctggtcgaggactgggttccgtggctgctgtttcttaatcactcagcttaaaaagctgtcgagtgctgtgtaagtcatcaccccaaatgtctcttggaaaattccacctgtgacattctga

SEQ ID NO: 12202 - DNA, 122 bp, Homo sapiens
  misc_feature (61)..(62): /note="This region represents a CpG dinucleotide"
  misc_feature (61)..(61): /note="Nucleotide may be methylated to form 5-methylcytosine"
aaaccagcggggggttcggttaaaccagcggggggttcggtaacaagggacttttgtcagcgggtagtgaaattcatcagatttccaagctgctgctgttgatgctcctaaggaagcagaca

SEQ ID NO: 12203 - DNA, 122 bp, Homo sapiens
  misc_feature (61)..(62): /note="This region represents a CpG dinucleotide"
  misc_feature (61)..(61): /note="Nucleotide may be methylated to form 5-methylcytosine"
ccagtgcctagaatagtgcctgacacaaagcaaataattaatacgcactgaatgagcaaacgacagacaggcattagctcatttcctgtagtcttgccggggtaggtctgctgcagctttat

SEQ ID NO: 12204 - DNA, 122 bp, Homo sapiens
  misc_feature (61)..(62): /note="This region represents a CpG dinucleotide"
  misc_feature (61)..(61): /note="Nucleotide may be methylated to form 5-methylcytosine"
tatgggaattaaatgagaaagcatgtgccaagttagtacattgcagccacaaaataatggcggtggaggtagcttaaattgagataattagctataatgatgatgataataatgacaaccag

SEQ ID NO: 12205 - DNA, 122 bp, Homo sapiens
  misc_feature (61)..(62): /note="This region represents a CpG dinucleotide"
  misc_feature (61)..(61): /note="Nucleotide may be methylated to form 5-methylcytosine"
ctcagtaagcaaacttacctgaggccaggttgttgcacaagacgagatcattgcacaagacgaggttgcataagatgatgtcgtgtcacggtgaggtttctgctggtgaggagtgtggctgc

SEQ ID NO: 12206 - DNA, 122 bp, Homo sapiens
  misc_feature (61)..(62): /note="This region represents a CpG dinucleotide"
  misc_feature (61)..(61): /note="Nucleotide may be methylated to form 5-methylcytosine"
acgggtgtatttgggagctgaggggccataccacctggtgcacatccacagcagcagcggcgtcctgcaggtgcaccatgcagactcactgagaacagctgcgtcagccacccccaccacac

SEQ ID NO: 12207 - DNA, 122 bp, Homo sapiens
  misc_feature (61)..(62): /note="This region represents a CpG dinucleotide"
  misc_feature (61)..(61): /note="Nucleotide may be methylated to form 5-methylcytosine"
atgccttgacctgccacttgatgtcatgggataactgagagcccactaccttgaagtctccgtgaagacacagtccaccgcctcaaaacactccactgatgcctccaaccccactgacctca

SEQ ID NO: 12208 - DNA, 122 bp, Homo sapiens
  misc_feature (61)..(62): /note="This region represents a CpG dinucleotide"
  misc_feature (61)..(61): /note="Nucleotide may be methylated to form 5-methylcytosine"
ttgtgtcaaccttatttctgtttcccctgctatactgttaactccagaggacagggtctgcgtctgtcttgctcattgctttatccccagcaccttacatgataccttagagtcagcagctt

SEQ ID NO: 12209 - DNA, 122 bp, Homo sapiens
  misc_feature (61)..(62): /note="This region represents a CpG dinucleotide"
  misc_feature (61)..(61): /note="Nucleotide may be methylated to form 5-methylcytosine"
cacttcctctcccaagtattagagcaagttgtatctccaaagggatctaaggaagctctacgctgtgtccttaagcacctagggtatgaacccagggagtcttgtccctggtgtccctccca

SEQ ID NO: 12210 - DNA, 122 bp, Homo sapiens
  misc_feature (61)..(62): /note="This region represents a CpG dinucleotide"
  misc_feature (61)..(61): /note="Nucleotide may be methylated to form 5-methylcytosine"
gccaggcaccacaaaacagcactgtacaaacatggtctcctttaatcctcacagtatcctcgtcagggagatgcagtgttatccctgataaggttctattgtcatccccatttcacaaatga

SEQ ID NO: 12211 - DNA, 122 bp, Homo sapiens
  misc_feature (61)..(62): /note="This region represents a CpG dinucleotide"
  misc_feature (61)..(61): /note="Nucleotide may be methylated to form 5-methylcytosine"
cccaatgtgaatagcaattctgggagggccccaaacaaggtaatatcatacacattttaccgtgtagcttttaagctctaattagaccaacactcagtgtagagtttcagcaatgctttgtt

SEQ ID NO: 12212 - DNA, 122 bp, Homo sapiens
  misc_feature (61)..(62): /note="This region represents a CpG dinucleotide"
  misc_feature (61)..(61): /note="Nucleotide may be methylated to form 5-methylcytosine"
aagggaacaacactgactgagtcagagctagactcaaagctagagtctactggctgatgtcgtgggagaggaagaagagatgagcgggccttgaattcgtttaacattcagcaaaaatgtat

SEQ ID NO: 12213 - DNA, 122 bp, Homo sapiens
  misc_feature (61)..(62): /note="This region represents a CpG dinucleotide"
  misc_feature (61)..(61): /note="Nucleotide may be methylated to form 5-methylcytosine"
ccaacgagaagcagttaccgaaaccacaactagcagaatgacttgcttaaatattagccacgtattttctcaagatctttgtgaaaatcccaagtttatgatgatagaccacaggagtataa

SEQ ID NO: 12214 - DNA, 122 bp, Homo sapiens
  misc_feature (61)..(62): /note="This region represents a CpG dinucleotide"
  misc_feature (61)..(61): /note="Nucleotide may be methylated to form 5-methylcytosine"
tagagaaggcaccacagaaactgaaatttagactgtccagtctccgccctgtcctcaggtcgtggtttctctggcttaagaaagctgaagtgaaattggcattgttaaaagcattaccttca

SEQ ID NO: 12215 - DNA, 122 bp, Homo sapiens
  misc_feature (61)..(62): /note="This region represents a CpG dinucleotide"
  misc_feature (61)..(61): /note="Nucleotide may be methylated to form 5-methylcytosine"
aagacaggagttaacccaagaatgacaaacttccttgacttggcgatttagaaaaaattacggcccagtttggtcagctaagaggcacacccaagaaacagctttgaagtatgtaggggtaa

SEQ ID NO: 12216 - DNA, 122 bp, Homo sapiens
  misc_feature (61)..(62): /note="This region represents a CpG dinucleotide"
  misc_feature (61)..(61): /note="Nucleotide may be methylated to form 5-methylcytosine"
gtcgattccctgttaacatggatatcagttctgcctcacatttcccacttgaggttgaggcgtactggagacaacacctcagaccatctgaaccccatcagtggacgaaaatggggctgtta

SEQ ID NO: 12217 - DNA, 122 bp, Homo sapiens
  misc_feature (61)..(62): /note="This region represents a CpG dinucleotide"
  misc_feature (61)..(61): /note="Nucleotide may be methylated to form 5-methylcytosine"
cctgttttacaggacactcacagctcctggcacctggcagcttttggggtttcctctccccgccttgcacaggttgactttatttccagatcttttcaaaactcctgtggtaacacatcaaa

SEQ ID NO: 12218 - DNA, 122 bp, Homo sapiens
  misc_feature (61)..(62): /note="This region represents a CpG dinucleotide"
  misc_feature (61)..(61): /note="Nucleotide may be methylated to form 5-methylcytosine"
gctgtggtttgagctggatggcagaggcaagagccagatcatgaaagccattgttatggacgctgaattcagtggcacatgtggaagaacaaggaaatgtgtgaaagacaggtgagattgtc

SEQ ID NO: 12219 - DNA, 122 bp, Homo sapiens
  misc_feature (61)..(62): /note="This region represents a CpG dinucleotide"
  misc_feature (61)..(61): /note="Nucleotide may be methylated to form 5-methylcytosine"
ggagagttcccattgaaattcattcgggagcctgttaacagctgttgtttccagtagggacgggcaacagagagaacaataaataactcaaatataaaatgcctttaccttctttgttctac

SEQ ID NO: 12220 - DNA, 122 bp, Homo sapiens
  misc_feature (61)..(62): /note="This region represents a CpG dinucleotide"
  misc_feature (61)..(61): /note="Nucleotide may be methylated to form 5-methylcytosine"
ctcaagtgatccgcctgcctccgcctcccaaagtgctgggattacaggcgtgagccaccacgcctggcccatactggaatatttataggtgaaatgatgtgtctgggattgctttaaaatat

SEQ ID NO: 12221 - DNA, 122 bp, Homo sapiens
  misc_feature (61)..(62): /note="This region represents a CpG dinucleotide"
  misc_feature (61)..(61): /note="Nucleotide may be methylated to form 5-methylcytosine"
tctgatgtttgcacaaccacaaaattgcctaacaatgtgtttctcaaaacacattcttgtcgttaagcaacccaggactgtatttcatttctttttttattgccgagtagtattccatggta

SEQ ID NO: 12222 - DNA, 122 bp, Homo sapiens
  misc_feature (61)..(62): /note="This region represents a CpG dinucleotide"
  misc_feature (61)..(61): /note="Nucleotide may be methylated to form 5-methylcytosine"
cctggaggtggcggtccagaccacctgacccgattcatgtctggcaacgaggccgcccagcggcatcagaaacttgaacatgcatccatctgtgccccaagtgctagaggagctggagaaga

SEQ ID NO: 12223 - DNA, 122 bp, Homo sapiens
  misc_feature (61)..(62): /note="This region represents a CpG dinucleotide"
  misc_feature (61)..(61): /note="Nucleotide may be methylated to form 5-methylcytosine"
tcacgcagtctgaatccaacctgaagtctgcttgtcaagccattagccttatccctgtggcgtctgcatggagaaggaaagccttttttacctccaaattctcacaaaaatccagcgtggga

SEQ ID NO: 12224 - DNA, 122 bp, Homo sapiens
  misc_feature (61)..(62): /note="This region represents a CpG dinucleotide"
  misc_feature (61)..(61): /note="Nucleotide may be methylated to form 5-methylcytosine"
ccaggctgactcacctggtctgggggcacccaatgacctgctgtttgtaccaaacattgccgtccacagagccctcaccctcccttcttttccttctttatctttcattaaaaaaaatctaa

SEQ ID NO: 12225 - DNA, 122 bp, Homo sapiens
  misc_feature (61)..(62): /note="This region represents a CpG dinucleotide"
  misc_feature (61)..(61): /note="Nucleotide may be methylated to form 5-methylcytosine"
ccccagcctcagctgatggtactaagtttctgcagcccttcatgcttagggcattactttcgttttactattttccttgtggaaggaaacagttcaagagttacacttggctttttctgcca

SEQ ID NO: 12226 - DNA, 122 bp, Homo sapiens
  misc_feature (61)..(62): /note="This region represents a CpG dinucleotide"
  misc_feature (61)..(61): /note="Nucleotide may be methylated to form 5-methylcytosine"
tcctgtccatgtagtcacctctgtcaacagcagctgcgatgactcttcttatagaacacacgcagtcaccttcacactgctgagtgtttgttgaatgactgtatgagtgagcaaagaagttt

SEQ ID NO: 12227 - DNA, 122 bp, Homo sapiens
  misc_feature (61)..(62): /note="This region represents a CpG dinucleotide"
  misc_feature (61)..(61): /note="Nucleotide may be methylated to form 5-methylcytosine"
gccagatgccgtggaagcagaagctgctctgacgctgtcgtggctgtgagttggggaactcgggccttgaaactcactcaatcaagagctgctcctgccttcccttcttttggtcaggtggg

SEQ ID NO: 12228 - DNA, 122 bp, Homo sapiens
  misc_feature (61)..(62): /note="This region represents a CpG dinucleotide"
  misc_feature (61)..(61): /note="Nucleotide may be methylated to form 5-methylcytosine"
gaagttacacaaccagtgagaaaggaatcttccctgggcaatgagatgagggctgactcacgatctcagctcttaggaatggctctccagctgctgacagaggccacatgggttcagccatg

SEQ ID NO: 12229 - DNA, 122 bp, Homo sapiens
  misc_feature (61)..(62): /note="This region represents a CpG dinucleotide"
  misc_feature (61)..(61): /note="Nucleotide may be methylated to form 5-methylcytosine"
tatgggtaatgatgactttcttcctctccttatctgtattttctaacttttttcaatgaccgtgttagttatgtaattttaagtttttttcttaaataaaaagaatcttcccaaattaccag

SEQ ID NO: 12230 - DNA, 122 bp, Homo sapiens
  misc_feature (61)..(62): /note="This region represents a CpG dinucleotide"
  misc_feature (61)..(61): /note="Nucleotide may be methylated to form 5-methylcytosine"
ctggggaggtgcattgtagctttgtaaatatctcattccccatcaaactttcagtttactcgttcatttattgctatcagtatgaactcatagtttcctgttttattcaataagctgtgatt

SEQ ID NO: 12231 - DNA, 122 bp, Homo sapiens
  misc_feature (61)..(62): /note="This region represents a CpG dinucleotide"
  misc_feature (61)..(61): /note="Nucleotide may be methylated to form 5-methylcytosine"
aattaataatgtctcacttaaaaagcaatgtcaactaacaggagaaaacatgaatgactacgagtcaatgctggacacaggaaatgacctagatgtcaccagagacagctcagagaccttga

SEQ ID NO: 12232 - DNA, 122 bp, Homo sapiens
  misc_feature (61)..(62): /note="This region represents a CpG dinucleotide"
  misc_feature (61)..(61): /note="Nucleotide may be methylated to form 5-methylcytosine"
cagcctgcattgcttgtaggagttggggcacgagccttgcccagggggaaggagtgtaggcggtcttttatcggctaggatgtaagaccgaaacccagtcatgggttttgatgacccatgac

SEQ ID NO: 12233 - DNA, 122 bp, Homo sapiens
  misc_feature (61)..(62): /note="This region represents a CpG dinucleotide"
  misc_feature (61)..(61): /note="Nucleotide may be methylated to form 5-methylcytosine"
ctaacagaaagaagctaatctgggagatcctcttgagtagattagccattccatgcaaaacgtcacagtggcaatcagaaaaggcatctctgaaatgtacaatgaagaaggacgttaaaaga

SEQ ID NO: 12234 - DNA, 122 bp, Homo sapiens
  misc_feature (61)..(62): /note="This region represents a CpG dinucleotide"
  misc_feature (61)..(61): /note="Nucleotide may be methylated to form 5-methylcytosine"
gacctttcccctcctgggaagtttccatgcagtactgaatcactcattctcttaggtccacgtcatatccttcctattttgtgcagggcccctttttgttttattttctccttttcacccta

SEQ ID NO: 12235 - DNA, 122 bp, Homo sapiens
  misc_feature (61)..(62): /note="This region represents a CpG dinucleotide"
  misc_feature (61)..(61): /note="Nucleotide may be methylated to form 5-methylcytosine"
tggtgtcaatgggatcaaggttctttctgcttgtcatttgaagactccaagacacattaacggtattcacaaataagagattttaagcttcaaattagaagaaggtttaacaatatggggaa

SEQ ID NO: 12236 - DNA, 122 bp, Homo sapiens
  misc_feature (61)..(62): /note="This region represents a CpG dinucleotide"
  misc_feature (61)..(61): /note="Nucleotide may be methylated to form 5-methylcytosine"
actagacagtgaaacctcagaacctaggcttttaaccactgtgtttcacaccctcccggacgaattggcacagaaggatatatttagtcattttaagataatgtcagagtttcacagtgaaa

SEQ ID NO: 12237 - DNA, 122 bp, Homo sapiens
  misc_feature (61)..(62): /note="This region represents a CpG dinucleotide"
  misc_feature (61)..(61): /note="Nucleotide may be methylated to form 5-methylcytosine"
gtgtgtctgcggggctctatgcaaatgtatgtgcatgctcgtgtgcccttgtgtgtgtcccgctgtgtatgtggaacctgaaaggtcaggttgtatttgctcattttccacaatgaaatcat

SEQ ID NO: 12238 - DNA, 122 bp, Homo sapiens
  misc_feature (61)..(62): /note="This region represents a CpG dinucleotide"
  misc_feature (61)..(61): /note="Nucleotide may be methylated to form 5-methylcytosine"
tggctcttgggacactccctcttagaacccagccaccatgctggagacagatcaggtaagcgtgccgttcaacagccctagctaagctcccagctgactgccagcattagccaccaatgtgg

SEQ ID NO: 12239 - DNA, 122 bp, Homo sapiens
  misc_feature (61)..(62): /note="This region represents a CpG dinucleotide"
  misc_feature (61)..(61): /note="Nucleotide may be methylated to form 5-methylcytosine"
tgactcattccaccttacaaaataccatatgtgggcatcactagtccaatccaagttgcacggtggcaggatcagtgctctctcttttcagtcacacctctagtgagaggtgagtcctctgc

SEQ ID NO: 12240 - DNA, 122 bp, Homo sapiens
  misc_feature (61)..(62): /note="This region represents a CpG dinucleotide"
  misc_feature (61)..(61): /note="Nucleotide may be methylated to form 5-methylcytosine"
tgttggaaaagggagtggagttttctagattttaatgtctccccagctgtgtactgtttgcgtatgcagacatagtgacacatctcctgcaagaaatacttcctgttagagtgtttttcttt

SEQ ID NO: 12241 - DNA, 122 bp, Homo sapiens
  misc_feature (61)..(62): /note="This region represents a CpG dinucleotide"
  misc_feature (61)..(61): /note="Nucleotide may be methylated to form 5-methylcytosine"
ccagggacaccctggtattgctctcatcaacaaaggccaagtaaaaatcccagtcatcaccgcaactgcatctcacctacaggccccacttaatggcatggatgccaaactgcatgactcac

SEQ ID NO: 12242 - DNA, 122 bp, Homo sapiens
  misc_feature (61)..(62): /note="This region represents a CpG dinucleotide"
  misc_feature (61)..(61): /note="Nucleotide may be methylated to form 5-methylcytosine"
cctctacctgttccctggattcttctctctttagacctgtcaccttgaagaaagcatgatcgattccaaacatcactgtaggcaaatcaccatagtacttgaactgagttactgtgaagaaa

SEQ ID NO: 12243 - DNA, 122 bp, Homo sapiens
  misc_feature (61)..(62): /note="This region represents a CpG dinucleotide"
  misc_feature (61)..(61): /note="Nucleotide may be methylated to form 5-methylcytosine"
acatttcaattgcagtcgcttttcccacaaatcagctttatcagctccattagcagttgacgccaataaaaatctgaggtcaacttcctgctggttggttcttaagtgtcagaaataatata

SEQ ID NO: 12244 - DNA, 122 bp, Homo sapiens
  misc_feature (61)..(62): /note="This region represents a CpG dinucleotide"
  misc_feature (61)..(61): /note="Nucleotide may be methylated to form 5-methylcytosine"
ggaggaactggctatcctaaaggtgattttaaaccggggtagctagagcccaaagaagggcgaaaccaggactaactgccccatagcatgaggggcagcgcctgtaaaattacataggattt

SEQ ID NO: 12245 - DNA, 122 bp, Homo sapiens
  misc_feature (61)..(62): /note="This region represents a CpG dinucleotide"
  misc_feature (61)..(61): /note="Nucleotide may be methylated to form 5-methylcytosine"
tgaacagaagtcaaaccacctgttgtcccctcctttacatgggaagaacaaaagatcacacggttacctaagaccttctagaggtgtggagcaaagtggagacctccaccctcagtataggc

SEQ ID NO: 12246 - DNA, 122 bp, Homo sapiens
  misc_feature (61)..(62): /note="This region represents a CpG dinucleotide"
  misc_feature (61)..(61): /note="Nucleotide may be methylated to form 5-methylcytosine"
caaagcgggagaaaaagcaagtgagcaaaacaggctaacacagggacgcgttcaaatacacgataccatcgacaggaaaacaagccatgctgccccaggcatcctgtgtgacgctgactatt

SEQ ID NO: 12247 - DNA, 122 bp, Homo sapiens
  misc_feature (61)..(62): /note="This region represents a CpG dinucleotide"
  misc_feature (61)..(61): /note="Nucleotide may be methylated to form 5-methylcytosine"
cctggctagaacagagagctgggctgaagtgaaataggatatgtagtgtgacaggtgtagcggagcccgattatgaagcatttcaacgtgatgtaacaggaaacagtgccttagtttttgat

SEQ ID NO: 12248 - DNA, 122 bp, Homo sapiens
  misc_feature (61)..(62): /note="This region represents a CpG dinucleotide"
  misc_feature (61)..(61): /note="Nucleotide may be methylated to form 5-methylcytosine"
aaaccaagtgagattgcacaaggggctctcacttcctgtgcttgtgagcatggctttcagcgtgtgctaaccacagctcctaagtacatggcccacattgagtttcatctgtgtctagattc

SEQ ID NO: 12249 - DNA, 122 bp, Homo sapiens
  misc_feature (61)..(62): /note="This region represents a CpG dinucleotide"
  misc_feature (61)..(61): /note="Nucleotide may be methylated to form 5-methylcytosine"
gtgtgggtctcttccctggaacgcggggttgagagggcagcctctactcccggaaggccccgcccccagacgccaatcaccaccgctaccccgccccgcccccagcggagccagactggggg

SEQ ID NO: 12250 - DNA, 122 bp, Homo sapiens
  misc_feature (61)..(62): /note="This region represents a CpG dinucleotide"
  misc_feature (61)..(61): /note="Nucleotide may be methylated to form 5-methylcytosine"
tcactgcggccggggaaacccactcccaggactcagcccggaagaggccctgaaggggagcggagactgggcgctggggtgggggcgggggcgccgagcctcaacttcccgcgtctgctgga

SEQ ID NO: 12251 - DNA, 122 bp, Homo sapiens
  misc_feature (61)..(62): /note="This region represents a CpG dinucleotide"
  misc_feature (61)..(61): /note="Nucleotide may be methylated to form 5-methylcytosine"
gagctcaacagggacctaattaactgacagttggtctgattgccaagctgaggggcggggcggggaggggggcggtcagttgctgcttggctcacgtagcaaggagggcaacttttcatttc

SEQ ID NO: 12252 - DNA, 122 bp, Homo sapiens
  misc_feature (61)..(62): /note="This region represents a CpG dinucleotide"
  misc_feature (61)..(61): /note="Nucleotide may be methylated to form 5-methylcytosine"
tttccagtactccccacttgacagcctctcaaacacttaggaagtcactttgtcctcccacgcagccatctctgtgttagataggaaaggaacaaatcttatgaggaggagtttaaaagaaa

SEQ ID NO: 12253 - DNA, 122 bp, Homo sapiens
  misc_feature (61)..(62): /note="This region represents a CpG dinucleotide"
  misc_feature (61)..(61): /note="Nucleotide may be methylated to form 5-methylcytosine"
aagctaacagagatagctagaaagtggccaggtacaacttgatctagggtcctcctggctcgtttctgtgctctctcatgatggacactgatgattgttttggggtgaggggcatggaagca

SEQ ID NO: 12254 - DNA, 122 bp, Homo sapiens
  misc_feature (61)..(62): /note="This region represents a CpG dinucleotide"
  misc_feature (61)..(61): /note="Nucleotide may be methylated to form 5-methylcytosine"
ccacattttagactttctgactctgtatttttcttttatctcattctggattctctttatcgtttattactttgattttttaaaaatgtgatcattaagtaagggatattactgacacgttc

SEQ ID NO: 12255 - DNA, 122 bp, Homo sapiens
  misc_feature (61)..(62): /note="This region represents a CpG dinucleotide"
  misc_feature (61)..(61): /note="Nucleotide may be methylated to form 5-methylcytosine"
gtacaatggcgcagtctcggctcacggcaacctctcccaatttttgagctgaaaaaaaaccgaggctcagaggtgtcaacttcccgaagctcacaaagttaatgatcaatgtccatataaag

SEQ ID NO: 12256 - DNA, 122 bp, Homo sapiens
  misc_feature (61)..(62): /note="This region represents a CpG dinucleotide"
  misc_feature (61)..(61): /note="Nucleotide may be methylated to form 5-methylcytosine"
atataacgtatctgacagtaactcagtatttactagtgttactgaccttactcagcaatacgtggaaaactgggctgtcataaaacatggcttaattgcaaagtttaatgtgaaaaatcaac

SEQ ID NO: 12257 - DNA, 122 bp, Homo sapiens
  misc_feature (61)..(62): /note="This region represents a CpG dinucleotide"
  misc_feature (61)..(61): /note="Nucleotide may be methylated to form 5-methylcytosine"
tcagtagtggcttgagaaaactaactgttgagtctgacaaagcaaagttctaagatagtgcgaagtataactagggctgctttgaaaaggaaacccagagagcaaggacaggtgtcgcttag

SEQ ID NO: 12258 - DNA, 122 bp, Homo sapiens
  misc_feature (61)..(62): /note="This region represents a CpG dinucleotide"
  misc_feature (61)..(61): /note="Nucleotide may be methylated to form 5-methylcytosine"
aattctaccttacgctacagaccaagcagctgagcttggcattctcatattatttaagaacgaaagccaggatcacagactggagcaatgactattagaacaaatagtggaaacggtctcac

SEQ ID NO: 12259 - DNA, 122 bp, Homo sapiens
  misc_feature (61)..(62): /note="This region represents a CpG dinucleotide"
  misc_feature (61)..(61): /note="Nucleotide may be methylated to form 5-methylcytosine"
ctggatgagtgagacaagggcagttcaggaggtcacccaataactgaggtcgcagcaacacgaaggagccagggagcaggggcggccttcccttctccactccaggcggctccagcgtgcac

SEQ ID NO: 12260 - DNA, 122 bp, Homo sapiens
  misc_feature (61)..(62): /note="This region represents a CpG dinucleotide"
  misc_feature (61)..(61): /note="Nucleotide may be methylated to form 5-methylcytosine"
taaagtaaataaatacagatggggcactacactgaaaatgtggcatgaagttgccatccacggcagaggtcaacatttggacctgataaatgaagccaagtcatagataagaaaaaaatatc

SEQ ID NO: 12261 - DNA, 122 bp, Homo sapiens
  misc_feature (61)..(62): /note="This region represents a CpG dinucleotide"
  misc_feature (61)..(61): /note="Nucleotide may be methylated to form 5-methylcytosine"
tccatggaaggcaactacagcagcgctgggaagacaaccagcagggcacagaggtgactgcgaggctggaatgaagcaacctgaattacaggcaaatcaatactattaatgattatgtatgg

SEQ ID NO: 12262 - DNA, 122 bp, Homo sapiens
  misc_feature (61)..(62): /note="This region represents a CpG dinucleotide"
  misc_feature (61)..(61): /note="Nucleotide may be methylated to form 5-methylcytosine"
aaatcaatcaggtgcaaagggttatttacacaactgatagcttcctgcctcagatagtcacggcttcttttaaggttgctgaagcaaacactttgcttaatatttgaacctagagaagttga

SEQ ID NO: 12263 - DNA, 122 bp, Homo sapiens
  misc_feature (61)..(62): /note="This region represents a CpG dinucleotide"
  misc_feature (61)..(61): /note="Nucleotide may be methylated to form 5-methylcytosine"
agcacccagccagggattcactttcttacctgaaactactaaaaatctgaacaaactatacgacacaacagtttcaggatttggttagttagcacaggattgtgtccctgaaagaagggagg

SEQ ID NO: 12264 - DNA, 122 bp, Homo sapiens
  misc_feature (61)..(62): /note="This region represents a CpG dinucleotide"
  misc_feature (61)..(61): /note="Nucleotide may be methylated to form 5-methylcytosine"
aatggggtcccatttggggtccccactggggacttatgctgtccctatgctgtctcctggcgtcttgtggggccattgtgaggatgacagcagcccagagcagggttattcctgggggtggg

SEQ ID NO: 12265 - DNA, 122 bp, Homo sapiens
  misc_feature (61)..(62): /note="This region represents a CpG dinucleotide"
  misc_feature (61)..(61): /note="Nucleotide may be methylated to form 5-methylcytosine"
cgagtgggtgcggtcagggaagaccggcggcttctgtcccgagggatggattccattaggcggcgtttctcagggtgtctccgaggctggttgcatcacaatcgtgaatacctgctaattac

SEQ ID NO: 12266 - DNA, 122 bp, Homo sapiens
  misc_feature (61)..(62): /note="This region represents a CpG dinucleotide"
  misc_feature (61)..(61): /note="Nucleotide may be methylated to form 5-methylcytosine"
aatctttacaggcctctgttctactgtcattccagtgtttgtccaggtgtggctcctgaccgtctgtgtgcctttacctggatgcttggtgaaaatgcagattcatggcctcccctccactc

SEQ ID NO: 12267 - DNA, 122 bp, Homo sapiens
  misc_feature (61)..(62): /note="This region represents a CpG dinucleotide"
  misc_feature (61)..(61): /note="Nucleotide may be methylated to form 5-methylcytosine"
gattatttctggaacttgattcgcatatttgcttttccaccacctggaatgtggggctaccggcaagataactatgtaccgataagttcagacactggtagcaaagactgagagtctgtctc

SEQ ID NO: 12268 - DNA, 122 bp, Homo sapiens
  misc_feature (61)..(62): /note="This region represents a CpG dinucleotide"
  misc_feature (61)..(61): /note="Nucleotide may be methylated to form 5-methylcytosine"
atcatgatgcagaataaattctggagcaaccctgcctgacaacagaggattgactgcaatcgtttgaaaggacagagctccacaacacattttctgaaatgttttcttatgaaggaaaagct

SEQ ID NO: 12269 - DNA, 122 bp, Homo sapiens
  misc_feature (61)..(62): /note="This region represents a CpG dinucleotide"
  misc_feature (61)..(61): /note="Nucleotide may be methylated to form 5-methylcytosine"
aacgaacgaacactcgcagtgatggtgatacgtcacagggacacagtagccagctgaaaacgctcccatacacaaagctggaacaattcaagaaaaagcaatattggatggtagcccagagt

SEQ ID NO: 12270 - DNA, 122 bp, Homo sapiens
  misc_feature (61)..(62): /note="This region represents a CpG dinucleotide"
  misc_feature (61)..(61): /note="Nucleotide may be methylated to form 5-methylcytosine"
cctttcatttataccactgtgcctaagtccatctacccctgaggcctacacagtcacttacggtgagaagaggcaagtgtgccataagaggctaaaggaatctggaaacttgataagcagaa

SEQ ID NO: 12271 - DNA, 122 bp, Homo sapiens
  misc_feature (61)..(62): /note="This region represents a CpG dinucleotide"
  misc_feature (61)..(61): /note="Nucleotide may be methylated to form 5-methylcytosine"
tattgatttccctcccagaattcatttgcactctctcatcttcttcataggaccagatttcgtttttaaggaactacccctccccattatgttatagatcatttggttcacttcatctgtag

SEQ ID NO: 12272 - DNA, 122 bp, Homo sapiens
  misc_feature (61)..(62): /note="This region represents a CpG dinucleotide"
  misc_feature (61)..(61): /note="Nucleotide may be methylated to form 5-methylcytosine"
agagcctgccctatgccaagcattcttcttgggagatacaaagatgataaaacaagaccacggaactcaaggagctcaaatcctagatggagtggcagataagtaaacatggaatcatgatg

SEQ ID NO: 12273 - DNA, 122 bp, Homo sapiens
  misc_feature (61)..(62): /note="This region represents a CpG dinucleotide"
  misc_feature (61)..(61): /note="Nucleotide may be methylated to form 5-methylcytosine"
cctttaactgatgggtcagacaggaactgtgcagtggagctcctcccagctcttgctgggcgaattgtttcttcagcttatctgatgatagggctgaggttagagtcatgatctgcctctgt

SEQ ID NO: 12274 - DNA, 122 bp, Homo sapiens
  misc_feature (61)..(62): /note="This region represents a CpG dinucleotide"
  misc_feature (61)..(61): /note="Nucleotide may be methylated to form 5-methylcytosine"
ggactgtagtccactgtagcctgccttctcactgtgtaaatacataactacatgggctcccgtgagcttgccacacgccacaggctatgcctaattctacaaagcctgaaggaaaaatactg

SEQ ID NO: 12275 - DNA, 122 bp, Homo sapiens
  misc_feature (61)..(62): /note="This region represents a CpG dinucleotide"
  misc_feature (61)..(61): /note="Nucleotide may be methylated to form 5-methylcytosine"
ctctttttcacttaacagtacatcatggagaccgtataggttaacatctatagatctgcccggcagtgcccctaaaggttaacaaccatttctgggggaagaggcagaggcaatgggccctg

SEQ ID NO: 12276 - DNA, 122 bp, Homo sapiens
  misc_feature (61)..(62): /note="This region represents a CpG dinucleotide"
  misc_feature (61)..(61): /note="Nucleotide may be methylated to form 5-methylcytosine"
gttacatacttgattttacagcaatttaaaaagccagactttgagacacttcctatatcacgaggctcttgctgtccagcagaatctcatttcctgaaatttgtgcacatttggctcctaat

SEQ ID NO: 12277 - DNA, 122 bp, Homo sapiens
  misc_feature (61)..(62): /note="This region represents a CpG dinucleotide"
  misc_feature (61)..(61): /note="Nucleotide may be methylated to form 5-methylcytosine"
tgagtgtgtgtgtgttgttttagtatgaggctcccttcccacctcagtcattggtttgctcgctcccttatgtgatgaatcaatgctttcagaacaggggcttctgagtgactgcgggaaca

SEQ ID NO: 12278 - DNA, 122 bp, Homo sapiens
  misc_feature (61)..(62): /note="This region represents a CpG dinucleotide"
  misc_feature (61)..(61): /note="Nucleotide may be methylated to form 5-methylcytosine"
accagcctggccaacatggtgaatccccgtctctacaaaaaaaaaaaaaaaaaatttagccgggcgtggtgacccctgcctatagtcccaactagtgggcagtctgaggtggaaggatagtt

SEQ ID NO: 12279 - DNA, 122 bp, Homo sapiens
  misc_feature (61)..(62): /note="This region represents a CpG dinucleotide"
  misc_feature (61)..(61): /note="Nucleotide may be methylated to form 5-methylcytosine"
actctagtgtgtctcaacggcatactattgatgcaataattttggagcacaagaattcctcgtcatgcaagactatcccaggcaatgaaaggtatttagcattctggccccgcccataaaat

SEQ ID NO: 12280 - DNA, 122 bp, Homo sapiens
  misc_feature (61)..(62): /note="This region represents a CpG dinucleotide"
  misc_feature (61)..(61): /note="Nucleotide may be methylated to form 5-methylcytosine"
tcacttgtatcaccaactgctcatcagtaaacctcatatctctagaataatctctgctgtcgtatttgtatttctagcatatactatgatgtctgacttagtagcttcataaaaatctattg

SEQ ID NO: 12281 - DNA, 122 bp, Homo sapiens
  misc_feature (61)..(62): /note="This region represents a CpG dinucleotide"
  misc_feature (61)..(61): /note="Nucleotide may be methylated to form 5-methylcytosine"
cgattagaacgggttccagtcgcttgggggcgttggggggctggagggcaagaggttacgcgccccagctcccaccttgggtccttcgcctgcacccagtctaacctggcacctaaaggttt

SEQ ID NO: 12282 - DNA, 122 bp, Homo sapiens
  misc_feature (61)..(62): /note="This region represents a CpG dinucleotide"
  misc_feature (61)..(61): /note="Nucleotide may be methylated to form 5-methylcytosine"
aactacatgtagcaagaattgcaacatctcatttagatgccctcttgagaaatctctatacgagctgccaaatgcattctcttggctgaattttctaactgaaattcggcaaaacaggctag

SEQ ID NO: 12283 - DNA, 122 bp, Homo sapiens
  misc_feature (61)..(62): /note="This region represents a CpG dinucleotide"
  misc_feature (61)..(61): /note="Nucleotide may be methylated to form 5-methylcytosine"
ttctgatgtgctcaatctggggaagagaactgaaaccaaaaacccagcagggatgaatgacgtcttagtcatggaactgacaggagctgtgaaacaggccactcagaagtgaggcagagact

SEQ ID NO: 12284 - DNA, 122 bp, Homo sapiens
  misc_feature (61)..(62): /note="This region represents a CpG dinucleotide"
  misc_feature (61)..(61): /note="Nucleotide may be methylated to form 5-methylcytosine"
aaagtgaagtacattcctttcatttgcctttgctgtagtccctatttcatccatctaatccgttttaagggataaaattgcaattacaaacatttcatgtgtggtcagatttttagtatttt

SEQ ID NO: 12285 - DNA, 122 bp, Homo sapiens
  misc_feature (61)..(62): /note="This region represents a CpG dinucleotide"
  misc_feature (61)..(61): /note="Nucleotide may be methylated to form 5-methylcytosine"
caagaggaaacaatttctctaccaggggtgtgtatatgtgtgtgtgtatgtgagaatgtgcgttaccagcatcaatttggataggtaaatggaaacgtgattactccacaatgatgcaagta

SEQ ID NO: 12286 - DNA, 122 bp, Homo sapiens
  misc_feature (61)..(62): /note="This region represents a CpG dinucleotide"
  misc_feature (61)..(61): /note="Nucleotide may be methylated to form 5-methylcytosine"
cagttctgaagctctatggttgtaagcctcgccttggcttgactgcacggctttaaagtacgaatctgttcacaggttgtccatgattaaaagccacacctgggccgagcacagtggctcac

SEQ ID NO: 12287 - DNA, 122 bp, Homo sapiens
  misc_feature (61)..(62): /note="This region represents a CpG dinucleotide"
  misc_feature (61)..(61): /note="Nucleotide may be methylated to form 5-methylcytosine"
gcctcatgtcatatggccctcagagtctaaaatatttgccatctggcccctttcagaaaacgtttcccaatccctggtgtaaattgcaacagtagtaatgtgcaatgaaaagactgatttcg

SEQ ID NO: 12288 - DNA, 122 bp, Homo sapiens
  misc_feature (61)..(62): /note="This region represents a CpG dinucleotide"
  misc_feature (61)..(61): /note="Nucleotide may be methylated to form 5-methylcytosine"
ggcacctagggacagccacactctgtgtccacgcacctagggacggccacaccttgtccacgcaccgagggacagccacacctgtatccacacacctaaggatggccacacctgtgtccacg

SEQ ID NO: 12289 - DNA, 122 bp, Homo sapiens
  misc_feature (61)..(62): /note="This region represents a CpG dinucleotide"
  misc_feature (61)..(61): /note="Nucleotide may be methylated to form 5-methylcytosine"
gtgctgggattataggcataagccatcatgcctggcatgggaagtttaaacaatgaattacgatttccaaactgaatggcaaggatgttatcttagtctgtttgtgctgctataaaaaatac

SEQ ID NO: 12290 - DNA, 122 bp, Homo sapiens
  misc_feature (61)..(62): /note="This region represents a CpG dinucleotide"
  misc_feature (61)..(61): /note="Nucleotide may be methylated to form 5-methylcytosine"
cagtctgggattatcttggagagctgcacgatccagttgttgatcttgtctcggcggcgacgctccactgtggggcaaagtggaggacaaggtgactcagtgaaaactcgccacaagtccca

SEQ ID NO: 12291 - DNA, 122 bp, Homo sapiens
  misc_feature (61)..(62): /note="This region represents a CpG dinucleotide"
  misc_feature (61)..(61): /note="Nucleotide may be methylated to form 5-methylcytosine"
attcattgtttaaaattcaaattaactgggcatcctgtattttactggacagccctactccgtgtatcacaaggaatccaggcctacattcctcctgcatcctttctttcctgttattgtcg

SEQ ID NO: 12292 - DNA, 122 bp, Homo sapiens
  misc_feature (61)..(62): /note="This region represents a CpG dinucleotide"
  misc_feature (61)..(61): /note="Nucleotide may be methylated to form 5-methylcytosine"
tttgtagctctgttaatcttctggcaccactgttgcatatgcttactgtgcgtgtcaccacgcctggctgtccttgaccaaagtgttatgtggtgcttgactgcataatcataacccaagtg

SEQ ID NO: 12293 - DNA, 122 bp, Homo sapiens
  misc_feature (61)..(62): /note="This region represents a CpG dinucleotide"
  misc_feature (61)..(61): /note="Nucleotide may be methylated to form 5-methylcytosine"
acagggatgcaatgtaatgatgtcttcaaatactaaaatatttcaaacacaaagtgtctacgcctgtatatgtattgtatatatgcaaatatatacaaacatacaaagagacagagggaatg

SEQ ID NO: 12294 - DNA, 122 bp, Homo sapiens
  misc_feature (61)..(62): /note="This region represents a CpG dinucleotide"
  misc_feature (61)..(61): /note="Nucleotide may be methylated to form 5-methylcytosine"
cctcacctctgttactccagtagcacttctacaactcagatgttgccttaccatattctacgtaatgcacaactacacgaaagataaatctgtgttttatacagagatgatgcaactacttc

SEQ ID NO: 12295 - DNA, 122 bp, Homo sapiens
  misc_feature (61)..(62): /note="This region represents a CpG dinucleotide"
  misc_feature (61)..(61): /note="Nucleotide may be methylated to form 5-methylcytosine"
cttttattttaggttcaagggtacatatgtagatttgttatatagataaactgtgtgtcacgggaggttgctgtaaagactgctttgtcactcaggtgataagcacagttcagacaggtagt

SEQ ID NO: 12296 - DNA, 122 bp, Homo sapiens
  misc_feature (61)..(62): /note="This region represents a CpG dinucleotide"
  misc_feature (61)..(61): /note="Nucleotide may be methylated to form 5-methylcytosine"
accactcagatgtcgatgaagcgagctatgttgtgtaaataactcagttatcttctctatcgttactagtccttttcctcttatacgtagctttttttttttttttcatcctggtgaactta

SEQ ID NO: 12297 - DNA, 122 bp, Homo sapiens
  misc_feature (61)..(62): /note="This region represents a CpG dinucleotide"
  misc_feature (61)..(61): /note="Nucleotide may be methylated to form 5-methylcytosine"
gtgtgcatgtgggtcctaagcctgagttactccatattctttcatttcccttactgcacacgtgtcaggagatggaattttccaccgccgacgtgtctggttctacgtaacatttttatcta

SEQ ID NO: 12298 - DNA, 122 bp, Homo sapiens
  misc_feature (61)..(62): /note="This region represents a CpG dinucleotide"
  misc_feature (61)..(61): /note="Nucleotide may be methylated to form 5-methylcytosine"
ggcggcccctcccgggctgggtcccgccccgccctgccctgtccttgaatccaaggcgggcgcagtgcgatcgcgctgcccaggcccgcacccgaccattcctccgtctctctggccgcctc

SEQ ID NO: 12299 - DNA, 122 bp, Homo sapiens
  misc_feature (61)..(62): /note="This region represents a CpG dinucleotide"
  misc_feature (61)..(61): /note="Nucleotide may be methylated to form 5-methylcytosine"
ggaccccgacttcattatacatcgattaaatagggctgggcgttgccctgtccagcttggcgcagagttcacactaagctgttcacattgggagcagccagttgcttgcattgcattcctta

SEQ ID NO: 12300 - DNA, 122 bp, Homo sapiens
  misc_feature (61)..(62): /note="This region represents a CpG dinucleotide"
  misc_feature (61)..(61): /note="Nucleotide may be methylated to form 5-methylcytosine"
agtggtgtttcagaatccaaagtgtaacccatctttctgatccttgggtgaaccagcttccgtgagtcactccagcaaggaaaactgttttacttcattaagacggcatgtgtggcctctag

SEQ ID NO: 12301 - DNA, 122 bp, Homo sapiens
  misc_feature (61)..(62): /note="This region represents a CpG dinucleotide"
  misc_feature (61)..(61): /note="Nucleotide may be methylated to form 5-methylcytosine"
caacttccaggcccacccaggaacacccacaggtggagcagagaaacgcagagatgtggacggtctctcttcagaagctttattctccctgggaggggcacacctcacccagccaagggctg

SEQ ID NO: 12302 - DNA, 122 bp, Homo sapiens
  misc_feature (61)..(62): /note="This region represents a CpG dinucleotide"
  misc_feature (61)..(61): /note="Nucleotide may be methylated to form 5-methylcytosine"
agagcaaacaaaagtcagggaggacttcctggagtagagaccatcaaagctacccaaatgcgaggccctcagggccttggaaaccaagtgcagcaatattggtatgtcattgtacatagtta

SEQ ID NO: 12303 - DNA, 122 bp, Homo sapiens
  misc_feature (61)..(62): /note="This region represents a CpG dinucleotide"
  misc_feature (61)..(61): /note="Nucleotide may be methylated to form 5-methylcytosine"
gggaaagagtactgcagtttcttacaaactaaatatgcacttaccatatgacccagcaagcgcagtcctgggcattaatccagagaaataaaagcttatgttcacacaaaatcctgtaactg

SEQ ID NO: 12304 - DNA, 122 bp, Homo sapiens
  misc_feature (61)..(62): /note="This region represents a CpG dinucleotide"
  misc_feature (61)..(61): /note="Nucleotide may be methylated to form 5-methylcytosine"
ctctgtagtaggtgggtgacctggcacttctctgctgaatcagaggatgctgcatgctcacgtttcctgtgggctgagtgaatacatgaagctctatcatgcatacttcttattcatgcaac

SEQ ID NO: 12305 - DNA, 122 bp, Homo sapiens
  misc_feature (61)..(62): /note="This region represents a CpG dinucleotide"
  misc_feature (61)..(61): /note="Nucleotide may be methylated to form 5-methylcytosine"
tactcagctctgtagcccctagggctgtaattataatcaccatcatcagtgtccaggacacgtgtctaagtcatcaagagcaagaccgaaggaaagttggtgctgaaatgatggagggagaa

SEQ ID NO: 12306 - DNA, 122 bp, Homo sapiens
  misc_feature (61)..(62): /note="This region represents a CpG dinucleotide"
  misc_feature (61)..(61): /note="Nucleotide may be methylated to form 5-methylcytosine"
ggaaggaggcttgctcctccagtgtagagggtttccagaacacaggcaatgggtgcagcacgtcctgccagctgaccacaccagagggccttactcacaacacttgagcttttggtgtgtgg

SEQ ID NO: 12307 - DNA, 122 bp, Homo sapiens
  misc_feature (61)..(62): /note="This region represents a CpG dinucleotide"
  misc_feature (61)..(61): /note="Nucleotide may be methylated to form 5-methylcytosine"
attcagctccttggtcacgagacaggaattgcaaggtggagggaagctgtaattccaacacgtaagtccatggatactccagtaaagcacaggcataggtgccactgatccagcagaggcag

SEQ ID NO: 12308 - DNA, 122 bp, Homo sapiens
  misc_feature (61)..(62): /note="This region represents a CpG dinucleotide"
  misc_feature (61)..(61): /note="Nucleotide may be methylated to form 5-methylcytosine"
ataataataataataataataataataataaataaagagcattcaggtgtggttaaggtacgactgaggtcaattccagctggtggcaatcaggaaggcttcacagaggaagtggtggctca

SEQ ID NO: 12309 - DNA, 122 bp, Homo sapiens
  misc_feature (61)..(62): /note="This region represents a CpG dinucleotide"
  misc_feature (61)..(61): /note="Nucleotide may be methylated to form 5-methylcytosine"
cccacgtcctgaccggctgggcagcgactacctggtctaaagaaaccctctcctatgttccgtgctctgcccctactgcattgtgaggactagccaatcagcacccagcttggcccccccaa

SEQ ID NO: 12310 - DNA, 122 bp, Homo sapiens
  misc_feature (61)..(62): /note="This region represents a CpG dinucleotide"
  misc_feature (61)..(61): /note="Nucleotide may be methylated to form 5-methylcytosine"
ggtgattgtgatatagggcttctctaagccttagttctctaaaaggtgatatcggactggcgatatctgagtcttgggattgttgtgtgaattggtggtttattagaaatagcatgatttta

SEQ ID NO: 12311 - DNA, 122 bp, Homo sapiens
  misc_feature (61)..(62): /note="This region represents a CpG dinucleotide"
  misc_feature (61)..(61): /note="Nucleotide may be methylated to form 5-methylcytosine"
tgtgtatgaggtcaggcaagtcaccaaactgcactgtctcaatttcctcctttgatataacgcatgataatatttggaaggcagatagcatagtggtttaaggacacagactcagaagccaa

SEQ ID NO: 12312 - DNA, 122 bp, Homo sapiens
  misc_feature (61)..(62): /note="This region represents a CpG dinucleotide"
  misc_feature (61)..(61): /note="Nucleotide may be methylated to form 5-methylcytosine"
agaaagatccaaaagtcctgtggatctgctttaacatcaataaaacagttatccacccttcgtagcttttagtgaaggctacaaaagtatgctttttatggattacacatgtgcacgcaact

SEQ ID NO: 12313 - DNA, 122 bp, Homo sapiens
  misc_feature (61)..(62): /note="This region represents a CpG dinucleotide"
  misc_feature (61)..(61): /note="Nucleotide may be methylated to form 5-methylcytosine"
tatggagtgtgcacattctaacacagcaccttgtcagctggctgagaagctgaaaattctcggcattcctccttgatgtcaattacttcaaggagcaggaaggtgacttcttttaacaagtg

SEQ ID NO: 12314 - DNA, 122 bp, Homo sapiens
  misc_feature (61)..(62): /note="This region represents a CpG dinucleotide"
  misc_feature (61)..(61): /note="Nucleotide may be methylated to form 5-methylcytosine"
aacctccccaggctcaggggatcctcccacctcagcctcctgagtagctggaactacaggcgtgtgcaaccacgcccaggctggttttgaactcctgggctttaagcaatccccctgcgtca

SEQ ID NO: 12315 - DNA, 122 bp, Homo sapiens
  misc_feature (61)..(62): /note="This region represents a CpG dinucleotide"
  misc_feature (61)..(61): /note="Nucleotide may be methylated to form 5-methylcytosine"
aaaagcatgctgttaagcatacccagattttgctacctacataatggcatacagtggcttcgttattatagaatactaactcccataatcttctcttcagagaaacacagcattcaatattc

SEQ ID NO: 12316 - DNA, 122 bp, Homo sapiens
  misc_feature (61)..(62): /note="This region represents a CpG dinucleotide"
  misc_feature (61)..(61): /note="Nucleotide may be methylated to form 5-methylcytosine"
gtaaagattactgacagtgactcttagatttcatctgcaaaggctcttcatactccaggacgtaatttgtttaggcctggagacaaaaactcatttaaaacaacaagatggtctcctgctat

SEQ ID NO: 12317 - DNA, 122 bp, Homo sapiens
  misc_feature (61)..(62): /note="This region represents a CpG dinucleotide"
  misc_feature (61)..(61): /note="Nucleotide may be methylated to form 5-methylcytosine"
tcagcccatgcttctcatgctgttaagacttgtttcttaagacacaggttgcaaagcccccgctgataaaacaggatgtggtaaagaagctggttgaaaccagccagaatcaagatggtgac

SEQ ID NO: 12318 - DNA, 122 bp, Homo sapiens
  misc_feature (61)..(62): /note="This region represents a CpG dinucleotide"
  misc_feature (61)..(61): /note="Nucleotide may be methylated to form 5-methylcytosine"
ccccatagccagcatatgtttcttgtctcctacgcactttagcactggctctggggaatgcgtgtatttctgaacgtccctaaacacagctctgactgaagcacttataatttaccctccat

SEQ ID NO: 12319 - DNA, 122 bp, Homo sapiens
  misc_feature (61)..(62): /note="This region represents a CpG dinucleotide"
  misc_feature (61)..(61): /note="Nucleotide may be methylated to form 5-methylcytosine"
ctctctggcctccatttcctccctcatctgtaaaatatgtgttgaagaggaagggggaagcgataataaatctaccacggtaggttactttaagaaccaaaagaagtcacttgagtaactgc

SEQ ID NO: 12320 - DNA, 122 bp, Homo sapiens
  misc_feature (61)..(62): /note="This region represents a CpG dinucleotide"
  misc_feature (61)..(61): /note="Nucleotide may be methylated to form 5-methylcytosine"
attattatcttggtaggtgtcattcaacctttttggcatatatgtaaagtaataaagcaacgatagcttaagagcaggccaagtttgtataaaggtatgctgcaatctcactgcaacttagt

SEQ ID NO: 12321 - DNA, 122 bp, Homo sapiens
  misc_feature (61)..(62): /note="This region represents a CpG dinucleotide"
  misc_feature (61)..(61): /note="Nucleotide may be methylated to form 5-methylcytosine"
cactgtttagtttaactttaggcagtgtggtctggccttagtaatattagttctattgtgcgttacaaagctgggcctacaattacctttgttagtactgtttattttgtggatttggtctg

SEQ ID NO: 12322 - DNA, 122 bp, Homo sapiens
  misc_feature (61)..(62): /note="This region represents a CpG dinucleotide"
  misc_feature (61)..(61): /note="Nucleotide may be methylated to form 5-methylcytosine"
cctagactaaaacctcctcatgagattttctctcttatcagcctttgaacttgggttgggcgctgagcaggaaagaccaaaaaaagaaaaagaagaagaacacagtaaacaatctgctgagc

SEQ ID NO: 12323 - DNA, 122 bp, Homo sapiens
  misc_feature (61)..(62): /note="This region represents a CpG dinucleotide"
  misc_feature (61)..(61): /note="Nucleotide may be methylated to form 5-methylcytosine"
taatccaaaaacctcagagctgaggaagcacaaccttcagaccaactctcagaagcagggcggaatgagaaagacacagaacagtacaatgtttgaatcatgatgaagcctttcaacagcat

SEQ ID NO: 12324 - DNA, 122 bp, Homo sapiens
  misc_feature (61)..(62): /note="This region represents a CpG dinucleotide"
  misc_feature (61)..(61): /note="Nucleotide may be methylated to form 5-methylcytosine"
agggctttggaagtcaagtgagacatgcttttgggccacagtccatcgcacaatggacaccgtgggggggtgtgaatccatcttgtgttaatttccccagttgtcttttttctttcctgaga

SEQ ID NO: 12325 - DNA, 122 bp, Homo sapiens
  misc_feature (61)..(62): /note="This region represents a CpG dinucleotide"
  misc_feature (61)..(61): /note="Nucleotide may be methylated to form 5-methylcytosine"
cacatttcaaaagcaaaataccacaaagatctttcaataaaacccctgcatggagtgtttcgtttgctctcctacactttccccttccctcttgctttggatgcatttgattatttattttt

SEQ ID NO: 12326 - DNA, 122 bp, Homo sapiens
  misc_feature (61)..(62): /note="This region represents a CpG dinucleotide"
  misc_feature (61)..(61): /note="Nucleotide may be methylated to form 5-methylcytosine"
tagtgatcatgacttattttaggttccttacttgtagaccaatgctgtcactcagctctacgttgagtaatatgtgtatcattcactgcatttattaataagctcctatttacctcacagta

SEQ ID NO: 12327 - DNA, 122 bp, Homo sapiens
  misc_feature (61)..(62): /note="This region represents a CpG dinucleotide"
  misc_feature (61)..(61): /note="Nucleotide may be methylated to form 5-methylcytosine"
acttgaagatttcaggcaccaacagtgtttcttctttgtctattagtttcttagggctgccgtagcaaagcgccacaaactgggtggcttaagcaacagacatctattgtctcccagttctg

SEQ ID NO: 12328 - DNA, 122 bp, Homo sapiens
  misc_feature (61)..(62): /note="This region represents a CpG dinucleotide"
  misc_feature (61)..(61): /note="Nucleotide may be methylated to form 5-methylcytosine"
agtttttaaagggtaacctgaaaagcaacgacaattagttattttttatttattcagaaacgaggaaatacagactccaaataagtggagtcagtgctcccagttactttcttttgaattca

SEQ ID NO: 12329 - DNA, 122 bp, Homo sapiens
  misc_feature (61)..(62): /note="This region represents a CpG dinucleotide"
  misc_feature (61)..(61): /note="Nucleotide may be methylated to form 5-methylcytosine"
aagactccgtctcgaaaggtgcttgtcggactccttcaccggagtcctccaggcgactggcggccttcactggaaagctgaggccagggccctggaaatatctggtagccagggagggggaa

SEQ ID NO: 12330 - DNA, 122 bp, Homo sapiens
  misc_feature (61)..(62): /note="This region represents a CpG dinucleotide"
  misc_feature (61)..(61): /note="Nucleotide may be methylated to form 5-methylcytosine"
aaagaaaggtgaagctgtaagttttggtgccacacccagtccctgaactacaaaggtttacggagttttagcctaggactgagttgtactggcaggttgggccaagtgtgagtgcaaggaga

SEQ ID NO: 12331 - DNA, 122 bp, Homo sapiens
  misc_feature (61)..(62): /note="This region represents a CpG dinucleotide"
  misc_feature (61)..(61): /note="Nucleotide may be methylated to form 5-methylcytosine"
gaggccagggctctccgggaaaaaggcaggcgcatatatgcccccctttctgggaaaagacggggaggggggcttctcctgggagactccaggcttcgaaattcctcgttccctatcctccg

SEQ ID NO: 12332 - DNA, 122 bp, Homo sapiens
  misc_feature (61)..(62): /note="This region represents a CpG dinucleotide"
  misc_feature (61)..(61): /note="Nucleotide may be methylated to form 5-methylcytosine"
atagcatgtgtcatacatatattctctctcactcatacacacatactcgctcttcttgtccggcttttaaaaaggaaggcagccagaaggccaagcccagtgatttgagttgaaaaggctgt

SEQ ID NO: 12333 - DNA, 122 bp, Homo sapiens
  misc_feature (61)..(62): /note="This region represents a CpG dinucleotide"
  misc_feature (61)..(61): /note="Nucleotide may be methylated to form 5-methylcytosine"
tgccacagccacctgagtagccgggattacaggcgtgagccaccacgcccggcctcagcacgaattatagctgctgcaatgtatttattctcacaaagcacaagtggagctttttgtcttcg

SEQ ID NO: 12334 - DNA, 122 bp, Homo sapiens
  misc_feature (61)..(62): /note="This region represents a CpG dinucleotide"
  misc_feature (61)..(61): /note="Nucleotide may be methylated to form 5-methylcytosine"
gcatggaagatagtggcaggtcacgtgtgtgaagaacaccgcgtggcaaatgcacgtgtgcggagttcttcatggaaggaaatgtcaagaagagccccctggctctgggagctgactcacac

SEQ ID NO: 12335 - DNA, 122 bp, Homo sapiens
  misc_feature (61)..(62): /note="This region represents a CpG dinucleotide"
  misc_feature (61)..(61): /note="Nucleotide may be methylated to form 5-methylcytosine"
ttctgctttctcttctatgcctgaaactgcctctggggtcccctgccctttggggagtaacgtcactccccactagcgacaaaattgagtgtacctgctgctggagaggttgcagaaagatg

SEQ ID NO: 12336 - DNA, 122 bp, Homo sapiens
  misc_feature (61)..(62): /note="This region represents a CpG dinucleotide"
  misc_feature (61)..(61): /note="Nucleotide may be methylated to form 5-methylcytosine"
attcattgtgcctttcctttcctgtgagtcacggcctacctaagagaaagcttagtaacacgcaaggaaaattcaaaacacattgaggctctttaatgtacgtgatacttcagctgagataa

SEQ ID NO: 12337 - DNA, 122 bp, Homo sapiens
  misc_feature (61)..(62): /note="This region represents a CpG dinucleotide"
  misc_feature (61)..(61): /note="Nucleotide may be methylated to form 5-methylcytosine"
tttcttaaccagtactttgcatctgaatcacataatttctcaattcccctaaggataatacgtaactagaactgttctcgatgcatgggaaagaagttgattcattacacatggtgggtacc

SEQ ID NO: 12338 - DNA, 122 bp, Homo sapiens
  misc_feature (61)..(62): /note="This region represents a CpG dinucleotide"
  misc_feature (61)..(61): /note="Nucleotide may be methylated to form 5-methylcytosine"
gaaattaaacacaatttgccccaagtttcatcttttataaaaccattctcatggtaagtacgtttcaatgacccaaatgaattaacaaaaaattaatcggggaaatgaaccctgattgctac

SEQ ID NO: 12339 - DNA, 122 bp, Homo sapiens
  misc_feature (61)..(62): /note="This region represents a CpG dinucleotide"
  misc_feature (61)..(61): /note="Nucleotide may be methylated to form 5-methylcytosine"
acaaaagcaaatacctcatactccttccactctatagaaaaaccaacaggtacagtatcacgtagctaggtaggccttgaatagaaaaaagggtaactcagctttgacaaggacatttatct

SEQ ID NO: 12340 - DNA, 122 bp, Homo sapiens
  misc_feature (61)..(62): /note="This region represents a CpG dinucleotide"
  misc_feature (61)..(61): /note="Nucleotide may be methylated to form 5-methylcytosine"
gctttgtgcgcagggctaagccaagctttctccataggcaatggggagcaactggaggttcgtagcaggagaaggacacatcttgcccaccaggaggctaagtaaaaacagttgtctcccaa

SEQ ID NO: 12341 - DNA, 122 bp, Homo sapiens
  misc_feature (61)..(62): /note="This region represents a CpG dinucleotide"
  misc_feature (61)..(61): /note="Nucleotide may be methylated to form 5-methylcytosine"
ggtccttctaacgaagcctcatgggagctgagcttgtcccaggactcaagggagtggggacgagcatatctgccaggaagcaaaggaacagatgcagacggtaacctacagactcacctccc

SEQ ID NO: 12342 - DNA, 122 bp, Homo sapiens
  misc_feature (61)..(62): /note="This region represents a CpG dinucleotide"
  misc_feature (61)..(61): /note="Nucleotide may be methylated to form 5-methylcytosine"
caggtgtgcaccactgcacccggcccaatttttctttaagcaaggtcacatgctcatatgcgcagagttttaaaactattgatagttttaattgatgggcatgacagaagtcgaatgctgct

SEQ ID NO: 12343 - DNA, 122 bp, Homo sapiens
  misc_feature (61)..(62): /note="This region represents a CpG dinucleotide"
  misc_feature (61)..(61): /note="Nucleotide may be methylated to form 5-methylcytosine"
gtttgcttagctcttatttgggagacaaaatttttctttgacagtagggagaggtggaagcgactggaacccatgttacatggggaagaacagtgcagcaaaggacacgtttgagtttcgag

SEQ ID NO: 12344 - DNA, 122 bp, Homo sapiens
  misc_feature (61)..(62): /note="This region represents a CpG dinucleotide"
  misc_feature (61)..(61): /note="Nucleotide may be methylated to form 5-methylcytosine"
ggccttccctaggggaggaggtgaatgcagacacaagtgcactgggtgtgctgtgtgcctcgtgctgtgctaggtcccaaggacatggaaggcccagccctccggcatcctgcaatctggct

SEQ ID NO: 12345 - DNA, 122 bp, Homo sapiens
  misc_feature (61)..(62): /note="This region represents a CpG dinucleotide"
  misc_feature (61)..(61): /note="Nucleotide may be methylated to form 5-methylcytosine"
aggaagaaaaataaactacagagtaaatgctctattaataactactcagtgtaagaacaacgtggaaagatgcatgttgtagatgacataagaattatgtcattaattgacagtgttgctta

SEQ ID NO: 12346 - DNA, 122 bp, Homo sapiens
  misc_feature (61)..(62): /note="This region represents a CpG dinucleotide"
  misc_feature (61)..(61): /note="Nucleotide may be methylated to form 5-methylcytosine"
aagccaggctccgagccggctgctgggtagagtgccgcaccccagggaacgctcagccctcgtggactcacctctgggcttgcccagcctaagccccgcagtaacagctggggtgaagcctg

SEQ ID NO: 12347 - DNA, 122 bp, Homo sapiens
  misc_feature (61)..(62): /note="This region represents a CpG dinucleotide"
  misc_feature (61)..(61): /note="Nucleotide may be methylated to form 5-methylcytosine"
ctagctgtactgccgtctgacttccttcattagtgttcagggtggcaacattagatcacacgtcggtaggcttaagtggggagtgaattactcacaaatttcatcacagaggttatgcactg

SEQ ID NO: 12348 - DNA, 122 bp, Homo sapiens
  misc_feature (61)..(62): /note="This region represents a CpG dinucleotide"
  misc_feature (61)..(61): /note="Nucleotide may be methylated to form 5-methylcytosine"
gtgtcataatgaggccccagtgttatctctgctgttagaacattgggcacccagcagtgacgttagctagattaatcttggcgagaggaatccagcttggtgagctcatgtaaaatctaccc

SEQ ID NO: 12349 - DNA, 122 bp, Homo sapiens
  misc_feature (61)..(62): /note="This region represents a CpG dinucleotide"
  misc_feature (61)..(61): /note="Nucleotide may be methylated to form 5-methylcytosine"
tgtccaccctcctaccattctctcttttgtcgattgctgtgatgtgtcactatcctggttcgcctctcctctgtcccttcctgctccccctacactgattctcaggcctcagctgtctgttc

SEQ ID NO: 12350 - DNA, 122 bp, Homo sapiens
  misc_feature (61)..(62): /note="This region represents a CpG dinucleotide"
  misc_feature (61)..(61): /note="Nucleotide may be methylated to form 5-methylcytosine"
tcctgacattaagattacacagtaaagatatggaggcaggatgccagcccagacatgtctcgttccaaagtcctaattctgaaccactagccatactgctgtcttccctttcggcctctacc

SEQ ID NO: 12351 - DNA, 122 bp, Homo sapiens
  misc_feature (61)..(62): /note="This region represents a CpG dinucleotide"
  misc_feature (61)..(61): /note="Nucleotide may be methylated to form 5-methylcytosine"
gtaggcaggtgaatacggttttattcagcagcagctgtcattgacaacttacttacactacgttacagtatgcacctttatcttggctgtctgctctggctctatggctccttctgccctca

SEQ ID NO: 12352 - DNA, 122 bp, Homo sapiens
  misc_feature (61)..(62): /note="This region represents a CpG dinucleotide"
  misc_feature (61)..(61): /note="Nucleotide may be methylated to form 5-methylcytosine"
gatgaagtcagaccagtttcacagcatgctgggagatgtagtttccggaggtttgagcaacggaagagccggggctaaacactaaaataaccgcgatttttagtttcagcgctaagaccaaa

SEQ ID NO: 12353 - DNA, 122 bp, Homo sapiens
  misc_feature (61)..(62): /note="This region represents a CpG dinucleotide"
  misc_feature (61)..(61): /note="Nucleotide may be methylated to form 5-methylcytosine"
tattgtaaagagatcttgagtaatcatttttatcttcctaaaatagccgttgtttactcccgtaagcgagtaagaaacttgtgccattattccttattgggtgcatatagatttctcacctt

SEQ ID NO: 12354 - DNA, 122 bp, Homo sapiens
  misc_feature (61)..(62): /note="This region represents a CpG dinucleotide"
  misc_feature (61)..(61): /note="Nucleotide may be methylated to form 5-methylcytosine"
cctggggtgtagcactgggtgggatgggccttccaggaagcagaattgtgacaaaatatacgttcagttttagacaagttgaatttgacaggtgtttggggcagccaagttaatatacgtgg

SEQ ID NO: 12355 - DNA, 122 bp, Homo sapiens
  misc_feature (61)..(62): /note="This region represents a CpG dinucleotide"
  misc_feature (61)..(61): /note="Nucleotide may be methylated to form 5-methylcytosine"
atccaagattctttaaccacactctaaaagttcttcagactcaggacttaaacatagccacgccaccttggccttcaatgacagggatctagcaatgctgcatcatcagccttccaatacca

SEQ ID NO: 12356 - DNA, 122 bp, Homo sapiens
  misc_feature (61)..(62): /note="This region represents a CpG dinucleotide"
  misc_feature (61)..(61): /note="Nucleotide may be methylated to form 5-methylcytosine"
ccattcaggccatgcgggcagccacgtgcaaaggccctgagccaggagtatacctagtatcgagctaagaggccagtgtggctggagctgaataaacagtggggagtcgtagcagatgagat

SEQ ID NO: 12357 - DNA, 122 bp, Homo sapiens
  misc_feature (61)..(62): /note="This region represents a CpG dinucleotide"
  misc_feature (61)..(61): /note="Nucleotide may be methylated to form 5-methylcytosine"
ggggatcatctcaggcctgtggcttggaggcacttgagtactcagcgtcccatggaagctcgcaccctgggagagaagggagcgctctggggtgccagatggtggaaagctgtgggaatgca

SEQ ID NO: 12358 - DNA, 122 bp, Homo sapiens
  misc_feature (61)..(62): /note="This region represents a CpG dinucleotide"
  misc_feature (61)..(61): /note="Nucleotide may be methylated to form 5-methylcytosine"
agaatcaggacccaaggccagattcattgactcaagatcctgtttttttgtacaatacaccgtggatagagagattaatgatacccaacattttttagtaataggaacgctttacatatata

SEQ ID NO: 12359 - DNA, 122 bp, Homo sapiens
  misc_feature (61)..(62): /note="This region represents a CpG dinucleotide"
  misc_feature (61)..(61): /note="Nucleotide may be methylated to form 5-methylcytosine"
agaccagccctccttccttgaggacaggactgactaggtctgaacacagcaggtgccccacgcatgagctgaactccactgaactacagccagtcacacagactggagggtctttctgtggg

SEQ ID NO: 12360 - DNA, 122 bp, Homo sapiens
  misc_feature (61)..(62): /note="This region represents a CpG dinucleotide"
  misc_feature (61)..(61): /note="Nucleotide may be methylated to form 5-methylcytosine"
tcaaacaaactttctctccttctgtccagcacttggggtcacacttgcatcgtggtctgccgccttttctcagggatttctggctcacttcccatattcccttacgggtgtgtccccttata

SEQ ID NO: 12361 - DNA, 122 bp, Homo sapiens
  misc_feature (61)..(62): /note="This region represents a CpG dinucleotide"
  misc_feature (61)..(61): /note="Nucleotide may be methylated to form 5-methylcytosine"
ctttcttttcggagagtagctgttagtttcacacttgcttagtgggtctgtggctgcaggcgggactgtggttctccagccctggcccacagatgtgcctggagataattgactctccaact

SEQ ID NO: 12362 - DNA, 122 bp, Homo sapiens
  misc_feature (61)..(62): /note="This region represents a CpG dinucleotide"
  misc_feature (61)..(61): /note="Nucleotide may be methylated to form 5-methylcytosine"
aacctactattgtgccactcattgaatttcagccagtcaagggcagtcaactgttcaaagcgtgtttaaataaggcaaatgccaactataaccaatccagccgtttctgtacctcacttcct

SEQ ID NO: 12363 - DNA, 122 bp, Homo sapiens
  misc_feature (61)..(62): /note="This region represents a CpG dinucleotide"
  misc_feature (61)..(61): /note="Nucleotide may be methylated to form 5-methylcytosine"
gaagtgttgatggttaaacaagagaacatccgtgtgatttgcatattgccattagtcattcgtgggtctgcagtcaaatttagtaacctggtgtttaattcaaacataggcatatttttgtt

SEQ ID NO: 12364 - DNA, 122 bp, Homo sapiens
  misc_feature (61)..(62): /note="This region represents a CpG dinucleotide"
  misc_feature (61)..(61): /note="Nucleotide may be methylated to form 5-methylcytosine"
cctgccggccactcagtacaactgatcttgggcaaccctgggctgagaagagcctggaagcggtttcagcaccaagttcctctttacctaaaagggcagactctgtgactggaactcacgga

SEQ ID NO: 12365 - DNA, 122 bp, Homo sapiens
  misc_feature (61)..(62): /note="This region represents a CpG dinucleotide"
  misc_feature (61)..(61): /note="Nucleotide may be methylated to form 5-methylcytosine"
caaaagtatctatagtgacactgaaaccacagagaagaacacagactctggaaccaggtgcgcgggggttctgggaagataagtaggaactcaccagggcacagagatgggggtcacctagg

SEQ ID NO: 12366 - DNA, 122 bp, Homo sapiens
  misc_feature (61)..(62): /note="This region represents a CpG dinucleotide"
  misc_feature (61)..(61): /note="Nucleotide may be methylated to form 5-methylcytosine"
ctctccccttggaaggatgtgaggattaaatgaatgaatgtactaaagttcttagatcaacgtaagactcaaagaaagtgccataaaagagtttgtgagccaggcacagtggttcacgcctg

SEQ ID NO: 12367 - DNA, 122 bp, Homo sapiens
  misc_feature (61)..(62): /note="This region represents a CpG dinucleotide"
  misc_feature (61)..(61): /note="Nucleotide may be methylated to form 5-methylcytosine"
gtggagggaacatgggaaacagagccagataaattcaagtttgtgctctggctctgctgccggctggctctgtgacgttgaggtactgactatatctttctgtgcctttatttattttgcat

SEQ ID NO: 12368 - DNA, 122 bp, Homo sapiens
  misc_feature (61)..(62): /note="This region represents a CpG dinucleotide"
  misc_feature (61)..(61): /note="Nucleotide may be methylated to form 5-methylcytosine"
ataacagatctctgttagagatactactcacatcccacttccactttattacagagattacgctgaatagagaactgatttttaacaataaaactctttctatggcctttagccagaagcaa

SEQ ID NO: 12369 - DNA, 122 bp, Homo sapiens
  misc_feature (61)..(62): /note="This region represents a CpG dinucleotide"
  misc_feature (61)..(61): /note="Nucleotide may be methylated to form 5-methylcytosine"
catcagacgccagggacagctcccacgtgccccgcggcctctggcacacggccagacgcccgccaggctgagcccccaccaggccctacctggcgagtgcagggacccaggctggcccgtgg

SEQ ID NO: 12370 - DNA, 122 bp, Homo sapiens
  misc_feature (61)..(62): /note="This region represents a CpG dinucleotide"
  misc_feature (61)..(61): /note="Nucleotide may be methylated to form 5-methylcytosine"
tatctcttatcctgtagcaaatattctgtattttatctctttagaatatgcagaaatccacgatctctacctgagatttaaggaagcatgagttattgatttaaaccttgcatctggtatag

SEQ ID NO: 12371 - DNA, 122 bp, Homo sapiens
  misc_feature (61)..(62): /note="This region represents a CpG dinucleotide"
  misc_feature (61)..(61): /note="Nucleotide may be methylated to form 5-methylcytosine"
aaacttacattgctccattggtatagacagtatcgcttccttccacatactgcacctgagcgggatagacatgttgtacctgctgcacagtctgtacctgctgtacctgaaaaacaagtatt

SEQ ID NO: 12372 - DNA, 122 bp, Homo sapiens
  misc_feature (61)..(62): /note="This region represents a CpG dinucleotide"
  misc_feature (61)..(61): /note="Nucleotide may be methylated to form 5-methylcytosine"
tgtaccaggcggggttctgaatgcttccacgtcccaatttcaatcacttctgcaaggtgacgcagctaggaaagatgtgactcaggccactctggcatccaggactcacctcctcttctgac

SEQ ID NO: 12373 - DNA, 122 bp, Homo sapiens
  misc_feature (61)..(62): /note="This region represents a CpG dinucleotide"
  misc_feature (61)..(61): /note="Nucleotide may be methylated to form 5-methylcytosine"
aggtatctttttattggctcaattcatgtcctattagtcttggaatttaacaaggcctcacggcaaagaaggtctggaagagaacttattaactttccctcagagtaatgagtcccatatgg

SEQ ID NO: 12374 - DNA, 122 bp, Homo sapiens
  misc_feature (61)..(62): /note="This region represents a CpG dinucleotide"
  misc_feature (61)..(61): /note="Nucleotide may be methylated to form 5-methylcytosine"
tatttgagacattttttgtgtgtgactagttaattttgcaggatgtgccatatcattgaacggaactaaagtctgtgacagtggatatagctgctggaccattccatcttatatgtaaagaa

SEQ ID NO: 12375 - DNA, 122 bp, Homo sapiens
  misc_feature (61)..(62): /note="This region represents a CpG dinucleotide"
  misc_feature (61)..(61): /note="Nucleotide may be methylated to form 5-methylcytosine"
gaaatcatcccaaaaggcctgagattttaaaaacagagatcaaaacacactggcattcaacgtctcttgctggtggacccggagcagatgctccccacattccatggggtgcctgtctcaac

SEQ ID NO: 12376 - DNA, 122 bp, Homo sapiens
  misc_feature (61)..(62): /note="This region represents a CpG dinucleotide"
  misc_feature (61)..(61): /note="Nucleotide may be methylated to form 5-methylcytosine"
tcttagtgttaaacaaacaatcaataacctcataaacttaaaaattgctgcaggaaataccggacagtttatggaaggatcatatgacagaaggaagggctgaagagtgtgagaagctagac

SEQ ID NO: 12377 - DNA, 122 bp, Homo sapiens
  misc_feature (61)..(62): /note="This region represents a CpG dinucleotide"
  misc_feature (61)..(61): /note="Nucleotide may be methylated to form 5-methylcytosine"
tatatacagtccatagtttagaggtaaaagggaatgaaaaccatctttaaaatattcttacgttgtggattagataatgaatatctggtgagattagatgatttacttagcacacaattagt

SEQ ID NO: 12378 - DNA, 122 bp, Homo sapiens
  misc_feature (61)..(62): /note="This region represents a CpG dinucleotide"
  misc_feature (61)..(61): /note="Nucleotide may be methylated to form 5-methylcytosine"
aaagccgggctgtgttgacctcgctgtgcatgctgggagttgtagtctcttcactgctcccgcccgttgtttcaggcacttcgggactacaatcccagcatgacccgggctcggggacgggg

SEQ ID NO: 12379 - DNA, 122 bp, Homo sapiens
  misc_feature (61)..(62): /note="This region represents a CpG dinucleotide"
  misc_feature (61)..(61): /note="Nucleotide may be methylated to form 5-methylcytosine"
gaaattggccatggcaggagaatttacaccacaagaaatggcaaatgccacagatcatggcgcctccctgcttccccatccccacgcccagctggtcattaaacatttaccagcacactgct

SEQ ID NO: 12380 - DNA, 122 bp, Homo sapiens
  misc_feature (61)..(62): /note="This region represents a CpG dinucleotide"
  misc_feature (61)..(61): /note="Nucleotide may be methylated to form 5-methylcytosine"
tatcttggtggtgatggggatttggagatgatatgttagaaaccgctagatgggtatttacggcagtgtggaaaaatgacagtcaaatggttcatgtcacaggcttatccagagtcaatctt

SEQ ID NO: 12381 - DNA, 122 bp, Homo sapiens
  misc_feature (61)..(62): /note="This region represents a CpG dinucleotide"
  misc_feature (61)..(61): /note="Nucleotide may be methylated to form 5-methylcytosine"
gctgggaatcattgaaaggacctcttgaattacagagtactgagttgaggggaaaacaagcgtaaggtgaaaagatagtttatcttttgtcaaggtgaaaagagcaagagttttcagtattc

SEQ ID NO: 12382 - DNA, 122 bp, Homo sapiens
  misc_feature (61)..(62): /note="This region represents a CpG dinucleotide"
  misc_feature (61)..(61): /note="Nucleotide may be methylated to form 5-methylcytosine"
gaggcgaagtaggaagtgggattttctcttccctctcctgggcccgtttgcccctaccctcgcccagcaagctgcgcccaaattctattctgcctctggaaactgctggaccatccaaggtc

SEQ ID NO: 12383 - DNA, 122 bp, Homo sapiens
  misc_feature (61)..(62): /note="This region represents a CpG dinucleotide"
  misc_feature (61)..(61): /note="Nucleotide may be methylated to form 5-methylcytosine"
tgaatcttcctatagctagagaaatccttttgggaataaggcagagtataaataaacagacggtgggtggatagttagataaatacatacatgtgtaattctcaccgtggcctggaaatctt

SEQ ID NO: 12384 - DNA, 122 bp, Homo sapiens
  misc_feature (61)..(62): /note="This region represents a CpG dinucleotide"
  misc_feature (61)..(61): /note="Nucleotide may be methylated to form 5-methylcytosine"
gcctctcctgtcctttctggtcaaaggtccctgatccctctgtgtgttgcaattgacacacgttttgtccccctctttctctttctaaattattccatgaagacagccacacctcttgctct

SEQ ID NO: 12385 - DNA, 122 bp, Homo sapiens
  misc_feature (61)..(62): /note="This region represents a CpG dinucleotide"
  misc_feature (61)..(61): /note="Nucleotide may be methylated to form 5-methylcytosine"
ggtaaacaatgacttgcctaccctggtcccacaggggcagtggcaggactgatatgaagacgcttacctcctctgccatccctacaataatctatgtttttttgtcataaataaaaagagta

SEQ ID NO: 12386 - DNA, 122 bp, Homo sapiens
  misc_feature (61)..(62): /note="This region represents a CpG dinucleotide"
  misc_feature (61)..(61): /note="Nucleotide may be methylated to form 5-methylcytosine"
cagaaacaagaccaggtgccgggtgggcacagttagtggaggcatcctcagcagaaggcccgtcagaaccacagaaacaagaccaggtgccgggtgggcacagttagtggaggcatcctcag

SEQ ID NO: 12387 - DNA, 122 bp, Homo sapiens
  misc_feature (61)..(62): /note="This region represents a CpG dinucleotide"
  misc_feature (61)..(61): /note="Nucleotide may be methylated to form 5-methylcytosine"
atgattggcatataagtgtagccccacaacacctagtgcgatgattggcacagaggtgatcgtaagtgttggtaaattacattaaaagttcgctctgggtcaggcgcggtggctcacacctg

SEQ ID NO: 12388 - DNA, 122 bp, Homo sapiens
  misc_feature (61)..(62): /note="This region represents a CpG dinucleotide"
  misc_feature (61)..(61): /note="Nucleotide may be methylated to form 5-methylcytosine"
cactcaaccagtatatggagatcccccccagcactttgaatatgtcattctcctgctttccgtcctctgtggtttgagatgagaagccagccattgattgtattgatactcccatgcgtgtg

SEQ ID NO: 12389 - DNA, 122 bp, Homo sapiens
  misc_feature (61)..(62): /note="This region represents a CpG dinucleotide"
  misc_feature (61)..(61): /note="Nucleotide may be methylated to form 5-methylcytosine"
ctgtgacttgtggacttatcttgtgcagctacatcacttcttagccttgttttcaacatgcgtaagcagaaggtactaatattagtctttagggctggtttgaggatgacgtgagatgagag

SEQ ID NO: 12390 - DNA, 122 bp, Homo sapiens
  misc_feature (61)..(62): /note="This region represents a CpG dinucleotide"
  misc_feature (61)..(61): /note="Nucleotide may be methylated to form 5-methylcytosine"
aaagctatttgggtaaagctgagtcatagctcaagatcaagatgtagcagcttggcccaccgtctgctgaggccagttgtagtctagtctgtgttcgtggttaggctttatggagcaagcaa

SEQ ID NO: 12391 - DNA, 122 bp, Homo sapiens
  misc_feature (61)..(62): /note="This region represents a CpG dinucleotide"
  misc_feature (61)..(61): /note="Nucleotide may be methylated to form 5-methylcytosine"
caggaagatgctgtcaaccaggaaggcatccttaggaagaggctccaagaaaccagccaacggctggaggatgtggaggagcaggtagggtggctcatggctacattagattcaggggacat

SEQ ID NO: 12392 - DNA, 122 bp, Homo sapiens
  misc_feature (61)..(62): /note="This region represents a CpG dinucleotide"
  misc_feature (61)..(61): /note="Nucleotide may be methylated to form 5-methylcytosine"
gaagccaaacaaaacaaaagaacaaacaaaaactctgtgggagaacccttagatcagactcgccctaaagctatccagtgaatgctttgtcatttgcctgagataaattcctctaacagaag

SEQ ID NO: 12393 - DNA, 122 bp, Homo sapiens
  misc_feature (61)..(62): /note="This region represents a CpG dinucleotide"
  misc_feature (61)..(61): /note="Nucleotide may be methylated to form 5-methylcytosine"
tcaatcatccagctttgcccttgaggaagaagcagccatacacagtctgtaaacaaaggacggggctgtgttccaggcaaactttgttgtttacaaaaacaggcggcaggctggggttggtg

SEQ ID NO: 12394 - DNA, 122 bp, Homo sapiens
  misc_feature (61)..(62): /note="This region represents a CpG dinucleotide"
  misc_feature (61)..(61): /note="Nucleotide may be methylated to form 5-methylcytosine"
cgccgccacgctggtggctgtattggcaggactcctgcccgcccgccccgccaaccccgtcggaggctgagctctgtttccaggctctgccccaggcaccctcctgcacccagcggtggcag

SEQ ID NO: 12395 - DNA, 122 bp, Homo sapiens
  misc_feature (61)..(62): /note="This region represents a CpG dinucleotide"
  misc_feature (61)..(61): /note="Nucleotide may be methylated to form 5-methylcytosine"
cccggtttataggaagtggagctgctgtctcagcctaggcatgtctgcctctttgcccttcgccatactgcttctcctctcctagccatgatggtgggagaatgcactgaaatgatgaatga

SEQ ID NO: 12396 - DNA, 122 bp, Homo sapiens
  misc_feature (61)..(62): /note="This region represents a CpG dinucleotide"
  misc_feature (61)..(61): /note="Nucleotide may be methylated to form 5-methylcytosine"
aggctgaggcaggagaatcgcttgaacctgggaggtggaggttgcagtgagccgagatcacgccagcctaggcgatagggcgaaactgtgtaaccgcccaccccgcccaaaaaaaaccgaag

SEQ ID NO: 12397 - DNA, 122 bp, Homo sapiens
  misc_feature (61)..(62): /note="This region represents a CpG dinucleotide"
  misc_feature (61)..(61): /note="Nucleotide may be methylated to form 5-methylcytosine"
ctggacaggaagagtggcccctgtgcagagcagtgcctctggggttcagagaacatgtggcgacagtgccaaacactacctgggccaaggaagggctccaggcctagaaggtctctggtgag

SEQ ID NO: 12398 - DNA, 122 bp, Homo sapiens
  misc_feature (61)..(62): /note="This region represents a CpG dinucleotide"
  misc_feature (61)..(61): /note="Nucleotide may be methylated to form 5-methylcytosine"
catggcattcattcattcatccaacacatattgattgagtgctggcactcgcaggcattgcgctggggttgaggacacagcagatgaacaggacagaccagcttctattctcacggtgcttg

SEQ ID NO: 12399 - DNA, 122 bp, Homo sapiens
  misc_feature (61)..(62): /note="This region represents a CpG dinucleotide"
  misc_feature (61)..(61): /note="Nucleotide may be methylated to form 5-methylcytosine"
gctcagcatttattaaatgtctgtattgtagctaccggcttgctggtgccacagcatctgcgcatgctccctgtgacttcctggtctgcaatgtgttgctgttcctagcaccagctctccag

SEQ ID NO: 12400 - DNA, 122 bp, Homo sapiens
  misc_feature (61)..(62): /note="This region represents a CpG dinucleotide"
  misc_feature (61)..(61): /note="Nucleotide may be methylated to form 5-methylcytosine"
tcataggtgcacatttcagagtcccagtcattctagcctgaagtatcatcttgttgtctacgtttctggggctgagaagatattttgctccacacctgccagcatgccctttccagccctga

SEQ ID NO: 12401 - DNA, 122 bp, Homo sapiens
  misc_feature (61)..(62): /note="This region represents a CpG dinucleotide"
  misc_feature (61)..(61): /note="Nucleotide may be methylated to form 5-methylcytosine"
gagctaactccgacccgggtaggagtgtgcgactgaaacttctaaaccatagaagagtgacgatgtggagagggacgggctgcatgtgctccccgcccccgagaggcctgcgtcatgcggtc

SEQ ID NO: 12402 - DNA, 122 bp, Homo sapiens
  misc_feature (61)..(62): /note="This region represents a CpG dinucleotide"
  misc_feature (61)..(61): /note="Nucleotide may be methylated to form 5-methylcytosine"
atgtagtcaaatcacttggagcttttaaaacatactgaccccacaggcttctctctctggcgattttgattcagtagcattggggtgaatccctcctttctgtactgtttaaactgctctgg

SEQ ID NO: 12403 - DNA, 122 bp, Homo sapiens
  misc_feature (61)..(62): /note="This region represents a CpG dinucleotide"
  misc_feature (61)..(61): /note="Nucleotide may be methylated to form 5-methylcytosine"
aaggcaggaaactttattgaataatcttttctttggggtagagaagttgagaaaccaaagcgtatccaggtcagagaggagagagatccgaccggaagagaagagcacagagggcccaccat

SEQ ID NO: 12404 - DNA, 122 bp, Homo sapiens
  misc_feature (61)..(62): /note="This region represents a CpG dinucleotide"
  misc_feature (61)..(61): /note="Nucleotide may be methylated to form 5-methylcytosine"
acagcgcttcctggagagatacatctacaaccgggaggagttcgcgcgcttcgacagcgacgtgggggagttccgggcggtgacggagctggggcggcctgctgcggagtactggaacagcc

SEQ ID NO: 12405 - DNA, 122 bp, Homo sapiens
  misc_feature (61)..(62): /note="This region represents a CpG dinucleotide"
  misc_feature (61)..(61): /note="Nucleotide may be methylated to form 5-methylcytosine"
tgcccagttctttctcatgcaaatccacgtgagtcctggttcaaggcaagctcagcttatcgtgcaaatcatcctctgtgactcagaagggaacgtgtaatggggctaacgctaagttttaa

SEQ ID NO: 12406 - DNA, 122 bp, Homo sapiens
  misc_feature (61)..(62): /note="This region represents a CpG dinucleotide"
  misc_feature (61)..(61): /note="Nucleotide may be methylated to form 5-methylcytosine"
gaaatgatgatgtttgcataacaacaaaattgcccagtgaagcaattttcacaatgtgtccgtgtagttaagtgacacatgactgtggctcagcacttctggtcatctagagagtaggacag

SEQ ID NO: 12407 - DNA, 122 bp, Homo sapiens
  misc_feature (61)..(62): /note="This region represents a CpG dinucleotide"
  misc_feature (61)..(61): /note="Nucleotide may be methylated to form 5-methylcytosine"
tagcccaggcggcctgctgtgtccagatgttgcatctagctcctggactctcatatgtggcgccagtctggcatcagagccccacccagatttggaggggaagcgcttgcctaactcccagc

SEQ ID NO: 12408 - DNA, 122 bp, Homo sapiens
  misc_feature (61)..(62): /note="This region represents a CpG dinucleotide"
  misc_feature (61)..(61): /note="Nucleotide may be methylated to form 5-methylcytosine"
tagggctaagactcaaagaagaactgcccaaggtggattcttgactgtgccagagctgaccgaggtctgtccaagacctaaggatgctacaaggtgttcatattgagcatggggtgcccagg

SEQ ID NO: 12409 - DNA, 122 bp, Homo sapiens
  misc_feature (61)..(62): /note="This region represents a CpG dinucleotide"
  misc_feature (61)..(61): /note="Nucleotide may be methylated to form 5-methylcytosine"
actcatcccatctcctcctgccgcttcatcctctaagccctccccagggaacccaggaggcgtctggaacctgttggggacagtccctcacacctgccccattgagtaagggttcatgtgga

SEQ ID NO: 12410 - DNA, 122 bp, Homo sapiens
  misc_feature (61)..(62): /note="This region represents a CpG dinucleotide"
  misc_feature (61)..(61): /note="Nucleotide may be methylated to form 5-methylcytosine"
cctccagagacttgtccacagcttctcgtttacccaaaaccacagtcaaaatgtagctgacgtcagaagacaacagatttagattccagctctgcaggtgtagtttcacttaagatcaaata

SEQ ID NO: 12411 - DNA, 122 bp, Homo sapiens
  misc_feature (61)..(62): /note="This region represents a CpG dinucleotide"
  misc_feature (61)..(61): /note="Nucleotide may be methylated to form 5-methylcytosine"
tgtgtcaccctgtagtgatgccaggtggcctggccatcttggttcatccagggtggaacacgttgttcctggtgagctgtgtcgtgcccatcactccctcagagatgccagagcctgtcctg

SEQ ID NO: 12412 - DNA, 122 bp, Homo sapiens
  misc_feature (61)..(62): /note="This region represents a CpG dinucleotide"
  misc_feature (61)..(61): /note="Nucleotide may be methylated to form 5-methylcytosine"
tgccaagttgccctgagctggctgagcagagaggagaaaaaggccacattgggagcaagccgcactttcattcatggcagcacagaggctgttcgtgttttcatgagccaaaaggtattcac

SEQ ID NO: 12413 - DNA, 122 bp, Homo sapiens
  misc_feature (61)..(62): /note="This region represents a CpG dinucleotide"
  misc_feature (61)..(61): /note="Nucleotide may be methylated to form 5-methylcytosine"
acagagacaaagaaagcattgtggcttagctcttctcaacctacagttccaagacccccccgggaggttttgggtgcagcagctctatgggtatattctgaaatgccactgggctctggtgc

SEQ ID NO: 12414 - DNA, 122 bp, Homo sapiens
  misc_feature (61)..(62): /note="This region represents a CpG dinucleotide"
  misc_feature (61)..(61): /note="Nucleotide may be methylated to form 5-methylcytosine"
acatcaagggatggagttctgcatgtgctcaaaagttacattaaacgtgctcagaagttacgttggagcaaaatctcatcaaagttttgtttggagactacatctggttatagattacagag

SEQ ID NO: 12415 - DNA, 122 bp, Homo sapiens
  misc_feature (61)..(62): /note="This region represents a CpG dinucleotide"
  misc_feature (61)..(61): /note="Nucleotide may be methylated to form 5-methylcytosine"
atatagttctgtgaaagatgagttgtttaacagttgcatatgcctgtgagttaatccttccgctactcaaaagagctctcagaatgttgactttaatctgcttgagcaagcaagcatttagc

SEQ ID NO: 12416 - DNA, 122 bp, Homo sapiens
  misc_feature (61)..(62): /note="This region represents a CpG dinucleotide"
  misc_feature (61)..(61): /note="Nucleotide may be methylated to form 5-methylcytosine"
tttgatgataacaaagagaagctagtagtgattccacctatttctgctgccaaaaagcctcgcaagcctataacaacaccctttagtacaaggaaaaggccagaaaataaaaactttatagt

SEQ ID NO: 12417 - DNA, 122 bp, Homo sapiens
  misc_feature (61)..(62): /note="This region represents a CpG dinucleotide"
  misc_feature (61)..(61): /note="Nucleotide may be methylated to form 5-methylcytosine"
aactttcttaaggtctcataaccactagatggcagagcctggattcaaattcagaattatcgttcttcaaagcctgcatatttattttaaataggaagctgacaaagcaaatggaaaaagtc

SEQ ID NO: 12418 - DNA, 122 bp, Homo sapiens
  misc_feature (61)..(62): /note="This region represents a CpG dinucleotide"
  misc_feature (61)..(61): /note="Nucleotide may be methylated to form 5-methylcytosine"
tcggtggccagcagtgtaaattaatctttccctctctgctcaaagcaactttgcaactctcgtctatagaggtggccagtaaaacccaagcaaaaatctaaacgggcaccaggtggccactg

SEQ ID NO: 12419 - DNA, 122 bp, Homo sapiens
  misc_feature (61)..(62): /note="This region represents a CpG dinucleotide"
  misc_feature (61)..(61): /note="Nucleotide may be methylated to form 5-methylcytosine"
acaaaatggcttgaagactggaatctaagatttgaaactattgaaactactagaagaaaacgttagggaaatgctccagaaccaaatatttcttagtaagaccttaaaagcataggcaagca

SEQ ID NO: 12420 - DNA, 122 bp, Homo sapiens
  misc_feature (61)..(62): /note="This region represents a CpG dinucleotide"
  misc_feature (61)..(61): /note="Nucleotide may be methylated to form 5-methylcytosine"
gtagaaaaccctaaaaactgctgacatttgacattctatgatcaaggaacaaagtctggacgcttggttccaaactgatggattgccttcacagatccaattctcgacaaattctagaacag

SEQ ID NO: 12421 - DNA, 122 bp, Homo sapiens
  misc_feature (61)..(62): /note="This region represents a CpG dinucleotide"
  misc_feature (61)..(61): /note="Nucleotide may be methylated to form 5-methylcytosine"
aatgtatcaggcctcaacagcccaagtttggagtttattctcaaagttcgtcagtccacacgtaggtgccagcagctacggcatgccagtgctacagaatctacgtacatcaagtgtgaata

SEQ ID NO: 12422 - DNA, 122 bp, Homo sapiens
  misc_feature (61)..(62): /note="This region represents a CpG dinucleotide"
  misc_feature (61)..(61): /note="Nucleotide may be methylated to form 5-methylcytosine"
gtgatcacagtttttgtcattgttttatctgtctaatctctctgggctgcaagctcctggcgctgtgttcctgctgctctatcacatagtaggtgatctatgaatatctgccaagtgaatgc

SEQ ID NO: 12423 - DNA, 122 bp, Homo sapiens
  misc_feature (61)..(62): /note="This region represents a CpG dinucleotide"
  misc_feature (61)..(61): /note="Nucleotide may be methylated to form 5-methylcytosine"
cactgaccaggccccgcccttcaaccagggcttctgcagcgtctacatcactctgctcaacgagctggacgaggccgtgcagttctccaatgcctcatacgaggctgccatcctggagaatc

SEQ ID NO: 12424 - DNA, 122 bp, Homo sapiens
  misc_feature (61)..(62): /note="This region represents a CpG dinucleotide"
  misc_feature (61)..(61): /note="Nucleotide may be methylated to form 5-methylcytosine"
catttgtaaactgtcatggtgctggtgggagtgtagcagtgaggacgaccaggggtcactcgtgagcatcttggttatggtgggttttagctggctttactgcaacctgttttatcagcagt

SEQ ID NO: 12425 - DNA, 122 bp, Homo sapiens
  misc_feature (61)..(62): /note="This region represents a CpG dinucleotide"
  misc_feature (61)..(61): /note="Nucleotide may be methylated to form 5-methylcytosine"
ggaacttgctagaaatacatgttacctgatctcaccttaaatctactgagtcagaaactccgggggtggggcccagaaatctgtgttttaaggcccttccagcaagtctgacatgcttgaaa

SEQ ID NO: 12426 - DNA, 122 bp, Homo sapiens
  misc_feature (61)..(62): /note="This region represents a CpG dinucleotide"
  misc_feature (61)..(61): /note="Nucleotide may be methylated to form 5-methylcytosine"
gcactgcagtgtcataactgcagaaacactgagacagcccagctgtgcagccccgagggacgggatcagtaaactatggtacatccctgtgatgtcccatgatgtagcaattaaaagtgctt

SEQ ID NO: 12427 - DNA, 122 bp, Homo sapiens
  misc_feature (61)..(62): /note="This region represents a CpG dinucleotide"
  misc_feature (61)..(61): /note="Nucleotide may be methylated to form 5-methylcytosine"
tcagcaaactccccaaacctagcagagtaggcagaaggctccaaaaagctagggagaagccggagctggcaaggggccttacagacccaggaagccctccccatgctctgggcctcccttgc

SEQ ID NO: 12428 - DNA, 122 bp, Homo sapiens
  misc_feature (61)..(62): /note="This region represents a CpG dinucleotide"
  misc_feature (61)..(61): /note="Nucleotide may be methylated to form 5-methylcytosine"
caccaaaaaaaaaaaaaaaaaaaaaaaaaaaaaaaaaaaaaaaaagaaaaaaaaccccgccggatccgaccgccactttcaaaaccccccaccgctctagaaccgcgggagcttccgtccct

SEQ ID NO: 12429 - DNA, 122 bp, Homo sapiens
  misc_feature (61)..(62): /note="This region represents a CpG dinucleotide"
  misc_feature (61)..(61): /note="Nucleotide may be methylated to form 5-methylcytosine"
tcctattctccttcttcccattgattatgggtgtggctgaaccactcagaaattcatcaccggtaaccaagtgagttcaatggtctttgaatgggttgcaggctgtgggtgtggtgtggtgg

SEQ ID NO: 12430 - DNA, 122 bp, Homo sapiens
  misc_feature (61)..(62): /note="This region represents a CpG dinucleotide"
  misc_feature (61)..(61): /note="Nucleotide may be methylated to form 5-methylcytosine"
aagatcaagttgcagcaggtttgatgtctggtgagggtgacactcttcacttcaagatggcgtcttgtcactgcatcctcacatggtgagggacagaaggacaaaaagggatgaatgctgtg

SEQ ID NO: 12431 - DNA, 122 bp, Homo sapiens
  misc_feature (61)..(62): /note="This region represents a CpG dinucleotide"
  misc_feature (61)..(61): /note="Nucleotide may be methylated to form 5-methylcytosine"
tccatctaacagctagactttccactgggttcctggcctgacttctgtagtattctgcatcgttttttccattaaacaagggcttccaggactataatttgactctgctaatggaagggcat

SEQ ID NO: 12432 - DNA, 122 bp, Homo sapiens
  misc_feature (61)..(62): /note="This region represents a CpG dinucleotide"
  misc_feature (61)..(61): /note="Nucleotide may be methylated to form 5-methylcytosine"
gcctccttctaaaattaaaggaaaggggtctgaaaatgttgcttgtgactaagcaggttacgtcacacatggaatttagattctgttccaaatctgaggacagaagcacacaccttagcagg

SEQ ID NO: 12433 - DNA, 122 bp, Homo sapiens
  misc_feature (61)..(62): /note="This region represents a CpG dinucleotide"
  misc_feature (61)..(61): /note="Nucleotide may be methylated to form 5-methylcytosine"
actaacttcttcagtctcagaactcccaccattccccacatatcggagcacagacagatacggtatcgctgcaggagaaacgtcaaccatcaggaaataagagtgacacatgcccatttcct

SEQ ID NO: 12434 - DNA, 122 bp, Homo sapiens
  misc_feature (61)..(62): /note="This region represents a CpG dinucleotide"
  misc_feature (61)..(61): /note="Nucleotide may be methylated to form 5-methylcytosine"
tctggtgaggaaggaagagagtggggtggatgtggctgtggacatgcaaagtctgactcacgttccacagaccacagaggtgagatctccaaattttgccgctagcttggcaagaaaattga

SEQ ID NO: 12435 - DNA, 122 bp, Homo sapiens
  misc_feature (61)..(62): /note="This region represents a CpG dinucleotide"
  misc_feature (61)..(61): /note="Nucleotide may be methylated to form 5-methylcytosine"
aggaaaccctcttatttgcatacttactagtatggcattcaaagcatttacttactaattcggatgataattttttgtcagttggaattcaactaagattgtagtggctttcaccaagcctt

SEQ ID NO: 12436 - DNA, 122 bp, Homo sapiens
  misc_feature (61)..(62): /note="This region represents a CpG dinucleotide"
  misc_feature (61)..(61): /note="Nucleotide may be methylated to form 5-methylcytosine"
tgcgcgctctgcagaaattctgcccgcctctccaggccctccttccagctcccggcagagcgggctggaagtaacggggaagagcggttatttgttggtttaatataatttgtttagtcacc

SEQ ID NO: 12437 - DNA, 122 bp, Homo sapiens
  misc_feature (61)..(62): /note="This region represents a CpG dinucleotide"
  misc_feature (61)..(61): /note="Nucleotide may be methylated to form 5-methylcytosine"
aagtcagtaaaacgcgtgaattgcgtggagcaggcactcccagaacaagtttggaggatccgtgatggctgagctcttccgagtccctggagatgtccctccctcgcgattggtgcctgccc

SEQ ID NO: 12438 - DNA, 122 bp, Homo sapiens
  misc_feature (61)..(62): /note="This region represents a CpG dinucleotide"
  misc_feature (61)..(61): /note="Nucleotide may be methylated to form 5-methylcytosine"
caacgacataaacgaagtcacttcctggattggctttcctaatggcctggagcatctgctcgtcctctaggcaccgggcactgaagccggacaggggctggctgctccggcagatggaggcc

SEQ ID NO: 12439 - DNA, 122 bp, Homo sapiens
  misc_feature (61)..(62): /note="This region represents a CpG dinucleotide"
  misc_feature (61)..(61): /note="Nucleotide may be methylated to form 5-methylcytosine"
acctgcctgtatgaggtgtctgtcggcccctactgggaggtgtctcccagtcaggctacacgagggtcagggacccacttgaagaagcagtctgtacattatcggagcttgaacgctgtgct

SEQ ID NO: 12440 - DNA, 122 bp, Homo sapiens
  misc_feature (61)..(62): /note="This region represents a CpG dinucleotide"
  misc_feature (61)..(61): /note="Nucleotide may be methylated to form 5-methylcytosine"
gcatgtggacaagtgaccagtctccagttgactgtaaaggctggctttcatcaccaccagcgggctaacctcctacatatatctgtgtgtctacggcaaggtcgacagaacccatatataag

SEQ ID NO: 12441 - DNA, 122 bp, Homo sapiens
  misc_feature (61)..(62): /note="This region represents a CpG dinucleotide"
  misc_feature (61)..(61): /note="Nucleotide may be methylated to form 5-methylcytosine"
ccttgtaatctgcttcttcccacatctgttgttaaacacttttctaattactctgtttagcgtttcttctgctttctctggtgacacatgatttctttcaaaattgggccccaaatttaagt

SEQ ID NO: 12442 - DNA, 122 bp, Homo sapiens
  misc_feature (61)..(62): /note="This region represents a CpG dinucleotide"
  misc_feature (61)..(61): /note="Nucleotide may be methylated to form 5-methylcytosine"
gggcagagttcgcagcaagtccagctcaatctgcttggaggctgggttctgtttctccagcgccttctgcagcaaggtctggaagtggccaggctcagtgttgtccttgaacttcctggtgt

SEQ ID NO: 12443 - DNA, 122 bp, Homo sapiens
  misc_feature (61)..(62): /note="This region represents a CpG dinucleotide"
  misc_feature (61)..(61): /note="Nucleotide may be methylated to form 5-methylcytosine"
ccttcacagcaacgcctagattagtgtttgactgagtaactgtggactctagcctggccacgtcaacacataacactagcctcacagataggaatagtgaaagcaaacactttatggggttc

SEQ ID NO: 12444 - DNA, 122 bp, Homo sapiens
  misc_feature (61)..(62): /note="This region represents a CpG dinucleotide"
  misc_feature (61)..(61): /note="Nucleotide may be methylated to form 5-methylcytosine"
ctcatttttaaaacggggaagacaccattgctcagaattgtgaagattaagctagaaggccgggcaggatggctcacttctataattccagcactgtgggaggctgaggtgggaggattgct

SEQ ID NO: 12445 - DNA, 122 bp, Homo sapiens
  misc_feature (61)..(62): /note="This region represents a CpG dinucleotide"
  misc_feature (61)..(61): /note="Nucleotide may be methylated to form 5-methylcytosine"
tcctttccataggtccatgagactggggcagcagcaggggcaggtacagagcacctcagccgcctctccacctgacagcaacatcaaagccgaggccaaggcgggagggcccagagtgagac

SEQ ID NO: 12446 - DNA, 122 bp, Homo sapiens
  misc_feature (61)..(62): /note="This region represents a CpG dinucleotide"
  misc_feature (61)..(61): /note="Nucleotide may be methylated to form 5-methylcytosine"
ttcacaaggttttgagaggatttagtgacttgctattcacaaagtgcctagcacagcgctcgcacaccataaatgctcataaatgtgagacccactcctcccctctgaacacttaccagccc

SEQ ID NO: 12447 - DNA, 122 bp, Homo sapiens
  misc_feature (61)..(62): /note="This region represents a CpG dinucleotide"
  misc_feature (61)..(61): /note="Nucleotide may be methylated to form 5-methylcytosine"
tggcccttctaatgttttctccacagaggcagaccattccttgtgaaacacaaatctagtcgtcatgtcactgctaatgcacaagcctgttcagtggctccctgttgtactctagctgataa

SEQ ID NO: 12448 - DNA, 122 bp, Homo sapiens
  misc_feature (61)..(62): /note="This region represents a CpG dinucleotide"
  misc_feature (61)..(61): /note="Nucleotide may be methylated to form 5-methylcytosine"
tccttacagatcgtgttgataatcgagtggaatggacgtggagcaaggcatgttgcacaacgctgagatacgcacactgtgcatttacaggcccataaaccaagaggccaaacagccacagt

SEQ ID NO: 12449 - DNA, 122 bp, Homo sapiens
  misc_feature (61)..(62): /note="This region represents a CpG dinucleotide"
  misc_feature (61)..(61): /note="Nucleotide may be methylated to form 5-methylcytosine"
ggttgtcatccagccctgtgtcttcttccagcactacttggccaaggaagacgtgccagacgtgcatgcccagaaagtggcagacgcaggttgccagacaccacactcccaaagcatcatcc

SEQ ID NO: 12450 - DNA, 122 bp, Homo sapiens
  misc_feature (61)..(62): /note="This region represents a CpG dinucleotide"
  misc_feature (61)..(61): /note="Nucleotide may be methylated to form 5-methylcytosine"
ccgtccaaccatgccccgccccttttcaatccggcacaactgggaaaaaccaagagcgaccgcgggaagcatccaccgtccccgccggccctcaacaggttcatccgtgccccgccccccac

SEQ ID NO: 12451 - DNA, 122 bp, Homo sapiens
  misc_feature (61)..(62): /note="This region represents a CpG dinucleotide"
  misc_feature (61)..(61): /note="Nucleotide may be methylated to form 5-methylcytosine"
acagattcaaaggttccaggggagtgtgttggccactctcaggacagtacacagtagcttcgggtgtgtcccagtcagtcctaggagctgtggaaagagtagaagtgcctgaatgtggtgct

SEQ ID NO: 12452 - DNA, 122 bp, Homo sapiens
  misc_feature (61)..(62): /note="This region represents a CpG dinucleotide"
  misc_feature (61)..(61): /note="Nucleotide may be methylated to form 5-methylcytosine"
aagtttctgaaattttaacaattggttcccttgagctggtaggagccagctccagcacaacgctgcaaacccaattaatagttatttgttgagggctgttcctgaagactgttaagtctttg

SEQ ID NO: 12453 - DNA, 122 bp, Homo sapiens
  misc_feature (61)..(62): /note="This region represents a CpG dinucleotide"
  misc_feature (61)..(61): /note="Nucleotide may be methylated to form 5-methylcytosine"
caatctctccccacttcctcctagagaatctgccgtgggtgaggggccagaggggagtggcgccagcagccccagcaccacactgctgctgctggccctgggcaatctcacttcccttcctg

SEQ ID NO: 12454 - DNA, 122 bp, Homo sapiens
  misc_feature (61)..(62): /note="This region represents a CpG dinucleotide"
  misc_feature (61)..(61): /note="Nucleotide may be methylated to form 5-methylcytosine"
aagcataagtagtttcggtactcacataattcccgagtcccaaaaatgtagatggcaccacggaagagatagtaggccacagtgttactggcttcccataaacacagccctttcctggctca

SEQ ID NO: 12455 - DNA, 122 bp, Homo sapiens
  misc_feature (61)..(62): /note="This region represents a CpG dinucleotide"
  misc_feature (61)..(61): /note="Nucleotide may be methylated to form 5-methylcytosine"
cagtcatgaaaaggcactggaaaatacaaggtaaaaaactagtgtgaaaacagttgaatccgaagacagtctgtggtttactgaatattagtgtaccaatgttaatttctaagctgtgataa

SEQ ID NO: 12456 - DNA, 122 bp, Homo sapiens
  misc_feature (61)..(62): /note="This region represents a CpG dinucleotide"
  misc_feature (61)..(61): /note="Nucleotide may be methylated to form 5-methylcytosine"
gctgttagatgcccaacaagtttcccttattcttgagatacttagacctatagctgctcacggttctgcctagcagtcacatttgtcccggctcaggtggtctgcttgtcttcccttcttta

SEQ ID NO: 12457 - DNA, 122 bp, Homo sapiens
  misc_feature (61)..(62): /note="This region represents a CpG dinucleotide"
  misc_feature (61)..(61): /note="Nucleotide may be methylated to form 5-methylcytosine"
ctctgagtcactcttactggatggtctcagtacagcaacagtaactaggataagccaaggcgtcctctacacacatagtgaggccagcttgaaacaaggaagtacatagttgcagacttgga

SEQ ID NO: 12458 - DNA, 122 bp, Homo sapiens
  misc_feature (61)..(62): /note="This region represents a CpG dinucleotide"
  misc_feature (61)..(61): /note="Nucleotide may be methylated to form 5-methylcytosine"
agacacttcccccgtgcttgtggctgtcataactgcaaactctttgaatctgagacagctcgtgagctggggctgggcttctctgtacctcgtgttcaaagtctcagcgtgaccccacgccc

SEQ ID NO: 12459 - DNA, 122 bp, Homo sapiens
  misc_feature (61)..(62): /note="This region represents a CpG dinucleotide"
  misc_feature (61)..(61): /note="Nucleotide may be methylated to form 5-methylcytosine"
cagggatggccgttgtccttggaacggctgcagctcgaggccagggtggtggaggccgagcggagcggaagggccgtggggtccgcggggcgcggcggggacccagctccgtggatcccgag

SEQ ID NO: 12460 - DNA, 122 bp, Homo sapiens
  misc_feature (61)..(62): /note="This region represents a CpG dinucleotide"
  misc_feature (61)..(61): /note="Nucleotide may be methylated to form 5-methylcytosine"
actatagattattttatttaatccacacgagcacactatgaggcaggtacttattattgccgcttttcaaatgtggaaggtgaggcacacggcagttaaataacttgcctaggctcatactc

SEQ ID NO: 12461 - DNA, 122 bp, Homo sapiens
  misc_feature (61)..(62): /note="This region represents a CpG dinucleotide"
  misc_feature (61)..(61): /note="Nucleotide may be methylated to form 5-methylcytosine"
gccacttggagctttctgagcctcagtgtgctcatgattaaaatggggtaatactatctgcgttatgaggattcttgtgaaatttaggtattgtctagaaaatcccagtgcagggcccagta

SEQ ID NO: 12462 - DNA, 122 bp, Homo sapiens
  misc_feature (61)..(62): /note="This region represents a CpG dinucleotide"
  misc_feature (61)..(61): /note="Nucleotide may be methylated to form 5-methylcytosine"
caaggctacaagaaaacctggcctttccctgacactgccttggccttgattgcctcagtgcggagagtaaaacaagctgtcagactcagctcctgccctatccttgagctctaataacctca

SEQ ID NO: 12463 - DNA, 122 bp, Homo sapiens
  misc_feature (61)..(62): /note="This region represents a CpG dinucleotide"
  misc_feature (61)..(61): /note="Nucleotide may be methylated to form 5-methylcytosine"
ctctgtcaggaggattccggatgatttagtcacaaaacagtgactagaacaaaatccttacgcatgtacatacttctgattatgaaagccaattatgcttgttgggaaatttttaagtaagc

SEQ ID NO: 12464 - DNA, 122 bp, Homo sapiens
  misc_feature (61)..(62): /note="This region represents a CpG dinucleotide"
  misc_feature (61)..(61): /note="Nucleotide may be methylated to form 5-methylcytosine"
aaatatctaataaagttgacaatacacatacgataagatgcagtaattcccttttaggtacgcactgcagacaagcccttgcacatggcaggagatatgtcaaagaatatttaatgtatcat

SEQ ID NO: 12465 - DNA, 122 bp, Homo sapiens
  misc_feature (61)..(62): /note="This region represents a CpG dinucleotide"
  misc_feature (61)..(61): /note="Nucleotide may be methylated to form 5-methylcytosine"
cctgtcttacacttacagcgaatggtacttagtacctatgtagatgcttcttcctctccccggccagggtctcctcccatctgtctttatatgcccttggttcttaacacagtcccgagcca

SEQ ID NO: 12466 - DNA, 122 bp, Homo sapiens
  misc_feature (61)..(62): /note="This region represents a CpG dinucleotide"
  misc_feature (61)..(61): /note="Nucleotide may be methylated to form 5-methylcytosine"
gaactcccagtgactcagcccaatgtagagggtcatggttgtcttggaaaccacacattccgtgggcatggaccaaatggagacagaagggtcaaaagagattttgagcagactgaaaaaca

SEQ ID NO: 12467 - DNA, 122 bp, Homo sapiens
  misc_feature (61)..(62): /note="This region represents a CpG dinucleotide"
  misc_feature (61)..(61): /note="Nucleotide may be methylated to form 5-methylcytosine"
taatgtggtcaaaggaaagacagaaaagacatctggatgcctacaagttgtgtgtgcacacgcttgcacacatgtgagtgggcagatgtcaggaagcactcataaatgccacctcctgtgta

SEQ ID NO: 12468 - DNA, 122 bp, Homo sapiens
  misc_feature (61)..(62): /note="This region represents a CpG dinucleotide"
  misc_feature (61)..(61): /note="Nucleotide may be methylated to form 5-methylcytosine"
accaacagcatctttgcctttcatttaagtgcaattcaacaggagtttatgagtaacatacgcaagttgattgagcaatggtatagattctgtgtccaataaataaggtagtgtcaccagac

SEQ ID NO: 12469 - DNA, 122 bp, Homo sapiens
  misc_feature (61)..(62): /note="This region represents a CpG dinucleotide"
  misc_feature (61)..(61): /note="Nucleotide may be methylated to form 5-methylcytosine"
aactgtctttttgtcttgaaaaatctttttttctgtaatctggttaaatcaacatagaaccgatgagtttgatcctcagataatccagatgactcttcaagataattctgtaacaagactac

SEQ ID NO: 12470 - DNA, 122 bp, Homo sapiens
  misc_feature (61)..(62): /note="This region represents a CpG dinucleotide"
  misc_feature (61)..(61): /note="Nucleotide may be methylated to form 5-methylcytosine"
aatatttagattagatgatcatcctacttcaggatatgttgacttcattgatattggcatcgagcacttagaatgtattataaaatactgccaatctttagaaagtattttcattaacttcc

SEQ ID NO: 12471 - DNA, 122 bp, Homo sapiens
  misc_feature (61)..(62): /note="This region represents a CpG dinucleotide"
  misc_feature (61)..(61): /note="Nucleotide may be methylated to form 5-methylcytosine"
gagcaaatacaggcctatctaaaagcatacctcacagtaaagatggttaaaaaccaaaaccggaggaggcagagtactcttggtggggctggtagtggggggaatggatgattttccaaaag

SEQ ID NO: 12472 - DNA, 122 bp, Homo sapiens
  misc_feature (61)..(62): /note="This region represents a CpG dinucleotide"
  misc_feature (61)..(61): /note="Nucleotide may be methylated to form 5-methylcytosine"
acctcatgatctgcccgcctcggcctcccaaagtgctgggattacaggcgtgagccaccacgcccggcctgatttgtttgctttctatctgtgtaatcagaaaagaataaacacagagctct

SEQ ID NO: 12473 - DNA, 122 bp, Homo sapiens
  misc_feature (61)..(62): /note="This region represents a CpG dinucleotide"
  misc_feature (61)..(61): /note="Nucleotide may be methylated to form 5-methylcytosine"
acttgggggaaatgtggcgagagggcaggactcggcagcccatgggcatgccacaagatgcgcccaggcgctctggggtgaactctgctgtgacttcaggccagaggtgtctgcccccgcag

SEQ ID NO: 12474 - DNA, 122 bp, Homo sapiens
  misc_feature (61)..(62): /note="This region represents a CpG dinucleotide"
  misc_feature (61)..(61): /note="Nucleotide may be methylated to form 5-methylcytosine"
ggtggtttttatagtttcaggtgttacatttgtctttaatccattttgtgttgattgttgcgtaagaggtgagacaaagatctattttcattgttctgtttgtgaatatccagttttcccaa

SEQ ID NO: 12475 - DNA, 122 bp, Homo sapiens
  misc_feature (61)..(62): /note="This region represents a CpG dinucleotide"
  misc_feature (61)..(61): /note="Nucleotide may be methylated to form 5-methylcytosine"
gagacagaaagtaaaggttactttaccaggtgatggaagggggcaaatagaaagtgattacgtaatgaatacgcagtgtttttatggggtgatgaaacactttagaaactagagagctagtg

SEQ ID NO: 12476 - DNA, 122 bp, Homo sapiens
  misc_feature (61)..(62): /note="This region represents a CpG dinucleotide"
  misc_feature (61)..(61): /note="Nucleotide may be methylated to form 5-methylcytosine"
ggccaaccagagagagataagggatccctgaaagtctcttcaggttactcaaagccttcacgaacaagacagacaagactaggcgcccaactcaaatcacagttctggggtcgtgttcggag

SEQ ID NO: 12477 - DNA, 122 bp, Homo sapiens
  misc_feature (61)..(62): /note="This region represents a CpG dinucleotide"
  misc_feature (61)..(61): /note="Nucleotide may be methylated to form 5-methylcytosine"
gggagcagcagctcctgaaggttccatggcagggaacaagacactccttctggaaggcaccgattttcctagccccactcccattacacgcacacacacacacacacatacagagtgattca

SEQ ID NO: 12478 - DNA, 122 bp, Homo sapiens
  misc_feature (61)..(62): /note="This region represents a CpG dinucleotide"
  misc_feature (61)..(61): /note="Nucleotide may be methylated to form 5-methylcytosine"
tttatgaaagaataatttctgtctattgcctaatactgtgtatcatcactgtgcttgacacgtagttggtaatctctaagtatttgagaagcagtgagttaattaatatttgcttttttgac

SEQ ID NO: 12479 - DNA, 122 bp, Homo sapiens
  misc_feature (61)..(62): /note="This region represents a CpG dinucleotide"
  misc_feature (61)..(61): /note="Nucleotide may be methylated to form 5-methylcytosine"
agaaggcttggaggggtgggtacttatccccagtcagtcatcagagagcccttcaggagacgtcactcatttctgtctcataatgaaactgaaagttgagacctctacggaataaaatagga

SEQ ID NO: 12480 - DNA, 122 bp, Homo sapiens
  misc_feature (61)..(62): /note="This region represents a CpG dinucleotide"
  misc_feature (61)..(61): /note="Nucleotide may be methylated to form 5-methylcytosine"
ttttttcccatagttattcctcataaaattggccgagtcatagaaggaagtccggctgaccgctgtggaaaactgaaagttggagatcatatctctgcagtgaatgggcagtccattgttga

SEQ ID NO: 12481 - DNA, 122 bp, Homo sapiens
  misc_feature (61)..(62): /note="This region represents a CpG dinucleotide"
  misc_feature (61)..(61): /note="Nucleotide may be methylated to form 5-methylcytosine"
cattgggggtggtgttggggagagcatcaagcacaaatacctaaaggtgtgagacccaaacgtattttggttcagcaaatagttgcattgctggcagtagaatggagttgggggagtggcaa

SEQ ID NO: 12482 - DNA, 122 bp, Homo sapiens
  misc_feature (61)..(62): /note="This region represents a CpG dinucleotide"
  misc_feature (61)..(61): /note="Nucleotide may be methylated to form 5-methylcytosine"
gagtactccagaagcgaaggctactagcacggacaactgcagtgtcctctctgacacatccgccatggctgccgccggcgtgcagcgcggtctacggcgcggcggcggggtcaaaaggcgcc

SEQ ID NO: 12483 - DNA, 122 bp, Homo sapiens
  misc_feature (61)..(62): /note="This region represents a CpG dinucleotide"
  misc_feature (61)..(61): /note="Nucleotide may be methylated to form 5-methylcytosine"
acacacaggcacacacgcacacacacaagtactaaaattatcttcactgacaggaatgcacgataaaaggcatttgaaagccactggtttagagaacgagcttcagagttccagttgcctaa

SEQ ID NO: 12484 - DNA, 122 bp, Homo sapiens
  misc_feature (61)..(62): /note="This region represents a CpG dinucleotide"
  misc_feature (61)..(61): /note="Nucleotide may be methylated to form 5-methylcytosine"
gggactgagcagcccctttctaaggaaagctaatgcttactgagcacttatatcagatatcgtgccaagtgccttatgcacactatctccttgaatcctcaaagcagccttacagaaagtct

SEQ ID NO: 12485 - DNA, 122 bp, Homo sapiens
  misc_feature (61)..(62): /note="This region represents a CpG dinucleotide"
  misc_feature (61)..(61): /note="Nucleotide may be methylated to form 5-methylcytosine"
tagaaaagtatgacctgatatgcctggtaatttggagggtataagaaaagaaagagaacacgaaaaagaccctgtccccagatgatttattatctaattgggaaaagatcatatgtgcttat

SEQ ID NO: 12486 - DNA, 122 bp, Homo sapiens
  misc_feature (61)..(62): /note="This region represents a CpG dinucleotide"
  misc_feature (61)..(61): /note="Nucleotide may be methylated to form 5-methylcytosine"
attctatcggttctgtcatttaaacaaattcagtcatatccacattctttcactcatctgcgattctaaatttctggaggacggagaccctacaagctactctggaatctctatagacacta

SEQ ID NO: 12487 - DNA, 122 bp, Homo sapiens
  misc_feature (61)..(62): /note="This region represents a CpG dinucleotide"
  misc_feature (61)..(61): /note="Nucleotide may be methylated to form 5-methylcytosine"
agagtagggggaccgctgagctctgtccacagactagagcaggaaaggggggaaaggcggcgatagaggttagcaggaatgtttaattatcaggagcaggaacagaactgagggcatgccca

SEQ ID NO: 12488 - DNA, 122 bp, Homo sapiens
  misc_feature (61)..(62): /note="This region represents a CpG dinucleotide"
  misc_feature (61)..(61): /note="Nucleotide may be methylated to form 5-methylcytosine"
caagtgtgtggtcctctcagacctatggagttggtgctgttctggctccctcttaaagagcgggaaactgagacacagagaagtcccaccgccgggggtcggggtggggagggcctgggatt

SEQ ID NO: 12489 - DNA, 122 bp, Homo sapiens
  misc_feature (61)..(62): /note="This region represents a CpG dinucleotide"
  misc_feature (61)..(61): /note="Nucleotide may be methylated to form 5-methylcytosine"
cctcactggctttcctagggtcccatcccctgtcgacttgagggcatttaactcttctttcgtcatcttggtaggatcttggtatcaaacattactgagagtgtcggaagtctctccattgg

SEQ ID NO: 12490 - DNA, 122 bp, Homo sapiens
  misc_feature (61)..(62): /note="This region represents a CpG dinucleotide"
  misc_feature (61)..(61): /note="Nucleotide may be methylated to form 5-methylcytosine"
tgtctttagaggttatttaatccagaggtcacaaaggcaaatggctgcaaaggccaggtgcgtagtggagatgagtcaagtgagcagagtatgaggacagtgaactgaaaaacaatgatgca

SEQ ID NO: 12491 - DNA, 122 bp, Homo sapiens
  misc_feature (61)..(62): /note="This region represents a CpG dinucleotide"
  misc_feature (61)..(61): /note="Nucleotide may be methylated to form 5-methylcytosine"
caagctgcccagacaggcctgtggggctggctgagggttgggctgcccttagccaggccccgctgctggccagaggagtggcagatgccaaaccactgaagccaaaaaagctcttaaggcgg

SEQ ID NO: 12492 - DNA, 122 bp, Homo sapiens
  misc_feature (61)..(62): /note="This region represents a CpG dinucleotide"
  misc_feature (61)..(61): /note="Nucleotide may be methylated to form 5-methylcytosine"
ttccaagaggataaagtgcaaaccttaaaacaaatggaagatttatggaatagcctcctccgtatttgaatgcattttatcttaataagtcttcttgatggaaacgtgtttttcaaaagtga

SEQ ID NO: 12493 - DNA, 122 bp, Homo sapiens
  misc_feature (61)..(62): /note="This region represents a CpG dinucleotide"
  misc_feature (61)..(61): /note="Nucleotide may be methylated to form 5-methylcytosine"
cttgcagggaagtgggtaagatcccactgggctgactgagtacccgggacagaccctaagcgtggagggaggaagcccggtcagagtgggcaggagacgcagggacccacagtctggtcagg

SEQ ID NO: 12494 - DNA, 122 bp, Homo sapiens
  misc_feature (61)..(62): /note="This region represents a CpG dinucleotide"
  misc_feature (61)..(61): /note="Nucleotide may be methylated to form 5-methylcytosine"
gtcacccacttcctctttccacaactgtggaagtaggcgttacttgacattctgaaagtacgtcagaaagtaatcctgacagcactttctgtaattggtgtgttgttgctgtgcttcatgct

SEQ ID NO: 12495 - DNA, 122 bp, Homo sapiens
  misc_feature (61)..(62): /note="This region represents a CpG dinucleotide"
  misc_feature (61)..(61): /note="Nucleotide may be methylated to form 5-methylcytosine"
gtgacttcagtctctgccagctggagccctgtctcccagtagccagtggcaggggcagtacgccacctggaaggggaaggtggggaggccatgctggcccaggggagagcatggccactgac

SEQ ID NO: 12496 - DNA, 122 bp, Homo sapiens
  misc_feature (61)..(62): /note="This region represents a CpG dinucleotide"
  misc_feature (61)..(61): /note="Nucleotide may be methylated to form 5-methylcytosine"
aagctgcagaacctctgtgcattcaacagtcacttcctgcgtttttgtgccattgtcacacgttgtgcttcagagacgccagaagacctgggcaaagacgtgagaactgcagccatcagctg

SEQ ID NO: 12497 - DNA, 122 bp, Homo sapiens
  misc_feature (61)..(62): /note="This region represents a CpG dinucleotide"
  misc_feature (61)..(61): /note="Nucleotide may be methylated to form 5-methylcytosine"
ggctacatatggactcagagcaaacatgtgctgtgatcaattaatgctgcctgctgtaggcgtgggaggaggaagtgatgacttgtgtgcatgtattggccaaccctggacctcccagctct

SEQ ID NO: 12498 - DNA, 122 bp, Homo sapiens
  misc_feature (61)..(62): /note="This region represents a CpG dinucleotide"
  misc_feature (61)..(61): /note="Nucleotide may be methylated to form 5-methylcytosine"
cagaaacaggactctcttaatagtctgatttacattcatatcaatacaaacacacatatacgcacagctatcaacacagtcatccactctacatctaaaatgtctcatttcctcctcttcat

SEQ ID NO: 12499 - DNA, 122 bp, Homo sapiens
  misc_feature (61)..(62): /note="This region represents a CpG dinucleotide"
  misc_feature (61)..(61): /note="Nucleotide may be methylated to form 5-methylcytosine"
ggtgacactctccaggtgagtccttgtgtaattattaaggactcgcctttctcaagctggcggggaaaggggttgctgagaagggagaaatctggagcctaagtgacctaaatgaccagaac

SEQ ID NO: 12500 - DNA, 122 bp, Homo sapiens
  misc_feature (61)..(62): /note="This region represents a CpG dinucleotide"
  misc_feature (61)..(61): /note="Nucleotide may be methylated to form 5-methylcytosine"
tcactaaccaagcatctttaatccaagccaaattacagaactctctaacttagaggtgatcgtccatacggcagatcattacaacatgaaaaacgtaagctaagatgttgaacacagccaga

SEQ ID NO: 12501 - DNA, 122 bp, Homo sapiens
  misc_feature (61)..(62): /note="This region represents a CpG dinucleotide"
  misc_feature (61)..(61): /note="Nucleotide may be methylated to form 5-methylcytosine"
ctcattctttatgccttgacatcagtgatatatatcatgtgtaacacaacacatagagtacgtatcttcctacatatgctggagagagcttaatctttttctgattttttgaaaatcgtgat

SEQ ID NO: 12502 - DNA, 122 bp, Homo sapiens
  misc_feature (61)..(62): /note="This region represents a CpG dinucleotide"
  misc_feature (61)..(61): /note="Nucleotide may be methylated to form 5-methylcytosine"
ctgcttccagtgactagctgcaaaacagaaagtgtctgttcacaactgtcattcacaccacggtgactttctcaaagtctcctctgggtaataaacctctttaggagtctgtcaatgcacac

SEQ ID NO: 12503 - DNA, 122 bp, Homo sapiens
  misc_feature (61)..(62): /note="This region represents a CpG dinucleotide"
  misc_feature (61)..(61): /note="Nucleotide may be methylated to form 5-methylcytosine"
acatgtcaaactggcctaccttagccagatgtgatgggtgtggtccagtgttggagagtccggatctgtctcaggattgtgttaatacctggaacatgcacaaagatacatacatacctgga

SEQ ID NO: 12504 - DNA, 122 bp, Homo sapiens
  misc_feature (61)..(62): /note="This region represents a CpG dinucleotide"
  misc_feature (61)..(61): /note="Nucleotide may be methylated to form 5-methylcytosine"
tcaaatgcctcttgaactggcctggggccttggctgtggcagcctgtttgcactgcagagcgtggtctcagactttggattgctctaagaattgtcattctcttcaggggctgaaatcctca

SEQ ID NO: 12505 - DNA, 122 bp, Homo sapiens
  misc_feature (61)..(62): /note="This region represents a CpG dinucleotide"
  misc_feature (61)..(61): /note="Nucleotide may be methylated to form 5-methylcytosine"
aaaccggacacggtagtagggtgcacgtgtcaggttataaatgaccctgtctcctttatgcgtgtgtgctctcgtggcaagactactagcgagcggcaacctttctgcagaaagtaaactag

SEQ ID NO: 12506 - DNA, 122 bp, Homo sapiens
  misc_feature (61)..(62): /note="This region represents a CpG dinucleotide"
  misc_feature (61)..(61): /note="Nucleotide may be methylated to form 5-methylcytosine"
cccagtgcagtgtaaatattcacacatccaggcacaaccccaccccaccccccacatgtacgcataaaatatgaatctgtctgtagtgaggaagcacagtacagtgttcattgctgtggatt

SEQ ID NO: 12507 - DNA, 122 bp, Homo sapiens
  misc_feature (61)..(62): /note="This region represents a CpG dinucleotide"
  misc_feature (61)..(61): /note="Nucleotide may be methylated to form 5-methylcytosine"
gggagagagatgagtaagatgagatgaccaatccccatctaccgtgtgtgcacacaaccacgcattcgcaagggtgtgggcacacgaacaccgacatacacctacctacagcagaaagcaga

SEQ ID NO: 12508 - DNA, 122 bp, Homo sapiens
  misc_feature (61)..(62): /note="This region represents a CpG dinucleotide"
  misc_feature (61)..(61): /note="Nucleotide may be methylated to form 5-methylcytosine"
gctgttctcatcccgagcacatagctcagtgcctgcagaagacaggcactcaggaaatgacgcaatgggcagcctgactcatggacagatttcacttcgattaaattccccaccgcctcctg

SEQ ID NO: 12509 - DNA, 122 bp, Homo sapiens
  misc_feature (61)..(62): /note="This region represents a CpG dinucleotide"
  misc_feature (61)..(61): /note="Nucleotide may be methylated to form 5-methylcytosine"
tgagctcagatgaggaattcgacagtgtctacgatccctcgtccattgcatcactgcttacggagagcaacctacagaccagctcctgttagctcgtggtcctcaaggactcagaaaccagg

SEQ ID NO: 12510 - DNA, 122 bp, Homo sapiens
  misc_feature (61)..(62): /note="This region represents a CpG dinucleotide"
  misc_feature (61)..(61): /note="Nucleotide may be methylated to form 5-methylcytosine"
acccaggtctatctcacagccacagcatagtattttcttttttttcttgctgtgactgcacgttacgccatacatggcattcaggacgcagaggaattagtatttactgtttttaacattcc

SEQ ID NO: 12511 - DNA, 122 bp, Homo sapiens
  misc_feature (61)..(62): /note="This region represents a CpG dinucleotide"
  misc_feature (61)..(61): /note="Nucleotide may be methylated to form 5-methylcytosine"
acataccaaatactctgccaagcactgacaggtagtgagtatgttgcaatggagagacaccgtgttttttgtttttgtttttgttttttgagatggagtctcacactgtcacccaggctgaa

SEQ ID NO: 12512 - DNA, 122 bp, Homo sapiens
  misc_feature (61)..(62): /note="This region represents a CpG dinucleotide"
  misc_feature (61)..(61): /note="Nucleotide may be methylated to form 5-methylcytosine"
taaaaagcctaggtctctttttggcacctgtgaaaagttcaaaccatgcatcttgtcctacgacaggcagccttcaccctagctgcaccccctagctaccataaaaacccaagccagtagcc

SEQ ID NO: 12513 - DNA, 122 bp, Homo sapiens
  misc_feature (61)..(62): /note="This region represents a CpG dinucleotide"
  misc_feature (61)..(61): /note="Nucleotide may be methylated to form 5-methylcytosine"
gtttccttggggagataagaataacattcgtggacggtaaataaagcagcatgtggtgaacggctaatttcgccacacagaaaacaaacacacaaatctctgtatggagagaacaggaggtc

SEQ ID NO: 12514 - DNA, 122 bp, Homo sapiens
  misc_feature (61)..(62): /note="This region represents a CpG dinucleotide"
  misc_feature (61)..(61): /note="Nucleotide may be methylated to form 5-methylcytosine"
taatgtgggtaggccttatccaatcagctggagacctgaatagacaaaaagaccagcctccgggaggaaaaaagaaattctccagcagactgccttcagattttatctgcaacatttgccct

SEQ ID NO: 12515 - DNA, 122 bp, Homo sapiens
  misc_feature (61)..(62): /note="This region represents a CpG dinucleotide"
  misc_feature (61)..(61): /note="Nucleotide may be methylated to form 5-methylcytosine"
acaaactggaagcccgggagccctgcactggctccctcacccccgctgatgtggctttcacggtgtcctaagcacttttgaatgggaagctgacattgcaaaactggaagatttcactttca

SEQ ID NO: 12516 - DNA, 122 bp, Homo sapiens
  misc_feature (61)..(62): /note="This region represents a CpG dinucleotide"
  misc_feature (61)..(61): /note="Nucleotide may be methylated to form 5-methylcytosine"
ctcttaaagataaatgtgtcttaagaataattatatatcctaacaagtgaccacatccttcgatgtgtggatctgatcctccttcactagaaggctggggataaggcagaggcaacactagc

SEQ ID NO: 12517 - DNA, 122 bp, Homo sapiens
  misc_feature (61)..(62): /note="This region represents a CpG dinucleotide"
  misc_feature (61)..(61): /note="Nucleotide may be methylated to form 5-methylcytosine"
cccagatgattgagtatacacacatgacatcctgactttgttcacaagagtttctaatgtcgatactcttcacagagtcttcaccaagtaatcttcaagaactgagaaactttattaacatc

SEQ ID NO: 12518 - DNA, 122 bp, Homo sapiens
  misc_feature (61)..(62): /note="This region represents a CpG dinucleotide"
  misc_feature (61)..(61): /note="Nucleotide may be methylated to form 5-methylcytosine"
tttgccatatcctaaaatatcattttatttcctccattatggaacagctctgagagtagacgatacgttgtcatccctaaattttttttttttttatggtagggagaaagcaactgccacca

SEQ ID NO: 12519 - DNA, 122 bp, Homo sapiens
  misc_feature (61)..(62): /note="This region represents a CpG dinucleotide"
  misc_feature (61)..(61): /note="Nucleotide may be methylated to form 5-methylcytosine"
attctcattttacagaagagaaaaacagaagttcagagaaataatgtgtcccaggaagtacgaagagggatttaagcctagattcagctgactctgaagcctatttttgcaccaccttctgg

SEQ ID NO: 12520 - DNA, 122 bp, Homo sapiens
  misc_feature (61)..(62): /note="This region represents a CpG dinucleotide"
  misc_feature (61)..(61): /note="Nucleotide may be methylated to form 5-methylcytosine"
gctctgccctttggcgctaaaattagcatgttcttccttgtcttcaaaggctcccatcaccggcacccaagcagtgacttgccttattaatgcacatgggcatgatggtagcaggttaattg

SEQ ID NO: 12521 - DNA, 122 bp, Homo sapiens
  misc_feature (61)..(62): /note="This region represents a CpG dinucleotide"
  misc_feature (61)..(61): /note="Nucleotide may be methylated to form 5-methylcytosine"
ttcaatggtaacacaagaaaagaatgactcattccaacttttgcaatcagggaaagcttccggggaaccagtggagatctgctgcaaaacagggaaggaaaaaaataccaggaacatagtaa

SEQ ID NO: 12522 - DNA, 122 bp, Homo sapiens
  misc_feature (61)..(62): /note="This region represents a CpG dinucleotide"
  misc_feature (61)..(61): /note="Nucleotide may be methylated to form 5-methylcytosine"
ccccatctgcaatacaagttttcataggcttttgagtccttttcagcccctccctgtagacgcacgataagaaacataaatatgcccctttcttacttgagtcctactcgtgatgctgatgc

SEQ ID NO: 12523 - DNA, 122 bp, Homo sapiens
  misc_feature (61)..(62): /note="This region represents a CpG dinucleotide"
  misc_feature (61)..(61): /note="Nucleotide may be methylated to form 5-methylcytosine"
ttgggtgtgttccttaagctgaacttccgtagatctggcaggacatttaacaccagaacacgaagcctgcttcagaagtgactgaaacggcatctgcctcacagtgcatatttaaaaaatga

SEQ ID NO: 12524 - DNA, 122 bp, Homo sapiens
  misc_feature (61)..(62): /note="This region represents a CpG dinucleotide"
  misc_feature (61)..(61): /note="Nucleotide may be methylated to form 5-methylcytosine"
actagtacttgacagcatggtgcagtctcattcctcatgccttcgcattgtggcccgccacgctcctgagaaggacacacctccatagcatggagaggaaacagaggcacagagaggctaat

SEQ ID NO: 12525 - DNA, 122 bp, Homo sapiens
  misc_feature (61)..(62): /note="This region represents a CpG dinucleotide"
  misc_feature (61)..(61): /note="Nucleotide may be methylated to form 5-methylcytosine"
gaaaaactaagtgaagaaagtgaaggaggaggatagggcatctgtggggaaggcaggggacggctcaatctatggattcaggaagggtgtggtctgcgtgctcccagtgtgagtgtgggtgt

SEQ ID NO: 12526 - DNA, 122 bp, Homo sapiens
  misc_feature (61)..(62): /note="This region represents a CpG dinucleotide"
  misc_feature (61)..(61): /note="Nucleotide may be methylated to form 5-methylcytosine"
tctctgaaatcagctgagaaaaggcagattaataggacaaaaggcaaatttattgatcatcgttttatgtgacacaggaacctcagaatgaagacccaaagatgcaaaggaaactgtccatt

SEQ ID NO: 12527 - DNA, 122 bp, Homo sapiens
  misc_feature (61)..(62): /note="This region represents a CpG dinucleotide"
  misc_feature (61)..(61): /note="Nucleotide may be methylated to form 5-methylcytosine"
gacgtgggttaggaaaccatcccaacgtcaaagagaaacaatccatctaaggcaggggaacgctgacgtggtaacacccagtgctgacacccacaggaggatcccatctaggccccacccca

SEQ ID NO: 12528 - DNA, 122 bp, Homo sapiens
  misc_feature (61)..(62): /note="This region represents a CpG dinucleotide"
  misc_feature (61)..(61): /note="Nucleotide may be methylated to form 5-methylcytosine"
accgcacccggcctggtttctcttcttctaaggccactgatcctgtcagaccagggcccacgctcatgacctcatctaaccctaatcacctcccaaaggtcccatcccctaataccatcaca

SEQ ID NO: 12529 - DNA, 122 bp, Homo sapiens
  misc_feature (61)..(62): /note="This region represents a CpG dinucleotide"
  misc_feature (61)..(61): /note="Nucleotide may be methylated to form 5-methylcytosine"
atgccctgttgctacatcaacatgatggtaaatgcttcttacaaaacctgtagcttccttcgcatgcatcctgtaactcctgctgacttactgaatttgtgagtcagcataatggtcaagaa

SEQ ID NO: 12530 - DNA, 122 bp, Homo sapiens
  misc_feature (61)..(62): /note="This region represents a CpG dinucleotide"
  misc_feature (61)..(61): /note="Nucleotide may be methylated to form 5-methylcytosine"
tggcgccggagctcattggcatgctgtaagcgccctgtggcctttttctcctcctccagccgctccttctcaatctgttctctctgagccctgggggagggaaacaggaatggaatgaactc

SEQ ID NO: 12531 - DNA, 122 bp, Homo sapiens
  misc_feature (61)..(62): /note="This region represents a CpG dinucleotide"
  misc_feature (61)..(61): /note="Nucleotide may be methylated to form 5-methylcytosine"
ggaagtcacttaacctttattgaaaagactctggatttaataagctgtgtaactggtactcgatagttacccaaagttcagtctagatggcacaaaccacctctcagggaataaaccctaag

SEQ ID NO: 12532 - DNA, 122 bp, Homo sapiens
  misc_feature (61)..(62): /note="This region represents a CpG dinucleotide"
  misc_feature (61)..(61): /note="Nucleotide may be methylated to form 5-methylcytosine"
atggtgtggcaaatgtcccctcctcccacagcgaccccctggcattttggtgagatgaaccgccgccctgagggaacacccagtaacgattccttcagtgatcccggttctccaaactcttg

SEQ ID NO: 12533 - DNA, 122 bp, Homo sapiens
  misc_feature (61)..(62): /note="This region represents a CpG dinucleotide"
  misc_feature (61)..(61): /note="Nucleotide may be methylated to form 5-methylcytosine"
gccttgggcacattaccttatgtttttgtttgtgcactcttatcggtgatatcaggccaacggcacataccttctgagttggggtgattggtaagctgtctaaacttcccagttggtaggtg

SEQ ID NO: 12534 - DNA, 122 bp, Homo sapiens
  misc_feature (61)..(62): /note="This region represents a CpG dinucleotide"
  misc_feature (61)..(61): /note="Nucleotide may be methylated to form 5-methylcytosine"
acaggtcacaaaaccagttggagcctcggtgacctcatgcataccttgagttgttactgacgcctaactcacatgtttgcataaacatcaagtaggatggagactgagaaaacagtttggaa

SEQ ID NO: 12535 - DNA, 122 bp, Homo sapiens
  misc_feature (61)..(62): /note="This region represents a CpG dinucleotide"
  misc_feature (61)..(61): /note="Nucleotide may be methylated to form 5-methylcytosine"
gggcaggagaataacaggcggtgccctggaggaacactgcatgctgctgaggaaggagggcggccttggcgatgatgtcaccatgaagcacttggaattgagacagaacattctcacttggg

SEQ ID NO: 12536 - DNA, 122 bp, Homo sapiens
  misc_feature (61)..(62): /note="This region represents a CpG dinucleotide"
  misc_feature (61)..(61): /note="Nucleotide may be methylated to form 5-methylcytosine"
ttctccagggctgacccgaggaaaggacggctcccttggaggactgtgcactccagggttcggctgatcaaccctaacacggtcacggccattctacctcacgtgacttggtgggaggctgc

SEQ ID NO: 12537 - DNA, 122 bp, Homo sapiens
  misc_feature (61)..(62): /note="This region represents a CpG dinucleotide"
  misc_feature (61)..(61): /note="Nucleotide may be methylated to form 5-methylcytosine"
aaaaggagggcataagttaagatagggttgagaaacagctccagggtgtttttattttctcggcccaccaagttgtatttttctgggagcatgagatgcatttgcatcaacagaaattcaat

SEQ ID NO: 12538 - DNA, 122 bp, Homo sapiens
  misc_feature (61)..(62): /note="This region represents a CpG dinucleotide"
  misc_feature (61)..(61): /note="Nucleotide may be methylated to form 5-methylcytosine"
taagagctaaaaacagaaaagactaagctccactttcctcaaagactaaatctcttgagacgctgatgattctggcttccttgaatgtgcctggggtaataaaaataattttagaccagggt

SEQ ID NO: 12539 - DNA, 122 bp, Homo sapiens
  misc_feature (61)..(62): /note="This region represents a CpG dinucleotide"
  misc_feature (61)..(61): /note="Nucleotide may be methylated to form 5-methylcytosine"
taatgataatggtggtagtagtagctgcaggagcagcaggattaaaagcaggatcatttacgaggaaaagcccaagagagaaaagtatgagtcagaagtaatgatccctacagttgggagcc

SEQ ID NO: 12540 - DNA, 122 bp, Homo sapiens
  misc_feature (61)..(62): /note="This region represents a CpG dinucleotide"
  misc_feature (61)..(61): /note="Nucleotide may be methylated to form 5-methylcytosine"
tggtaatcttatgggactatcatcatatatgtggtccatcattgacatcattgatccaaacgtccttatgcggctcatgattatttccctaggaccacagtcagggaggaaaaagatgtact

SEQ ID NO: 12541 - DNA, 122 bp, Homo sapiens
  misc_feature (61)..(62): /note="This region represents a CpG dinucleotide"
  misc_feature (61)..(61): /note="Nucleotide may be methylated to form 5-methylcytosine"
acccacaccccagcttcaccccgagctactcactgccatcttgtatgtattagggttttgcgtaaggttttgtttgggagaaactggtgcccacaaaaaagaaaatggaaaatcaacctccc

SEQ ID NO: 12542 - DNA, 122 bp, Homo sapiens
  misc_feature (61)..(62): /note="This region represents a CpG dinucleotide"
  misc_feature (61)..(61): /note="Nucleotide may be methylated to form 5-methylcytosine"
tctttccatctggtgccatggcttaattcatcccttacattttggtcatagctctgccatcgctttgcttgattcctgagacagaggatgggttctagacccaaaatgattctaggattagg

SEQ ID NO: 12543 - DNA, 122 bp, Homo sapiens
  misc_feature (61)..(62): /note="This region represents a CpG dinucleotide"
  misc_feature (61)..(61): /note="Nucleotide may be methylated to form 5-methylcytosine"
tcaaagtgctccccacccaacactggcatggactgctcactaggtggccaaaagagatttcgtttatggatgtgttttgaatgttttaacattaaaaaaaaaaaacccaaagcatttgaggc

SEQ ID NO: 12544 - DNA, 122 bp, Homo sapiens
  misc_feature (61)..(62): /note="This region represents a CpG dinucleotide"
  misc_feature (61)..(61): /note="Nucleotide may be methylated to form 5-methylcytosine"
cacttctggctgttggtctcggggctaccggactagaatcctagcatgtgcctggtggtgcgcagccccggagggaggggcagggccgtgtgcaccgctccgcttccaaagccatgctggac

SEQ ID NO: 12545 - DNA, 122 bp, Homo sapiens
  misc_feature (61)..(62): /note="This region represents a CpG dinucleotide"
  misc_feature (61)..(61): /note="Nucleotide may be methylated to form 5-methylcytosine"
aaggaagcgccagtacatcaggagacagagtggctgggttccaaggccagcaggctgttacgcaagggggaaaacttcacacacagtcaataattagaaaaatgattctgggctgtggaaac

SEQ ID NO: 12546 - DNA, 122 bp, Homo sapiens
  misc_feature (61)..(62): /note="This region represents a CpG dinucleotide"
  misc_feature (61)..(61): /note="Nucleotide may be methylated to form 5-methylcytosine"
tgacagcagttcagattttcaagacagcaaatctctgttgagcacgtgtaaaccaggccacgtgcttacagatgcctgatactcttgagtcgaattcagagctgaatccaaatgaaagatga

SEQ ID NO: 12547 - DNA, 122 bp, Homo sapiens
  misc_feature (61)..(62): /note="This region represents a CpG dinucleotide"
  misc_feature (61)..(61): /note="Nucleotide may be methylated to form 5-methylcytosine"
ctcaaactcctgaccttgtgatccacctgccttggcctcccaaagtgctgggattacaggcgtgagccacctcgcccagcccagataaggttttatgtttttatgacttctgccttccctgg

SEQ ID NO: 12548 - DNA, 122 bp, Homo sapiens
  misc_feature (61)..(62): /note="This region represents a CpG dinucleotide"
  misc_feature (61)..(61): /note="Nucleotide may be methylated to form 5-methylcytosine"
tggaataagtccaatctagttggaaggatgagaaaacagagacagcttggctttgtcactcgctgaccccatgaccacaacactcagctcactgctgagcactcacatagcccaggcctctc

SEQ ID NO: 12549 - DNA, 122 bp, Homo sapiens
  misc_feature (61)..(62): /note="This region represents a CpG dinucleotide"
  misc_feature (61)..(61): /note="Nucleotide may be methylated to form 5-methylcytosine"
ttggattaactagtttagcactgattgtttgtgatgctaagattcttccttccctctcaccgagatgtgtgtgcttggatgacaaggaaagatggagtccccagcagttgttgaaacacagc

SEQ ID NO: 12550 - DNA, 122 bp, Homo sapiens
  misc_feature (61)..(62): /note="This region represents a CpG dinucleotide"
  misc_feature (61)..(61): /note="Nucleotide may be methylated to form 5-methylcytosine"
ttattaaagatgtggcagaaagctcagtgtggcagctgggaggaggagtccatgggaccacgatggagctggatcagcagtccagtcacaaagcacgctactgatattgaaggttcataagc

SEQ ID NO: 12551 - DNA, 122 bp, Homo sapiens
  misc_feature (61)..(62): /note="This region represents a CpG dinucleotide"
  misc_feature (61)..(61): /note="Nucleotide may be methylated to form 5-methylcytosine"
atcatcataactgtttaactaaaattttaaaacatatttcttacctggtatgactaagtacggcctgccctaggaaggaaagcatataaggccattatgaacatgctctactgcattagcag

SEQ ID NO: 12552 - DNA, 122 bp, Homo sapiens
  misc_feature (61)..(62): /note="This region represents a CpG dinucleotide"
  misc_feature (61)..(61): /note="Nucleotide may be methylated to form 5-methylcytosine"
gcctcccagagacaagctgagaaaacacctttcatactagcctccaacggaaattaaagacgtgtagccgtgtcgccttctggattccataaatccctggctatcgctgtgacttaaaacta

SEQ ID NO: 12553 - DNA, 122 bp, Homo sapiens
  misc_feature (61)..(62): /note="This region represents a CpG dinucleotide"
  misc_feature (61)..(61): /note="Nucleotide may be methylated to form 5-methylcytosine"
ctgcctctgctctagccctcatacttgaagtatttgtttacgtctgttgtttctgaactgcgagtccatccagggctgggcccaacccttattcatctttataggtttcccaggcctgtcac

SEQ ID NO: 12554 - DNA, 122 bp, Homo sapiens
  misc_feature (61)..(62): /note="This region represents a CpG dinucleotide"
  misc_feature (61)..(61): /note="Nucleotide may be methylated to form 5-methylcytosine"
atgtccaaatatagaaaatgattaagttaactgattccagacgcatgatgaaataccttacggttattaaaattctatttagggagagctggtaatcaccaagagggtaaccagacacaaaa

SEQ ID NO: 12555 - DNA, 122 bp, Homo sapiens
  misc_feature (61)..(62): /note="This region represents a CpG dinucleotide"
  misc_feature (61)..(61): /note="Nucleotide may be methylated to form 5-methylcytosine"
aaacaaggatactaataacacctacttcatgggagtttgtgactatcaaataagataattcgtatacagttgcctggcatctagtatgtgcaataaactgagctataatcaccaccatcatc

SEQ ID NO: 12556 - DNA, 122 bp, Homo sapiens
  misc_feature (61)..(62): /note="This region represents a CpG dinucleotide"
  misc_feature (61)..(61): /note="Nucleotide may be methylated to form 5-methylcytosine"
ttaatacgcactgaatgagcaaacgacagacaggcattagctcatttcctgtagtcttgccggggtaggtctgctgcagctttatcacctgctctaccaaggttaaatcacaggactgctca

SEQ ID NO: 12557 - DNA, 122 bp, Homo sapiens
  misc_feature (61)..(62): /note="This region represents a CpG dinucleotide"
  misc_feature (61)..(61): /note="Nucleotide may be methylated to form 5-methylcytosine"
tgcaatcttcttcccacaccaaccccactctctctgccccaagcaagatgactatgcaaacgagagaaggcctaggatctcaagtcccagtgactcacctgccagctctaggcatacatata

SEQ ID NO: 12558 - DNA, 122 bp, Homo sapiens
  misc_feature (61)..(62): /note="This region represents a CpG dinucleotide"
  misc_feature (61)..(61): /note="Nucleotide may be methylated to form 5-methylcytosine"
taagaaaatccatgtggcagcggccaaccggaaacagttttgtcccaggctgcacagggtcggaggccccaaggtcaccggggccactgcccgtcacaggtccaccttgaccccctttatga

SEQ ID NO: 12559 - DNA, 122 bp, Homo sapiens
  misc_feature (61)..(62): /note="This region represents a CpG dinucleotide"
  misc_feature (61)..(61): /note="Nucleotide may be methylated to form 5-methylcytosine"
tgatgaattggaaaacatgctatgataggcatgggcaatttagagctcagtctggacaatcggtgatgattaatcttaagaggatttctgaagttcaggcaacaaatgattaaaaatcaact

SEQ ID NO: 12560 - DNA, 122 bp, Homo sapiens
  misc_feature (61)..(62): /note="This region represents a CpG dinucleotide"
  misc_feature (61)..(61): /note="Nucleotide may be methylated to form 5-methylcytosine"
ttcacgtatgggaaaattgagattcagagaagttaagtttcccagggacaccgcagatcacgaacagagctgggattcagtccaacttcagagctaatgcactttggaggaagagatacaat

SEQ ID NO: 12561 - DNA, 122 bp, Homo sapiens
  misc_feature (61)..(62): /note="This region represents a CpG dinucleotide"
  misc_feature (61)..(61): /note="Nucleotide may be methylated to form 5-methylcytosine"
ctcacaacttcagctgattaatactttgttaaaacctagaccacgaaaacagacagagcccggcgaggtggctcacgcctgtaatcccaacactttgggaggccgaagcgggtggatcacga

SEQ ID NO: 12562 - DNA, 122 bp, Homo sapiens
  misc_feature (61)..(62): /note="This region represents a CpG dinucleotide"
  misc_feature (61)..(61): /note="Nucleotide may be methylated to form 5-methylcytosine"
gaggttgacatgaaacaaacaaaaaccaagagtatcagttcatgataagtgctatgtagacgattatagggcaccttaaacttagatcgggtgctacagagacaattatataatagggcacc

SEQ ID NO: 12563 - DNA, 122 bp, Homo sapiens
  misc_feature (61)..(62): /note="This region represents a CpG dinucleotide"
  misc_feature (61)..(61): /note="Nucleotide may be methylated to form 5-methylcytosine"
aaacagactgcagcagaaaaaaaggctagttcaaaacctgagccaaattctgaggctgaccgtctgaatcacttaagatgcctgttaaaaatgcagatttctggcctccaacccagacctac

SEQ ID NO: 12564 - DNA, 122 bp, Homo sapiens
  misc_feature (61)..(62): /note="This region represents a CpG dinucleotide"
  misc_feature (61)..(61): /note="Nucleotide may be methylated to form 5-methylcytosine"
ctagtcccagctccccagctcggcactggctctctccgctgcagtgggaggaggaggaggcgccaccaccgccacccgagccagaggggggcgaactggacagtttctgcttcttcaccccg

SEQ ID NO: 12565 - DNA, 122 bp, Homo sapiens
  misc_feature (61)..(62): /note="This region represents a CpG dinucleotide"
  misc_feature (61)..(61): /note="Nucleotide may be methylated to form 5-methylcytosine"
tgtcaccctctggtgagctgccaaaccatgcatgagttgttccatccgagcttttgtgcacgtggagagctggtgactgactgcataaggtactggatgcctggcttctccacgtaactcta

SEQ ID NO: 12566 - DNA, 122 bp, Homo sapiens
  misc_feature (61)..(62): /note="This region represents a CpG dinucleotide"
  misc_feature (61)..(61): /note="Nucleotide may be methylated to form 5-methylcytosine"
ctccactgatgtgatgctggcctttataacaactgcgaagtggcagaaaccttcgtgaaacgtgaagtttccgttggccgcctgccactgttcccactgcacactgacgctccacccgaggc

SEQ ID NO: 12567 - DNA, 122 bp, Homo sapiens
  misc_feature (61)..(62): /note="This region represents a CpG dinucleotide"
  misc_feature (61)..(61): /note="Nucleotide may be methylated to form 5-methylcytosine"
ggataactgtacccatatgtcctttaattctggtctgcatgctgcctaccattaaatattcgtaatggattattgtaaacaggagattagcatgggagacagggtgttaaagctgagtctca

SEQ ID NO: 12568 - DNA, 122 bp, Homo sapiens
  misc_feature (61)..(62): /note="This region represents a CpG dinucleotide"
  misc_feature (61)..(61): /note="Nucleotide may be methylated to form 5-methylcytosine"
gcatctagagcagggcctggcacaaagtaggagctcaataaacatttatgaatgagtgtgcgctgagatgacctttttttttttttttattgagagggagccttgctctgtcacccaggcta

SEQ ID NO: 12569 - DNA, 122 bp, Homo sapiens
  misc_feature (61)..(62): /note="This region represents a CpG dinucleotide"
  misc_feature (61)..(61): /note="Nucleotide may be methylated to form 5-methylcytosine"
tttctcaaccctcttcccctccagatcctaaactccttcctctaggaccaggctgctattcggtacccgtgtgtgtaggtaccagtatggccataccagctgttaagtcattaaaatacttt

SEQ ID NO: 12570 - DNA, 122 bp, Homo sapiens
  misc_feature (61)..(62): /note="This region represents a CpG dinucleotide"
  misc_feature (61)..(61): /note="Nucleotide may be methylated to form 5-methylcytosine"
gagagggtccagagggaccccaggaccaggcagtgccagggagccgaagagggaggggtacggaaggagcagtcttaggacccggcctcacacctgcatagcagcaccttggccccgtggga

SEQ ID NO: 12571 - DNA, 122 bp, Homo sapiens
  misc_feature (61)..(62): /note="This region represents a CpG dinucleotide"
  misc_feature (61)..(61): /note="Nucleotide may be methylated to form 5-methylcytosine"
ctttccccagaccccgccgacagcctcccccagcgggctccaggcgtgcgtccctccccacgtcctggtgaggccagccatgtttctaggagtctcaggccgactcagtgtgtagtgagaga

SEQ ID NO: 12572 - DNA, 122 bp, Homo sapiens
  misc_feature (61)..(62): /note="This region represents a CpG dinucleotide"
  misc_feature (61)..(61): /note="Nucleotide may be methylated to form 5-methylcytosine"
cttggggaagtcctgacccttatctgactccagtcttgtgtggaatctactgtggaaatgcggaaacttcatgcaattatttctgtttgtgcagctggtttggctggggttgaacgtcttcc

SEQ ID NO: 12573 - DNA, 122 bp, Homo sapiens
  misc_feature (61)..(62): /note="This region represents a CpG dinucleotide"
  misc_feature (61)..(61): /note="Nucleotide may be methylated to form 5-methylcytosine"
ctttattggcatttagcagtcaggcaccagagatgccagatggcctgcaatgcttaggaacgcctttcacagtgaataactgtcctgcttggttttcaaatattccactggtcattcatgaa

SEQ ID NO: 12574 - DNA, 122 bp, Homo sapiens
  misc_feature (61)..(62): /note="This region represents a CpG dinucleotide"
  misc_feature (61)..(61): /note="Nucleotide may be methylated to form 5-methylcytosine"
gctgtggcactgcctacccatcaggggtgtggtgaggtcactggaaagggtgacctaatacgttgctaatgctcagatggggattgctgggagtgttgcctttctcagttgtcacagggcca

SEQ ID NO: 12575 - DNA, 122 bp, Homo sapiens
  misc_feature (61)..(62): /note="This region represents a CpG dinucleotide"
  misc_feature (61)..(61): /note="Nucleotide may be methylated to form 5-methylcytosine"
acaagactttgcagcagccactataaagtggcttcaagaatttacttgaacagtgtccatcgaaatgtgaatgtataccaaacagccagtgtggacttagactggaggacttagactggatt

SEQ ID NO: 12576 - DNA, 122 bp, Homo sapiens
  misc_feature (61)..(62): /note="This region represents a CpG dinucleotide"
  misc_feature (61)..(61): /note="Nucleotide may be methylated to form 5-methylcytosine"
ggggaatggaatgccagtgaggaaatgtaatgatgtacagattgtatcaaaataaaggtgcgtccacaaactctacactctgacctcagcctggttagaattacttttggcctcaaaaggag

SEQ ID NO: 12577 - DNA, 122 bp, Homo sapiens
  misc_feature (61)..(62): /note="This region represents a CpG dinucleotide"
  misc_feature (61)..(61): /note="Nucleotide may be methylated to form 5-methylcytosine"
agaccttttcctcaaagtaaccaaatcaagatggcgaatctcaagcacagtcatgtgttgcgtaagaacagggctatgttctgggaaatgcttcattcggtgatctcatcattgtgggaaca

SEQ ID NO: 12578 - DNA, 122 bp, Homo sapiens
  misc_feature (61)..(62): /note="This region represents a CpG dinucleotide"
  misc_feature (61)..(61): /note="Nucleotide may be methylated to form 5-methylcytosine"
ggtgatccacctgcttcagcctcccaaagtgctgggattacaggcgtgacctgccgagcccggcctggacctgttcttcaaccatgaagaccaggggaaagtgctaacacagtccccactac

SEQ ID NO: 12579 - DNA, 122 bp, Homo sapiens
  misc_feature (61)..(62): /note="This region represents a CpG dinucleotide"
  misc_feature (61)..(61): /note="Nucleotide may be methylated to form 5-methylcytosine"
gaccttatttaataatatcattagttatcatttattggactctgaactgagctcccaacacggaagatgtaagatttatctgcattttacagatgagaagacagaggcaccaagcagtataa

SEQ ID NO: 12580 - DNA, 122 bp, Homo sapiens
  misc_feature (61)..(62): /note="This region represents a CpG dinucleotide"
  misc_feature (61)..(61): /note="Nucleotide may be methylated to form 5-methylcytosine"
gcttccggaagaggaaattagctggtgattctttccaatctgctttcccagtcacctttccggcatgttctgtaaaacaaaatgtaatttgactttgtttcattattttaactccataacac

SEQ ID NO: 12581 - DNA, 122 bp, Homo sapiens
  misc_feature (61)..(62): /note="This region represents a CpG dinucleotide"
  misc_feature (61)..(61): /note="Nucleotide may be methylated to form 5-methylcytosine"
actaccacaatgaatccaagtaatcattcctactgagatttaataggctcatattatgatcggaaaatacctagttgtccagatgatgctcactccaaaaacttgtcagcacacctgagttc

SEQ ID NO: 12582 - DNA, 122 bp, Homo sapiens
  misc_feature (61)..(62): /note="This region represents a CpG dinucleotide"
  misc_feature (61)..(61): /note="Nucleotide may be methylated to form 5-methylcytosine"
agaggttagaaggtggggctgaaagttccaaccccttcattacacaggtggtttgttccccgggaaaccagccctcactctaagggtatccaggagcccactgagagccaccccgttagaac

SEQ ID NO: 12583 - DNA, 122 bp, Homo sapiens
  misc_feature (61)..(62): /note="This region represents a CpG dinucleotide"
  misc_feature (61)..(61): /note="Nucleotide may be methylated to form 5-methylcytosine"
cgggcggcaggaaataaacacgatgttctcaggcttttcccggtgggcgcgtggaggccccggcagcagatcctaacactcggcttcctctccacagctccgggccttgggatcgattgtgt

SEQ ID NO: 12584 - DNA, 122 bp, Homo sapiens
  misc_feature (61)..(62): /note="This region represents a CpG dinucleotide"
  misc_feature (61)..(61): /note="Nucleotide may be methylated to form 5-methylcytosine"
ccagctggtcctcattgcaggttgggggagggatacagggttgtagaagagctccagaatcggccccaaataggtgagatcagagttctgccattgaaaggcttcttgccctccttgggcca

SEQ ID NO: 12585 - DNA, 122 bp, Homo sapiens
  misc_feature (61)..(62): /note="This region represents a CpG dinucleotide"
  misc_feature (61)..(61): /note="Nucleotide may be methylated to form 5-methylcytosine"
agaatgatcagtagtatttacgtggtgcctggggttctgtggctttgggctcatctcccacgcccttcaactcactgattcggccagggtccttgttgcagccccttcctcaatttacctta

SEQ ID NO: 12586 - DNA, 122 bp, Homo sapiens
  misc_feature (61)..(62): /note="This region represents a CpG dinucleotide"
  misc_feature (61)..(61): /note="Nucleotide may be methylated to form 5-methylcytosine"
gtgggaaacttacagcatattaacagacagttatcaatgacaaaaacattaaaattatgacgagtgctaagaaggaagcactctaaccaaatacttagcttattattatagtaatatttgaa

SEQ ID NO: 12587 - DNA, 122 bp, Homo sapiens
  misc_feature (61)..(62): /note="This region represents a CpG dinucleotide"
  misc_feature (61)..(61): /note="Nucleotide may be methylated to form 5-methylcytosine"
ggggacttgaaaaggatttagttcaacaactgagtcagcatgagctcacacaaaacaaatcgtttcacaccaatgtcaatttctttctttcttcccccccgcccccacttttttatttaaat

SEQ ID NO: 12588 - DNA, 122 bp, Homo sapiens
  misc_feature (61)..(62): /note="This region represents a CpG dinucleotide"
  misc_feature (61)..(61): /note="Nucleotide may be methylated to form 5-methylcytosine"
tggactgagtatctggaaagccagtctgcaggatgggttctgagggcagaacccagaggacgtgcagtgaggaagctggaagagagcacactccctgggttcctttggtttactgtcctatt

SEQ ID NO: 12589 - DNA, 122 bp, Homo sapiens
  misc_feature (61)..(62): /note="This region represents a CpG dinucleotide"
  misc_feature (61)..(61): /note="Nucleotide may be methylated to form 5-methylcytosine"
tagtccattttactagcaggcagtgcttttccagagagctgttttcctggcggggtgcaacgactgctttcaggggcaaaagtatgtgtctcgaagctgtctggctcactctccctggcact

SEQ ID NO: 12590 - DNA, 122 bp, Homo sapiens
  misc_feature (61)..(62): /note="This region represents a CpG dinucleotide"
  misc_feature (61)..(61): /note="Nucleotide may be methylated to form 5-methylcytosine"
aagcttttgcttcacagttggaacagctcatggagagcagcaaccaggtgttcctgagcccgtcacagaaggagctgccatcagtgcctctcgtgacctgcagtatttgggcctgtggaggt

SEQ ID NO: 12591 - DNA, 122 bp, Homo sapiens
  misc_feature (61)..(62): /note="This region represents a CpG dinucleotide"
  misc_feature (61)..(61): /note="Nucleotide may be methylated to form 5-methylcytosine"
ccaaaaatgtttgtttatattatctgtgagtaatctatactgtctggtttcacgtaagaacgaaataaattatgtcactaaactgggatgtttgtatcacaggaacagatctggaaatgaaa

SEQ ID NO: 12592 - DNA, 122 bp, Homo sapiens
  misc_feature (61)..(62): /note="This region represents a CpG dinucleotide"
  misc_feature (61)..(61): /note="Nucleotide may be methylated to form 5-methylcytosine"
tgctgaacctccaagcaggacacaggttgtttttctacatgtagatattgcagttaattccgtcccatggtatttaatcggacacatttattaagcctcataaagggcattttcctgttaat

SEQ ID NO: 12593 - DNA, 122 bp, Homo sapiens
  misc_feature (61)..(62): /note="This region represents a CpG dinucleotide"
  misc_feature (61)..(61): /note="Nucleotide may be methylated to form 5-methylcytosine"
aaccactgttgctgctgacggggctgagcacgacaccactgatggcattggggcaggttgcgttccctggaccaggatgtttctgtctgcagcagaatttctctgctgagtcaccaccacat

SEQ ID NO: 12594 - DNA, 122 bp, Homo sapiens
  misc_feature (61)..(62): /note="This region represents a CpG dinucleotide"
  misc_feature (61)..(61): /note="Nucleotide may be methylated to form 5-methylcytosine"
tacaaaaggccagtgaaaaagatcagtttcaagaaaagggtggaactattttgtcaaatgcggctaagtagtcacagagatgaggactgagaactgataaccacatttggtaatatattagt

SEQ ID NO: 12595 - DNA, 122 bp, Homo sapiens
  misc_feature (61)..(62): /note="This region represents a CpG dinucleotide"
  misc_feature (61)..(61): /note="Nucleotide may be methylated to form 5-methylcytosine"
ggatcttcgattgacgagttcaagttctctgcatgacccaaggctgaatcatctgcagttcggcctctgcccagtagagtgaacttaggtactgtagagcagctacataatttttataataa

SEQ ID NO: 12596 - DNA, 122 bp, Homo sapiens
  misc_feature (61)..(62): /note="This region represents a CpG dinucleotide"
  misc_feature (61)..(61): /note="Nucleotide may be methylated to form 5-methylcytosine"
gctccgattgggaaaagctgcttaaccactgtaagttacgggttggataagtgacatatacgactggtgtcaattggcaaccaggcttcacagtttcatgaaatgtgtggattctgaaagtg

SEQ ID NO: 12597 - DNA, 122 bp, Homo sapiens
  misc_feature (61)..(62): /note="This region represents a CpG dinucleotide"
  misc_feature (61)..(61): /note="Nucleotide may be methylated to form 5-methylcytosine"
tgatgtatcattaaaggccaaaaaaaaaaaaaagtcaattcagctgtgtctgtaaccaggcgtgtcatatgtagacacttataccgtgggaggtcactttatgtgggtttgcattgacaaaa

SEQ ID NO: 12598 - DNA, 122 bp, Homo sapiens
  misc_feature (61)..(62): /note="This region represents a CpG dinucleotide"
  misc_feature (61)..(61): /note="Nucleotide may be methylated to form 5-methylcytosine"
cctaagactgacagcaccaccccaggcaaggagtgaaaggtgtgcggacttcgtcgtggacgccttcttgccaccagcctgactgaaagctggtgcggcctctgctctgggcagagaaggag

SEQ ID NO: 12599 - DNA, 122 bp, Homo sapiens
  misc_feature (61)..(62): /note="This region represents a CpG dinucleotide"
  misc_feature (61)..(61): /note="Nucleotide may be methylated to form 5-methylcytosine"
tgtgttgtaagtactatatttctacaggtaaggaaatagagtctcaggaaaggtaggtgacgtggccaaggtcataaagctgggaagtgacaggaccatgatttgtgtccaggaagtctgac

SEQ ID NO: 12600 - DNA, 122 bp, Homo sapiens
  misc_feature (61)..(62): /note="This region represents a CpG dinucleotide"
  misc_feature (61)..(61): /note="Nucleotide may be methylated to form 5-methylcytosine"
gggtaatacccaccccccgcaagccaagtctctccccattctcttgctcagcctcagtcacgggaaccaccctgtggttgattcattctgacaattattataggtagcttaggaacggatgg

SEQ ID NO: 12601 - DNA, 122 bp, Homo sapiens
  misc_feature (61)..(62): /note="This region represents a CpG dinucleotide"
  misc_feature (61)..(61): /note="Nucleotide may be methylated to form 5-methylcytosine"
cttagcccttctatgagaaacaggaatgctaaaaccaccaccctcccagggctgttaatgcggatcaaatgagatcacacacctaaggaacgccacagtgcctggctgagaataaggattga

SEQ ID NO: 12602 - DNA, 122 bp, Homo sapiens
  misc_feature (61)..(62): /note="This region represents a CpG dinucleotide"
  misc_feature (61)..(61): /note="Nucleotide may be methylated to form 5-methylcytosine"
ctgtggctagtgtggcacaaggaagaggaaggatgggagattacgtgctagtgtgatgtgcggttgtcttcctgtgggtgttcccccagccacatacatagaactgggagctcctggtgcac

SEQ ID NO: 12603 - DNA, 122 bp, Homo sapiens
  misc_feature (61)..(62): /note="This region represents a CpG dinucleotide"
  misc_feature (61)..(61): /note="Nucleotide may be methylated to form 5-methylcytosine"
tgagctaacaatagtgaactttatctcccgccccatgctggaagttccagctgtaggtcccgaattctaataagggctttgctcatgcctctgaggttatggtaatattttatccatctttc

SEQ ID NO: 12604 - DNA, 122 bp, Homo sapiens
  misc_feature (61)..(62): /note="This region represents a CpG dinucleotide"
  misc_feature (61)..(61): /note="Nucleotide may be methylated to form 5-methylcytosine"
atttgtcacaacttcttttccctgacaagggaggaaagaaaatcagacttgaataacttccggaaaagtcaattcagaattagagggagacagacttcaaacaaatatagacaaaagaggaa

SEQ ID NO: 12605 - DNA, 122 bp, Homo sapiens
  misc_feature (61)..(62): /note="This region represents a CpG dinucleotide"
  misc_feature (61)..(61): /note="Nucleotide may be methylated to form 5-methylcytosine"
gactagagagtcaggtttgtaggccatgtggctagggacaagccccaggttaccctgtagcggtttctactgccactgccctgagcacatatctggcagctcgcaaccccaaatactgagca

SEQ ID NO: 12606 - DNA, 122 bp, Homo sapiens
  misc_feature (61)..(62): /note="This region represents a CpG dinucleotide"
  misc_feature (61)..(61): /note="Nucleotide may be methylated to form 5-methylcytosine"
ggtgggggccccaggacggcatctgtgctcagtgcgaacgctgagcttccttttatggtgcgtgcacgcctgcgcgtgtgtggggtgtggtggtggtggtggtggtgcagggcaggccttcc

SEQ ID NO: 12607 - DNA, 122 bp, Homo sapiens
  misc_feature (61)..(62): /note="This region represents a CpG dinucleotide"
  misc_feature (61)..(61): /note="Nucleotide may be methylated to form 5-methylcytosine"
gacttcaggtaatctgcccaccttggcctcccaatgtgctgggattacaggcattagccacggtgccgggccgtgcttctgctgttatctacagtgatctccaagttctgaagaacccttct

SEQ ID NO: 12608 - DNA, 122 bp, Homo sapiens
  misc_feature (61)..(62): /note="This region represents a CpG dinucleotide"
  misc_feature (61)..(61): /note="Nucleotide may be methylated to form 5-methylcytosine"
ttgtactgtcaatgaagccaagagaagagattgcttcaggaaattaaatgggttgctgtacgtcacaaagattcaatcctcactgaaccatttggtgtcactggtgagtcactccagagtat

SEQ ID NO: 12609 - DNA, 122 bp, Homo sapiens
  misc_feature (61)..(62): /note="This region represents a CpG dinucleotide"
  misc_feature (61)..(61): /note="Nucleotide may be methylated to form 5-methylcytosine"
ccagctattttagatcctcagaaaatttaattttctctctctctctcgttagctcttagtcgtttttgtgtatcacactttgccctgcatacagaggcagcctcatgtttaatgtcaaagta

SEQ ID NO: 12610 - DNA, 122 bp, Homo sapiens
  misc_feature (61)..(62): /note="This region represents a CpG dinucleotide"
  misc_feature (61)..(61): /note="Nucleotide may be methylated to form 5-methylcytosine"
ttcccttatctgtgcctgcaggctgtttttttgtctgcaagaattcaatcaaggacccaccgtaactgtctgcctgaccagtttcttcctttctcctctctcactattgtcccccacactca

SEQ ID NO: 12611 - DNA, 122 bp, Homo sapiens
  misc_feature (61)..(62): /note="This region represents a CpG dinucleotide"
  misc_feature (61)..(61): /note="Nucleotide may be methylated to form 5-methylcytosine"
ctttaaacttcaggaagtcacagtagaatcacaatgtcagacacagtctacgaaacgcttcgtatatgttacctcatttgatctttgtaatcaacccatgaggcaggtggggtgtggcgggt

SEQ ID NO: 12612 - DNA, 122 bp, Homo sapiens
  misc_feature (61)..(62): /note="This region represents a CpG dinucleotide"
  misc_feature (61)..(61): /note="Nucleotide may be methylated to form 5-methylcytosine"
aagaacgaggcgagtaagaccagtgaagcaggaatgcacacagatatggaaagaagtccccggcatcatgataaatggaagcaactttcagaacagcctgtgtaatacaattctatttatga

SEQ ID NO: 12613 - DNA, 122 bp, Homo sapiens
  misc_feature (61)..(62): /note="This region represents a CpG dinucleotide"
  misc_feature (61)..(61): /note="Nucleotide may be methylated to form 5-methylcytosine"
ttggtggcgtcagaaacacacccagcaccttgcctggagcagggcggctgggccctgctccgtgaatcccaagtgccctatgggagcctctccggccagggactgccagcctagaggagggg

SEQ ID NO: 12614 - DNA, 122 bp, Homo sapiens
  misc_feature (61)..(62): /note="This region represents a CpG dinucleotide"
  misc_feature (61)..(61): /note="Nucleotide may be methylated to form 5-methylcytosine"
aaaaccctgacctggaaagcaaaggagattgcttgctaattgtaggcacttgaggtgtgtcgaaggccctgggcaaagagaagacgaggaaaccaaagcttctgagggcacctggggaggga

SEQ ID NO: 12615 - DNA, 122 bp, Homo sapiens
  misc_feature (61)..(62): /note="This region represents a CpG dinucleotide"
  misc_feature (61)..(61): /note="Nucleotide may be methylated to form 5-methylcytosine"
caccatgtggggtgggaacgtagctgaatttccacaaggaagaaaaaaaatatggatggacgtcaaaaggctcaattaattacaggctagtgaaacgatgcgagacacaaaggcatctcaat

SEQ ID NO: 12616 - DNA, 122 bp, Homo sapiens
  misc_feature (61)..(62): /note="This region represents a CpG dinucleotide"
  misc_feature (61)..(61): /note="Nucleotide may be methylated to form 5-methylcytosine"
caaagacggataatctggtgaaccaccgtctcattggcatggcctatggacagattggtgcgcccagaggaatgaggggtggagggagcagggagtggtttcccctgcctggcaacgtgagc

SEQ ID NO: 12617 - DNA, 122 bp, Homo sapiens
  misc_feature (61)..(62): /note="This region represents a CpG dinucleotide"
  misc_feature (61)..(61): /note="Nucleotide may be methylated to form 5-methylcytosine"
gcagcactgagaatgaaggtgcctccagtcctctaccaacagagatgtaatgaaaaactccgggatgtgttgatgctgggtcattgtgaggtcagtttctaaaatagaattattccctaaaa

SEQ ID NO: 12618 - DNA, 122 bp, Homo sapiens
  misc_feature (61)..(62): /note="This region represents a CpG dinucleotide"
  misc_feature (61)..(61): /note="Nucleotide may be methylated to form 5-methylcytosine"
gtgctatcatcttccgcaacaagactctgtcttcttatgaattatggctctgcaataaaacgaaccaggatgtgaatgtttgctagatcaatacagtaatccagggcaaacaaaccagaata

SEQ ID NO: 12619 - DNA, 122 bp, Homo sapiens
  misc_feature (61)..(62): /note="This region represents a CpG dinucleotide"
  misc_feature (61)..(61): /note="Nucleotide may be methylated to form 5-methylcytosine"
ctccttcagtttgccccaagtcacaggggaagagaggtagaccagtccaacatttacctacgagagtaccagaggcccagagatggagcctcactcgtctaatagggtcacacagcaaagtc

SEQ ID NO: 12620 - DNA, 122 bp, Homo sapiens
  misc_feature (61)..(62): /note="This region represents a CpG dinucleotide"
  misc_feature (61)..(61): /note="Nucleotide may be methylated to form 5-methylcytosine"
ccctcccacctctggctcttaggactcacattgcaagtgggggaggcatcctccgcgaggcgcggactgagagccagcccctcttccccccctggctctagggacccccatcgcagggggtg

SEQ ID NO: 12621 - DNA, 122 bp, Homo sapiens
  misc_feature (61)..(62): /note="This region represents a CpG dinucleotide"
  misc_feature (61)..(61): /note="Nucleotide may be methylated to form 5-methylcytosine"
tgtgcaagtgttgataaaggctggaaagtggacagatgaaaagatattattatacatctacgtgaatgagatctgcatgttgtgtgtgaagtaacatgttagtagaattagccaaaagttct

SEQ ID NO: 12622 - DNA, 122 bp, Homo sapiens
  misc_feature (61)..(62): /note="This region represents a CpG dinucleotide"
  misc_feature (61)..(61): /note="Nucleotide may be methylated to form 5-methylcytosine"
ggcggaacacagagctgccaaggacactgcaaggtcacatgtcatgtggttgacagcctacgctggggggccttggcctgaagcctggacctcaaccctcccctccacggcatgcgtattgc

SEQ ID NO: 12623 - DNA, 122 bp, Homo sapiens
  misc_feature (61)..(62): /note="This region represents a CpG dinucleotide"
  misc_feature (61)..(61): /note="Nucleotide may be methylated to form 5-methylcytosine"
taaaatggatgtagtctattctatttccattcattgcataggccaggcttgtggccagagcgtcctcttctgtcagttctgctgtcttgcatagtttcttttataggtgatgctggtgaggg

SEQ ID NO: 12624 - DNA, 122 bp, Homo sapiens
  misc_feature (61)..(62): /note="This region represents a CpG dinucleotide"
  misc_feature (61)..(61): /note="Nucleotide may be methylated to form 5-methylcytosine"
gcgaggaggctctaacctctggcagcctgagcagcgcaagccgggcaatggccggttgggcgcagccggcgggctttgatagggagccaggaccccctgctgggagttcccaggaggattgg

SEQ ID NO: 12625 - DNA, 122 bp, Homo sapiens
  misc_feature (61)..(62): /note="This region represents a CpG dinucleotide"
  misc_feature (61)..(61): /note="Nucleotide may be methylated to form 5-methylcytosine"
ggacacattattattaactaaaatccactttcttcacttttactgcctttttctgttccacgatcccatccagatgccacattacatttagttgtccttgttattttttattagtcatagtc

SEQ ID NO: 12626 - DNA, 122 bp, Homo sapiens
  misc_feature (61)..(62): /note="This region represents a CpG dinucleotide"
  misc_feature (61)..(61): /note="Nucleotide may be methylated to form 5-methylcytosine"
gctcataaggataaggatactaagaagcgccgtattttatggggcatttcctacgtgctacgctctattctaagcattgggtgtggaggatctctcataaacctcagaatagctctttgagg

SEQ ID NO: 12627 - DNA, 122 bp, Homo sapiens
  misc_feature (61)..(62): /note="This region represents a CpG dinucleotide"
  misc_feature (61)..(61): /note="Nucleotide may be methylated to form 5-methylcytosine"
ttactctccattcaaattgtcttccagcctgaatcttcgtggctgtgggacagacaaccccgtctttagctgaactaaggaaaagtcctgcaacaccatgacaaatataattaaaatatttt

SEQ ID NO: 12628 - DNA, 122 bp, Homo sapiens
  misc_feature (61)..(62): /note="This region represents a CpG dinucleotide"
  misc_feature (61)..(61): /note="Nucleotide may be methylated to form 5-methylcytosine"
tcaatctagcagcatcactcctttgcttaaaaccacttgcattactgtgggatgagcatacgttcagacagacaatggcttctcgtcccagctgttagtcatatgctcttggacaaattaca

SEQ ID NO: 12629 - DNA, 122 bp, Homo sapiens
  misc_feature (61)..(62): /note="This region represents a CpG dinucleotide"
  misc_feature (61)..(61): /note="Nucleotide may be methylated to form 5-methylcytosine"
tgaaagtaaaggggctctattaataattactctgagataacagcaataaaccgggactgtcgaagcaagttgagcatagggtcacccttgttactgtgccaagagtcaccatctagctgtca

SEQ ID NO: 12630 - DNA, 122 bp, Homo sapiens
  misc_feature (61)..(62): /note="This region represents a CpG dinucleotide"
  misc_feature (61)..(61): /note="Nucleotide may be methylated to form 5-methylcytosine"
ttcttctcccgtccttgaaaggtacaagttgcttaaccaagaagaaggtgagtactacaacgtacccattccggaaggggacgaggaaggaaacatggaactcaggcagaaattcgaggtga

SEQ ID NO: 12631 - DNA, 122 bp, Homo sapiens
  misc_feature (61)..(62): /note="This region represents a CpG dinucleotide"
  misc_feature (61)..(61): /note="Nucleotide may be methylated to form 5-methylcytosine"
gatctctgctaataccagagtcctgcgtggcagagccattggcaccagaaattacaagtacgtaaagtaagtaaccagatataatctctgatttctttggatgaggaaagtggggtctggag

SEQ ID NO: 12632 - DNA, 122 bp, Homo sapiens
  misc_feature (61)..(62): /note="This region represents a CpG dinucleotide"
  misc_feature (61)..(61): /note="Nucleotide may be methylated to form 5-methylcytosine"
catggatccaaaagctctctctgatacatatatggtgatttccatttaattaactgtttccggggagcacctagagccattaccaaaggtgctaactgggcagccaatgggaaaactcttaa

SEQ ID NO: 12633 - DNA, 122 bp, Homo sapiens
  misc_feature (61)..(62): /note="This region represents a CpG dinucleotide"
  misc_feature (61)..(61): /note="Nucleotide may be methylated to form 5-methylcytosine"
cttggtttttccccttttccttgcagttcttaaggtgtgcagtgggttgaacggtgcccccgtcccctaaagataagaccatgtcctaatttctggaagctgtgaatgtgaccatatttgga

SEQ ID NO: 12634 - DNA, 122 bp, Homo sapiens
  misc_feature (61)..(62): /note="This region represents a CpG dinucleotide"
  misc_feature (61)..(61): /note="Nucleotide may be methylated to form 5-methylcytosine"
tgtttgtctttaatcatttaggcgaaccatgcatttttcactcttctaagactaactcagcgtttagaaatttttaaaaaatgtaaacttacactacagagtaatggtaagttatataaata

SEQ ID NO: 12635 - DNA, 122 bp, Homo sapiens
  misc_feature (61)..(62): /note="This region represents a CpG dinucleotide"
  misc_feature (61)..(61): /note="Nucleotide may be methylated to form 5-methylcytosine"
cctcccacttcacctgtatactgatgtcaatacagtcaaacagaagagttaaattaacaccggtggctacatgacccaagacatattattgttatttttattactattaccatttaagcttg

SEQ ID NO: 12636 - DNA, 122 bp, Homo sapiens
  misc_feature (61)..(62): /note="This region represents a CpG dinucleotide"
  misc_feature (61)..(61): /note="Nucleotide may be methylated to form 5-methylcytosine"
tcacagtttctgtgagtcaggaatttggagtctggtcagcagcgtagcctgtctccattccgcttggcatcagcaggggaggctcgaagtatggggaaatcatctgaaggctcgcgagctga

SEQ ID NO: 12637 - DNA, 122 bp, Homo sapiens
  misc_feature (61)..(62): /note="This region represents a CpG dinucleotide"
  misc_feature (61)..(61): /note="Nucleotide may be methylated to form 5-methylcytosine"
tcttgctgagtcactgagctgggcgaggcattcagaccccctgactgggcccagctggggcggcagatggtggagaggcctcagctgtggggggtgttggggagattatccactgatgaacc

SEQ ID NO: 12638 - DNA, 122 bp, Homo sapiens
  misc_feature (61)..(62): /note="This region represents a CpG dinucleotide"
  misc_feature (61)..(61): /note="Nucleotide may be methylated to form 5-methylcytosine"
ccctcagcatgtttcttaggcaacagataaagacttctggtgactctgtgttttctggtccggcttggctttctcatggggccagggagggaagctgtagttttctagaatacacacacaca

SEQ ID NO: 12639 - DNA, 122 bp, Homo sapiens
  misc_feature (61)..(62): /note="This region represents a CpG dinucleotide"
  misc_feature (61)..(61): /note="Nucleotide may be methylated to form 5-methylcytosine"
gcgccccctgcaggcggcgcgccacaccgctggccctccggcaccgccccctcccggccccgctccgcccgccgccccccggtactgcccaccttcagcccaccccgcagcccccgcgctct

SEQ ID NO: 12640 - DNA, 122 bp, Homo sapiens
  misc_feature (61)..(62): /note="This region represents a CpG dinucleotide"
  misc_feature (61)..(61): /note="Nucleotide may be methylated to form 5-methylcytosine"
aatacaaggcctgcggtgcaggtagactttgcaagctggtctaagcacaaggtgactctgcggaataacagcaaaagtggaactggggaaaagtactgcagagacatgctatccttacatat

SEQ ID NO: 12641 - DNA, 122 bp, Homo sapiens
  misc_feature (61)..(62): /note="This region represents a CpG dinucleotide"
  misc_feature (61)..(61): /note="Nucleotide may be methylated to form 5-methylcytosine"
ttctggcttgggatcttggtggccagcttcctcgggccacacctttgttatggttctgtgcgtagccagtcttcaaaggaaaaacaaagcagagactcaaggtgattttataaattttatta

SEQ ID NO: 12642 - DNA, 122 bp, Homo sapiens
  misc_feature (61)..(62): /note="This region represents a CpG dinucleotide"
  misc_feature (61)..(61): /note="Nucleotide may be methylated to form 5-methylcytosine"
cctgtgtgtggtgtgggtcttgcagtggcaggactccagtggcgggtgaggacccactcccgcagccggcctcctcactgctcttgcctccgggcatgggaacgatgccgtctgctcgtctg

SEQ ID NO: 12643 - DNA, 122 bp, Homo sapiens
  misc_feature (61)..(62): /note="This region represents a CpG dinucleotide"
  misc_feature (61)..(61): /note="Nucleotide may be methylated to form 5-methylcytosine"
cgcccgacgcctcccaggaaccaaaccggaccgggccgcggggggagggggcggtcaacccggggggggtcaccccagctactgcaccccgactttgaagattctgaatcagcccgtgaact

SEQ ID NO: 12644 - DNA, 122 bp, Homo sapiens
  misc_feature (61)..(62): /note="This region represents a CpG dinucleotide"
  misc_feature (61)..(61): /note="Nucleotide may be methylated to form 5-methylcytosine"
gtgagcctctgaggattcagtgtcccctgcaggtccaaccagttatgaccttggtgtggccgtgtcacaggaagctggagatggaatttctgcagggtgtgctttattgcatagctgcttgg

SEQ ID NO: 12645 - DNA, 122 bp, Homo sapiens
  misc_feature (61)..(62): /note="This region represents a CpG dinucleotide"
  misc_feature (61)..(61): /note="Nucleotide may be methylated to form 5-methylcytosine"
aagattatcaaaagtagccttaacagttcagggtggagttgggggtgcagcaccataacacgtgggactgcacatccctcacagtaactcactgagatggggttgccgtagtgcaggtggga

SEQ ID NO: 12646 - DNA, 122 bp, Homo sapiens
  misc_feature (61)..(62): /note="This region represents a CpG dinucleotide"
  misc_feature (61)..(61): /note="Nucleotide may be methylated to form 5-methylcytosine"
ggaggtcaaggctgcagtgagtcatgattgcaccactgcactccagcctgggcaacagagcgagactgtatcaaagaaaaaagaaaaatttgtttctgagacctgggatatcttctatcctc

SEQ ID NO: 12647 - DNA, 122 bp, Homo sapiens
  misc_feature (61)..(62): /note="This region represents a CpG dinucleotide"
  misc_feature (61)..(61): /note="Nucleotide may be methylated to form 5-methylcytosine"
ggtacgactctgttgacacattgatttcagacttctggcctccagagctccaagagactacgtatctattgctttaaaccaccacatgtgtggtaatttgtcatagacagcagccccaggaa

SEQ ID NO: 12648 - DNA, 122 bp, Homo sapiens
  misc_feature (61)..(62): /note="This region represents a CpG dinucleotide"
  misc_feature (61)..(61): /note="Nucleotide may be methylated to form 5-methylcytosine"
tcctatgctaccaacattgtactacaatagtattccatagcttattttccacacatacttcgctacttctttcctgtgtgtgtgtgtgtgtgtgtgtgtgtgtgtgtgtgtgttttccacta

SEQ ID NO: 12649 - DNA, 122 bp, Homo sapiens
  misc_feature (61)..(62): /note="This region represents a CpG dinucleotide"
  misc_feature (61)..(61): /note="Nucleotide may be methylated to form 5-methylcytosine"
tctttctaacccaaggctcaaggtaagcctgcattcttgtgactctttctgacagtcaatcgtaacaaatcatgctacctcggctaactgtcttcacttgatgttctacccagaaaagcaca

SEQ ID NO: 12650 - DNA, 122 bp, Homo sapiens
  misc_feature (61)..(62): /note="This region represents a CpG dinucleotide"
  misc_feature (61)..(61): /note="Nucleotide may be methylated to form 5-methylcytosine"
gagagccatgggctggctcaccttcctccacctgttaccacccatcccaggactgctccccgctcctccaatgataagaggcttagctcagctaccctggaaaaaacagtttcacttgtcaa

SEQ ID NO: 12651 - DNA, 122 bp, Homo sapiens
  misc_feature (61)..(62): /note="This region represents a CpG dinucleotide"
  misc_feature (61)..(61): /note="Nucleotide may be methylated to form 5-methylcytosine"
aacacagtcaaaacttctcatggtagcctaacaatcccttcctgatctggatcgtgagtacgtatgtgtcctcatctcctaatctacaaccccctgctcactctgctctgagtacaatggcc

SEQ ID NO: 12652 - DNA, 122 bp, Homo sapiens
  misc_feature (61)..(62): /note="This region represents a CpG dinucleotide"
  misc_feature (61)..(61): /note="Nucleotide may be methylated to form 5-methylcytosine"
cattcctccagtcacactgttcatgctacccattccaccacctggattttcaagaaaggacggggggatttgggaattttgtgtttttgtttcaaaaacataaggaaaaggagaagaggaga

SEQ ID NO: 12653 - DNA, 122 bp, Homo sapiens
  misc_feature (61)..(62): /note="This region represents a CpG dinucleotide"
  misc_feature (61)..(61): /note="Nucleotide may be methylated to form 5-methylcytosine"
tgccttgggtggggaagggtatgccctaagctagaaattgctatggctctggtaggagagcgagcacaaaattcttatgacattgccatttcctgccatcctgtatttctctctgggacttc

SEQ ID NO: 12654 - DNA, 122 bp, Homo sapiens
  misc_feature (61)..(62): /note="This region represents a CpG dinucleotide"
  misc_feature (61)..(61): /note="Nucleotide may be methylated to form 5-methylcytosine"
cactaccctcaaaatgtcaccgagtctagccagttctgtgtcctccaaggccacactacacgtggccaccaccacctcctggctgatgatacagtgacctctggcagttccccattcttacc

SEQ ID NO: 12655 - DNA, 122 bp, Homo sapiens
  misc_feature (61)..(62): /note="This region represents a CpG dinucleotide"
  misc_feature (61)..(61): /note="Nucleotide may be methylated to form 5-methylcytosine"
tgcctggtcatagcacagtgtgtacttaggtgaccttgaacaagatgtttctgttatttacgtggctgctcaagctttgtcctgtggactatatattcctaatgacttctttctgtacagtc

SEQ ID NO: 12656 - DNA, 122 bp, Homo sapiens
  misc_feature (61)..(62): /note="This region represents a CpG dinucleotide"
  misc_feature (61)..(61): /note="Nucleotide may be methylated to form 5-methylcytosine"
cagttaggcaggcctagcctaattttgatccctgtatccaaaatgttgctgagtgcctcccgctacaacccgtggctcctaagtggaaatgtgtgctctgctgttgtctctagggttgccaa

SEQ ID NO: 12657 - DNA, 122 bp, Homo sapiens
  misc_feature (61)..(62): /note="This region represents a CpG dinucleotide"
  misc_feature (61)..(61): /note="Nucleotide may be methylated to form 5-methylcytosine"
cacgtggccaataccacctcaagaaagaggcagataacccctgctggcctggtgatggagcggccaaatgcttcacagcccctccctgcaaaagtcaggtagggacggaacgtgcacacatt

SEQ ID NO: 12658 - DNA, 122 bp, Homo sapiens
  misc_feature (61)..(62): /note="This region represents a CpG dinucleotide"
  misc_feature (61)..(61): /note="Nucleotide may be methylated to form 5-methylcytosine"
ttactaaataatggcagctcctgttacgtctggtgtcattcatcatgactaaggccctctcggggaagtgggcagaacatatgatgatccgggggcctctttgtatttggtgcctacttacc

SEQ ID NO: 12659 - DNA, 122 bp, Homo sapiens
  misc_feature (61)..(62): /note="This region represents a CpG dinucleotide"
  misc_feature (61)..(61): /note="Nucleotide may be methylated to form 5-methylcytosine"
cccctagggtgtgtccttgctaacatgtgcagagctgttgctgccacatctgtgtgcaaccggcagggacggcaagagagaaaggccagggtggctaacttccttttaagcatgtggggctg

SEQ ID NO: 12660 - DNA, 122 bp, Homo sapiens
  misc_feature (61)..(62): /note="This region represents a CpG dinucleotide"
  misc_feature (61)..(61): /note="Nucleotide may be methylated to form 5-methylcytosine"
acagcaattcctggaggtatcaatcagcaaagccattctgcagggcaacttggcagcttccgtttgtacttaatataggtgtgcccctgccgacctagcagtttcacttcttgatagctaca

SEQ ID NO: 12661 - DNA, 122 bp, Homo sapiens
  misc_feature (61)..(62): /note="This region represents a CpG dinucleotide"
  misc_feature (61)..(61): /note="Nucleotide may be methylated to form 5-methylcytosine"
atctagagaggcagtctagctacagtggctttctggtgctgccgtgggctccacccagtccgaacttcctagcagctttgtttacactgtgaagggaaaaccgccaactcaagcctcagtaa

SEQ ID NO: 12662 - DNA, 122 bp, Homo sapiens
  misc_feature (61)..(62): /note="This region represents a CpG dinucleotide"
  misc_feature (61)..(61): /note="Nucleotide may be methylated to form 5-methylcytosine"
aaaaaaagacagcattcatatacatattctctcaagtaacaaaaatacctgtatttttatcgttatcatttcttccaacaattaagcaaattttttgaccctattctccactcagttaacat

SEQ ID NO: 12663 - DNA, 122 bp, Homo sapiens
  misc_feature (61)..(62): /note="This region represents a CpG dinucleotide"
  misc_feature (61)..(61): /note="Nucleotide may be methylated to form 5-methylcytosine"
taagcctcagcattttcttttttaagtataatcccaggacttactctactctgttgtaagcgatttccccacacattgcacatacttaatcgtagaattatgggattccagatttgtttatc

SEQ ID NO: 12664 - DNA, 122 bp, Homo sapiens
  misc_feature (61)..(62): /note="This region represents a CpG dinucleotide"
  misc_feature (61)..(61): /note="Nucleotide may be methylated to form 5-methylcytosine"
gtctgctctccttaggtagcatgagcaccaggattggtcctcgccttttccccaactaaccgcatccctgtaggtaagatcttccccaagttttttggccccagtagcaaaggggagtttga

SEQ ID NO: 12665 - DNA, 122 bp, Homo sapiens
  misc_feature (61)..(62): /note="This region represents a CpG dinucleotide"
  misc_feature (61)..(61): /note="Nucleotide may be methylated to form 5-methylcytosine"
ctgggccagtcacttcacttctctgcaacttgccttgctctgtgaaatgtagataataatcgttcatacccatggggttatactggaattaaatataacagtatgtacaaagggacataaac

SEQ ID NO: 12666 - DNA, 122 bp, Homo sapiens
  misc_feature (61)..(62): /note="This region represents a CpG dinucleotide"
  misc_feature (61)..(61): /note="Nucleotide may be methylated to form 5-methylcytosine"
cccctccccacccagaccctggcctcctgccgagacactctgaacttctgcttcaaggagcggctccaagccgtggacctcatgaaccagcctctggacaaggttctggagcaggccagacg

SEQ ID NO: 12667 - DNA, 122 bp, Homo sapiens
  misc_feature (61)..(62): /note="This region represents a CpG dinucleotide"
  misc_feature (61)..(61): /note="Nucleotide may be methylated to form 5-methylcytosine"
ccttatggccagtttattacaaacagtttatgttcaaaccttgtttttctccaccccttgcgttgtcatatttcattttgtactgtacggcccacatttcttatcctgttctttactatgag

SEQ ID NO: 12668 - DNA, 122 bp, Homo sapiens
  misc_feature (61)..(62): /note="This region represents a CpG dinucleotide"
  misc_feature (61)..(61): /note="Nucleotide may be methylated to form 5-methylcytosine"
acccctgagccaagtatcacctcatcagtgaagccttctttgatatccccaggtagagttcgttgttcccagccctacataatactgcattggagagtatgtggtcatttagttgtctgtct

SEQ ID NO: 12669 - DNA, 122 bp, Homo sapiens
  misc_feature (61)..(62): /note="This region represents a CpG dinucleotide"
  misc_feature (61)..(61): /note="Nucleotide may be methylated to form 5-methylcytosine"
ggcctaggtccagattattctaagttatgtgaacgtcagacaatgggatcttaggccagccgtgggcagtgttcagtgttttctcaatcttcagtttctcaacttcatttttcccctctctg

SEQ ID NO: 12670 - DNA, 122 bp, Homo sapiens
  misc_feature (61)..(62): /note="This region represents a CpG dinucleotide"
  misc_feature (61)..(61): /note="Nucleotide may be methylated to form 5-methylcytosine"
gcagttgggcactgggtgttctccctttaaaaggttacagtgttaactgacacatagtaacgtgcccagatgagaaagactgagatgacttcaggactttcagccatgtaacaggaagcatg

SEQ ID NO: 12671 - DNA, 122 bp, Homo sapiens
  misc_feature (61)..(62): /note="This region represents a CpG dinucleotide"
  misc_feature (61)..(61): /note="Nucleotide may be methylated to form 5-methylcytosine"
tttgagattcagggtggattctgcacacctgctcaagcctgaatcaccttgttacagaaacgtcacagcagaccagtggggggaagccaagtagcccaggcctgccctgaagttcctctgct

SEQ ID NO: 12672 - DNA, 122 bp, Homo sapiens
  misc_feature (61)..(62): /note="This region represents a CpG dinucleotide"
  misc_feature (61)..(61): /note="Nucleotide may be methylated to form 5-methylcytosine"
gtgctatgggtttctgaaatccaggcttcatttgttgatttggggtttagagcccagagacgagactcttgcaatgtcttcatcttacctctgctctctgaaggctgagctgagggctgacc

SEQ ID NO: 12673 - DNA, 122 bp, Homo sapiens
  misc_feature (61)..(62): /note="This region represents a CpG dinucleotide"
  misc_feature (61)..(61): /note="Nucleotide may be methylated to form 5-methylcytosine"
atctcccccaccccacccgccacagccccacagccctgtcggtctagcagggtgagtagccgcactgtctctgaacccttacgcctggactttgaagggggaacagattcttgcttactgag

SEQ ID NO: 12674 - DNA, 122 bp, Homo sapiens
  misc_feature (61)..(62): /note="This region represents a CpG dinucleotide"
  misc_feature (61)..(61): /note="Nucleotide may be methylated to form 5-methylcytosine"
cctctgcgcctcgccccgcccccagggccaagcctcccatcaccgcgccgccccagaacacgctccgcgtcaccgccccgccccagaacccgccccacgtcaccgccccgctccagaatcca

SEQ ID NO: 12675 - DNA, 122 bp, Homo sapiens
  misc_feature (61)..(62): /note="This region represents a CpG dinucleotide"
  misc_feature (61)..(61): /note="Nucleotide may be methylated to form 5-methylcytosine"
aggatctaagtaggtgctgtggctccaggccgggaagttgagtcaggaggggtgggcgtccgaggaggtggaaggaatatctcattcttatgtactctgtttcggttttaggcttatgggtt

SEQ ID NO: 12676 - DNA, 122 bp, Homo sapiens
  misc_feature (61)..(62): /note="This region represents a CpG dinucleotide"
  misc_feature (61)..(61): /note="Nucleotide may be methylated to form 5-methylcytosine"
agtatggtgagtgtctcattaaaaagccatatgctaaataacttccaaatactgtaatttcgattcctttttttttagagagagcctcactctatggtccaggctgaagtgcagtggtgcag

SEQ ID NO: 12677 - DNA, 122 bp, Homo sapiens
  misc_feature (61)..(62): /note="This region represents a CpG dinucleotide"
  misc_feature (61)..(61): /note="Nucleotide may be methylated to form 5-methylcytosine"
cggtagaccacgaatgactcaaactcagaacaacaaatgttgtaatgggtttcccaacaccgcttctaatggctgctcacaaagccgctaagtgaaagagctgacgttcaagtttcactcca

SEQ ID NO: 12678 - DNA, 122 bp, Homo sapiens
  misc_feature (61)..(62): /note="This region represents a CpG dinucleotide"
  misc_feature (61)..(61): /note="Nucleotide may be methylated to form 5-methylcytosine"
ggggacgctggatgagcccatttctgaagtgcggaggggccgggcttcttaggctgtgggcggagcctgggcctgggagaggaacagggccctggagcacctggtttcggggacagtagggt

SEQ ID NO: 12679 - DNA, 122 bp, Homo sapiens
  misc_feature (61)..(62): /note="This region represents a CpG dinucleotide"
  misc_feature (61)..(61): /note="Nucleotide may be methylated to form 5-methylcytosine"
ggttgtgattgtggctggggctgtggttgtggttggggctgcagcttaggcgggggtgctcgggtgaagaggggggacccagggagcatggcgcggctggccccgtgctcccagaaggcgtt

SEQ ID NO: 12680 - DNA, 122 bp, Homo sapiens
  misc_feature (61)..(62): /note="This region represents a CpG dinucleotide"
  misc_feature (61)..(61): /note="Nucleotide may be methylated to form 5-methylcytosine"
cagccaggctctgccgagtcatcctgagatcagccctatgcagagaagcgaatctcaaaacgccagcctccaagaatagaaggctccagagactgtgcaaccaagactaacaaactggaaaa

SEQ ID NO: 12681 - DNA, 122 bp, Homo sapiens
  misc_feature (61)..(62): /note="This region represents a CpG dinucleotide"
  misc_feature (61)..(61): /note="Nucleotide may be methylated to form 5-methylcytosine"
gccaaaacaacagatgtctgctctacaggctctgaacttgttttctgtgcagtgacaagccgtaaaccacttggagtttatccttcagcttggtggcatcctgaatgagactgtccctgtct

SEQ ID NO: 12682 - DNA, 122 bp, Homo sapiens
  misc_feature (61)..(62): /note="This region represents a CpG dinucleotide"
  misc_feature (61)..(61): /note="Nucleotide may be methylated to form 5-methylcytosine"
attaccaaattgagccccaccttgtgagtcagtggggcaggtgcctcccaaggcctccagcgccatggattacctgcctcggtcaggttctagagcccagcttggccttgggctgggcagca

SEQ ID NO: 12683 - DNA, 122 bp, Homo sapiens
  misc_feature (61)..(62): /note="This region represents a CpG dinucleotide"
  misc_feature (61)..(61): /note="Nucleotide may be methylated to form 5-methylcytosine"
caaaaaataccagggcactcagaaattgcctacgttgaactgcctgggtgagaagtgtggcgtggccatttcccgtcagatgtctgctatctactcatctgtcctctgttgttcctaattgg

SEQ ID NO: 12684 - DNA, 122 bp, Homo sapiens
  misc_feature (61)..(62): /note="This region represents a CpG dinucleotide"
  misc_feature (61)..(61): /note="Nucleotide may be methylated to form 5-methylcytosine"
ctgtaaacctgaagtcctggttggtttttaagccttagacataaggcaaccacaggattccgtgttaggggagaaatagaaacaataatctaccctttttgacggtataatcaagttgatct

SEQ ID NO: 12685 - DNA, 122 bp, Homo sapiens
  misc_feature (61)..(62): /note="This region represents a CpG dinucleotide"
  misc_feature (61)..(61): /note="Nucleotide may be methylated to form 5-methylcytosine"
cagctctggcagaaaatgatggtgacagaaaatgacatttcaggaatggcttttaaggcacgaggagcaatagcctgaggataatcagagttgttaggctactctcctgtcctggaaagtga

SEQ ID NO: 12686 - DNA, 122 bp, Homo sapiens
  misc_feature (61)..(62): /note="This region represents a CpG dinucleotide"
  misc_feature (61)..(61): /note="Nucleotide may be methylated to form 5-methylcytosine"
tatacacagaaatccgacggaatgctttttattcccattcaagcagttactacttatctgcgtgactaaggtatggaagatctaaaaagaaactaagtgctagtctggcctctactccttca

SEQ ID NO: 12687 - DNA, 122 bp, Homo sapiens
  misc_feature (61)..(62): /note="This region represents a CpG dinucleotide"
  misc_feature (61)..(61): /note="Nucleotide may be methylated to form 5-methylcytosine"
aaaggacataaacagactaattaaatcacagcagtatggctgggatgacagctggtacagcgtgtgactgagaagatccatatctgtgagcaggaggtacttcacttccaatccattcgcta

SEQ ID NO: 12688 - DNA, 122 bp, Homo sapiens
  misc_feature (61)..(62): /note="This region represents a CpG dinucleotide"
  misc_feature (61)..(61): /note="Nucleotide may be methylated to form 5-methylcytosine"
ctgtcactgtctttgcttttctcagcctcctcccatgggtgcaccgttatctcttttctccgtcttaaccaatcattgcctatggagacttttttttttttttttttaaatccagtctaagg

SEQ ID NO: 12689 - DNA, 122 bp, Homo sapiens
  misc_feature (61)..(62): /note="This region represents a CpG dinucleotide"
  misc_feature (61)..(61): /note="Nucleotide may be methylated to form 5-methylcytosine"
gccagtgggagaacgcattttctttcaggtctgtgctgcctgccagggagctgctgttctcgtgcggcatcttaagatggccctggcagcctttggcttttgccttgtgagggtcaatgggc

SEQ ID NO: 12690 - DNA, 122 bp, Homo sapiens
  misc_feature (61)..(62): /note="This region represents a CpG dinucleotide"
  misc_feature (61)..(61): /note="Nucleotide may be methylated to form 5-methylcytosine"
tatgacccatggtgtagtcctggcagttcaagcactccccagtcactgggtcgcagtcatcggcgtggccattgcactggcagggctggcaacttggaaagccccagtgcccaggtaagcac

SEQ ID NO: 12691 - DNA, 122 bp, Homo sapiens
  misc_feature (61)..(62): /note="This region represents a CpG dinucleotide"
  misc_feature (61)..(61): /note="Nucleotide may be methylated to form 5-methylcytosine"
tcagcctatgggctcttctaggtctcaattctttatctgtaaaattaagagattgggctacgcacattttacggccctttttagttctaacatcccatcagcttgtgattttacagaaaata

SEQ ID NO: 12692 - DNA, 122 bp, Homo sapiens
  misc_feature (61)..(62): /note="This region represents a CpG dinucleotide"
  misc_feature (61)..(61): /note="Nucleotide may be methylated to form 5-methylcytosine"
gctttgattttcacatgtaccatctcctgcagctaagcttctgtgttaacctcctgtcatcgtctctttcatgggcagcccagtaagccacacctcctgagactcatgcgcttgtacagtct

SEQ ID NO: 12693 - DNA, 122 bp, Homo sapiens
  misc_feature (61)..(62): /note="This region represents a CpG dinucleotide"
  misc_feature (61)..(61): /note="Nucleotide may be methylated to form 5-methylcytosine"
atttccatctcctggcctttccgctgccgtctctctgctggatgctttatccttagtccccgctgagggcagaaggactttccaggaggaattgaccagaacgcagaacagcaggatgtgga

SEQ ID NO: 12694 - DNA, 122 bp, Homo sapiens
  misc_feature (61)..(62): /note="This region represents a CpG dinucleotide"
  misc_feature (61)..(61): /note="Nucleotide may be methylated to form 5-methylcytosine"
agggaggtagtgaaagggaagctggccggacaggcagggccattccaagagggctttgtgcgcagggctaagccaagctttctccataggcaatggggagcaactggaggttcgtagcagga

SEQ ID NO: 12695 - DNA, 122 bp, Homo sapiens
  misc_feature (61)..(62): /note="This region represents a CpG dinucleotide"
  misc_feature (61)..(61): /note="Nucleotide may be methylated to form 5-methylcytosine"
tagggaaggagatggttctagtaccacagataacacacaagagggagcagttcagaaccacggtacaagcacctctcacagcgttggcactgtcttcagagatctctggcatgctgctttct

SEQ ID NO: 12696 - DNA, 122 bp, Homo sapiens
  misc_feature (61)..(62): /note="This region represents a CpG dinucleotide"
  misc_feature (61)..(61): /note="Nucleotide may be methylated to form 5-methylcytosine"
ctgtggacagcacatagcacatactattcttcctggtctcttcagttaaatcttgggtttcgttttgtttcgttttttcatgaacaatatacctcagaggctatttcacctcagtgagcaaa

SEQ ID NO: 12697 - DNA, 122 bp, Homo sapiens
  misc_feature (61)..(62): /note="This region represents a CpG dinucleotide"
  misc_feature (61)..(61): /note="Nucleotide may be methylated to form 5-methylcytosine"
tcagaacagcaaaatctaagatgtgttcaggcaatgaagtgctggagtctcacatactggcgccaagtgagtcattgtttcccagcaattgggacttaacacttgttggaacacaacaaatg

SEQ ID NO: 12698 - DNA, 122 bp, Homo sapiens
  misc_feature (61)..(62): /note="This region represents a CpG dinucleotide"
  misc_feature (61)..(61): /note="Nucleotide may be methylated to form 5-methylcytosine"
attttttgacagcatctcaagcaaactaagatgtctcttcagcatcagtctgactgctgccgctcctgatttcgtcaagcctgagtcagacctcagttctggacatcacagttattttaaag

SEQ ID NO: 12699 - DNA, 122 bp, Homo sapiens
  misc_feature (61)..(62): /note="This region represents a CpG dinucleotide"
  misc_feature (61)..(61): /note="Nucleotide may be methylated to form 5-methylcytosine"
tgagaggctgctggctgtgcccagagatgtcttggccacgaacccctcagtcactgccagcgggttctgcacgcgccttggagtcccgggcatccactgacatttcttcccccggccccacc

SEQ ID NO: 12700 - DNA, 122 bp, Homo sapiens
  misc_feature (61)..(62): /note="This region represents a CpG dinucleotide"
  misc_feature (61)..(61): /note="Nucleotide may be methylated to form 5-methylcytosine"
ggttatataaagcctattgctgtgacctgcattgctttgaggctgtgcctcactgtcttgcgtcctctgtcacaatatgtcatcagttcagacattcacacacacacacccccgggtctctg

SEQ ID NO: 12701 - DNA, 122 bp, Homo sapiens
  misc_feature (61)..(62): /note="This region represents a CpG dinucleotide"
  misc_feature (61)..(61): /note="Nucleotide may be methylated to form 5-methylcytosine"
cctggccaatcagagcactgccttctcatagcctcactgattggctcagggatgggcacacggtctaaactgctccaatcacagtgagtcccaggacttaggtaggagctacccaaatgata

SEQ ID NO: 12702 - DNA, 122 bp, Homo sapiens
  misc_feature (61)..(62): /note="This region represents a CpG dinucleotide"
  misc_feature (61)..(61): /note="Nucleotide may be methylated to form 5-methylcytosine"
tcagcaaaaatgtaggacacgtgtactcagggctaggaactatgccagctggagctgaaacgctggatcccacacagcccctcccctcagaagccagcaatctcagaggggagacaaacaag

SEQ ID NO: 12703 - DNA, 122 bp, Homo sapiens
  misc_feature (61)..(62): /note="This region represents a CpG dinucleotide"
  misc_feature (61)..(61): /note="Nucleotide may be methylated to form 5-methylcytosine"
catgaatatttagcagggctccctcattaactgggtttagagaggtctcccttacaatcacgaagctctaataaatgctggcatttaattgtgctcatccaataggaactaagctgcagggg

SEQ ID NO: 12704 - DNA, 122 bp, Homo sapiens
  misc_feature (61)..(62): /note="This region represents a CpG dinucleotide"
  misc_feature (61)..(61): /note="Nucleotide may be methylated to form 5-methylcytosine"
cccacacgtgaggagacatccctttttaagtccatcctgtgaccaaagcttggaatgcagcgctggcttttggaaataagcaaaggcagattaaggaagaaagatcctttactgtgagttct

SEQ ID NO: 12705 - DNA, 122 bp, Homo sapiens
  misc_feature (61)..(62): /note="This region represents a CpG dinucleotide"
  misc_feature (61)..(61): /note="Nucleotide may be methylated to form 5-methylcytosine"
cctcggttggtgtctagcacctagtaggttctcaaatactttttgaatcacagtgcctgccgatatatttaatgtttcaaaatagttctgccgtcataaagaaaaacatcatggtgtagggg

SEQ ID NO: 12706 - DNA, 122 bp, Homo sapiens
  misc_feature (61)..(62): /note="This region represents a CpG dinucleotide"
  misc_feature (61)..(61): /note="Nucleotide may be methylated to form 5-methylcytosine"
tgaactcctgacctcaggtgatccgcctgccttggcctcccaaagtgttgggattacaggcgtgagccactgcacccagcctaaggcttaagtctttccgatggctcttcagaggtaaatgg

SEQ ID NO: 12707 - DNA, 122 bp, Homo sapiens
  misc_feature (61)..(62): /note="This region represents a CpG dinucleotide"
  misc_feature (61)..(61): /note="Nucleotide may be methylated to form 5-methylcytosine"
tcctgggctgtggattctagtgcagattctgtggacagacagcctgactcatacccagcccgtccacttacaagctgtgtgactttgcctcagttccttaacctctctgggcctcagtttct

SEQ ID NO: 12708 - DNA, 122 bp, Homo sapiens
  misc_feature (61)..(62): /note="This region represents a CpG dinucleotide"
  misc_feature (61)..(61): /note="Nucleotide may be methylated to form 5-methylcytosine"
ctttgttcattgcacattcacagcctgcctccagagccctcttgttcactgtttcactcacgttacacatgaggaaattggcctagaatggccaagtaacttgcccccaggtcactcagctg

SEQ ID NO: 12709 - DNA, 122 bp, Homo sapiens
  misc_feature (61)..(62): /note="This region represents a CpG dinucleotide"
  misc_feature (61)..(61): /note="Nucleotide may be methylated to form 5-methylcytosine"
gcaggtggtaaaactgtacacgccttaacatgcacatgtgtgtgtgcatacgtgcatatacgagtgcaagtaaccaggggtatctgaataagataaatgggttgtatcaatgccaatatcct

SEQ ID NO: 12710 - DNA, 122 bp, Homo sapiens
  misc_feature (61)..(62): /note="This region represents a CpG dinucleotide"
  misc_feature (61)..(61): /note="Nucleotide may be methylated to form 5-methylcytosine"
acgcggaggcttgctctgctcatggtggagctgaggacttcaaaccccacagggcctggtcgagagccactgggccccaggtctagatgtggaactgggggaccctccagcgagctttgctg

SEQ ID NO: 12711 - DNA, 122 bp, Homo sapiens
  misc_feature (61)..(62): /note="This region represents a CpG dinucleotide"
  misc_feature (61)..(61): /note="Nucleotide may be methylated to form 5-methylcytosine"
ctgccactcttactacaaatacacccacaaagtcacatcaataatacatttcaggccaggcgtggtggctcacacctgtaatcctagcactttgagaggccgaggcgggcggatcacaaggt

SEQ ID NO: 12712 - DNA, 122 bp, Homo sapiens
  misc_feature (61)..(62): /note="This region represents a CpG dinucleotide"
  misc_feature (61)..(61): /note="Nucleotide may be methylated to form 5-methylcytosine"
gccgactggctcctctcagggtgttgttgatgaaatttggtctcttgtcacatcatcttccgagctttgcagcagctactccctcatggtttctcatgcatgatcatgaatttatggataga

SEQ ID NO: 12713 - DNA, 122 bp, Homo sapiens
  misc_feature (61)..(62): /note="This region represents a CpG dinucleotide"
  misc_feature (61)..(61): /note="Nucleotide may be methylated to form 5-methylcytosine"
aataatggcacagaatttccaggcacattctgttacatgatattccaaacatgccctgggcgtttacacacatggtacaacaaactaaccttagaggtacttgtgtgtcatgtgcagagcat

SEQ ID NO: 12714 - DNA, 122 bp, Homo sapiens
  misc_feature (61)..(62): /note="This region represents a CpG dinucleotide"
  misc_feature (61)..(61): /note="Nucleotide may be methylated to form 5-methylcytosine"
atggatactgatgagtcatggaacaggcttagctctgttcaatccaactaacctactttacgctcagagaattctgttgaatggcttccttgtgaggtacaatctgaaaatattttaaaaac

SEQ ID NO: 12715 - DNA, 122 bp, Homo sapiens
  misc_feature (61)..(62): /note="This region represents a CpG dinucleotide"
  misc_feature (61)..(61): /note="Nucleotide may be methylated to form 5-methylcytosine"
atataaccacctaacagtggcatttaatttggaaacttaaatgtaagggaaagctgcctacgggaagtagtatctaggttaagatctgtaaaacagttagccaaaaatggagtcagagacag

SEQ ID NO: 12716 - DNA, 122 bp, Homo sapiens
  misc_feature (61)..(62): /note="This region represents a CpG dinucleotide"
  misc_feature (61)..(61): /note="Nucleotide may be methylated to form 5-methylcytosine"
tccagacacggaagacagtggttttaatagagtaaaccaaaatgtaggatttgctctctccgatattctggaaaatcccactgctttagggcatagacttttcctgaaaatagaaggctgtg

SEQ ID NO: 12717 - DNA, 122 bp, Homo sapiens
  misc_feature (61)..(62): /note="This region represents a CpG dinucleotide"
  misc_feature (61)..(61): /note="Nucleotide may be methylated to form 5-methylcytosine"
agggagccgagcaattagcaaggcgcgggcgcccgcttgcccagagggggtcggggagggcgagtggggagaccagggcgcgagggcaaagggctcccttcctggcaggctgcggtctgcag

SEQ ID NO: 12718 - DNA, 122 bp, Homo sapiens
  misc_feature (61)..(62): /note="This region represents a CpG dinucleotide"
  misc_feature (61)..(61): /note="Nucleotide may be methylated to form 5-methylcytosine"
actctggagtctgaggtgggggtcagttgtgaagaaagggaagaaggaagaaaaaggatacgttgtgctccgaccacaggccaaggtacaaagaagaggggaaaagaaaatagctgggccct

SEQ ID NO: 12719 - DNA, 122 bp, Homo sapiens
  misc_feature (61)..(62): /note="This region represents a CpG dinucleotide"
  misc_feature (61)..(61): /note="Nucleotide may be methylated to form 5-methylcytosine"
tttggaagaaactaaacactgcttctagataagaagtgctccaaagggaaacaggctcagcggtgcccgttacaacttgcagcactcaggagatagttccatgcagcaggagaggaaagaat

SEQ ID NO: 12720 - DNA, 122 bp, Homo sapiens
  misc_feature (61)..(62): /note="This region represents a CpG dinucleotide"
  misc_feature (61)..(61): /note="Nucleotide may be methylated to form 5-methylcytosine"
cacaaatcagcttgaaacacccatttttcatctttcttttggcaaagggtgttgttattacgtgcagttatgtgttcactggagatacatacagaagtagttcatgtcctcatgaggctttc

SEQ ID NO: 12721 - DNA, 122 bp, Homo sapiens
  misc_feature (61)..(62): /note="This region represents a CpG dinucleotide"
  misc_feature (61)..(61): /note="Nucleotide may be methylated to form 5-methylcytosine"
atgtgattcaaatgtgcacatattacctctgcttgcttctcgttggctaaatcactgtcacgtgctcgtgctagcttgcaagtgtgttgtgggaagtcagggaccccgaatggagggactgc

SEQ ID NO: 12722 - DNA, 122 bp, Homo sapiens
  misc_feature (61)..(62): /note="This region represents a CpG dinucleotide"
  misc_feature (61)..(61): /note="Nucleotide may be methylated to form 5-methylcytosine"
ctgaattaagaggccatatgagagagctaaattaagttagagattatctagccttaaacacgagttacagatgtgataattgggcctagaagaaggaatcattttattaggctcatgttata

SEQ ID NO: 12723 - DNA, 122 bp, Homo sapiens
  misc_feature (61)..(62): /note="This region represents a CpG dinucleotide"
  misc_feature (61)..(61): /note="Nucleotide may be methylated to form 5-methylcytosine"
tttcatgaaagagtaagtaaattctaatagaaacatcttttttagagtgaacaatattcccgtcaacatttgagcttctaattgcatgttgaagacctttagtgctatgtgggcctaaaccc

SEQ ID NO: 12724 - DNA, 122 bp, Homo sapiens
  misc_feature (61)..(62): /note="This region represents a CpG dinucleotide"
  misc_feature (61)..(61): /note="Nucleotide may be methylated to form 5-methylcytosine"
taaattatttttctgtacttcagctttatcaggtgaatgtcatgggagatgacaaatccccgtaagtcataggattattttgagtactaaatgaacaaactgaaaagcaactagcagaggac

SEQ ID NO: 12725 - DNA, 122 bp, Homo sapiens
  misc_feature (61)..(62): /note="This region represents a CpG dinucleotide"
  misc_feature (61)..(61): /note="Nucleotide may be methylated to form 5-methylcytosine"
ttcactgcccccttggcctgcctgtaaaagcgctgctcccttcaaagggacccataatcacgccgagtctgtgggttgcacgactatacccactgtcttatctgcaagttgagtttgatctt

SEQ ID NO: 12726 - DNA, 122 bp, Homo sapiens
  misc_feature (61)..(62): /note="This region represents a CpG dinucleotide"
  misc_feature (61)..(61): /note="Nucleotide may be methylated to form 5-methylcytosine"
ataggtttttgggaaggaataaatcaaaggtgagaaaatatatacaaaaacctgactgagcgagaacatagcttacacacaagaagtggcagcttggtgagcacactgctatgtcatgttgt

SEQ ID NO: 12727 - DNA, 122 bp, Homo sapiens
  misc_feature (61)..(62): /note="This region represents a CpG dinucleotide"
  misc_feature (61)..(61): /note="Nucleotide may be methylated to form 5-methylcytosine"
aggacgctttggatcaagacagatctgagcttgtttgaccacttagtaccttgagcctcacgctcaaccttgctaaacttcaccagtaaataggagcaggagattgttagaaagggtttcat

SEQ ID NO: 12728 - DNA, 122 bp, Homo sapiens
  misc_feature (61)..(62): /note="This region represents a CpG dinucleotide"
  misc_feature (61)..(61): /note="Nucleotide may be methylated to form 5-methylcytosine"
acaaatctgtgttttagaaaaatcacattggctacactccaggaagcagtcgaacaacagcgaaagcttttgggaaactgtaatcccatagaaagacaaaggattataagtattatggaaag

SEQ ID NO: 12729 - DNA, 122 bp, Homo sapiens
  misc_feature (61)..(62): /note="This region represents a CpG dinucleotide"
  misc_feature (61)..(61): /note="Nucleotide may be methylated to form 5-methylcytosine"
ggactggtgtaaagcggactggattaagaattagaagacccaattacccgagaaggggtacgaggagccttctgggtactgaaatgttcaaagctgttcactgaagatttatgggtttgaat

SEQ ID NO: 12730 - DNA, 122 bp, Homo sapiens
  misc_feature (61)..(62): /note="This region represents a CpG dinucleotide"
  misc_feature (61)..(61): /note="Nucleotide may be methylated to form 5-methylcytosine"
aggtgggtggatcacttgaggccaggagttggagaccagcctggccaacatggtgaaacccggtctctactaataatacacaaaaattagccggggatggtggcaagtgcctataatcctag

SEQ ID NO: 12731 - DNA, 122 bp, Homo sapiens
  misc_feature (61)..(62): /note="This region represents a CpG dinucleotide"
  misc_feature (61)..(61): /note="Nucleotide may be methylated to form 5-methylcytosine"
catactttttgtatgtatacccttatttctctccataacacatcacagattttataagcacgtcagtctctctcactaaggcattttcttccttttcccataatgcctagcaattaatatgt

SEQ ID NO: 12732 - DNA, 122 bp, Homo sapiens
  misc_feature (61)..(62): /note="This region represents a CpG dinucleotide"
  misc_feature (61)..(61): /note="Nucleotide may be methylated to form 5-methylcytosine"
ttcttggagccaagtgcccttaagtgtgataagcagagaaataaaaatcaaagtgagtcacggatgaatgagcacataatggagattgttttgttttagagatggggtctcactatattgcc

SEQ ID NO: 12733 - DNA, 122 bp, Homo sapiens
  misc_feature (61)..(62): /note="This region represents a CpG dinucleotide"
  misc_feature (61)..(61): /note="Nucleotide may be methylated to form 5-methylcytosine"
aggcgttcccgaagtcctccacccggggctccgccagcccagagggggtaaggaagtcgtcgccctggttgccattgtaattcccacacaggccgcaggtcttcccggcatagacgggggac

SEQ ID NO: 12734 - DNA, 122 bp, Homo sapiens
  misc_feature (61)..(62): /note="This region represents a CpG dinucleotide"
  misc_feature (61)..(61): /note="Nucleotide may be methylated to form 5-methylcytosine"
tcgttctgacttctgagctgcgaggtgagctctgtggtcagctgcactgtggcgtatgctcgctgtcattcagctgacatttcagctgctcccaaagtcaacatttatgagttctgccatgt

SEQ ID NO: 12735 - DNA, 122 bp, Homo sapiens
  misc_feature (61)..(62): /note="This region represents a CpG dinucleotide"
  misc_feature (61)..(61): /note="Nucleotide may be methylated to form 5-methylcytosine"
aaatggttacttcgagggctggggcaggaatatataagataacattggaacaaattctgacgccagaacatgaagaaatatttgaaaaaggatggggcatattgactgaacacagaagacaa

SEQ ID NO: 12736 - DNA, 122 bp, Homo sapiens
  misc_feature (61)..(62): /note="This region represents a CpG dinucleotide"
  misc_feature (61)..(61): /note="Nucleotide may be methylated to form 5-methylcytosine"
acgatgtgcagaggctacctgtagtgatggtgctgagtcaagcctgtcaaccactgtgctcgttagtgaccaaggctgctttgacaggctgccagcttgtcagtggtttgcagccccccaga

SEQ ID NO: 12737 - DNA, 122 bp, Homo sapiens
  misc_feature (61)..(62): /note="This region represents a CpG dinucleotide"
  misc_feature (61)..(61): /note="Nucleotide may be methylated to form 5-methylcytosine"
taaccgaattccattactgaaggaagtttttgaggcctttcctaacactcccattaacatcgatatcaaagtcaacaacaatgtgctgattaagaaggtactcaaggcattgcctcctctgg

SEQ ID NO: 12738 - DNA, 122 bp, Homo sapiens
  misc_feature (61)..(62): /note="This region represents a CpG dinucleotide"
  misc_feature (61)..(61): /note="Nucleotide may be methylated to form 5-methylcytosine"
cagccagactgcctctgacacacccagtcctcatttggatttgaggaaaggagacttgagcgcaggagaaaggcacccaggagcctgtgagtcgtgcctaagcctctggatcccacatctga

SEQ ID NO: 12739 - DNA, 122 bp, Homo sapiens
  misc_feature (61)..(62): /note="This region represents a CpG dinucleotide"
  misc_feature (61)..(61): /note="Nucleotide may be methylated to form 5-methylcytosine"
agtttgttttacaggaataaagaataacaggaagttgtactcaaggtatacacctatatgcgatagcctgtacatcaggcagataagcttctagttgaatgttaaccatgaaatcaaaacat

SEQ ID NO: 12740 - DNA, 122 bp, Homo sapiens
  misc_feature (61)..(62): /note="This region represents a CpG dinucleotide"
  misc_feature (61)..(61): /note="Nucleotide may be methylated to form 5-methylcytosine"
agtttgtgcttgtctgactacatggtcttaaaaccaaggtccttgtcttgaatacacaaccgtcaccacacaaagtccaagactgccaggtcattgctcatcaccagatggctctgtaaatc

SEQ ID NO: 12741 - DNA, 122 bp, Homo sapiens
  misc_feature (61)..(62): /note="This region represents a CpG dinucleotide"
  misc_feature (61)..(61): /note="Nucleotide may be methylated to form 5-methylcytosine"
aaaataactccttccttttagttatagttattagtataatatagtaattatatttggccacgcccaacatgtagagtgattgacttgggtgttgaccttagatttccttgggtggctactga

SEQ ID NO: 12742 - DNA, 122 bp, Homo sapiens
  misc_feature (61)..(62): /note="This region represents a CpG dinucleotide"
  misc_feature (61)..(61): /note="Nucleotide may be methylated to form 5-methylcytosine"
ccccaagcctctagtgttcaccataaagagctcagtcagcccatcacccttgggtgacagcgagcactgtgaggggtaaagaaggcagtctttaatatgctcattatttatagggaagaaag

SEQ ID NO: 12743 - DNA, 122 bp, Homo sapiens
  misc_feature (61)..(62): /note="This region represents a CpG dinucleotide"
  misc_feature (61)..(61): /note="Nucleotide may be methylated to form 5-methylcytosine"
gccccagggctgtggggaagggttgatgaatagtattcccacgcagtgctttgcacagtccgggcaccacaggatccctgtcattgtgaaacatctgtcacggtgaacaacttgccactccc

SEQ ID NO: 12744 - DNA, 122 bp, Homo sapiens
  misc_feature (61)..(62): /note="This region represents a CpG dinucleotide"
  misc_feature (61)..(61): /note="Nucleotide may be methylated to form 5-methylcytosine"
gatcatgcctaacttgctactctgctgcaaggactgtagctcattcatttgttcaatgagcgtttactaagcaatgccacatgccagacactacactagacacagactatataacggcaaac

SEQ ID NO: 12745 - DNA, 122 bp, Homo sapiens
  misc_feature (61)..(62): /note="This region represents a CpG dinucleotide"
  misc_feature (61)..(61): /note="Nucleotide may be methylated to form 5-methylcytosine"
gagagggtgggaagaaggtctccagtccctctccagccttggagcttcccatggtccccacgaagtccttcccactgtacatctgattagtctctctcaggccagaagctacccccagctgc

SEQ ID NO: 12746 - DNA, 122 bp, Homo sapiens
  misc_feature (61)..(62): /note="This region represents a CpG dinucleotide"
  misc_feature (61)..(61): /note="Nucleotide may be methylated to form 5-methylcytosine"
agcaagctggcacgggaagaggacagggcctctcgtgtcccctcctcccttcccgcccatcgcactggtcctgcagagatagctgtccccttggggccccggggctcccgctggcgcatctg

SEQ ID NO: 12747 - DNA, 122 bp, Homo sapiens
  misc_feature (61)..(62): /note="This region represents a CpG dinucleotide"
  misc_feature (61)..(61): /note="Nucleotide may be methylated to form 5-methylcytosine"
cagaaaaccgagggctgcctctgggggagcaggctttgggcattcctggggctgtccctccgctctgccacttaacaaccgtgtggctgtggttgagtgactcagctctctctgtaaagcag

SEQ ID NO: 12748 - DNA, 122 bp, Homo sapiens
  misc_feature (61)..(62): /note="This region represents a CpG dinucleotide"
  misc_feature (61)..(61): /note="Nucleotide may be methylated to form 5-methylcytosine"
tatgatgattaattcagtttacaattcagtaatatttgctaggctaaacactatgatgcacgtgcggggagtggaatgaactcttccaagcaggagactctttttctactccaagtgacaag

SEQ ID NO: 12749 - DNA, 122 bp, Homo sapiens
  misc_feature (61)..(62): /note="This region represents a CpG dinucleotide"
  misc_feature (61)..(61): /note="Nucleotide may be methylated to form 5-methylcytosine"
gtcagtaaatcattgtagatggtggctatcatattaagaaggctatttcttgactaagctcggtcatgagattagcattccagtaccaacatgctggacacttgctgaatagatgaacacat

SEQ ID NO: 12750 - DNA, 122 bp, Homo sapiens
  misc_feature (61)..(62): /note="This region represents a CpG dinucleotide"
  misc_feature (61)..(61): /note="Nucleotide may be methylated to form 5-methylcytosine"
aatctcagctttatgatgtcagaagacttttaaacttcccattttccacagcttgttccccgcctagggaaaaagctcaatcacttcataaatctggcatcattctagtacactgtgtttta

SEQ ID NO: 12751 - DNA, 122 bp, Homo sapiens
  misc_feature (61)..(62): /note="This region represents a CpG dinucleotide"
  misc_feature (61)..(61): /note="Nucleotide may be methylated to form 5-methylcytosine"
gtgtctatacccaaagcaccacccggtgattttgaacaaacaggaaacaaatcaacgtagcgtgtggttcctgcagaaggctgctgtcagactgcagtcagtaggggtggagtcctctgggg

SEQ ID NO: 12752 - DNA, 122 bp, Homo sapiens
  misc_feature (61)..(62): /note="This region represents a CpG dinucleotide"
  misc_feature (61)..(61): /note="Nucleotide may be methylated to form 5-methylcytosine"
taagaggttcttggaacaatctatcttggctgccacatggtggtacccatctgtgggtaccgttttttcatctctgcccctcttctcccgaagcttcatctatcactctcaccagaacacca

SEQ ID NO: 12753 - DNA, 122 bp, Homo sapiens
  misc_feature (61)..(62): /note="This region represents a CpG dinucleotide"
  misc_feature (61)..(61): /note="Nucleotide may be methylated to form 5-methylcytosine"
attaatgaaaatgctctcagccaaataagatctaaaaatagcctccctgtgatatgaacgcgtggcccctaagggtcctaaagagagagctaggggaggttcagctggccacagagatgcta

SEQ ID NO: 12754 - DNA, 122 bp, Homo sapiens
  misc_feature (61)..(62): /note="This region represents a CpG dinucleotide"
  misc_feature (61)..(61): /note="Nucleotide may be methylated to form 5-methylcytosine"
gcagattatccagcttggttggaggaggtcttatcttacttcctcccacccttccttagccgtcgcctctgtttcctcatttgacttcatgtatgttttgatccatgtcaataagattgtga

SEQ ID NO: 12755 - DNA, 122 bp, Homo sapiens
  misc_feature (61)..(62): /note="This region represents a CpG dinucleotide"
  misc_feature (61)..(61): /note="Nucleotide may be methylated to form 5-methylcytosine"
gggacctgcttgccagtgctctcacatccttattaggggagaccaactctgcagctgtgacgcattgcttcaagaaatgaaactctggaaggtgaccaggagagaacaccctgcctagatta

SEQ ID NO: 12756 - DNA, 122 bp, Homo sapiens
  misc_feature (61)..(62): /note="This region represents a CpG dinucleotide"
  misc_feature (61)..(61): /note="Nucleotide may be methylated to form 5-methylcytosine"
ccctatgtcctctagttctcagtcttgagaccagcacccagctggctacatcagaattgccggtggtgatgttttagaagattccaaattcctggactccatccccggaggttcatccccta

SEQ ID NO: 12757 - DNA, 122 bp, Homo sapiens
  misc_feature (61)..(62): /note="This region represents a CpG dinucleotide"
  misc_feature (61)..(61): /note="Nucleotide may be methylated to form 5-methylcytosine"
cttgtgtaatggtgaactaagacagcaaaactcaaggtatgtacctcagatgttattcatcgaaaaaaacaagggtgaccctggggtcaaataaatttggaaaccgtgagattgaacaactt

SEQ ID NO: 12758 - DNA, 122 bp, Homo sapiens
  misc_feature (61)..(62): /note="This region represents a CpG dinucleotide"
  misc_feature (61)..(61): /note="Nucleotide may be methylated to form 5-methylcytosine"
agtctgccacctccccatgctaggctgagttagcaggagctggcaggaagcacgcagaggcgcccgccctgtcagcttttcactgtggattaggcttccttctgttggctctggaaattgtt

SEQ ID NO: 12759 - DNA, 122 bp, Homo sapiens
  misc_feature (61)..(62): /note="This region represents a CpG dinucleotide"
  misc_feature (61)..(61): /note="Nucleotide may be methylated to form 5-methylcytosine"
gaggcccgggctggggacccgctggccgggggagcgtctcctggaagtcccgtcccccaccgacctgcatggtttctgcgctcgggacttgcaggctgagggccaagcaccgcgagaccacc

SEQ ID NO: 12760 - DNA, 122 bp, Homo sapiens
  misc_feature (61)..(62): /note="This region represents a CpG dinucleotide"
  misc_feature (61)..(61): /note="Nucleotide may be methylated to form 5-methylcytosine"
cagattccactaatcagaaatgtaaggcataaagtagactaggatttatctttttatcaacgatgatgaaagatggcccaaggaaataaatgacataaacaagattaaagggggatgttttc

SEQ ID NO: 12761 - DNA, 122 bp, Homo sapiens
  misc_feature (61)..(62): /note="This region represents a CpG dinucleotide"
  misc_feature (61)..(61): /note="Nucleotide may be methylated to form 5-methylcytosine"
tccgtgtgcacctggctcagtgtctgcatgcacatgtgagcgctgcaccctcatgcagggcgctacccgtgtgtcagtggatatggaagaaggaggtgtgaaaagctttgaggacacaggtg

SEQ ID NO: 12762 - DNA, 122 bp, Homo sapiens
  misc_feature (61)..(62): /note="This region represents a CpG dinucleotide"
  misc_feature (61)..(61): /note="Nucleotide may be methylated to form 5-methylcytosine"
ccggacctgacatcccttgatgtgtggcttggtacaaccctgacatccattgatgtcattcggctgtcgattagacctcaggtgccacacccacagccaagccctgatgtcaccgtccctcc

SEQ ID NO: 12763 - DNA, 122 bp, Homo sapiens
  misc_feature (61)..(62): /note="This region represents a CpG dinucleotide"
  misc_feature (61)..(61): /note="Nucleotide may be methylated to form 5-methylcytosine"
gtgcaatacatcaactaacaacaggatgttagaacagaggaatataacaagtatcatggacgagggtggggtatcagctcccaaaaaatgagtcatatggaagtgttattttagccaagatc

SEQ ID NO: 12764 - DNA, 122 bp, Homo sapiens
  misc_feature (61)..(62): /note="This region represents a CpG dinucleotide"
  misc_feature (61)..(61): /note="Nucleotide may be methylated to form 5-methylcytosine"
caggaggggcaaatgcaaaatccctgcagtaggagacacctggtgcacttcaatgtggctcgaactgaaaggagagatagcaagagacgagatcagagaggtaaaaatgagccagattgttt

SEQ ID NO: 12765 - DNA, 122 bp, Homo sapiens
  misc_feature (61)..(62): /note="This region represents a CpG dinucleotide"
  misc_feature (61)..(61): /note="Nucleotide may be methylated to form 5-methylcytosine"
tgggatgatcaggaataagtgcagctggaacagaacctagatatctttcttctggtccctcgtcacattcactcccacttctctttcactccccgctccatcactccagatttggtccctct

SEQ ID NO: 12766 - DNA, 122 bp, Homo sapiens
  misc_feature (61)..(62): /note="This region represents a CpG dinucleotide"
  misc_feature (61)..(61): /note="Nucleotide may be methylated to form 5-methylcytosine"
acagcattctgcccatgcttggtgctgcttctccaaaaggcgactctggcgtgtgttgggcgttacatcattctctccttcaggggcttaaatgatgaaatatcaagagagggaattaaata

SEQ ID NO: 12767 - DNA, 122 bp, Homo sapiens
  misc_feature (61)..(62): /note="This region represents a CpG dinucleotide"
  misc_feature (61)..(61): /note="Nucleotide may be methylated to form 5-methylcytosine"
taattaggttgacctctctctcctgtagaccaggaccaagcattcagtgagcatacatgacgtgtcagatactgttcagggacagcaaaggtaaacaacaggacacctgcagccttcagagg

SEQ ID NO: 12768 - DNA, 122 bp, Homo sapiens
  misc_feature (61)..(62): /note="This region represents a CpG dinucleotide"
  misc_feature (61)..(61): /note="Nucleotide may be methylated to form 5-methylcytosine"
gcccacctcagcctcccaaagtgctgggattacaggcgtgagccaccgtgcccagccgagcgtgtctgtcttgttcactggtgtattttcttaatgcctggaatgatgtctagcaaacaata

SEQ ID NO: 12769 - DNA, 122 bp, Homo sapiens
  misc_feature (61)..(62): /note="This region represents a CpG dinucleotide"
  misc_feature (61)..(61): /note="Nucleotide may be methylated to form 5-methylcytosine"
gcagaggaaacaggcaggatgaatggagagtggagaggcaggagtggaccctcctagtaacggctggtatttactgaaggtttaccatgagaaggatgcctcataaccctccccaccaagga

SEQ ID NO: 12770 - DNA, 122 bp, Homo sapiens
  misc_feature (61)..(62): /note="This region represents a CpG dinucleotide"
  misc_feature (61)..(61): /note="Nucleotide may be methylated to form 5-methylcytosine"
agttggatacatgggcacggaaggctcatacacggccaaagaaggctagtcacatgggcacggaaggttgctacctggacacagaatgtcaacagtgatgacagctaatacattgtgggcac

SEQ ID NO: 12771 - DNA, 122 bp, Homo sapiens
  misc_feature (61)..(62): /note="This region represents a CpG dinucleotide"
  misc_feature (61)..(61): /note="Nucleotide may be methylated to form 5-methylcytosine"
gcaatagattctaggagtataaaaaacatagaaggaagggaacacagctctctactaccccgtctggctgctgatcagagtaagtttggagaaacatcaacaaatgtgttctgccattgctt

SEQ ID NO: 12772 - DNA, 122 bp, Homo sapiens
  misc_feature (61)..(62): /note="This region represents a CpG dinucleotide"
  misc_feature (61)..(61): /note="Nucleotide may be methylated to form 5-methylcytosine"
aaaaaggtgggtgttttttctctttcagagtaatacatttagatacacgcaacatacatgcgtgggtggcaggaatgcaggttattcagcttagaagtaaacccaactgggtaaagtttatt

SEQ ID NO: 12773 - DNA, 122 bp, Homo sapiens
  misc_feature (61)..(62): /note="This region represents a CpG dinucleotide"
  misc_feature (61)..(61): /note="Nucleotide may be methylated to form 5-methylcytosine"
gataacactggggagagttaactttttcacctctgtttgttgatatgcccctttgtgctccgtattcacaaaggggcacctcaacaagcccatcatttgttaatgaatgcctttactttcat

SEQ ID NO: 12774 - DNA, 122 bp, Homo sapiens
  misc_feature (61)..(62): /note="This region represents a CpG dinucleotide"
  misc_feature (61)..(61): /note="Nucleotide may be methylated to form 5-methylcytosine"
tgatggagtggatagatgcggtagaagcagatggggccggtgacctggcagacaggtgcgcgcataacacctctgcagccacaaagccgtgcaagcccagcatgtgggagggactggcgtgg

SEQ ID NO: 12775 - DNA, 122 bp, Homo sapiens
  misc_feature (61)..(62): /note="This region represents a CpG dinucleotide"
  misc_feature (61)..(61): /note="Nucleotide may be methylated to form 5-methylcytosine"
acagacacagacctcagagctggctgcctcgggagtgccttgctgacggtcgctggagttcgtccatcaggcgactgcggtggggcacggagagcaaccgctgcctggcggagactttgatg

SEQ ID NO: 12776 - DNA, 122 bp, Homo sapiens
  misc_feature (61)..(62): /note="This region represents a CpG dinucleotide"
  misc_feature (61)..(61): /note="Nucleotide may be methylated to form 5-methylcytosine"
ggaaatttgccctctcccttgataacatttattgttcatatatgttcacttgctaggaaacggggatagaaataaataagatccgagtcctgctctcaaggatacacagccttgtagcaagt

SEQ ID NO: 12777 - DNA, 122 bp, Homo sapiens
  misc_feature (61)..(62): /note="This region represents a CpG dinucleotide"
  misc_feature (61)..(61): /note="Nucleotide may be methylated to form 5-methylcytosine"
gcaaataagtggcatttcatgcaactgctcttggcaaggcagctcccacgccagtgtggacgggcagtggtgactttgtccccagttcccacatcctcctcccacggccgctcagcagcccc

SEQ ID NO: 12778 - DNA, 122 bp, Homo sapiens
  misc_feature (61)..(62): /note="This region represents a CpG dinucleotide"
  misc_feature (61)..(61): /note="Nucleotide may be methylated to form 5-methylcytosine"
gatatttaaaggacacaggaagtacaggcacttccttccccgactgtaaaatctggttggcgtactaagtcatagaaatataaatagttcagtacccatataaagaggtgtgactaagaacc

SEQ ID NO: 12779 - DNA, 122 bp, Homo sapiens
  misc_feature (61)..(62): /note="This region represents a CpG dinucleotide"
  misc_feature (61)..(61): /note="Nucleotide may be methylated to form 5-methylcytosine"
ccatttacccccattaatctaaacagttgacccacatgtctttcactttaccagctgatacgcaccttgaggcttgcctcttaattcaccattacatcagactgccaagcacaatatttgac

SEQ ID NO: 12780 - DNA, 122 bp, Homo sapiens
  misc_feature (61)..(62): /note="This region represents a CpG dinucleotide"
  misc_feature (61)..(61): /note="Nucleotide may be methylated to form 5-methylcytosine"
gttgatgctctttggtgagccagttcattctgacgttgagacctgaggctactgcatgtgcgcttacacaactcactctataattgatctgatgctgacactgacactgccagctcttactc

SEQ ID NO: 12781 - DNA, 122 bp, Homo sapiens
  misc_feature (61)..(62): /note="This region represents a CpG dinucleotide"
  misc_feature (61)..(61): /note="Nucleotide may be methylated to form 5-methylcytosine"
ttcagaatttttgattcattacttggatgaaaacacaggaaattgcttatcagatatgtacgtggtacagaactgaaaggacagctgcaacagagagctgcctgcattaagattacaagtag

SEQ ID NO: 12782 - DNA, 122 bp, Homo sapiens
  misc_feature (61)..(62): /note="This region represents a CpG dinucleotide"
  misc_feature (61)..(61): /note="Nucleotide may be methylated to form 5-methylcytosine"
cctgtaatatgcaaagttcctagtcaaggctgccttaggaattcctgccccttaacttaacgctttaatctttatcagggaaaatatccctcttctctagtgatgtttaagaaatcaattcc

SEQ ID NO: 12783 - DNA, 122 bp, Homo sapiens
  misc_feature (61)..(62): /note="This region represents a CpG dinucleotide"
  misc_feature (61)..(61): /note="Nucleotide may be methylated to form 5-methylcytosine"
cactcgcgctccaagactcgggacaggcccttcccttccctccggcacacgtcctacacacgtccccgagaacagaacccacatggcagggagccccaccgtgctcactgttgtgttcccca

SEQ ID NO: 12784 - DNA, 122 bp, Homo sapiens
  misc_feature (61)..(62): /note="This region represents a CpG dinucleotide"
  misc_feature (61)..(61): /note="Nucleotide may be methylated to form 5-methylcytosine"
aaaaaggtgaggcttctatttagtggagaggaactgagagagctgcatgggttttaaatacgaaaatgaaagcaatacattttaggccaagtccaggaagcaagcaaggttggatagcaagg

SEQ ID NO: 12785 - DNA, 122 bp, Homo sapiens
  misc_feature (61)..(62): /note="This region represents a CpG dinucleotide"
  misc_feature (61)..(61): /note="Nucleotide may be methylated to form 5-methylcytosine"
cgataactgtaatatgtacacacacccacagaagactcccttcagctgtaaaaaatcaagcgtgatctggagcacaaacccacttttctgattgctgtagggactttagtcacaaacaaggg

SEQ ID NO: 12786 - DNA, 122 bp, Homo sapiens
  misc_feature (61)..(62): /note="This region represents a CpG dinucleotide"
  misc_feature (61)..(61): /note="Nucleotide may be methylated to form 5-methylcytosine"
tgaaatatatccattttttgctgaaatatgagctgccttgttctcccagtgagcaggttacgtttagctcagcgatgccacaccctgacctgtgcactgccaggggtcacttgaacctaagc

SEQ ID NO: 12787 - DNA, 122 bp, Homo sapiens
  misc_feature (61)..(62): /note="This region represents a CpG dinucleotide"
  misc_feature (61)..(61): /note="Nucleotide may be methylated to form 5-methylcytosine"
cataatgaaaaatctgacagccttctttttagagaacgctctgcaagcgaagcagctcaacgatgctgactattctctgtcaacttgatttcaaattgtattgtctaaatcttgccattagg

SEQ ID NO: 12788 - DNA, 122 bp, Homo sapiens
  misc_feature (61)..(62): /note="This region represents a CpG dinucleotide"
  misc_feature (61)..(61): /note="Nucleotide may be methylated to form 5-methylcytosine"
ccccgcgccctgtggttttctgaggcccccgaggaggaagtgcgggctcccggcatgcctcgcatccggccccagccctgagccacctcaggccgcccctggccagccctgaggcccgcccc

SEQ ID NO: 12789 - DNA, 122 bp, Homo sapiens
  misc_feature (61)..(62): /note="This region represents a CpG dinucleotide"
  misc_feature (61)..(61): /note="Nucleotide may be methylated to form 5-methylcytosine"
ttggcaagtactctgtgttctctcatttccttatctttgtgtatgctgtattgcagcacacgtcacatggagatgggcgtcaagaagttacctctcgtaccagccgctcaggagctcggtgt

SEQ ID NO: 12790 - DNA, 122 bp, Homo sapiens
  misc_feature (61)..(62): /note="This region represents a CpG dinucleotide"
  misc_feature (61)..(61): /note="Nucleotide may be methylated to form 5-methylcytosine"
gctgcagcttcttggctctctcactcaatcccctacaccttctggggcctcccagattgacgttttcatttcccgggctccacgacacgcagggactgtgagtctgcttttcacacgtggga

SEQ ID NO: 12791 - DNA, 122 bp, Homo sapiens
  misc_feature (61)..(62): /note="This region represents a CpG dinucleotide"
  misc_feature (61)..(61): /note="Nucleotide may be methylated to form 5-methylcytosine"
ttccagccataaaaaatatggcccaagatttacaaaaatatccctaaaacattccacatgcgtctcaaggcggagggtaattgttatgaacaaatccacacaaactcttgtgccaagagcaa

SEQ ID NO: 12792 - DNA, 122 bp, Homo sapiens
  misc_feature (61)..(62): /note="This region represents a CpG dinucleotide"
  misc_feature (61)..(61): /note="Nucleotide may be methylated to form 5-methylcytosine"
catattttcaaaaccataccagatctatatctaaggaacagtttaatatccgagtgagtacgatacaagttgacacaggtacaatcctatgttaaccaaaccaaaaatgcagtaacacagct

SEQ ID NO: 12793 - DNA, 122 bp, Homo sapiens
  misc_feature (61)..(62): /note="This region represents a CpG dinucleotide"
  misc_feature (61)..(61): /note="Nucleotide may be methylated to form 5-methylcytosine"
gacatgctttgtttgcatgtctaatgggtgtatcttttactaccacaattgtttccatgacggagcactggcatacataaatagaccaacagacatatagacttatgcatatatgtactgag

SEQ ID NO: 12794 - DNA, 122 bp, Homo sapiens
  misc_feature (61)..(62): /note="This region represents a CpG dinucleotide"
  misc_feature (61)..(61): /note="Nucleotide may be methylated to form 5-methylcytosine"
gaaagtgcacaccctggaacaaggagccttgggggtaaacataaatgaaatgcacttaggcgaaaatggaaatttttacaaggaaatagaggtatctcaggaacccaaggaagcacactagg

SEQ ID NO: 12795 - DNA, 122 bp, Homo sapiens
  misc_feature (61)..(62): /note="This region represents a CpG dinucleotide"
  misc_feature (61)..(61): /note="Nucleotide may be methylated to form 5-methylcytosine"
ggtctcttaggagagctggtgacactctccaggtgagtccttgtgtaattattaaggactcgcctttctcaagctggcggggaaaggggttgctgagaagggagaaatctggagcctaagtg

SEQ ID NO: 12796 - DNA, 122 bp, Homo sapiens
  misc_feature (61)..(62): /note="This region represents a CpG dinucleotide"
  misc_feature (61)..(61): /note="Nucleotide may be methylated to form 5-methylcytosine"
gcagcatgcatccctgtttgctatgatgtcttctccttctgttgcttcttttcttgctgccgttgaagttggaatgctatatcttgaaatccacgtctcagagtacaaggagtcaaatagta

SEQ ID NO: 12797 - DNA, 122 bp, Homo sapiens
  misc_feature (61)..(62): /note="This region represents a CpG dinucleotide"
  misc_feature (61)..(61): /note="Nucleotide may be methylated to form 5-methylcytosine"
agcaaaactccgtctcaaaaaaaaatttgttatttttgagacaggctacagtgcagtggccgtcatcatggctcactgtagcctggaccactagggcttaagtgatccatccacctcagcct

SEQ ID NO: 12798 - DNA, 122 bp, Homo sapiens
  misc_feature (61)..(62): /note="This region represents a CpG dinucleotide"
  misc_feature (61)..(61): /note="Nucleotide may be methylated to form 5-methylcytosine"
taggtagggactaagtaactaggagtagctcagggtcacctagccaatgatcggagatcccgggctcagagccaggccttctgactccttccaagttgcgtgccctcctctttttcgtttga

SEQ ID NO: 12799 - DNA, 122 bp, Homo sapiens
  misc_feature (61)..(62): /note="This region represents a CpG dinucleotide"
  misc_feature (61)..(61): /note="Nucleotide may be methylated to form 5-methylcytosine"
cagctatagtttcctacctctatgaccagagagtgaagcgtttcactgaagaactgtggccggcgtctccaggaaaggaaggagcctcgctttctccagggcaggggcagcgtggggcgggg

SEQ ID NO: 12800 - DNA, 122 bp, Homo sapiens
  misc_feature (61)..(62): /note="This region represents a CpG dinucleotide"
  misc_feature (61)..(61): /note="Nucleotide may be methylated to form 5-methylcytosine"
aactgttagtggcttaaagacaaaatatgccatctcttatcatgaatgttagggaatgaacgaaagatgccaaggctaccgaagtcatgtcattaaagaatcaatgtttgaaaatcctgttt

SEQ ID NO: 12801 - DNA, 122 bp, Homo sapiens
  misc_feature (61)..(62): /note="This region represents a CpG dinucleotide"
  misc_feature (61)..(61): /note="Nucleotide may be methylated to form 5-methylcytosine"
tgctccaggggaacttgggccagtgggtctattgtgccaaaaatgctgaccttcaggccccgcaggtgctctcctggggctgaagttgggagcagccaggcttctgggcaccacccaggctg

SEQ ID NO: 12802 - DNA, 122 bp, Homo sapiens
  misc_feature (61)..(62): /note="This region represents a CpG dinucleotide"
  misc_feature (61)..(61): /note="Nucleotide may be methylated to form 5-methylcytosine"
ttaagaaggaagacttatttacttacctaatctctgtaagcagtaaactattacgactctcgtaactctttgctgcttcctccgtttgtcagcttgatgttttctcttccacattttctacc

SEQ ID NO: 12803 - DNA, 122 bp, Homo sapiens
  misc_feature (61)..(62): /note="This region represents a CpG dinucleotide"
  misc_feature (61)..(61): /note="Nucleotide may be methylated to form 5-methylcytosine"
gttcgtttcttccctgcacagtggtagggtgaggcattctccccttccctctgctgcatacgcttccagcctgtgttgctttgagcattcagattgagttgctcttgcatttgtgattcttg

SEQ ID NO: 12804 - DNA, 122 bp, Homo sapiens
  misc_feature (61)..(62): /note="This region represents a CpG dinucleotide"
  misc_feature (61)..(61): /note="Nucleotide may be methylated to form 5-methylcytosine"
actctcaaatattctgcattctttttgaatgactttagtgtgcttttcctcctgtagctacgttgagaccagagtaccagctttccttgcagagagagaaagggagtgagaagggggagaga

SEQ ID NO: 12805 - DNA, 122 bp, Homo sapiens
  misc_feature (61)..(62): /note="This region represents a CpG dinucleotide"
  misc_feature (61)..(61): /note="Nucleotide may be methylated to form 5-methylcytosine"
ccagagaattaatttgctaatttacagtgattcagattcagctgccatttgttttgagcacgttacatgtcaaacactgagcttgaggctttctcaccaatgatctcatttaagcctctcag

SEQ ID NO: 12806 - DNA, 122 bp, Homo sapiens
  misc_feature (61)..(62): /note="This region represents a CpG dinucleotide"
  misc_feature (61)..(61): /note="Nucleotide may be methylated to form 5-methylcytosine"
tgtgctggggctggttttcctccaggacgaccttgctggccacgtgggccaagccgggggcgctcttagaatgtggatctgagcagggagaggtgtgaggtgtcctgagggctgtgggggtg

SEQ ID NO: 12807 - DNA, 122 bp, Homo sapiens
  misc_feature (61)..(62): /note="This region represents a CpG dinucleotide"
  misc_feature (61)..(61): /note="Nucleotide may be methylated to form 5-methylcytosine"
gcgtgaatcactgaacccaggcccatccttgggaccccagccctggccagccggcatcaccgcctggactcagcagcttctgccaagccaccacctgctcccaattagcccctgggccctaa

SEQ ID NO: 12808 - DNA, 122 bp, Homo sapiens
  misc_feature (61)..(62): /note="This region represents a CpG dinucleotide"
  misc_feature (61)..(61): /note="Nucleotide may be methylated to form 5-methylcytosine"
tgattcacaggaacattaagaaaaccttgccaggctaagcaattccaggcagccttcagccgccaccaccggtgatgaatcacagaggctgctgccagagatgggacattttgggactctgc

SEQ ID NO: 12809 - DNA, 122 bp, Homo sapiens
  misc_feature (61)..(62): /note="This region represents a CpG dinucleotide"
  misc_feature (61)..(61): /note="Nucleotide may be methylated to form 5-methylcytosine"
ttcccattatatttcataatcctcttctgatttcattaacctctccataacaaagacgggcgaactcaatctttcattttgcctttttgacttctgggatatcttctcttttctcctggctc

SEQ ID NO: 12810 - DNA, 122 bp, Homo sapiens
  misc_feature (61)..(62): /note="This region represents a CpG dinucleotide"
  misc_feature (61)..(61): /note="Nucleotide may be methylated to form 5-methylcytosine"
gccaccacgcccagcctgcccttatttaacttatgaaacctttcagcatttcttagtctccgtactgagactaagcaggtactgtactgcctcccaggggttcagcgaggaggaaactgtgg

SEQ ID NO: 12811 - DNA, 122 bp, Homo sapiens
  misc_feature (61)..(62): /note="This region represents a CpG dinucleotide"
  misc_feature (61)..(61): /note="Nucleotide may be methylated to form 5-methylcytosine"
ggagggacgtggttaaggcgagttctgccattaacgtgtaattagacaacacttttaccccgcccctcctgtgaatgccaccattctctccaaaatttaacctcctctaccaagttaaaacg

SEQ ID NO: 12812 - DNA, 122 bp, Homo sapiens
  misc_feature (61)..(62): /note="This region represents a CpG dinucleotide"
  misc_feature (61)..(61): /note="Nucleotide may be methylated to form 5-methylcytosine"
agtatttatttaccatgggttaatcattcatttgctttatctgtttgttccatgacatgtcgtttcttcctaactggtctgtagcttctttcctttctatctcttttagattgctgcagatt

SEQ ID NO: 12813 - DNA, 122 bp, Homo sapiens
  misc_feature (61)..(62): /note="This region represents a CpG dinucleotide"
  misc_feature (61)..(61): /note="Nucleotide may be methylated to form 5-methylcytosine"
ctttgtaggggaggtatatgtcatacttacgcatcaagtaggacagcagaagcccagggacgtagcggcccaagacagccaaaaaggtcagtatcccacagctcagcaagcagaactgggga

SEQ ID NO: 12814 - DNA, 122 bp, Homo sapiens
  misc_feature (61)..(62): /note="This region represents a CpG dinucleotide"
  misc_feature (61)..(61): /note="Nucleotide may be methylated to form 5-methylcytosine"
cctttacttaggaatgtaaaagtcaaaaatttaaaacatgactagcattccacaatacagcgtaagaaggaacaaaccaccatgaccaaatagggcttacctgggaaatgcaaaaatgcctt

SEQ ID NO: 12815 - DNA, 122 bp, Homo sapiens
  misc_feature (61)..(62): /note="This region represents a CpG dinucleotide"
  misc_feature (61)..(61): /note="Nucleotide may be methylated to form 5-methylcytosine"
aaaaacataaagaagttattctttgtatattttttaaaaaacaactcacactccaaatagcgaagtgatcaaagagtgtaaaactgtggctgacaattcctgcatggtagaaggatatcttc

SEQ ID NO: 12816 - DNA, 122 bp, Homo sapiens
  misc_feature (61)..(62): /note="This region represents a CpG dinucleotide"
  misc_feature (61)..(61): /note="Nucleotide may be methylated to form 5-methylcytosine"
tactctgatatgtaatgtaatttcccacatttccctctcaatggttagctgggagcctggcgtctctatgcatttaggcatttcacacaggctggtccacctggcttattcatgaaatcgcc

SEQ ID NO: 12817 - DNA, 122 bp, Homo sapiens
  misc_feature (61)..(62): /note="This region represents a CpG dinucleotide"
  misc_feature (61)..(61): /note="Nucleotide may be methylated to form 5-methylcytosine"
gaattcagtctttccagttccaaaacgccaaaagatcagtgaaggtaatatcttggcctgcgggttatagtttgcgtatagccataaaaccctaaagggcctatattatgccactttagaga

SEQ ID NO: 12818 - DNA, 122 bp, Homo sapiens
  misc_feature (61)..(62): /note="This region represents a CpG dinucleotide"
  misc_feature (61)..(61): /note="Nucleotide may be methylated to form 5-methylcytosine"
aggctgagccttgctgagggcactgaagctccggggagtttatagctggaggctcgggcccgccccgaggggagagggagggggagagaattcctttgctcaaacacaagcctgggagttca

SEQ ID NO: 12819 - DNA, 122 bp, Homo sapiens
  misc_feature (61)..(62): /note="This region represents a CpG dinucleotide"
  misc_feature (61)..(61): /note="Nucleotide may be methylated to form 5-methylcytosine"
gaggtgtagacgtgtagtagagtcgtcgtaggcagctcctgtagccacctgtgcggggtacgttggaagctctaagatgactaagaattggcaaactgggacatgaaatcacagtgatctgg

SEQ ID NO: 12820 - DNA, 122 bp, Homo sapiens
  misc_feature (61)..(62): /note="This region represents a CpG dinucleotide"
  misc_feature (61)..(61): /note="Nucleotide may be methylated to form 5-methylcytosine"
catgacactccggaaaatttcatctcatccttgaaaatgaagacttttcacacccaacagcggtcaagccgggcctcagccttctgaccctcctcccctgcttcctggcaggtacaggtttg

SEQ ID NO: 12821 - DNA, 122 bp, Homo sapiens
  misc_feature (61)..(62): /note="This region represents a CpG dinucleotide"
  misc_feature (61)..(61): /note="Nucleotide may be methylated to form 5-methylcytosine"
tagggctggggaagccccagtcaagacagtcagccacagcctgataactctccctgcatgcgcaagcccaccgcttgcaacctggaggaagctcctgtcagcaatgggctctaatgacatgt

SEQ ID NO: 12822 - DNA, 122 bp, Homo sapiens
  misc_feature (61)..(62): /note="This region represents a CpG dinucleotide"
  misc_feature (61)..(61): /note="Nucleotide may be methylated to form 5-methylcytosine"
gctgtgtggcccggttcctaacaggccatggaccagtcagtggcccagggtctaaattgacgttaggacttgcagtttgaaaaataccacctccaggagacaagaaatctagtgtgatttcc

SEQ ID NO: 12823 - DNA, 122 bp, Homo sapiens
  misc_feature (61)..(62): /note="This region represents a CpG dinucleotide"
  misc_feature (61)..(61): /note="Nucleotide may be methylated to form 5-methylcytosine"
gcaggcgacccggcgtggactggtgtggatttcacctgggagagcagcggcagcctgtgtcgcttgcgcccaggctctggaggaggggcccctgcggctcccgggccaggacagaggcgccc

SEQ ID NO: 12824 - DNA, 122 bp, Homo sapiens
  misc_feature (61)..(62): /note="This region represents a CpG dinucleotide"
  misc_feature (61)..(61): /note="Nucleotide may be methylated to form 5-methylcytosine"
gccatgggatccaattcattaaagggaggagaagaattttccagataatgggaaggaaaacgccaagaggacagccatgcagcaggcacagaaagtgaccagcagagactgcagcaggacga

SEQ ID NO: 12825 - DNA, 122 bp, Homo sapiens
  misc_feature (61)..(62): /note="This region represents a CpG dinucleotide"
  misc_feature (61)..(61): /note="Nucleotide may be methylated to form 5-methylcytosine"
accacttgacagcagaatggtgtgtagagcctatactgctcctaggtcagcccatctgggcgtgaggatcactgtgaagcccgcagttggcttcagcctcttatttcctaccaataaactct

SEQ ID NO: 12826 - DNA, 122 bp, Homo sapiens
  misc_feature (61)..(62): /note="This region represents a CpG dinucleotide"
  misc_feature (61)..(61): /note="Nucleotide may be methylated to form 5-methylcytosine"
cagtgtcttttatttgctacttcatgttgtactgcctcaggcacggggacacttgagggacgccatcctgtgacttatgcttgtgcccaccagctgccggggtccccctcccactagcgcca

SEQ ID NO: 12827 - DNA, 122 bp, Homo sapiens
  misc_feature (61)..(62): /note="This region represents a CpG dinucleotide"
  misc_feature (61)..(61): /note="Nucleotide may be methylated to form 5-methylcytosine"
ctgaatcagaatataaatactgacaagatgccccgggattcatatgcacagtagagctggcgaagttccattgtagcctgtgattgttttctgcaacttagtatttctgagttttcccaagg

SEQ ID NO: 12828 - DNA, 122 bp, Homo sapiens
  misc_feature (61)..(62): /note="This region represents a CpG dinucleotide"
  misc_feature (61)..(61): /note="Nucleotide may be methylated to form 5-methylcytosine"
tcctcagaactaagcagactccgccctccggtccgcgaagtggcgactgcggtattaagtcgacctcgcgatttctcaaatagtgcaggaagaagacattaaatagcgaatgctagagactg

SEQ ID NO: 12829 - DNA, 122 bp, Homo sapiens
  misc_feature (61)..(62): /note="This region represents a CpG dinucleotide"
  misc_feature (61)..(61): /note="Nucleotide may be methylated to form 5-methylcytosine"
aggccgcggtagcaggagatgccgcggtagggggcggcggtgatgcagcagcggcttggccggggcccgcaggcagagacacagctgaagtttccagggcggaacccacagcctatggagtt

SEQ ID NO: 12830 - DNA, 122 bp, Homo sapiens
  misc_feature (61)..(62): /note="This region represents a CpG dinucleotide"
  misc_feature (61)..(61): /note="Nucleotide may be methylated to form 5-methylcytosine"
gccaataactggaatacctaaggaaagtgaaagagacattagagaagcagttattgatggcgacatttgaagtaacaagacctcctacattactgtgattgacttgtgcatattagtttttt

SEQ ID NO: 12831 - DNA, 122 bp, Homo sapiens
  misc_feature (61)..(62): /note="This region represents a CpG dinucleotide"
  misc_feature (61)..(61): /note="Nucleotide may be methylated to form 5-methylcytosine"
gtgaaatcgctagtcaaacagtgagtagcagcagtagctccacttcctttgccaggggttcgtaacccctcagttccctatccgacccctgtggtcctcagtgtctgctccttgggtttctt

SEQ ID NO: 12832 - DNA, 122 bp, Homo sapiens
  misc_feature (61)..(62): /note="This region represents a CpG dinucleotide"
  misc_feature (61)..(61): /note="Nucleotide may be methylated to form 5-methylcytosine"
aaaattatatggatattcatagttaagtagcacacccaaaaaagcaactttgaggccaggcgcagtggctcatgcctataattccagcactttgggaggccaaggcgagtggatcacctgag

SEQ ID NO: 12833 - DNA, 122 bp, Homo sapiens
  misc_feature (61)..(62): /note="This region represents a CpG dinucleotide"
  misc_feature (61)..(61): /note="Nucleotide may be methylated to form 5-methylcytosine"
ctaggttggtcttcaactcctgagctcaagcaatcttcccacctcagcctcccaaagtgccgggattacaggattgagccagggcacccagcctctaaaattcttttatcagctaattgaga

SEQ ID NO: 12834 - DNA, 122 bp, Homo sapiens
  misc_feature (61)..(62): /note="This region represents a CpG dinucleotide"
  misc_feature (61)..(61): /note="Nucleotide may be methylated to form 5-methylcytosine"
ttaacctataccaagaatgcaaacttttccatgaagcatttcctgttgtaattggaaagacggctcctttaaacacaggcggatttcaaggtactcggcctaatgttgttttgacgcataac

SEQ ID NO: 12835 - DNA, 122 bp, Homo sapiens
  misc_feature (61)..(62): /note="This region represents a CpG dinucleotide"
  misc_feature (61)..(61): /note="Nucleotide may be methylated to form 5-methylcytosine"
actttgtgatccgcccacctcggcctcccaaagtgctgggattacaggtgtgagccaccgcgcccggccaggaggtactattattgtcagtgtcactatgtcaagcggggaggaggcaggga

SEQ ID NO: 12836 - DNA, 122 bp, Homo sapiens
  misc_feature (61)..(62): /note="This region represents a CpG dinucleotide"
  misc_feature (61)..(61): /note="Nucleotide may be methylated to form 5-methylcytosine"
ttaggcaagacccctgtgcacaatgaccttggtaggtcagaggttctctaaggacattcccgtatctgcttaggagagttctctgcctcctgcctctatcagtttcattccacaacatccct

SEQ ID NO: 12837 - DNA, 122 bp, Homo sapiens
  misc_feature (61)..(62): /note="This region represents a CpG dinucleotide"
  misc_feature (61)..(61): /note="Nucleotide may be methylated to form 5-methylcytosine"
agcagatctggagctgggcctaagattctgcgtttctaacaagctcccacctaatacctacgcaactgattcttgcatcacacttttttgagtggcaagactggacttagttctaatgatgt

SEQ ID NO: 12838 - DNA, 122 bp, Homo sapiens
  misc_feature (61)..(62): /note="This region represents a CpG dinucleotide"
  misc_feature (61)..(61): /note="Nucleotide may be methylated to form 5-methylcytosine"
aggttgccacatgacattttaatatcacctgcaaacctaaatccagtgagtgcctacagacgacacacttaacagctcagggcatgattcagaggaagcaattttccaaagtgaagataatt

SEQ ID NO: 12839 - DNA, 122 bp, Homo sapiens
  misc_feature (61)..(62): /note="This region represents a CpG dinucleotide"
  misc_feature (61)..(61): /note="Nucleotide may be methylated to form 5-methylcytosine"
caacactggctattccatgtaggttattacacatttactgtgcaattactatgtgcaaaacgtgtcatgcaggctgtgtaatacaaagataagtaagacatagccctgatactttggtagga

SEQ ID NO: 12840 - DNA, 122 bp, Homo sapiens
  misc_feature (61)..(62): /note="This region represents a CpG dinucleotide"
  misc_feature (61)..(61): /note="Nucleotide may be methylated to form 5-methylcytosine"
atccagcactggcaataagccatggtgagatgttatgtataaacatattaagcttccctgcgccatggcataggttctatcttgccagagaccatcgctagcaatttagatcttaatctgaa

SEQ ID NO: 12841 - DNA, 122 bp, Homo sapiens
  misc_feature (61)..(62): /note="This region represents a CpG dinucleotide"
  misc_feature (61)..(61): /note="Nucleotide may be methylated to form 5-methylcytosine"
tgtataaggaagatcccctgcaggtgaagcagttggggctcttattgtggtgacctgctacgaggcactgccatgactgcagaggggcccaggaggtagcaagtctccatagatgtggtgaa

SEQ ID NO: 12842 - DNA, 122 bp, Homo sapiens
  misc_feature (61)..(62): /note="This region represents a CpG dinucleotide"
  misc_feature (61)..(61): /note="Nucleotide may be methylated to form 5-methylcytosine"
tacagtgggagtagttatctgaggcaagtgcattaaaaattagagagttgtaactggtaacggcattttgataaagggatattgaagagtttacttatgttaatggtattctgcaaatgttt

SEQ ID NO: 12843 - DNA, 122 bp, Homo sapiens
  misc_feature (61)..(62): /note="This region represents a CpG dinucleotide"
  misc_feature (61)..(61): /note="Nucleotide may be methylated to form 5-methylcytosine"
ggctgactcatgtgggagacctagcttcaaggccgcatggagatccagcatcctgtcaggcgggaggccaatttcaagaccctgggcatctctagtctaaacggttgccagctaagagtggg

SEQ ID NO: 12844 - DNA, 122 bp, Homo sapiens
  misc_feature (61)..(62): /note="This region represents a CpG dinucleotide"
  misc_feature (61)..(61): /note="Nucleotide may be methylated to form 5-methylcytosine"
gcttagcttcagcaaatattgccaaatcatttcccaagtggttgaagcaattaacactcccgccagcagtgcaagagttctggtagctagctccaagctcttgccaaaattcagaattatca

SEQ ID NO: 12845 - DNA, 122 bp, Homo sapiens
  misc_feature (61)..(62): /note="This region represents a CpG dinucleotide"
  misc_feature (61)..(61): /note="Nucleotide may be methylated to form 5-methylcytosine"
ctgccccttattttcattacaaacaaaggtccacagagggcacatttaaaacgaagaagtcgtcactactgtccacccactgcctggcctacgtctttgtaacaaaggccctcttgggtttt

SEQ ID NO: 12846 - DNA, 122 bp, Homo sapiens
  misc_feature (61)..(62): /note="This region represents a CpG dinucleotide"
  misc_feature (61)..(61): /note="Nucleotide may be methylated to form 5-methylcytosine"
aaaacagaagccaggtctctttataacctggtgtccaaagtgacagcccatggcttttgccgtagcccattcattagcattgagtcactcagtccatcccacactcaagggagggggttaca

SEQ ID NO: 12847 - DNA, 122 bp, Homo sapiens
  misc_feature (61)..(62): /note="This region represents a CpG dinucleotide"
  misc_feature (61)..(61): /note="Nucleotide may be methylated to form 5-methylcytosine"
gacatgagggggcatggcagaggttgtgtgtaggactgccagagctgggcagaaaaaccccgctgccaaaggcctcctagcgggcagctgtactctgtggtaccaatgggcatccagccctg

SEQ ID NO: 12848 - DNA, 122 bp, Homo sapiens
  misc_feature (61)..(62): /note="This region represents a CpG dinucleotide"
  misc_feature (61)..(61): /note="Nucleotide may be methylated to form 5-methylcytosine"
ttaacatcaatcttcctgattggctgtgtgaggatgggcggggtctgtttttgttgtttacgcctgtatccccagcacaaaacatggggctggcatatggtaggtactaaacagatagttga

SEQ ID NO: 12849 - DNA, 122 bp, Homo sapiens
  misc_feature (61)..(62): /note="This region represents a CpG dinucleotide"
  misc_feature (61)..(61): /note="Nucleotide may be methylated to form 5-methylcytosine"
ccctggcagctgtggactctactcagcactctatcagttgtctgcgttcaggtagagagacgcaaaggaagagtgttgtggaaagctccggaagagtctggttttgactggcgtctctgtcc

SEQ ID NO: 12850 - DNA, 122 bp, Homo sapiens
  misc_feature (61)..(62): /note="This region represents a CpG dinucleotide"
  misc_feature (61)..(61): /note="Nucleotide may be methylated to form 5-methylcytosine"
tgtaattccaacagcctttcctttattatctatctaatagattatcctgcttcatatctccgtggcaccagatggcattatctccttagactggctgttgccttgttaatacagagttacat

SEQ ID NO: 12851 - DNA, 122 bp, Homo sapiens
  misc_feature (61)..(62): /note="This region represents a CpG dinucleotide"
  misc_feature (61)..(61): /note="Nucleotide may be methylated to form 5-methylcytosine"
tgtcaataataagggctacaggatctgggagcagggagtcatttcggacggcagaagatgcgtcaggaggaaatattcagactgaaaggactgcaataagtaaaaagtgggacgatgaaagg

SEQ ID NO: 12852 - DNA, 122 bp, Homo sapiens
  misc_feature (61)..(62): /note="This region represents a CpG dinucleotide"
  misc_feature (61)..(61): /note="Nucleotide may be methylated to form 5-methylcytosine"
aattccttcttgaactgctggttctctctgttgatgccacaggagtattcaaaaataaaccgctttgctgccaacttcaaggcctgggccttcatattaagctctcttctttttctctttcc

SEQ ID NO: 12853 - DNA, 122 bp, Homo sapiens
  misc_feature (61)..(62): /note="This region represents a CpG dinucleotide"
  misc_feature (61)..(61): /note="Nucleotide may be methylated to form 5-methylcytosine"
aacaaatattgactctctgtaagacttttatgccattaaggccacagttgaaattatcctcgccatcttctctatttccttcttcctagcccccgggctgtcacccctggcatcctttctat

SEQ ID NO: 12854 - DNA, 122 bp, Homo sapiens
  misc_feature (61)..(62): /note="This region represents a CpG dinucleotide"
  misc_feature (61)..(61): /note="Nucleotide may be methylated to form 5-methylcytosine"
ccttcttcacccagtaggcttcattctcttttctgagtcctacctctgtgtcttcacatgcgacagccactattaccctggcactttccttgtgtgtgtgtcacagccctagcgagtttcct

SEQ ID NO: 12855 - DNA, 122 bp, Homo sapiens
  misc_feature (61)..(62): /note="This region represents a CpG dinucleotide"
  misc_feature (61)..(61): /note="Nucleotide may be methylated to form 5-methylcytosine"
tactccgctccaggaatcgtcaactaatataaaagcccaggcagccaggaagtcacctggcggctgatgtgtcacagtttcaggtatttatttccagcttactcttgctgtgtaaaaacaca

SEQ ID NO: 12856 - DNA, 122 bp, Homo sapiens
  misc_feature (61)..(62): /note="This region represents a CpG dinucleotide"
  misc_feature (61)..(61): /note="Nucleotide may be methylated to form 5-methylcytosine"
tcccctatccctgcttctccagctcaggctcttcttgtcttggtgtgtcactgtgagcatcgtgtttctgagctcagctctgagtgtctgccctaatcctcgcccctcataaaagcataccg

SEQ ID NO: 12857 - DNA, 122 bp, Homo sapiens
  misc_feature (61)..(62): /note="This region represents a CpG dinucleotide"
  misc_feature (61)..(61): /note="Nucleotide may be methylated to form 5-methylcytosine"
cccatcccttcctcaccatcctctgttgggggtaggagggttggccaaggtttggccaggcgtggtgacaaagtcaggtcccaatctgatgtttgtcaacctgttgtgcttttgcttttaac

SEQ ID NO: 12858 - DNA, 122 bp, Homo sapiens
  misc_feature (61)..(62): /note="This region represents a CpG dinucleotide"
  misc_feature (61)..(61): /note="Nucleotide may be methylated to form 5-methylcytosine"
ccattcagctcttttgtcactacttgccagactaatcactcagaattgtaaccctttaaacgcgtcccctcccttctttatgttccaccatttttaaaacagaggaaccaaagcatcagcct

SEQ ID NO: 12859 - DNA, 122 bp, Homo sapiens
  misc_feature (61)..(62): /note="This region represents a CpG dinucleotide"
  misc_feature (61)..(61): /note="Nucleotide may be methylated to form 5-methylcytosine"
tcactttcctcctctacacatgcaactcttggatgacaacttaagccaatcactatatctcgtattcctttaactcctctcactcccagattggttcaggaacaggaacgtaatcatatgac

SEQ ID NO: 12860 - DNA, 122 bp, Homo sapiens
  misc_feature (61)..(62): /note="This region represents a CpG dinucleotide"
  misc_feature (61)..(61): /note="Nucleotide may be methylated to form 5-methylcytosine"
cagggagaatgccacaggcaggaaccttaagaaacataaagaatgtaaacctataggcagcgatgtatcagaggcaccatagctgccctgagtcagaccaccagctaaagaccctgcctctg

SEQ ID NO: 12861 - DNA, 122 bp, Homo sapiens
  misc_feature (61)..(62): /note="This region represents a CpG dinucleotide"
  misc_feature (61)..(61): /note="Nucleotide may be methylated to form 5-methylcytosine"
gtgggttgactggtgcttaaggggcatgagaaagaaaatatattctgtcatttttggatgcggtttggatgtgagaaataaatatgagacaagtccagagaattagttgacttaattcccct

SEQ ID NO: 12862 - DNA, 122 bp, Homo sapiens
  misc_feature (61)..(62): /note="This region represents a CpG dinucleotide"
  misc_feature (61)..(61): /note="Nucleotide may be methylated to form 5-methylcytosine"
ctgatgtactcagagaaaagtctctaacaactctagtctagactagaggttctcaaagtgcggtccccagatgaacagtgcaaacttcacctgggaacttgttggaaatgtaaattcttgga

SEQ ID NO: 12863 - DNA, 122 bp, Homo sapiens
  misc_feature (61)..(62): /note="This region represents a CpG dinucleotide"
  misc_feature (61)..(61): /note="Nucleotide may be methylated to form 5-methylcytosine"
aaatttaggtagaatatcatttaggatcctcttgatagacctaaaccaaataggtgtaaacgcaaagagcatttattggtttacaaaactgggaagctcaggaacagggctgccttcataca

SEQ ID NO: 12864 - DNA, 122 bp, Homo sapiens
  misc_feature (61)..(62): /note="This region represents a CpG dinucleotide"
  misc_feature (61)..(61): /note="Nucleotide may be methylated to form 5-methylcytosine"
gtcactgtgcctggccttgtctgtcatttcaattactcaaaatccataatctgggccgggcgcagtggctcacactggtaatcccagcactttgggaggccaaggtaagcagatcacttgag

SEQ ID NO: 12865 - DNA, 122 bp, Homo sapiens
  misc_feature (61)..(62): /note="This region represents a CpG dinucleotide"
  misc_feature (61)..(61): /note="Nucleotide may be methylated to form 5-methylcytosine"
actggcagctgggagagtggggcagggctctcacagcactgcagccaaaggcgggcaccacgcccacacggggcagcacacgggaaccaagagttgccacacattcctaaggcccagagcag

SEQ ID NO: 12866 - DNA, 122 bp, Homo sapiens
  misc_feature (61)..(62): /note="This region represents a CpG dinucleotide"
  misc_feature (61)..(61): /note="Nucleotide may be methylated to form 5-methylcytosine"
tgtcatctaatagttaagaattggtagacacaggaaagcaagaattgaggcaagttttgacgatgtgctgataagtgagcccttggttcatgtaaacaaatagttctcctgataagtaatct

SEQ ID NO: 12867 - DNA, 122 bp, Homo sapiens
  misc_feature (61)..(62): /note="This region represents a CpG dinucleotide"
  misc_feature (61)..(61): /note="Nucleotide may be methylated to form 5-methylcytosine"
tccaggctccttcccgctcctggagctgccgctgggtctcagctctctgctctgaggctacgccgcagctacagctccctgacctgttcctgttcaggctcccaggaaacctcagagtggca

SEQ ID NO: 12868 - DNA, 122 bp, Homo sapiens
  misc_feature (61)..(62): /note="This region represents a CpG dinucleotide"
  misc_feature (61)..(61): /note="Nucleotide may be methylated to form 5-methylcytosine"
caatgactctttaaacttctgctcagatgcatccaatgtcacatctgcttacatcctatacgctgcagcaagtcacatgaccaatgtcaacatcagtggaatgggcaagtgtatttgtatag

SEQ ID NO: 12869 - DNA, 122 bp, Homo sapiens
  misc_feature (61)..(62): /note="This region represents a CpG dinucleotide"
  misc_feature (61)..(61): /note="Nucleotide may be methylated to form 5-methylcytosine"
tgcgacgatggctgggacctggcggacgcggaggtcgtgtgccgccagctgggctgtggtcgggccgtcgccgccctgggggccgccgcctttggccctggctccgggcccgtgtggctgga

SEQ ID NO: 12870 - DNA, 122 bp, Homo sapiens
  misc_feature (61)..(62): /note="This region represents a CpG dinucleotide"
  misc_feature (61)..(61): /note="Nucleotide may be methylated to form 5-methylcytosine"
tcatgcagctccagaatgaagccataatccaattttagaaaacgtatcatctgggccgggcgcagtggctcacacctgtaatcccagcactttgggaggcccaggtggcagatcacttgagg

SEQ ID NO: 12871 - DNA, 122 bp, Homo sapiens
  misc_feature (61)..(62): /note="This region represents a CpG dinucleotide"
  misc_feature (61)..(61): /note="Nucleotide may be methylated to form 5-methylcytosine"
tttttgtttttttgctcagacaataaaaagccttattccctttcaattcagggtttcactcgttgttcttgaaaattcccttcagtttagctctcaagatggccttgcttgctgagcatgag

SEQ ID NO: 12872 - DNA, 122 bp, Homo sapiens
  misc_feature (61)..(62): /note="This region represents a CpG dinucleotide"
  misc_feature (61)..(61): /note="Nucleotide may be methylated to form 5-methylcytosine"
tttttctgatggttgtttttagatcagtcttaagcattctgctgtttcttctcttcaccccgacccctgcctcaccccccaacacccacctccaaccaacccacccaacagcatttggtctt

SEQ ID NO: 12873 - DNA, 122 bp, Homo sapiens
  misc_feature (61)..(62): /note="This region represents a CpG dinucleotide"
  misc_feature (61)..(61): /note="Nucleotide may be methylated to form 5-methylcytosine"
tgttgcctccagacctgagcctttcacttagaaactacatgagtctcaaagatgggtcaacgaaatagtttttgtccctacaacacagagcaaacatgatatatacaaaggcaaatgattag

SEQ ID NO: 12874 - DNA, 122 bp, Homo sapiens
  misc_feature (61)..(62): /note="This region represents a CpG dinucleotide"
  misc_feature (61)..(61): /note="Nucleotide may be methylated to form 5-methylcytosine"
aagttacagggaggcagatgtttgtctaagacaaagaatcttctcggggtcagagctgtccgtgtggaccggaagcctggggagggagtgaacagcacaacctgagagaagtttgagaggag

SEQ ID NO: 12875 - DNA, 122 bp, Homo sapiens
  misc_feature (61)..(62): /note="This region represents a CpG dinucleotide"
  misc_feature (61)..(61): /note="Nucleotide may be methylated to form 5-methylcytosine"
ccctctcagggtgctcctgaggctatgagcagctggcagttccctgtctgagaggtccttcgtaccgcaggagaggcagctctcacctgaaggcctccctggacaccggtctcaactttgtg

SEQ ID NO: 12876 - DNA, 122 bp, Homo sapiens
  misc_feature (61)..(62): /note="This region represents a CpG dinucleotide"
  misc_feature (61)..(61): /note="Nucleotide may be methylated to form 5-methylcytosine"
gcgccacctttatgaacattatgcttcggcgttctttttagatcttgttaccttttcttacgttcacaaatgttgcctagcaatatgtctagtcaggaaagatgaagggattcttatcttgg

SEQ ID NO: 12877 - DNA, 122 bp, Homo sapiens
  misc_feature (61)..(62): /note="This region represents a CpG dinucleotide"
  misc_feature (61)..(61): /note="Nucleotide may be methylated to form 5-methylcytosine"
ctgcttctgaaaatttctttcaccacttaacccattgcctagtgtattagtctattctcacgctgctaaatacaaagaaatatctgagactgggtaatttagaaagaagagaggattaattg

SEQ ID NO: 12878 - DNA, 122 bp, Homo sapiens
  misc_feature (61)..(62): /note="This region represents a CpG dinucleotide"
  misc_feature (61)..(61): /note="Nucleotide may be methylated to form 5-methylcytosine"
cttttagctgcctccagccttggtcacagtcaccctgcctcttttctaagaatgagcatccggggagcgcctcctgtgggtgctctttaaagcttcagttctgtgatcacagacagggagtt

SEQ ID NO: 12879 - DNA, 122 bp, Homo sapiens
  misc_feature (61)..(62): /note="This region represents a CpG dinucleotide"
  misc_feature (61)..(61): /note="Nucleotide may be methylated to form 5-methylcytosine"
tgggtaacctttctgacgttaatttgtttctccatctgtgtgccatgcattttgggaggacgtgagaaacaggcttgatgccattcaagtgtgtttcccctttttgtattgatggaaacttg

SEQ ID NO: 12880 - DNA, 122 bp, Homo sapiens
  misc_feature (61)..(62): /note="This region represents a CpG dinucleotide"
  misc_feature (61)..(61): /note="Nucleotide may be methylated to form 5-methylcytosine"
ttatttcttatatcttactacaagtagtaagtaagtaatatgccttgtattactaccttacgtacaatctctgcctgacttgagagaaactattcattgacaactcaaatttgcttgaacat

SEQ ID NO: 12881 - DNA, 122 bp, Homo sapiens
  misc_feature (61)..(62): /note="This region represents a CpG dinucleotide"
  misc_feature (61)..(61): /note="Nucleotide may be methylated to form 5-methylcytosine"
taataatttatgccttggaggtgagagtatcaaaagcaaccattatgtttccaggagtctcggctccggtaagcatctcttcctgtcgacttcatttgtgagcaaataatacccagtattaa

SEQ ID NO: 12882 - DNA, 122 bp, Homo sapiens
  misc_feature (61)..(62): /note="This region represents a CpG dinucleotide"
  misc_feature (61)..(61): /note="Nucleotide may be methylated to form 5-methylcytosine"
gcaacagaacttacttgaaagctggtttctgacaatgtagagcagagttctctggagcagcgtacttaagggcagtccaagcaagatctctggagagaaggataaaatgtcaggccaagggt

SEQ ID NO: 12883 - DNA, 122 bp, Homo sapiens
  misc_feature (61)..(62): /note="This region represents a CpG dinucleotide"
  misc_feature (61)..(61): /note="Nucleotide may be methylated to form 5-methylcytosine"
aaccagagacagaccacttcacccacaaatctttattgtgcccccaagcccacacctatacgagggccaggggaaggtaaggggtttggtgctttaaactatccttggaagagggctcacga

SEQ ID NO: 12884 - DNA, 122 bp, Homo sapiens
  misc_feature (61)..(62): /note="This region represents a CpG dinucleotide"
  misc_feature (61)..(61): /note="Nucleotide may be methylated to form 5-methylcytosine"
acgaagtcttcatttcctatggggcgataacactgctgctttgtggatgactacctgtcacgcccaaatcctgcaaacttttctacatagggaaatgaaattgggcttatttcccctgtagc

SEQ ID NO: 12885 - DNA, 122 bp, Homo sapiens
  misc_feature (61)..(62): /note="This region represents a CpG dinucleotide"
  misc_feature (61)..(61): /note="Nucleotide may be methylated to form 5-methylcytosine"
ctgctgagctttactgtgggaagagggggaggtgaaggaaattattacaaaatttttgtacgtgatgaggagacagcctctggacttccccaaatatttccgtattccctaaaacagctcta

SEQ ID NO: 12886 - DNA, 122 bp, Homo sapiens
  misc_feature (61)..(62): /note="This region represents a CpG dinucleotide"
  misc_feature (61)..(61): /note="Nucleotide may be methylated to form 5-methylcytosine"
gaaactgaatcaacccccaagagcgttattagtatcagactaaattatctcctttaactgcgtcacatcatgacctttactttttaaacagatatcttgtttttcttatcttctcttcttga

SEQ ID NO: 12887 - DNA, 122 bp, Homo sapiens
  misc_feature (61)..(62): /note="This region represents a CpG dinucleotide"
  misc_feature (61)..(61): /note="Nucleotide may be methylated to form 5-methylcytosine"
gtctacactctagcttcatgtggccttctttcttgtgcttgcctatagtttctgttctctcgtaagttcagcttacacctgagccgtcatggacaccactgtctctcttttacttacttttg

SEQ ID NO: 12888 - DNA, 122 bp, Homo sapiens
  misc_feature (61)..(62): /note="This region represents a CpG dinucleotide"
  misc_feature (61)..(61): /note="Nucleotide may be methylated to form 5-methylcytosine"
tataatctcgtggtgcgctgttttttaagccggtctgaaaagcacaatattcgccaggtgcgtccgtcacccctttctttgactcggaaagggaactccctgaccccttgtgcttcccaggt

SEQ ID NO: 12889 - DNA, 122 bp, Homo sapiens
  misc_feature (61)..(62): /note="This region represents a CpG dinucleotide"
  misc_feature (61)..(61): /note="Nucleotide may be methylated to form 5-methylcytosine"
ggcagatttagggtgtgatcgccagatcctatcccaagtccgccttcctgacggggaggacgtctgaacccgcctgccacggaaacggcccgttcggtagccttatttggccaacaaggcta

SEQ ID NO: 12890 - DNA, 122 bp, Homo sapiens
  misc_feature (61)..(62): /note="This region represents a CpG dinucleotide"
  misc_feature (61)..(61): /note="Nucleotide may be methylated to form 5-methylcytosine"
tcatattgtggctttgatggggagaatactgtttgtaccttgtacttacttttcaatttacgaagagtaatggtaaagagtatcaaaaaatttgatgccaatcttgattgatacacaattaa

SEQ ID NO: 12891 - DNA, 122 bp, Homo sapiens
  misc_feature (61)..(62): /note="This region represents a CpG dinucleotide"
  misc_feature (61)..(61): /note="Nucleotide may be methylated to form 5-methylcytosine"
ggtgatccgcgcgtctcggcctcccaaagtgctgggattacaggcgtgggccaccgtgcccggctgagacagaatcttgcactgtcatccaagctggagtgcagtggcacaatcttgggtca

SEQ ID NO: 12892 - DNA, 122 bp, Homo sapiens
  misc_feature (61)..(62): /note="This region represents a CpG dinucleotide"
  misc_feature (61)..(61): /note="Nucleotide may be methylated to form 5-methylcytosine"
ctcacaaacactccagtctcactttctgtaacctctgcataactgactggctgacattcacgtcaaagtacaccatactaagtacagggacaaacacacaaagatgcttcctcactgatagg

SEQ ID NO: 12893 - DNA, 122 bp, Homo sapiens
  misc_feature (61)..(62): /note="This region represents a CpG dinucleotide"
  misc_feature (61)..(61): /note="Nucleotide may be methylated to form 5-methylcytosine"
taatccccgcattgtacagcagggaaactgagtcacagagcagcttaggtgctggctcaacgcctcagtctggtaatggaattacatgagagctttagctctggagcagcctgtctgctgtg

SEQ ID NO: 12894 - DNA, 122 bp, Homo sapiens
  misc_feature (61)..(62): /note="This region represents a CpG dinucleotide"
  misc_feature (61)..(61): /note="Nucleotide may be methylated to form 5-methylcytosine"
ttgatctgacctgtggaaggcacagccatctaatcttcctgcttagccaaggagcaggcccgcctacaggttacacaatggcagacacaagcaccagcaggagggaaaagtttcagtgggca

SEQ ID NO: 12895 - DNA, 122 bp, Homo sapiens
  misc_feature (61)..(62): /note="This region represents a CpG dinucleotide"
  misc_feature (61)..(61): /note="Nucleotide may be methylated to form 5-methylcytosine"
ccacatgaagatgtggtagatggggctgcagcgacctcgggcagggaaaccactgaacaccgggctccagccaaatgcagcataattttgtggaagtctagaaatgctgactgtccttggga

SEQ ID NO: 12896 - DNA, 122 bp, Homo sapiens
  misc_feature (61)..(62): /note="This region represents a CpG dinucleotide"
  misc_feature (61)..(61): /note="Nucleotide may be methylated to form 5-methylcytosine"
caagacactaggcagcgtcctgaacgctggagatctagcagcaagcacgcaaggttctcacgctcacattctagtgagagcgtacattccaatgagagagagtaattaagtaaataataatt

SEQ ID NO: 12897 - DNA, 122 bp, Homo sapiens
  misc_feature (61)..(62): /note="This region represents a CpG dinucleotide"
  misc_feature (61)..(61): /note="Nucleotide may be methylated to form 5-methylcytosine"
tagctgaaaacctttccccatccaatatccattaactctcagtggaaacacagatgtgcacgtccactggagcagcactaaagggctctctgcagtccagcaccctcccaactgcccctacc

SEQ ID NO: 12898 - DNA, 122 bp, Homo sapiens
  misc_feature (61)..(62): /note="This region represents a CpG dinucleotide"
  misc_feature (61)..(61): /note="Nucleotide may be methylated to form 5-methylcytosine"
ctcaaggcaaattctatctggtagaggaaacaagtctccttagtgttctagccactataacgtagagtagaaagtcagcaggtgaagaaatcatattaccattttgctgttctgcttattaa

SEQ ID NO: 12899 - DNA, 122 bp, Homo sapiens
  misc_feature (61)..(62): /note="This region represents a CpG dinucleotide"
  misc_feature (61)..(61): /note="Nucleotide may be methylated to form 5-methylcytosine"
gttgccggacacagtcaggcagagccggttgctcctcccctggtttccgtggtgtttgaccgaaacctttgccaaggctgtcagtgtgctggatttcactgactgtgcaccacgtactcctc

SEQ ID NO: 12900 - DNA, 122 bp, Homo sapiens
  misc_feature (61)..(62): /note="This region represents a CpG dinucleotide"
  misc_feature (61)..(61): /note="Nucleotide may be methylated to form 5-methylcytosine"
atttttcattgtgaattgactccacacctacagaggccaagacaggccctccagcctcagcgcagcatcacgcccgctgcagcagggatcagtcaatgcatgctgattccatgtaagtggat

SEQ ID NO: 12901 - DNA, 122 bp, Homo sapiens
  misc_feature (61)..(62): /note="This region represents a CpG dinucleotide"
  misc_feature (61)..(61): /note="Nucleotide may be methylated to form 5-methylcytosine"
ttaatttgtgaagtgcaaaaatactaatttttctcgcgttgtcgttttttctgggcttgccgaggcccctccccctcctgcctcgcttcccatccccctttcctctgcgcccttcccctccc

SEQ ID NO: 12902 - DNA, 122 bp, Homo sapiens
  misc_feature (61)..(62): /note="This region represents a CpG dinucleotide"
  misc_feature (61)..(61): /note="Nucleotide may be methylated to form 5-methylcytosine"
aactgtgttcttttccaccatccacaaggactttaatgtttcatataattaaccctttaacgtactgatgtggccgagaggaaaaatgcaatggctgaaaaattttggagaagttaggtagt

SEQ ID NO: 12903 - DNA, 122 bp, Homo sapiens
  misc_feature (61)..(62): /note="This region represents a CpG dinucleotide"
  misc_feature (61)..(61): /note="Nucleotide may be methylated to form 5-methylcytosine"
agcattttaataaatattgctaaactgaactttcaaaacaagtatagtaatttacattcccgttaacaaggcatgattgctcatttcccaagatctttatcaaaccaagtattgtcaagctt

SEQ ID NO: 12904 - DNA, 122 bp, Homo sapiens
  misc_feature (61)..(62): /note="This region represents a CpG dinucleotide"
  misc_feature (61)..(61): /note="Nucleotide may be methylated to form 5-methylcytosine"
aactcgtttttcacctagaagcacaaaagtgatccttacccttggaggcaagatcaggagcgcacaatacaagggctgacttgttcatccactggagactctgctacagtataaatgcaata

SEQ ID NO: 12905 - DNA, 122 bp, Homo sapiens
  misc_feature (61)..(62): /note="This region represents a CpG dinucleotide"
  misc_feature (61)..(61): /note="Nucleotide may be methylated to form 5-methylcytosine"
ctttgtaacagggtccagaaataattagccactccagagagtgttgtggaatttgaaaaccgagatgccatgtattttctctgacactattttctgaatagtccaaataaaaacttggagga

SEQ ID NO: 12906 - DNA, 122 bp, Homo sapiens
  misc_feature (61)..(62): /note="This region represents a CpG dinucleotide"
  misc_feature (61)..(61): /note="Nucleotide may be methylated to form 5-methylcytosine"
atgaattagctcagaagttatttgatgtttcagaaataacttcagcagcaatggttcattcgttgcctacagcagttccagaatctcctagaattcatcctacaagaacacccaaaacacct

SEQ ID NO: 12907 - DNA, 122 bp, Homo sapiens
  misc_feature (61)..(62): /note="This region represents a CpG dinucleotide"
  misc_feature (61)..(61): /note="Nucleotide may be methylated to form 5-methylcytosine"
acagttaaaacacagcttactagatacaaatcctgccttctcatggtaatatcaatgatccgtacagcagtgaaatgtggagctaattgattcctttgaatgccaaaagcagggtcctaagg

SEQ ID NO: 12908 - DNA, 122 bp, Homo sapiens
  misc_feature (61)..(62): /note="This region represents a CpG dinucleotide"
  misc_feature (61)..(61): /note="Nucleotide may be methylated to form 5-methylcytosine"
gaggaggaactgctgagggcagggccatgagctcagagctggggacaatggccctgctatcggggcacttccacaatggctgctcatcagtcctggcagagactaaagggcagacttttttt

SEQ ID NO: 12909 - DNA, 122 bp, Homo sapiens
  misc_feature (61)..(62): /note="This region represents a CpG dinucleotide"
  misc_feature (61)..(61): /note="Nucleotide may be methylated to form 5-methylcytosine"
ggaaaacctggctacagcctacctgggggctgcttctcccagctgagcctctcctccccacgcagtgctccagccacgctgcactagtcagggctcccagcctgctggacacctgtctccgc

SEQ ID NO: 12910 - DNA, 122 bp, Homo sapiens
  misc_feature (61)..(62): /note="This region represents a CpG dinucleotide"
  misc_feature (61)..(61): /note="Nucleotide may be methylated to form 5-methylcytosine"
ggcaagaacgatgccatcggcaaagtctttgtgggctacaacagcaccggcgcggagctgcgacactggtcagacatgctggccaaccccaggcgacctattgcccagtggcacaccctgca

SEQ ID NO: 12911 - DNA, 122 bp, Homo sapiens
  misc_feature (61)..(62): /note="This region represents a CpG dinucleotide"
  misc_feature (61)..(61): /note="Nucleotide may be methylated to form 5-methylcytosine"
ctgtatttagagctccagacgtctgtgcggacccaagtctgctggcaggggtattgatgtcgtacttcgtcatttctgagtgccattagagccaccaacctgttctgggcctaggctgggtc

SEQ ID NO: 12912 - DNA, 122 bp, Homo sapiens
  misc_feature (61)..(62): /note="This region represents a CpG dinucleotide"
  misc_feature (61)..(61): /note="Nucleotide may be methylated to form 5-methylcytosine"
taatagccttcccactagaacagggctccccaactcccagggcctggactggtaccagtccgttgcctgttagggaccaggtggcacagcaggaggtgagtggtggctgagcaagcactacc

SEQ ID NO: 12913 - DNA, 122 bp, Homo sapiens
  misc_feature (61)..(62): /note="This region represents a CpG dinucleotide"
  misc_feature (61)..(61): /note="Nucleotide may be methylated to form 5-methylcytosine"
ccaagtctcagtgaaagtgaaaattgctgaacatttcaagattgttctaatggccaaagccgtaggactgacaggtgtcactcagcatttctagtcaatggaactctaacagaaatgaaggc

SEQ ID NO: 12914 - DNA, 122 bp, Homo sapiens
  misc_feature (61)..(62): /note="This region represents a CpG dinucleotide"
  misc_feature (61)..(61): /note="Nucleotide may be methylated to form 5-methylcytosine"
tgaatccaacattgctaaaactttcattccatgatgactaactcttctaaacaattgagacggaataatactcaccttaggtaaacttttctgtgaataaaaaaagaggaagtgcctctatt

SEQ ID NO: 12915 - DNA, 122 bp, Homo sapiens
  misc_feature (61)..(62): /note="This region represents a CpG dinucleotide"
  misc_feature (61)..(61): /note="Nucleotide may be methylated to form 5-methylcytosine"
ctcccatcccacctcccaggcttctctccccttgacctctagacagcccgaacttccctgcggctgctgttcctggtgaacatcgtgacagatgacagcactagtcaggtgattaatcagct

SEQ ID NO: 12916 - DNA, 122 bp, Homo sapiens
  misc_feature (61)..(62): /note="This region represents a CpG dinucleotide"
  misc_feature (61)..(61): /note="Nucleotide may be methylated to form 5-methylcytosine"
cagactcccaaggcctcccatgcagggcagggactccctccagcggtacgtaacccaacacgtgagaaaatgtcacccagggaacagagagaccagattaacttgataacatctgaaacccc

SEQ ID NO: 12917 - DNA, 122 bp, Homo sapiens
  misc_feature (61)..(62): /note="This region represents a CpG dinucleotide"
  misc_feature (61)..(61): /note="Nucleotide may be methylated to form 5-methylcytosine"
cctagctttagattggcgcctcagcggcttctgactttagcaattccagtgttcaggcagcgaaagccagggaaacacaatagaaatgacaggggcgggagtaacaggagagtgttggaaaa

SEQ ID NO: 12918 - DNA, 122 bp, Homo sapiens
  misc_feature (61)..(62): /note="This region represents a CpG dinucleotide"
  misc_feature (61)..(61): /note="Nucleotide may be methylated to form 5-methylcytosine"
aatctcagccaagcccaccaagcggctgcaggaggcgctgcagcccattctggagaagcacggcttgagcccgctagaggtggtgctgcaccgggtgagcttccgggccgcggggcggggcg

SEQ ID NO: 12919 - DNA, 122 bp, Homo sapiens
  misc_feature (61)..(62): /note="This region represents a CpG dinucleotide"
  misc_feature (61)..(61): /note="Nucleotide may be methylated to form 5-methylcytosine"
tatgcagagaagaaatggaaaaatacacctttcaatatatcagttcccaaccctgatcttcgttactgaaatatgaatctaatcccatctctgaatttgatcaaccaaaactgtgcaaactg

SEQ ID NO: 12920 - DNA, 122 bp, Homo sapiens
  misc_feature (61)..(62): /note="This region represents a CpG dinucleotide"
  misc_feature (61)..(61): /note="Nucleotide may be methylated to form 5-methylcytosine"
ctcaagcagtcatttcctctcggcctcccaaagtacttggattacaggcacgagccaccacgcccgcccaaagtcataattcttgagtcatctgctcgtgttatcttggtttcctcaccttc

SEQ ID NO: 12921 - DNA, 122 bp, Homo sapiens
  misc_feature (61)..(62): /note="This region represents a CpG dinucleotide"
  misc_feature (61)..(61): /note="Nucleotide may be methylated to form 5-methylcytosine"
ggccctcatgcctacagttagaggaagggacagaacttgcatgcacaccaggccacctaacgatgacacacaagatgagcattgtcaaccccatgttatggctgagggactcagcctcagag

SEQ ID NO: 12922 - DNA, 122 bp, Homo sapiens
  misc_feature (61)..(62): /note="This region represents a CpG dinucleotide"
  misc_feature (61)..(61): /note="Nucleotide may be methylated to form 5-methylcytosine"
actgctcagatcccagtaagactttcagtggccaagattaaagctggcttccctctgccacgccaagcaacccagcctggctacagtacagcaggctgctgcaggaacttttcagagcgaag

SEQ ID NO: 12923 - DNA, 122 bp, Homo sapiens
  misc_feature (61)..(62): /note="This region represents a CpG dinucleotide"
  misc_feature (61)..(61): /note="Nucleotide may be methylated to form 5-methylcytosine"
gcaccaggctcgatgctgcatctcaggctctgtttcataaacaggaggattatttcagaccgatcagaggcggctgcattctgcaaattaccgtgtgctgtggctgcgctcacacattgcca

SEQ ID NO: 12924 - DNA, 122 bp, Homo sapiens
  misc_feature (61)..(62): /note="This region represents a CpG dinucleotide"
  misc_feature (61)..(61): /note="Nucleotide may be methylated to form 5-methylcytosine"
cagaattccactagttactgtgacagccaaaaacttaatacatgcatttccatatttccacgtgtctttctctctcccctggaaacacagcttttcctgtagccctctcaagtagagccaat

SEQ ID NO: 12925 - DNA, 122 bp, Homo sapiens
  misc_feature (61)..(62): /note="This region represents a CpG dinucleotide"
  misc_feature (61)..(61): /note="Nucleotide may be methylated to form 5-methylcytosine"
aaatagggtgactccatctcaaccaccctcctccctgtactcacccaaccaactgactctcggagattgcccaaccaaagagcagaagttcacagaatatctcttcttgggtcagcacccaa

SEQ ID NO: 12926 - DNA, 122 bp, Homo sapiens
  misc_feature (61)..(62): /note="This region represents a CpG dinucleotide"
  misc_feature (61)..(61): /note="Nucleotide may be methylated to form 5-methylcytosine"
tccaggacggggcggctggcggggcagagatgctcctcacttcccagatggtgtggttgccgggcggaggggctcctcatttctcagatggggcggctgctgggcggaggggctcctcactt

SEQ ID NO: 12927 - DNA, 122 bp, Homo sapiens
  misc_feature (61)..(62): /note="This region represents a CpG dinucleotide"
  misc_feature (61)..(61): /note="Nucleotide may be methylated to form 5-methylcytosine"
catgagcaaagcacagaaccttataactatgcttgcttgtggaaagacatcccttgtccacgggccaagtatttgaaaataccactccatatagctccagggccctgagagaagctaccgtg

SEQ ID NO: 12928 - DNA, 122 bp, Homo sapiens
  misc_feature (61)..(62): /note="This region represents a CpG dinucleotide"
  misc_feature (61)..(61): /note="Nucleotide may be methylated to form 5-methylcytosine"
agctcagtactaaatatctactcatccctgattaaataaggtagtaggtcttcactttctcggaagcttctctgtaaattagattatatctagatgcaacataagaaggggaaaccctaatg

SEQ ID NO: 12929 - DNA, 122 bp, Homo sapiens
  misc_feature (61)..(62): /note="This region represents a CpG dinucleotide"
  misc_feature (61)..(61): /note="Nucleotide may be methylated to form 5-methylcytosine"
gaatgtcaaaataaggaagagagagtggttgataatcagtagagagaggtttctaactcacggaagtgtttgcaatacaacctctttgtacatcagctgtgtggaacaacatacttgtcact

SEQ ID NO: 12930 - DNA, 122 bp, Homo sapiens
  misc_feature (61)..(62): /note="This region represents a CpG dinucleotide"
  misc_feature (61)..(61): /note="Nucleotide may be methylated to form 5-methylcytosine"
tccatgatgtctggtaggttacaaagagagaaggcattaaatgtgttgttaaccagcaagcgcatgaggtagaaattttggaggattaaggctttattgaacccaccaaatcatactccagg

SEQ ID NO: 12931 - DNA, 122 bp, Homo sapiens
  misc_feature (61)..(62): /note="This region represents a CpG dinucleotide"
  misc_feature (61)..(61): /note="Nucleotide may be methylated to form 5-methylcytosine"
gagaaagggatccgcttccttcctttagagctgtgaaatgtccccggttggaattaaaggcggctgctggggagaggtgaaattcagccaaaaccacccagtcaggcagcccttctcagaga

SEQ ID NO: 12932 - DNA, 122 bp, Homo sapiens
  misc_feature (61)..(62): /note="This region represents a CpG dinucleotide"
  misc_feature (61)..(61): /note="Nucleotide may be methylated to form 5-methylcytosine"
attgtttgaaagtaaattgataaccacccatacatacactgctcctaactactttgaggtcgttctataaaatgaagacactcttctacataaccacaaaatcttaccatacctaagaaaac

SEQ ID NO: 12933 - DNA, 122 bp, Homo sapiens
  misc_feature (61)..(62): /note="This region represents a CpG dinucleotide"
  misc_feature (61)..(61): /note="Nucleotide may be methylated to form 5-methylcytosine"
taaagtgctgcctaatagattttcaagctcagatttgcttcccgctcccatataatacagcggatagtaacgagaaaacacctaatttctagacatgctctaaacctaattatgagtcagca

SEQ ID NO: 12934 - DNA, 122 bp, Homo sapiens
  misc_feature (61)..(62): /note="This region represents a CpG dinucleotide"
  misc_feature (61)..(61): /note="Nucleotide may be methylated to form 5-methylcytosine"
agacgcgtggctgtgggagccgagtggcacagggagggctccagactggggagccggtgtcgccacacaggcaggggactggagcccggggtcccagcttccagtccagccgacatttgtgg

SEQ ID NO: 12935 - DNA, 122 bp, Homo sapiens
  misc_feature (61)..(62): /note="This region represents a CpG dinucleotide"
  misc_feature (61)..(61): /note="Nucleotide may be methylated to form 5-methylcytosine"
gaccttgctgcttcctgggctaagcagctgcagtgagggtgtgttgccctgaagcagttacgtcattcattaatccaaattctgaaagacaaatgagcatatggtgctaaaatacttttttt

SEQ ID NO: 12936 - DNA, 122 bp, Homo sapiens
  misc_feature (61)..(62): /note="This region represents a CpG dinucleotide"
  misc_feature (61)..(61): /note="Nucleotide may be methylated to form 5-methylcytosine"
ggggcggacgcccaggaggcaacttctgagacgcagctcctgagaggggcagggaccaggcgcgggaggccagagggggcacagagaacaaaccccctcagaagtgaagaggagagcggaag

SEQ ID NO: 12937 - DNA, 122 bp, Homo sapiens
  misc_feature (61)..(62): /note="This region represents a CpG dinucleotide"
  misc_feature (61)..(61): /note="Nucleotide may be methylated to form 5-methylcytosine"
cataacctcccacaagtattcacaggaaatggtgccactcatgcacagaacttcctgagccggcatccaccacatcaaacccactgagtgagctcccttgttgttgtggtatgttgtcatat

SEQ ID NO: 12938 - DNA, 122 bp, Homo sapiens
  misc_feature (61)..(62): /note="This region represents a CpG dinucleotide"
  misc_feature (61)..(61): /note="Nucleotide may be methylated to form 5-methylcytosine"
tggccatatttttaaattaaggtctgtacatggtttttaaatacataatgctattgtgcacgtaatagattatagtataatgtaaatataaattctatatgcactggagaacaaaaaaaaaa

SEQ ID NO: 12939 - DNA, 122 bp, Homo sapiens
  misc_feature (61)..(62): /note="This region represents a CpG dinucleotide"
  misc_feature (61)..(61): /note="Nucleotide may be methylated to form 5-methylcytosine"
gggggctgggtgcgccaaagttattgtaaaactaagaagggggctgggtgcggtggcttacgcctataaccccagccattgggaggacaaggcaggccgatcacctgaagtcaggagttcga

SEQ ID NO: 12940 - DNA, 122 bp, Homo sapiens
  misc_feature (61)..(62): /note="This region represents a CpG dinucleotide"
  misc_feature (61)..(61): /note="Nucleotide may be methylated to form 5-methylcytosine"
gttaagggagaaataaaatttacgataaaatgtacgttgtaatacataaatactcaggtacggctacaacagaagacagagatgaatgtgacagctacaaatgaaaactgacccttgtgtat

SEQ ID NO: 12941 - DNA, 122 bp, Homo sapiens
  misc_feature (61)..(62): /note="This region represents a CpG dinucleotide"
  misc_feature (61)..(61): /note="Nucleotide may be methylated to form 5-methylcytosine"
catgtatttacttatgagttcctctcccaacagagccttctactgaaaggtgttcaataccgtgttcatagagtgaaggtatgaataactgactctaattaatccttaaattgctgtgggag

SEQ ID NO: 12942 - DNA, 122 bp, Homo sapiens
  misc_feature (61)..(62): /note="This region represents a CpG dinucleotide"
  misc_feature (61)..(61): /note="Nucleotide may be methylated to form 5-methylcytosine"
gcagtggcgcgatctcggctcagttgggcactaattttcatttgatgaacgcctctccttcgtatattgttaaaactaccaccatgatccagggggagataaaagaaatcctaaatccagct

SEQ ID NO: 12943 - DNA, 122 bp, Homo sapiens
  misc_feature (61)..(62): /note="This region represents a CpG dinucleotide"
  misc_feature (61)..(61): /note="Nucleotide may be methylated to form 5-methylcytosine"
gaagaacggatcacttaaattcagagtggcatttttatttctgagggagctgggctctcacggaacgtgctggagtgacagcctggaagagcgaaagccgccccccctcccgcttccccgca

SEQ ID NO: 12944 - DNA, 122 bp, Homo sapiens
  misc_feature (61)..(62): /note="This region represents a CpG dinucleotide"
  misc_feature (61)..(61): /note="Nucleotide may be methylated to form 5-methylcytosine"
ttaacggcaattaagagggatagaaaatgtattccagctgataaaaaggaattccctgtgcgaaagggaaaggcagaaagcagctggaaaaaaaaaatagcaggcagttgtcttaataacgt

SEQ ID NO: 12945 - DNA, 122 bp, Homo sapiens
  misc_feature (61)..(62): /note="This region represents a CpG dinucleotide"
  misc_feature (61)..(61): /note="Nucleotide may be methylated to form 5-methylcytosine"
catgaggtttgtcacctgtatttgccagtgattcccagagctcttacagttgtcccaggacgctttagcacatggccacacgactcccaaggttgacctgggagttattagaagatcagagg

SEQ ID NO: 12946 - DNA, 122 bp, Homo sapiens
  misc_feature (61)..(62): /note="This region represents a CpG dinucleotide"
  misc_feature (61)..(61): /note="Nucleotide may be methylated to form 5-methylcytosine"
tgagtggaaacagaattacagaaatgtggagttttgtttaagtaaaggggaacaaaaaaacgcaatcccatcgattttgatgctgacagtgattgcggtattagtgatgttaacagctttaa

SEQ ID NO: 12947 - DNA, 122 bp, Homo sapiens
  misc_feature (61)..(62): /note="This region represents a CpG dinucleotide"
  misc_feature (61)..(61): /note="Nucleotide may be methylated to form 5-methylcytosine"
ttcccattcagtcactcatggatcactgggcacaaagtcaggggtggaaagtgccccccacgtaggagccaagttagaccagacccagaggaccttagcacctgtctcaaatatctgaagat

SEQ ID NO: 12948 - DNA, 122 bp, Homo sapiens
  misc_feature (61)..(62): /note="This region represents a CpG dinucleotide"
  misc_feature (61)..(61): /note="Nucleotide may be methylated to form 5-methylcytosine"
cattcttttgagtctttgttcagcctttcgctgactgcacaatttattatgcatgtgagacgcgggtagaggaatagtcgcttatgctttagtctggcttactgaatcttcatttctacgta

SEQ ID NO: 12949 - DNA, 122 bp, Homo sapiens
  misc_feature (61)..(62): /note="This region represents a CpG dinucleotide"
  misc_feature (61)..(61): /note="Nucleotide may be methylated to form 5-methylcytosine"
attctctttcgtttggggaaatgcagtggtaaaacatcagagctggtcctgcggaaataacgaagtggccaaggtcatcgaaaggatctggcctgttgttcctctgcttgcccctgcccacc

SEQ ID NO: 12950 - DNA, 122 bp, Homo sapiens
  misc_feature (61)..(62): /note="This region represents a CpG dinucleotide"
  misc_feature (61)..(61): /note="Nucleotide may be methylated to form 5-methylcytosine"
ccctgccctgggttgaccttacaatgcccagaggattaaagcttaacttcctacctgtcacgtttctttttgcagctcttctggaaagcttctctctcttccttgattccccctctttcctt

SEQ ID NO: 12951 - DNA, 122 bp, Homo sapiens
  misc_feature (61)..(62): /note="This region represents a CpG dinucleotide"
  misc_feature (61)..(61): /note="Nucleotide may be methylated to form 5-methylcytosine"
gaggggtcccctgtgccttctaggactagctccagtgccctgggatcccagagtgcatggcgctcagggagaaacgcgtttgcatgtttcagtttcacagtttgcctggggcggtcttgtta

SEQ ID NO: 12952 - DNA, 122 bp, Homo sapiens
  misc_feature (61)..(62): /note="This region represents a CpG dinucleotide"
  misc_feature (61)..(61): /note="Nucleotide may be methylated to form 5-methylcytosine"
tcctgaagtctttcaatctggatagacaggcttcctgttgcataactatcctggaacttgcgttcactgcatttctgaatttgttccactgtttcacagacccaatccacttcatttccttc

SEQ ID NO: 12953 - DNA, 122 bp, Homo sapiens
  misc_feature (61)..(62): /note="This region represents a CpG dinucleotide"
  misc_feature (61)..(61): /note="Nucleotide may be methylated to form 5-methylcytosine"
ccgtaaagacggggatctttacgggttttcctcactgacttctcccaaaagctaaaccagcgcctggaatataaacatgtacataatttgcaggtgttagttttagcgtccttccggattca

SEQ ID NO: 12954 - DNA, 122 bp, Homo sapiens
  misc_feature (61)..(62): /note="This region represents a CpG dinucleotide"
  misc_feature (61)..(61): /note="Nucleotide may be methylated to form 5-methylcytosine"
ggagaaggaccttcggagcacccgtgtgctgtgaatacagggcctcagctctgctaggggcggcgtggggaagacatagggcgggtgtgagtcagccacttcggctaagcctggaacagccc

SEQ ID NO: 12955 - DNA, 122 bp, Homo sapiens
  misc_feature (61)..(62): /note="This region represents a CpG dinucleotide"
  misc_feature (61)..(61): /note="Nucleotide may be methylated to form 5-methylcytosine"
aaatcagttgtggcccaactagactgcctggatataatatccttttggactggatcatgtcgtttcattgcagtcaggatggctaagcatggtgatggatcataactgaccaaacagacagg

SEQ ID NO: 12956 - DNA, 122 bp, Homo sapiens
  misc_feature (61)..(62): /note="This region represents a CpG dinucleotide"
  misc_feature (61)..(61): /note="Nucleotide may be methylated to form 5-methylcytosine"
tgatttattgcaggagatgctgtttactctgacagtctcaaaaacacccattaattgttccgggtcccttttgtgcttcttgacttccccgtggggtgtttcacatagatgttattgagtat

SEQ ID NO: 12957 - DNA, 122 bp, Homo sapiens
  misc_feature (61)..(62): /note="This region represents a CpG dinucleotide"
  misc_feature (61)..(61): /note="Nucleotide may be methylated to form 5-methylcytosine"
agcatttgatacagtgggctaacagcacggatgaatctttaaagctcatcacttcactcacgtacaatattccagcctcctctgcatgggaagcaaactcctcttgtcctgtctttagtttc

SEQ ID NO: 12958 - DNA, 122 bp, Homo sapiens
  misc_feature (61)..(62): /note="This region represents a CpG dinucleotide"
  misc_feature (61)..(61): /note="Nucleotide may be methylated to form 5-methylcytosine"
acaaatagttgctgtttttaattaaacccaacatggctacttccttaacttagaaaaaagcgactagcaatgttatgctttgatagattggaaaccatgggtgtgtgatcacacttaagaaa

SEQ ID NO: 12959 - DNA, 122 bp, Homo sapiens
  misc_feature (61)..(62): /note="This region represents a CpG dinucleotide"
  misc_feature (61)..(61): /note="Nucleotide may be methylated to form 5-methylcytosine"
atggtcactgcatcataatggcggtcacaatgcaggtatcaaagtgcctacgtgctcccccgtgtggtgagggtggggcaaagcagggctcgcttgaccactttatttcatcctctcttaag

SEQ ID NO: 12960 - DNA, 122 bp, Homo sapiens
  misc_feature (61)..(62): /note="This region represents a CpG dinucleotide"
  misc_feature (61)..(61): /note="Nucleotide may be methylated to form 5-methylcytosine"
tctatgacatacaaaggtcatttttggtctcttcctgcatatcttaccagcctaatctctcgtcacttctctcgcatactatttgccagtttctctgaagtttcctgttctctctgcctcca

SEQ ID NO: 12961 - DNA, 122 bp, Homo sapiens
  misc_feature (61)..(62): /note="This region represents a CpG dinucleotide"
  misc_feature (61)..(61): /note="Nucleotide may be methylated to form 5-methylcytosine"
acagttgacttataaagtatcagacaccacaaatgttaacccactgggtaattacatcagcgagtcatttcagaggcactagagatgtttatcagaaggattcagtaggttgtgatgtatgt

SEQ ID NO: 12962 - DNA, 122 bp, Homo sapiens
  misc_feature (61)..(62): /note="This region represents a CpG dinucleotide"
  misc_feature (61)..(61): /note="Nucleotide may be methylated to form 5-methylcytosine"
tggcttgtcaccatcttcctcgttccctgcttttgcccttgctcaccagaaggttactctcgacatggcagccagggtgatcctgttgaaatccaagatgaatcatgccattcctctaccca

SEQ ID NO: 12963 - DNA, 122 bp, Homo sapiens
  misc_feature (61)..(62): /note="This region represents a CpG dinucleotide"
  misc_feature (61)..(61): /note="Nucleotide may be methylated to form 5-methylcytosine"
acatttgtaataaacagagaaagcatttagaattcgagtgcttttaagatatagcaactccgccagtgactgtgttagcaaagcaatgcttaccaccataacactttctaaggacatgtttt

SEQ ID NO: 12964 - DNA, 122 bp, Homo sapiens
  misc_feature (61)..(62): /note="This region represents a CpG dinucleotide"
  misc_feature (61)..(61): /note="Nucleotide may be methylated to form 5-methylcytosine"
ttaattcagttaaattaaaacattttctctgtaatactatccacatttcaagtgctcagacgtgacaagtggctcgtgggtgctgcgttaggcagcactggcctgcagaatccactggttta

SEQ ID NO: 12965 - DNA, 122 bp, Homo sapiens
  misc_feature (61)..(62): /note="This region represents a CpG dinucleotide"
  misc_feature (61)..(61): /note="Nucleotide may be methylated to form 5-methylcytosine"
ctcactaaagaaaatgaacataactatggatagtctgtggccagccagaggaatggcttgcgatttggagagataaagaaaggattcatagaagtggaacttgcctttattggggcctcagt

SEQ ID NO: 12966 - DNA, 122 bp, Homo sapiens
  misc_feature (61)..(62): /note="This region represents a CpG dinucleotide"
  misc_feature (61)..(61): /note="Nucleotide may be methylated to form 5-methylcytosine"
tgtaccattgcactccagccttggcaacaagagcgaaactttgtccacaccacccccccacgcccccacaaaaaaagaccgtgatggataagacagtgaattcataattttgttttagcttc

SEQ ID NO: 12967 - DNA, 122 bp, Homo sapiens
  misc_feature (61)..(62): /note="This region represents a CpG dinucleotide"
  misc_feature (61)..(61): /note="Nucleotide may be methylated to form 5-methylcytosine"
tgggcttcagctccgtgttgagcaaacagctcccccaaatgagtagggcctggacctagccgtggcctgtgacctcaggaaggagttctcactttcctgttttccaagactgaagttctgct

SEQ ID NO: 12968 - DNA, 122 bp, Homo sapiens
  misc_feature (61)..(62): /note="This region represents a CpG dinucleotide"
  misc_feature (61)..(61): /note="Nucleotide may be methylated to form 5-methylcytosine"
cattaccatgtgtccagtaagtgggtaaaagcagattagaatacaggtctgcctccaaatcgactccaaaatctgtcttctccacaagtattgccttgggaggtgttcattttacttctaat

SEQ ID NO: 12969 - DNA, 122 bp, Homo sapiens
  misc_feature (61)..(62): /note="This region represents a CpG dinucleotide"
  misc_feature (61)..(61): /note="Nucleotide may be methylated to form 5-methylcytosine"
tcccggctcctgggagccagcgtctgcagagccctggcggcggagggcggtggagggcggcggcccacgtacacaacggcgccttccagctctgggaggcttgctccagagcctggaaacac

SEQ ID NO: 12970 - DNA, 122 bp, Homo sapiens
  misc_feature (61)..(62): /note="This region represents a CpG dinucleotide"
  misc_feature (61)..(61): /note="Nucleotide may be methylated to form 5-methylcytosine"
gggaaaaccagaagaccctgtttctggttcattctttcctcaacatttgaattcatttgtcgtttcttgtttttatagtgcagtgaagacagagaatgtcaactttgttaggaaatggcttt

SEQ ID NO: 12971 - DNA, 122 bp, Homo sapiens
  misc_feature (61)..(62): /note="This region represents a CpG dinucleotide"
  misc_feature (61)..(61): /note="Nucleotide may be methylated to form 5-methylcytosine"
tgtcatcttgatagttacaaaacatggggcttctggctcctgccctaaaataacacttgacgtttttaaaactacccctttttttttgctctagcacggaggtatccagttagaaagcacct

SEQ ID NO: 12972 - DNA, 122 bp, Homo sapiens
  misc_feature (61)..(62): /note="This region represents a CpG dinucleotide"
  misc_feature (61)..(61): /note="Nucleotide may be methylated to form 5-methylcytosine"
tgaacgcattcaacagcactactcatgagctctcagattcatcctggctgtcctttgacacgttgggattgatgctttcttctcatgggtcatcccaatttctccaggcagctttctcttct

SEQ ID NO: 12973 - DNA, 122 bp, Homo sapiens
  misc_feature (61)..(62): /note="This region represents a CpG dinucleotide"
  misc_feature (61)..(61): /note="Nucleotide may be methylated to form 5-methylcytosine"
gtcacagccacagaaattacaggagttaagaaagtgcatcatctccttccttggagaacacggagggatggtgacttgcagtatggtctggttctcaagctcacagtgcacctcttttcctc

SEQ ID NO: 12974 - DNA, 122 bp, Homo sapiens
  misc_feature (61)..(62): /note="This region represents a CpG dinucleotide"
  misc_feature (61)..(61): /note="Nucleotide may be methylated to form 5-methylcytosine"
gctgggatcccactaacattggccaaactgctgcagacatgaagacttcatctgggaacccgaaaggagaactcaaaatccaaatcttcagactttcttaggagaagcgtggaagtgggaaa

SEQ ID NO: 12975 - DNA, 122 bp, Homo sapiens
  misc_feature (61)..(62): /note="This region represents a CpG dinucleotide"
  misc_feature (61)..(61): /note="Nucleotide may be methylated to form 5-methylcytosine"
ttagggggagtctattcaggtcaatttgcagcttaaattttctactttttctttccactccgtttttactttacctttgattttttaatatttccagaagtcaaaaatgtaggatgggcaca

SEQ ID NO: 12976 - DNA, 122 bp, Homo sapiens
  misc_feature (61)..(62): /note="This region represents a CpG dinucleotide"
  misc_feature (61)..(61): /note="Nucleotide may be methylated to form 5-methylcytosine"
ctcctgtccccccagtcacgcttgcacagatctgactcagcagctgccttcctcctttcacgtcattgcatcgggcacatgctggtcatgtgtttctaaattaagtcctgttgtgtggggaa

SEQ ID NO: 12977 - DNA, 122 bp, Homo sapiens
  misc_feature (61)..(62): /note="This region represents a CpG dinucleotide"
  misc_feature (61)..(61): /note="Nucleotide may be methylated to form 5-methylcytosine"
gcacacacacacacacgtgaatatatatatatatatatatatatatatatatatgaaatccggatggatcaagatgtttatagaaatgcaaagctttaaatctgtggaagaaatgagagaaa

SEQ ID NO: 12978 - DNA, 122 bp, Homo sapiens
  misc_feature (61)..(62): /note="This region represents a CpG dinucleotide"
  misc_feature (61)..(61): /note="Nucleotide may be methylated to form 5-methylcytosine"
ctgtaagatgggcgaggccaaggaagagtcatttcctccatggtgaagaacataatgctacgcaacttcaagcaaattaaaaaacagttgtggttggccaggcatggtggctcacacctgta

SEQ ID NO: 12979 - DNA, 122 bp, Homo sapiens
  misc_feature (61)..(62): /note="This region represents a CpG dinucleotide"
  misc_feature (61)..(61): /note="Nucleotide may be methylated to form 5-methylcytosine"
gtgaagaaaaccttgtctcagcgaggtgtggctgttctcagagtactgtgtgtatatgcacgtgggtgggtgtgggtgtgcatatatgtgtaatggggacgaacgagtattcctgtaccttc

SEQ ID NO: 12980 - DNA, 122 bp, Homo sapiens
  misc_feature (61)..(62): /note="This region represents a CpG dinucleotide"
  misc_feature (61)..(61): /note="Nucleotide may be methylated to form 5-methylcytosine"
gcccaggagctctgcctcacgttgtataaatcacagcttcttgtggtccataagtcacggcgctagcgctgtgaaatgccaggccccagcctggagagccactccggccctctgtcatcttt

SEQ ID NO: 12981 - DNA, 122 bp, Homo sapiens
  misc_feature (61)..(62): /note="This region represents a CpG dinucleotide"
  misc_feature (61)..(61): /note="Nucleotide may be methylated to form 5-methylcytosine"
tctggcagatctgctcctccaggatgctgatatacatcttaatttctgacagctgagccacgtagccagcttctgtgtcagccagggttccttctggggagctttgctacaaatgcccatga

SEQ ID NO: 12982 - DNA, 122 bp, Homo sapiens
  misc_feature (61)..(62): /note="This region represents a CpG dinucleotide"
  misc_feature (61)..(61): /note="Nucleotide may be methylated to form 5-methylcytosine"
ctttgacctagagttgttaggcgtgggtgaagcaatcaattgccaggaattctttcagcacggaggttttctctgcaaactcatcctccttttatcttttttcttaaaacacattcttgtcc

SEQ ID NO: 12983 - DNA, 122 bp, Homo sapiens
  misc_feature (61)..(62): /note="This region represents a CpG dinucleotide"
  misc_feature (61)..(61): /note="Nucleotide may be methylated to form 5-methylcytosine"
gggtgttcataaacaaaggcatggcagtaatacagctgagggagatggagcggagggcgacggaacaggtacttgcctcaattaaccctaaaaatgtgcttatgagggaggataactgttcc

SEQ ID NO: 12984 - DNA, 122 bp, Homo sapiens
  misc_feature (61)..(62): /note="This region represents a CpG dinucleotide"
  misc_feature (61)..(61): /note="Nucleotide may be methylated to form 5-methylcytosine"
tgaaaatgaatacatcctgacagcttagttcaacagttattcatggggtggccttgctctcgttcatgaaactagtgcatttccttcaaaggggaggagcttccaaactttaacatgctatg

SEQ ID NO: 12985 - DNA, 122 bp, Homo sapiens
  misc_feature (61)..(62): /note="This region represents a CpG dinucleotide"
  misc_feature (61)..(61): /note="Nucleotide may be methylated to form 5-methylcytosine"
tcatcacttatggataggtttccacttcccagtcacttgaaggtaaacatgcttacgtggcgactttttcttttccctcccgagtgtggtttgtggtagaatttgagggaaatataaatgag

SEQ ID NO: 12986 - DNA, 122 bp, Homo sapiens
  misc_feature (61)..(62): /note="This region represents a CpG dinucleotide"
  misc_feature (61)..(61): /note="Nucleotide may be methylated to form 5-methylcytosine"
cgtgtaggaaggcagtgacagtccaagtgacaggcagatcataaaacctcaaggataggccgggcccggtggctcatgcctgtaatcccaagcacttcgggaggccgaggtgggcaaatcac

SEQ ID NO: 12987 - DNA, 122 bp, Homo sapiens
  misc_feature (61)..(62): /note="This region represents a CpG dinucleotide"
  misc_feature (61)..(61): /note="Nucleotide may be methylated to form 5-methylcytosine"
ttgatgacttcatccggtatagcttcttgtttgtactgggttccataccactcttctgtgcgatcagtttttccttcaaaagatttagaaactatggcaaccctagagatagaaaaaacaaa

SEQ ID NO: 12988 - DNA, 122 bp, Homo sapiens
  misc_feature (61)..(62): /note="This region represents a CpG dinucleotide"
  misc_feature (61)..(61): /note="Nucleotide may be methylated to form 5-methylcytosine"
agccctccccaccccgcccacaagcccagcgccttcctgaagtgaccctccctgcagaggcgatattaatagccgtggcagggctcgaatcacaggccaagaatgttacccagcagctcgtg

SEQ ID NO: 12989 - DNA, 122 bp, Homo sapiens
  misc_feature (61)..(62): /note="This region represents a CpG dinucleotide"
  misc_feature (61)..(61): /note="Nucleotide may be methylated to form 5-methylcytosine"
catgccagctccgggggctcatttgctggggaagaatgtcagtgatcataactgctgcaccgctttcttgaagactttataggctccctctcgtgggaccctccgcataaggccagaaggcg

SEQ ID NO: 12990 - DNA, 122 bp, Homo sapiens
  misc_feature (61)..(62): /note="This region represents a CpG dinucleotide"
  misc_feature (61)..(61): /note="Nucleotide may be methylated to form 5-methylcytosine"
actggacataactttgaagcaaaacaattttaagtggatgactaaaatccttcctgaaaacgcatgcctgtggtccctgtgaaatcaccttttctccccctttcctaatctcctttccctcc

SEQ ID NO: 12991 - DNA, 122 bp, Homo sapiens
  misc_feature (61)..(62): /note="This region represents a CpG dinucleotide"
  misc_feature (61)..(61): /note="Nucleotide may be methylated to form 5-methylcytosine"
ttggaactaggatatgaaccaacacagtaagccttgaaaaacgaatcaaaatgtgcattacgtgttgtttataaagacaagcataaataagatacaggatggtgctcagtaaattaatgcag

SEQ ID NO: 12992 - DNA, 122 bp, Homo sapiens
  misc_feature (61)..(62): /note="This region represents a CpG dinucleotide"
  misc_feature (61)..(61): /note="Nucleotide may be methylated to form 5-methylcytosine"
tgcccccgagaggggctgctctgctcctctgccccttccccaaggagccagaggcagctgcgagagggggagtctttataaagactctcgttctaactgccctgagcccagaaaccacggcc

SEQ ID NO: 12993 - DNA, 122 bp, Homo sapiens
  misc_feature (61)..(62): /note="This region represents a CpG dinucleotide"
  misc_feature (61)..(61): /note="Nucleotide may be methylated to form 5-methylcytosine"
gagcaggctgctccagatatacaagacatcattcctgcaggcattgtcagtcttgtagtccgttgacagtaattgcatggacaacacccaaattgattgacttttctgtaagtattgttgaa

SEQ ID NO: 12994 - DNA, 122 bp, Homo sapiens
  misc_feature (61)..(62): /note="This region represents a CpG dinucleotide"
  misc_feature (61)..(61): /note="Nucleotide may be methylated to form 5-methylcytosine"
gaggccagccatgtttctaggagtctcaggccgactcagtgtgtagtgagagaaggtaaacgtaggggaaagaaaattaaaatgctcaaagagtgagcaaaggaaaaatgaagtgtaagaga

SEQ ID NO: 12995 - DNA, 122 bp, Homo sapiens
  misc_feature (61)..(62): /note="This region represents a CpG dinucleotide"
  misc_feature (61)..(61): /note="Nucleotide may be methylated to form 5-methylcytosine"
ccactccaaggaaatacagaatccgggaaacaattgttcctagcgattagggaaatctcgcgagattcaggtcctgggagcctggcaagcccacacagcgacggttatttagccgttgaact

SEQ ID NO: 12996 - DNA, 122 bp, Homo sapiens
  misc_feature (61)..(62): /note="This region represents a CpG dinucleotide"
  misc_feature (61)..(61): /note="Nucleotide may be methylated to form 5-methylcytosine"
acccctgcagccctctcctagggaaattcatggggcaccttgcgtcacagctgggtggggcgagagctttctccatgagcagagagggaccctgtacccagagcagagcggagtgctcgggg

SEQ ID NO: 12997 - DNA, 122 bp, Homo sapiens
  misc_feature (61)..(62): /note="This region represents a CpG dinucleotide"
  misc_feature (61)..(61): /note="Nucleotide may be methylated to form 5-methylcytosine"
ccttccataccgaaagaattctgagtggttcttgacctgggctgcagtctagcgtcaccacgtaaaagggagtatatggagcacctggacatatcatgcatgactggtgggagtataaagtg

SEQ ID NO: 12998 - DNA, 122 bp, Homo sapiens
  misc_feature (61)..(62): /note="This region represents a CpG dinucleotide"
  misc_feature (61)..(61): /note="Nucleotide may be methylated to form 5-methylcytosine"
tcccaatcactgacaaagaagtaaaatacattatcaggtgaccaggcaagaatatacttacgacttggtctaaatcttaaggaagacaattaattaactgggaagcatagagcaacaatgag

SEQ ID NO: 12999 - DNA, 122 bp, Homo sapiens
  misc_feature (61)..(62): /note="This region represents a CpG dinucleotide"
  misc_feature (61)..(61): /note="Nucleotide may be methylated to form 5-methylcytosine"
gctgggtgtggtgccatgcacctgtagtcccagctgtttgggagcctgaggtggaaggatcgcttcagcctgggcagaggttgtagtgaactaacatggtatcacgtcactgtactccagcc

SEQ ID NO: 13000 - DNA, 122 bp, Homo sapiens
  misc_feature (61)..(62): /note="This region represents a CpG dinucleotide"
  misc_feature (61)..(61): /note="Nucleotide may be methylated to form 5-methylcytosine"
gccttactaggtttcctgactcagtctgttagtattatatcatatccttttttgcctaatcgtatttctacctggttatcttcaatcatgtctatccaatggagtcttgctaagagacccaa

SEQ ID NO: 13001 - DNA, 122 bp, Homo sapiens
  misc_feature (61)..(62): /note="This region represents a CpG dinucleotide"
  misc_feature (61)..(61): /note="Nucleotide may be methylated to form 5-methylcytosine"
cactctgggagaactgaagaagatgcgaaagtataaaacagtcctgcccttaggagcttacggattaattgaagacagggcataaacatttgaaaagttacccaacatcagagaatgagagg

SEQ ID NO: 13002 - DNA, 122 bp, Homo sapiens
  misc_feature (61)..(62): /note="This region represents a CpG dinucleotide"
  misc_feature (61)..(61): /note="Nucleotide may be methylated to form 5-methylcytosine"
gtacattatacctcataaagtactgctagcatctaaaagatacacatacagaaaaatacacggaacggacatgctcagtttaatgaattatttagccagcgcctgtgaaacaccacccacaa

SEQ ID NO: 13003 - DNA, 122 bp, Homo sapiens
  misc_feature (61)..(62): /note="This region represents a CpG dinucleotide"
  misc_feature (61)..(61): /note="Nucleotide may be methylated to form 5-methylcytosine"
cacgcaagggcagtcatttgttcctatccttgctgcccactgaatccagggcctatagctcgctgacctactaggtgcgcgcctaaaggcatgcctggagggcctgggtgcgggcacgtgga

SEQ ID NO: 13004 - DNA, 122 bp, Homo sapiens
  misc_feature (61)..(62): /note="This region represents a CpG dinucleotide"
  misc_feature (61)..(61): /note="Nucleotide may be methylated to form 5-methylcytosine"
caggacttatgcaaaggttgttccatttgtggtgggaccttaatcatgctctttccacaccgcttcactgccccgcttgcagttccaggggaaatccccaagagttatcccctagagttcct

SEQ ID NO: 13005 - DNA, 122 bp, Homo sapiens
  misc_feature (61)..(62): /note="This region represents a CpG dinucleotide"
  misc_feature (61)..(61): /note="Nucleotide may be methylated to form 5-methylcytosine"
tacttttaatgactatataaattatgaatgccctgcagtcccaaatcaccaagaacacaccgaatcagaacaaagttgggtttattgacttgttgcaatgaaggagactgcacacaatagga

SEQ ID NO: 13006 - DNA, 122 bp, Homo sapiens
  misc_feature (61)..(62): /note="This region represents a CpG dinucleotide"
  misc_feature (61)..(61): /note="Nucleotide may be methylated to form 5-methylcytosine"
tgtccagccacagctgtagcttgaaggcttgaagttcaatgggacccacttctgcttccacgctttctttcctttaattttaatttttatttatttgagacagggtctggctctgtcaccaa

SEQ ID NO: 13007 - DNA, 122 bp, Homo sapiens
  misc_feature (61)..(62): /note="This region represents a CpG dinucleotide"
  misc_feature (61)..(61): /note="Nucleotide may be methylated to form 5-methylcytosine"
tttttcatctttctaaacagctctgagttcagatcctgtcaaggttaccttcctatgattcgtgaagatgtcatcctaaaatataaaaggaaagtacattggtaaaaagtcaacctttgaat

SEQ ID NO: 13008 - DNA, 122 bp, Homo sapiens
  misc_feature (61)..(62): /note="This region represents a CpG dinucleotide"
  misc_feature (61)..(61): /note="Nucleotide may be methylated to form 5-methylcytosine"
aggaaagatctaaaatcaacattctagcatcacaattaaaataactagagaggctgggcacggtggctcacgcctgtaatcccagcactttgggaggccgaggcgggcggatcacgaggtca

SEQ ID NO: 13009 - DNA, 122 bp, Homo sapiens
  misc_feature (61)..(62): /note="This region represents a CpG dinucleotide"
  misc_feature (61)..(61): /note="Nucleotide may be methylated to form 5-methylcytosine"
cttactcatgggcagtacagggagtcagttctagtgagcagaatgtcatgtgttctctctcggcactttgcaaactatcgcgagtcatgctacagttttttctttctttttaaatttccaac

SEQ ID NO: 13010 - DNA, 122 bp, Homo sapiens
  misc_feature (61)..(62): /note="This region represents a CpG dinucleotide"
  misc_feature (61)..(61): /note="Nucleotide may be methylated to form 5-methylcytosine"
agctggtagtggagactcccttgtttgaagctctgactttttttccagtggcctttaaatcgctcacgtggaatcacacaacatgattaattcacttaacaaactcaatgactcatcatcag

SEQ ID NO: 13011 - DNA, 122 bp, Homo sapiens
  misc_feature (61)..(62): /note="This region represents a CpG dinucleotide"
  misc_feature (61)..(61): /note="Nucleotide may be methylated to form 5-methylcytosine"
attaaagctgagtgttttcttggaaaatgtcctgcatgtgttgaaattaaaagcctttggcgaaggctttaagctcacagtgaattctggtgtgttacctgcacctgccagcagccttgctt

SEQ ID NO: 13012 - DNA, 122 bp, Homo sapiens
  misc_feature (61)..(62): /note="This region represents a CpG dinucleotide"
  misc_feature (61)..(61): /note="Nucleotide may be methylated to form 5-methylcytosine"
tgaggagattcaaacacagatctgcccattgcctgagtctgtgattttttttcattacatcgtgctgctcccttatttccagaggtgttctgagctgattggggcatgggccaggtcaaggt

SEQ ID NO: 13013 - DNA, 122 bp, Homo sapiens
  misc_feature (61)..(62): /note="This region represents a CpG dinucleotide"
  misc_feature (61)..(61): /note="Nucleotide may be methylated to form 5-methylcytosine"
aaaaaaaaaaaaaaacagattctgttggtacagtgtatttatacaaatgaccctaccttacgtggaaaacctgaatgtctgagggtaagatatgtttgccctagctccacttgtgattacag

SEQ ID NO: 13014 - DNA, 122 bp, Homo sapiens
  misc_feature (61)..(62): /note="This region represents a CpG dinucleotide"
  misc_feature (61)..(61): /note="Nucleotide may be methylated to form 5-methylcytosine"
tttttatttattgctgcattgattaatgttttgtaagggttttgtgttgatattcatgagcgatttggtctatagttttttgttcttagagtgtgtttgccagaatttggtatctgtgatta

SEQ ID NO: 13015 - DNA, 122 bp, Homo sapiens
  misc_feature (61)..(62): /note="This region represents a CpG dinucleotide"
  misc_feature (61)..(61): /note="Nucleotide may be methylated to form 5-methylcytosine"
taggccttcaggagtcctcgtgttacacactcaacgcctaatggagactggattcatttacgtgtattaatgtaacctgcgtgatcatgtgagtgcaagtgctttgtagattgtcctgggag

SEQ ID NO: 13016 - DNA, 122 bp, Homo sapiens
  misc_feature (61)..(62): /note="This region represents a CpG dinucleotide"
  misc_feature (61)..(61): /note="Nucleotide may be methylated to form 5-methylcytosine"
ttttcataaagcagaaaccttctcatactctttcacctggtcttcaaggctctccctattcgaccccacacccacaccaacaagagtgatcacacatgagtcacaccttcatgttactgtgc

SEQ ID NO: 13017 - DNA, 122 bp, Homo sapiens
  misc_feature (61)..(62): /note="This region represents a CpG dinucleotide"
  misc_feature (61)..(61): /note="Nucleotide may be methylated to form 5-methylcytosine"
agcaccttgggagtgagaagcagtgaggctgttttactgccctgagtcgaaatgaaacctcgtatcagcccccatttccttataaatggaggaggttccagctagaatcctgcttagagcag

SEQ ID NO: 13018 - DNA, 122 bp, Homo sapiens
  misc_feature (61)..(62): /note="This region represents a CpG dinucleotide"
  misc_feature (61)..(61): /note="Nucleotide may be methylated to form 5-methylcytosine"
gaagttagcttctcgtctcacaattttacttttgaaaccatctttcctcaaccaaaatagcgcctggggttgttttgcaaaacaaaacagttttcggcctctgctgactgtaaaaaataact

SEQ ID NO: 13019 - DNA, 122 bp, Homo sapiens
  misc_feature (61)..(62): /note="This region represents a CpG dinucleotide"
  misc_feature (61)..(61): /note="Nucleotide may be methylated to form 5-methylcytosine"
tgttgtcaatttttactgcagaggatatgacttagaaccacacctctaccccctggtgcccgtcatcaacaggtgaggcccacctgacagatgggggaaggcagagaagtacagccctgaca

SEQ ID NO: 13020 - DNA, 122 bp, Homo sapiens
  misc_feature (61)..(62): /note="This region represents a CpG dinucleotide"
  misc_feature (61)..(61): /note="Nucleotide may be methylated to form 5-methylcytosine"
caccctccttctctctcctgccctttccccgttgccccacagggagccaggtgtgccgcccgcctctgcttcatggatccctaccctggctggacggcggcaaagccctgggcagccaccac

SEQ ID NO: 13021 - DNA, 122 bp, Homo sapiens
  misc_feature (61)..(62): /note="This region represents a CpG dinucleotide"
  misc_feature (61)..(61): /note="Nucleotide may be methylated to form 5-methylcytosine"
ttcttcctgtgcctttgctttgcttatctcccaccctacacgggcctgtgagtgacaggccgaggtcagcccaggcccttctccttggggcccctttgacatcacggcagcatttaacattc

SEQ ID NO: 13022 - DNA, 122 bp, Homo sapiens
  misc_feature (61)..(62): /note="This region represents a CpG dinucleotide"
  misc_feature (61)..(61): /note="Nucleotide may be methylated to form 5-methylcytosine"
ggggatttatagccaaggagcagcatgagggctggaggatggaacatttctaagaggagacgtcaaggcgaggcctctgcttgctgaaagcaggcccaggacttacacagtcaacccttgaa

SEQ ID NO: 13023 - DNA, 122 bp, Homo sapiens
  misc_feature (61)..(62): /note="This region represents a CpG dinucleotide"
  misc_feature (61)..(61): /note="Nucleotide may be methylated to form 5-methylcytosine"
caaagccttcagagtgacagattataccgaatttattgcataaaagggtcagtaagcacccgcgggtctcgaaccccagcacagagatggacagatagaaagtccggcatgaggaggtaacc

SEQ ID NO: 13024 - DNA, 122 bp, Homo sapiens
  misc_feature (61)..(62): /note="This region represents a CpG dinucleotide"
  misc_feature (61)..(61): /note="Nucleotide may be methylated to form 5-methylcytosine"
tttgagcaggtttagtttcagatgagttcagcttagtagctccctttgtcttctgagagtcgtcatctgaatgatggaggctctgctgtgtcagtaaggctggcatgcccttgagaggtctt

SEQ ID NO: 13025 - DNA, 122 bp, Homo sapiens
  misc_feature (61)..(62): /note="This region represents a CpG dinucleotide"
  misc_feature (61)..(61): /note="Nucleotide may be methylated to form 5-methylcytosine"
gggtatttcacaagggctcccacagtgagccaccccgggcctgcccaacgtgaaggctggcggagtcagcccctccgagctgcagcctgctctctggtccctgccccgggtgagtgcccaca

SEQ ID NO: 13026 - DNA, 122 bp, Homo sapiens
  misc_feature (61)..(62): /note="This region represents a CpG dinucleotide"
  misc_feature (61)..(61): /note="Nucleotide may be methylated to form 5-methylcytosine"
gttgacagagagactccagctcaaaaaaaaaaaaaaaaaaaaaaaaaaaaatctgacctacgttatttgacttaggtcataaaacctccattccagagagggtcctgccccacaccagaagg

SEQ ID NO: 13027 - DNA, 122 bp, Homo sapiens
  misc_feature (61)..(62): /note="This region represents a CpG dinucleotide"
  misc_feature (61)..(61): /note="Nucleotide may be methylated to form 5-methylcytosine"
gtcactagataggtgttcaaacaaaacgccagcagcaccaccatgatcctgctttcctaacggagccttgtggcgtctgcaattccacttctgggcagttatccaagagcaattaaaacatg

SEQ ID NO: 13028 - DNA, 122 bp, Homo sapiens
  misc_feature (61)..(62): /note="This region represents a CpG dinucleotide"
  misc_feature (61)..(61): /note="Nucleotide may be methylated to form 5-methylcytosine"
acaaatgtgttcttcctttaaaatgtaaacaatgagccaatcttagaagcaaacattgaccgcagagtcatatcaagtccgttgttataagtactttagttttaacagtgcagaaacgtgaa

SEQ ID NO: 13029 - DNA, 122 bp, Homo sapiens
  misc_feature (61)..(62): /note="This region represents a CpG dinucleotide"
  misc_feature (61)..(61): /note="Nucleotide may be methylated to form 5-methylcytosine"
caccgagcctgctgtgttctcatcagtgcatagtcttattctgtcccaggcataggctctcgctgtttgttctctcatcccttctgataatcagaaagactcatcccttctgataattcagt

SEQ ID NO: 13030 - DNA, 122 bp, Homo sapiens
  misc_feature (61)..(62): /note="This region represents a CpG dinucleotide"
  misc_feature (61)..(61): /note="Nucleotide may be methylated to form 5-methylcytosine"
acagcaacctacatttattgagagtttactatatgctcggcactacactaatcctttatccgggttatctcatttaatctttacactctctgaggtagacaaacctacattttccagatgag

SEQ ID NO: 13031 - DNA, 122 bp, Homo sapiens
  misc_feature (61)..(62): /note="This region represents a CpG dinucleotide"
  misc_feature (61)..(61): /note="Nucleotide may be methylated to form 5-methylcytosine"
ccagccccagagccacaccccctctatctgtcctacacacccccagaggcaaaattcctccgcccagggccaggtcccagtcaattagggaccaacctataccccaaagccactgaaattat

SEQ ID NO: 13032 - DNA, 122 bp, Homo sapiens
  misc_feature (61)..(62): /note="This region represents a CpG dinucleotide"
  misc_feature (61)..(61): /note="Nucleotide may be methylated to form 5-methylcytosine"
ttttacactttttatatcactatattacatggagtaaagtgtggagttttaggtcaagtacgtagataaatgctggcttacaaacagaaaatacacaaagcatttatataacaaagtagata

SEQ ID NO: 13033 - DNA, 122 bp, Homo sapiens
  misc_feature (61)..(62): /note="This region represents a CpG dinucleotide"
  misc_feature (61)..(61): /note="Nucleotide may be methylated to form 5-methylcytosine"
ttcaccctcaccctgacaagggacctgcagctgtggcacccagtagtgtctaatgacatccgtcaactctggacatgaatgcctgcgatcctgagaacgagttaaatgactaatcactccta

SEQ ID NO: 13034 - DNA, 122 bp, Homo sapiens
  misc_feature (61)..(62): /note="This region represents a CpG dinucleotide"
  misc_feature (61)..(61): /note="Nucleotide may be methylated to form 5-methylcytosine"
agctaatggaatatccatagaccctactatactaaattttaaactctaggcactgcaaaacgagaatactatccacttcttcacacacatttgtagccacctttacattagaggcaccatct

SEQ ID NO: 13035 - DNA, 122 bp, Homo sapiens
  misc_feature (61)..(62): /note="This region represents a CpG dinucleotide"
  misc_feature (61)..(61): /note="Nucleotide may be methylated to form 5-methylcytosine"
taggccagaaagtctttatatcaaattgtcagtctttgcctttgctaggtttgcccaggacgtaaaagacccacctgttcacaaagctaggagcccctgaaaataggtgcacaggccaggag

SEQ ID NO: 13036 - DNA, 122 bp, Homo sapiens
  misc_feature (61)..(62): /note="This region represents a CpG dinucleotide"
  misc_feature (61)..(61): /note="Nucleotide may be methylated to form 5-methylcytosine"
tggggatttataaacaaggagttgggtggggccaggggatggaaaatcacaaagaagaaacgtcaaggattagctgtttctggctacccagacttaatgggattactgctgaaggcaggcca

SEQ ID NO: 13037 - DNA, 122 bp, Homo sapiens
  misc_feature (61)..(62): /note="This region represents a CpG dinucleotide"
  misc_feature (61)..(61): /note="Nucleotide may be methylated to form 5-methylcytosine"
caagtgagagtaatgacgtgagctaatccaatttgaagtataaacaaagaaatttcttcacgcaaagagactgacttattttgtttcagaactaaataccacgcagtagaggttaggtcagg

SEQ ID NO: 13038 - DNA, 122 bp, Homo sapiens
  misc_feature (61)..(62): /note="This region represents a CpG dinucleotide"
  misc_feature (61)..(61): /note="Nucleotide may be methylated to form 5-methylcytosine"
cagctaatgaacatttaaatacactactttatgcaggcatggtttcacttctcttaaatacgtacataagaggaggacaggtcatatgagaagtgtatgtttaaatttataaaatactgcca

SEQ ID NO: 13039 - DNA, 122 bp, Homo sapiens
  misc_feature (61)..(62): /note="This region represents a CpG dinucleotide"
  misc_feature (61)..(61): /note="Nucleotide may be methylated to form 5-methylcytosine"
gccgagtcaacacctgcagcaaacccctggtggtgttctgggagttagaagaccacacaacgtcaggacacatttgcactttaggtgaattaatccagccatgcctgcgggagatgcattta

SEQ ID NO: 13040 - DNA, 122 bp, Homo sapiens
  misc_feature (61)..(62): /note="This region represents a CpG dinucleotide"
  misc_feature (61)..(61): /note="Nucleotide may be methylated to form 5-methylcytosine"
tacagctgtttttctctcaacctctgtgctggtggctaaatatttacttttctctgttaacggaaggagccagataagattttaagagtctgagacttttgcccctaggacccactgtcaaa

SEQ ID NO: 13041 - DNA, 122 bp, Homo sapiens
  misc_feature (61)..(62): /note="This region represents a CpG dinucleotide"
  misc_feature (61)..(61): /note="Nucleotide may be methylated to form 5-methylcytosine"
actgactcagcagtatctcttgctgcagttattggcacatgatattgactgggaagtgtacggactggtaatctaacgtctttagagagagtcacattgtcaagcctggctggcaatggcct

SEQ ID NO: 13042 - DNA, 122 bp, Homo sapiens
  misc_feature (61)..(62): /note="This region represents a CpG dinucleotide"
  misc_feature (61)..(61): /note="Nucleotide may be methylated to form 5-methylcytosine"
gcttcagtcctcatagagtaacttatctattccaagatttcattattattttatagttctcgaacacaccaagagtgctgcccggcggtacctcacacattctgcaactaactaaaacaaag

SEQ ID NO: 13043 - DNA, 122 bp, Homo sapiens
  misc_feature (61)..(62): /note="This region represents a CpG dinucleotide"
  misc_feature (61)..(61): /note="Nucleotide may be methylated to form 5-methylcytosine"
attcccttgtctattacttgagtggccagacaccaggaggcagcaagtagatttctccaccgcctctgactactgaagccctgggagttgcttaagcttatctactaaccaccttgacaggc

SEQ ID NO: 13044 - DNA, 122 bp, Homo sapiens
  misc_feature (61)..(62): /note="This region represents a CpG dinucleotide"
  misc_feature (61)..(61): /note="Nucleotide may be methylated to form 5-methylcytosine"
gctctaaaaaagtagaagtaaatacatttttaattgactagaatgttttaaatgatctcccgtgtgtcatctacttgttcaaaatataaattacactggcagtttttgggtgtgtaatctac

SEQ ID NO: 13045 - DNA, 122 bp, Homo sapiens
  misc_feature (61)..(62): /note="This region represents a CpG dinucleotide"
  misc_feature (61)..(61): /note="Nucleotide may be methylated to form 5-methylcytosine"
tgaataatttttcccagctttattgagctataaattgataaaatagcatgcatttaagtacggtgtaccacatgatctgatacatgtatacattgtgaaggattagcacaatcaagctaatt

SEQ ID NO: 13046 - DNA, 122 bp, Homo sapiens
  misc_feature (61)..(62): /note="This region represents a CpG dinucleotide"
  misc_feature (61)..(61): /note="Nucleotide may be methylated to form 5-methylcytosine"
accatgaggaagcccaaatcaactcatatagagtgactatgatggcgaggatcaagatttcgggaagaaaaacagttaagttttcaacgatgtatgaatctctctctccaagcaggactata

SEQ ID NO: 13047 - DNA, 122 bp, Homo sapiens
  misc_feature (61)..(62): /note="This region represents a CpG dinucleotide"
  misc_feature (61)..(61): /note="Nucleotide may be methylated to form 5-methylcytosine"
cactgaaataacaatggccagccttaatctcacctttataacatgatttcatttaatcttcgcaacaactctacaaagcaatatagatatggaatccgaggcttagagttcacacagacagt

SEQ ID NO: 13048 - DNA, 122 bp, Homo sapiens
  misc_feature (61)..(62): /note="This region represents a CpG dinucleotide"
  misc_feature (61)..(61): /note="Nucleotide may be methylated to form 5-methylcytosine"
cctgctgagtgcaagaagccacaccttgacaatgtatcaagccctgaatataggacactgcgtgaaagcctctgtgcaagtgtcatgtgtatgtgtgttgtattcatgtgtcatgtgtaggg

SEQ ID NO: 13049 - DNA, 122 bp, Homo sapiens
  misc_feature (61)..(62): /note="This region represents a CpG dinucleotide"
  misc_feature (61)..(61): /note="Nucleotide may be methylated to form 5-methylcytosine"
ggcccaatgaatgtgggctatttagacactcaggaagtgaactgacttcttcccatttgccgtgagacttggatcatgaggctatgactagaaataggaggggagcaggaagtagggcacag

SEQ ID NO: 13050 - DNA, 122 bp, Homo sapiens
  misc_feature (61)..(62): /note="This region represents a CpG dinucleotide"
  misc_feature (61)..(61): /note="Nucleotide may be methylated to form 5-methylcytosine"
gtataacaggggtggttgcgggtgcattcctgtaggcattatctttcttctgaggtcctccgcctcttatctgcctaaccagcccctgtctcctctctcacagtcatgtggggagtccaggg

SEQ ID NO: 13051 - DNA, 122 bp, Homo sapiens
  misc_feature (61)..(62): /note="This region represents a CpG dinucleotide"
  misc_feature (61)..(61): /note="Nucleotide may be methylated to form 5-methylcytosine"
acaggcctgagccactacacttgacagaggtaaggcttcttctattgtcttcataaaatacgcagcatagtaccctggggctatgaaatccacaaaagctgactcagcatggactttccaaa

SEQ ID NO: 13052 - DNA, 122 bp, Homo sapiens
  misc_feature (61)..(62): /note="This region represents a CpG dinucleotide"
  misc_feature (61)..(61): /note="Nucleotide may be methylated to form 5-methylcytosine"
gtggcattaaaagccctgcagaccatatgatcatggaatgacccttacccaagcagaaatcgcaatctctctcgagttgtgaatgttgtcattgacctatgtgaaactgacatctttattct

SEQ ID NO: 13053 - DNA, 122 bp, Homo sapiens
  misc_feature (61)..(62): /note="This region represents a CpG dinucleotide"
  misc_feature (61)..(61): /note="Nucleotide may be methylated to form 5-methylcytosine"
ccctgaacaagttcctgcctggctcccggttgcttgtgtaaaactcaaagtttggctcttcgtttcccggggaaagtttttatcttttacatgtttgggggtgattgtgaaactgcgtattt

SEQ ID NO: 13054 - DNA, 122 bp, Homo sapiens
  misc_feature (61)..(62): /note="This region represents a CpG dinucleotide"
  misc_feature (61)..(61): /note="Nucleotide may be methylated to form 5-methylcytosine"
ccctcaggagaatgtaaacgcatcaagaggatcttgtctttcactaattgtattttcaggcggggcccagaggctcacgcctgtaatccctgcactttggaaagctgaggggtggatcactt

SEQ ID NO: 13055 - DNA, 122 bp, Homo sapiens
  misc_feature (61)..(62): /note="This region represents a CpG dinucleotide"
  misc_feature (61)..(61): /note="Nucleotide may be methylated to form 5-methylcytosine"
gcacagcctgcaagacttcatggcatttggtcacagtccttctgtcctgatgacatcaggcgaaagaagtgccacagtgtttccctggggcctgaagagtattaatcacacagtcagatgtt

SEQ ID NO: 13056 - DNA, 122 bp, Homo sapiens
  misc_feature (61)..(62): /note="This region represents a CpG dinucleotide"
  misc_feature (61)..(61): /note="Nucleotide may be methylated to form 5-methylcytosine"
acactttctgtgaactctcccagaaatacctgcttggggctttgatcctcttctgaaggccgctctggctaggtttttctctgataccaaatgactccctcatcccctgtgggacaatttcc

SEQ ID NO: 13057 - DNA, 122 bp, Homo sapiens
  misc_feature (61)..(62): /note="This region represents a CpG dinucleotide"
  misc_feature (61)..(61): /note="Nucleotide may be methylated to form 5-methylcytosine"
gatttgccatcttgggaccacctttcagccaaaaaggtggtgacttctggcctttctggccgtcctgttggcacaacaaagttggtgaggggaggagactgggaagggaaagaaaactgcta

SEQ ID NO: 13058 - DNA, 122 bp, Homo sapiens
  misc_feature (61)..(62): /note="This region represents a CpG dinucleotide"
  misc_feature (61)..(61): /note="Nucleotide may be methylated to form 5-methylcytosine"
cttgttagaaacatttttgtgtttcctttgcagcagcttttcctcctcatagctgtcctgcgtctgacatcaggtttccttgtttgcaggcctgccctgctccaggtactgacccagaaaga

SEQ ID NO: 13059 - DNA, 122 bp, Homo sapiens
  misc_feature (61)..(62): /note="This region represents a CpG dinucleotide"
  misc_feature (61)..(61): /note="Nucleotide may be methylated to form 5-methylcytosine"
acccccatgcacacccaagttggtttatatgtccagatacagacccttgcttggtggccccgggtaagcaccttcccaggctggagcactcacagtttgacggctgatgtaaagggtgagca

SEQ ID NO: 13060 - DNA, 122 bp, Homo sapiens
  misc_feature (61)..(62): /note="This region represents a CpG dinucleotide"
  misc_feature (61)..(61): /note="Nucleotide may be methylated to form 5-methylcytosine"
acatgtgatacatgctagtaggtgcaaaagacagtatctccttgtcactcattttcatatcgattatatagccatgaaaatcacaattagatgtgactgaagacctagctaacttgcttcat

SEQ ID NO: 13061 - DNA, 122 bp, Homo sapiens
  misc_feature (61)..(62): /note="This region represents a CpG dinucleotide"
  misc_feature (61)..(61): /note="Nucleotide may be methylated to form 5-methylcytosine"
atcaaaatgagttcagcataatattcattcatttgttcattcattcaagaaatgttctgacgtgtcctgggccctgaggtagggcaaaagataaactaaagtaaatgtgacacatttcctac

SEQ ID NO: 13062 - DNA, 122 bp, Homo sapiens
  misc_feature (61)..(62): /note="This region represents a CpG dinucleotide"
  misc_feature (61)..(61): /note="Nucleotide may be methylated to form 5-methylcytosine"
ccctcagaaaaggaactagatgctgcagttccttgtcagaagtaaacttggagcgaaacacgcctttaggaggggtaaccaggctgctttcctctatttttaaagctgtagtatgaagccaa

SEQ ID NO: 13063 - DNA, 122 bp, Homo sapiens
  misc_feature (61)..(62): /note="This region represents a CpG dinucleotide"
  misc_feature (61)..(61): /note="Nucleotide may be methylated to form 5-methylcytosine"
ttggcctaaagctgcctccataaatagcaagccacaacctaacttagtgtgtaaacaaaccgtaacctaactaagagtatattcttgtaacaagtagctgggtctctgccaatcataacagg

SEQ ID NO: 13064 - DNA, 122 bp, Homo sapiens
  misc_feature (61)..(62): /note="This region represents a CpG dinucleotide"
  misc_feature (61)..(61): /note="Nucleotide may be methylated to form 5-methylcytosine"
cagagcagaatgcctgccctccaaccaggacccatgctgcagaaaccctctgggaaaaaccgatctgttacaggacccctgggcatttcctaggcaccaccccaattaagtatttcctagag

SEQ ID NO: 13065 - DNA, 122 bp, Homo sapiens
  misc_feature (61)..(62): /note="This region represents a CpG dinucleotide"
  misc_feature (61)..(61): /note="Nucleotide may be methylated to form 5-methylcytosine"
cgccacactacctccacgtactcattcagcaaacatttatgttacagctactatgagtcacgtgctgtttcagatgctggagaaacagtgaagatgaagacaaaatccctctgagaatggag

SEQ ID NO: 13066 - DNA, 122 bp, Homo sapiens
  misc_feature (61)..(62): /note="This region represents a CpG dinucleotide"
  misc_feature (61)..(61): /note="Nucleotide may be methylated to form 5-methylcytosine"
taatataaatgaactcaagaactgcaagagctcttggcacactgagtttatgggctgcaccgcatgtccatcacatactcgtatttttttcatagttgagccaatggtatgacaaccatggg

SEQ ID NO: 13067 - DNA, 122 bp, Homo sapiens
  misc_feature (61)..(62): /note="This region represents a CpG dinucleotide"
  misc_feature (61)..(61): /note="Nucleotide may be methylated to form 5-methylcytosine"
aaatatgactgcctgactctcctgcttaaaactcctcaatgagttctcagagtccttgctcgtgcaatgcttggaatgtaataaggaagacagacagcatgagatagcatgcaaggacacag

SEQ ID NO: 13068 - DNA, 122 bp, Homo sapiens
  misc_feature (61)..(62): /note="This region represents a CpG dinucleotide"
  misc_feature (61)..(61): /note="Nucleotide may be methylated to form 5-methylcytosine"
caccctctctcagcctcagccttctggagtgcatcacgggatgataacagtgtctgcctccggagttgctgtgaggactgagtgagtaactatgcatagagaattcagctttgtacccggta

SEQ ID NO: 13069 - DNA, 122 bp, Homo sapiens
  misc_feature (61)..(62): /note="This region represents a CpG dinucleotide"
  misc_feature (61)..(61): /note="Nucleotide may be methylated to form 5-methylcytosine"
gctcaggcccaccctgtgctgtgcaggttgggaaaccgagggcagacggttcaagccttgcgcagggtcacatgctgggccctggcccccatccagaccttgttgctttcaccagagggcag

SEQ ID NO: 13070 - DNA, 122 bp, Homo sapiens
  misc_feature (61)..(62): /note="This region represents a CpG dinucleotide"
  misc_feature (61)..(61): /note="Nucleotide may be methylated to form 5-methylcytosine"
gtgggtgagccttgcgcccaggaggctagagatgcaggagccccagaacctgcggtgcagcgagtgcacatgcgcatagacggggcccaggagctgaccctggccctcccgttcgcttccgg

SEQ ID NO: 13071 - DNA, 122 bp, Homo sapiens
  misc_feature (61)..(62): /note="This region represents a CpG dinucleotide"
  misc_feature (61)..(61): /note="Nucleotide may be methylated to form 5-methylcytosine"
ggaaatgtcactaacctactttgagacgcccagatccagggccaaaggaggctgggctatcgctagaattttacagctctccttcccgaggatgtggctaaaagcaattagggcttggcctg

SEQ ID NO: 13072 - DNA, 122 bp, Homo sapiens
  misc_feature (61)..(62): /note="This region represents a CpG dinucleotide"
  misc_feature (61)..(61): /note="Nucleotide may be methylated to form 5-methylcytosine"
tgatgcaattgaaagaaaggtcttgaaccaaagcctttataagtaagctgtttttataagcgagccattcacccaagtaagcagactattgtgcttgggggaaaaaatgatctgtggaaatt

SEQ ID NO: 13073 - DNA, 122 bp, Homo sapiens
  misc_feature (61)..(62): /note="This region represents a CpG dinucleotide"
  misc_feature (61)..(61): /note="Nucleotide may be methylated to form 5-methylcytosine"
gaagcatagagaagttcaactcatccaagttcccaaagaaactgaacagggatctgaatacgggcaggtctgtccagctgcagagcccagagcccttgatgccacctaaaactgcctcccgg

SEQ ID NO: 13074 - DNA, 122 bp, Homo sapiens
  misc_feature (61)..(62): /note="This region represents a CpG dinucleotide"
  misc_feature (61)..(61): /note="Nucleotide may be methylated to form 5-methylcytosine"
gctttaaagagatttgtttcagttccttgtttgagggaggtaatgggccagcctaagaatcgaaagtgacaatgaaatatgaatgtaaaagaggaagggagacagacctctggcttgttagt

SEQ ID NO: 13075 - DNA, 122 bp, Homo sapiens
  misc_feature (61)..(62): /note="This region represents a CpG dinucleotide"
  misc_feature (61)..(61): /note="Nucleotide may be methylated to form 5-methylcytosine"
gcgctcctgctctggggcggaagcctgtgctcggtgtgtcctgagcgccccctgcagccccgccccgcccctgcagggaggttcctgtctgagctcacagagtatattcctaccagtgtctc

SEQ ID NO: 13076 - DNA, 122 bp, Homo sapiens
  misc_feature (61)..(62): /note="This region represents a CpG dinucleotide"
  misc_feature (61)..(61): /note="Nucleotide may be methylated to form 5-methylcytosine"
gatactgcagatgtcttcctatctttcttgctagctgaagacgacttcgggcttgattttcgcttcggagatttgctagactttcttagagaaggtgacggggacaattttgatctaaccac

SEQ ID NO: 13077 - DNA, 122 bp, Homo sapiens
  misc_feature (61)..(62): /note="This region represents a CpG dinucleotide"
  misc_feature (61)..(61): /note="Nucleotide may be methylated to form 5-methylcytosine"
ggggaagggtgcagccaagttgagagtctgcagcagctcagataaggttcacaagaaaggcgaggagtgaggaggagagaatgcagccttcagagaaccagaatcacccccttgcagaaaag

SEQ ID NO: 13078 - DNA, 122 bp, Homo sapiens
  misc_feature (61)..(62): /note="This region represents a CpG dinucleotide"
  misc_feature (61)..(61): /note="Nucleotide may be methylated to form 5-methylcytosine"
atcctccagaacccttcagtaatcaaaataaataatagttcaatgcaatatatcttatctcgattataagataatcaagccatttatctggattgctgagtcttttggtgcccccttatttt

SEQ ID NO: 13079 - DNA, 122 bp, Homo sapiens
  misc_feature (61)..(62): /note="This region represents a CpG dinucleotide"
  misc_feature (61)..(61): /note="Nucleotide may be methylated to form 5-methylcytosine"
gccccgggtctgacgggggagtgcccgtggctcggggtaagtgggccaggcccggggacgcgggcaccttgctgctggccctcggccccacgcacctgcccttggctgccggcctggccctg

SEQ ID NO: 13080 - DNA, 122 bp, Homo sapiens
  misc_feature (61)..(62): /note="This region represents a CpG dinucleotide"
  misc_feature (61)..(61): /note="Nucleotide may be methylated to form 5-methylcytosine"
ccattttagagactgaattttaaattcctgttttcatcatctttgcatctaaataacaatcgctaccctacaaccctttatagtctacctttgttgcttgcctgtcaaatacaatactgcta

SEQ ID NO: 13081 - DNA, 122 bp, Homo sapiens
  misc_feature (61)..(62): /note="This region represents a CpG dinucleotide"
  misc_feature (61)..(61): /note="Nucleotide may be methylated to form 5-methylcytosine"
atacacaccctacggatagggccgtgagctgtgcagggtctgaatgaccacagggcgtcccgggaatcacagtcgctgggtgagaaagtggccgcagtacccgggtgcaaggcagggaatgg

SEQ ID NO: 13082 - DNA, 122 bp, Homo sapiens
  misc_feature (61)..(62): /note="This region represents a CpG dinucleotide"
  misc_feature (61)..(61): /note="Nucleotide may be methylated to form 5-methylcytosine"
gactgagctcactggcaggaaagggagcagccttaattggtactggccctgccttggccccgtgacactcattaccacaggctgcccaggaggatgacccgtgcatttgggctgtaagcaat

SEQ ID NO: 13083 - DNA, 122 bp, Homo sapiens
  misc_feature (61)..(62): /note="This region represents a CpG dinucleotide"
  misc_feature (61)..(61): /note="Nucleotide may be methylated to form 5-methylcytosine"
ttctctgaatttacaaccctggagacaattttggtttattttgctgccctgaaagaggcccgaggcagtttgttatcttaacccctatgcatagtgacaccaagcagaattccagacatttc

SEQ ID NO: 13084 - DNA, 122 bp, Homo sapiens
  misc_feature (61)..(62): /note="This region represents a CpG dinucleotide"
  misc_feature (61)..(61): /note="Nucleotide may be methylated to form 5-methylcytosine"
tgttcattgatgttggtgatgcctgtgagtcaccaccgccccctccctgccccaacagaccgttcccatgtggacaagagctaggagctagatttgtctctgtaaaaggtcaggtcactgga

SEQ ID NO: 13085 - DNA, 122 bp, Homo sapiens
  misc_feature (61)..(62): /note="This region represents a CpG dinucleotide"
  misc_feature (61)..(61): /note="Nucleotide may be methylated to form 5-methylcytosine"
cctactgacagtacttcctaagagaaacttccttactcctgtacctcccctcagtagtcacgactggctagattaggaatggctacctgactcaagggtgagccattaatcagctttccagt

SEQ ID NO: 13086 - DNA, 122 bp, Homo sapiens
  misc_feature (61)..(62): /note="This region represents a CpG dinucleotide"
  misc_feature (61)..(61): /note="Nucleotide may be methylated to form 5-methylcytosine"
gccccctataggacatcgtgggaatgtgtgtgggtgatctggatgtcacagtgacccagacgaggcttttactgggggaagaggggaaggcaggggtgctagatataatgcttggggaacaa

SEQ ID NO: 13087 - DNA, 122 bp, Homo sapiens
  misc_feature (61)..(62): /note="This region represents a CpG dinucleotide"
  misc_feature (61)..(61): /note="Nucleotide may be methylated to form 5-methylcytosine"
agagtaaatgacactacaatacagtgctgggctcacagctccggaaatgctcataggctccggaaatgctcagtcaccttctctgttagtcaccttgttccatcaagcagcattttttcctc

SEQ ID NO: 13088 - DNA, 122 bp, Homo sapiens
  misc_feature (61)..(62): /note="This region represents a CpG dinucleotide"
  misc_feature (61)..(61): /note="Nucleotide may be methylated to form 5-methylcytosine"
accccatcccaatctgatttttgagacgtgcattttcaggtagtcctaaactgtgaacagcgagctttgtgtgttatctagtgggggtggggatgaaaggggaggagactcccactgcccgt

SEQ ID NO: 13089 - DNA, 122 bp, Homo sapiens
  misc_feature (61)..(62): /note="This region represents a CpG dinucleotide"
  misc_feature (61)..(61): /note="Nucleotide may be methylated to form 5-methylcytosine"
ccactggtcagaaactttgtttatacagctgatcaagttaatggttcatctcctctgctccgcaggcactccaattctaccgtcatcataactaggactggttattttgtttggcagagtta

SEQ ID NO: 13090 - DNA, 122 bp, Homo sapiens
  misc_feature (61)..(62): /note="This region represents a CpG dinucleotide"
  misc_feature (61)..(61): /note="Nucleotide may be methylated to form 5-methylcytosine"
tatattaattttcttgactctagtaaccattttaccacgcatatgtataccaaaacatcacgttgcacaccttaaatacatataatttttaaagcggagaaagtgttaagcctaaggtcaac

SEQ ID NO: 13091 - DNA, 122 bp, Homo sapiens
  misc_feature (61)..(62): /note="This region represents a CpG dinucleotide"
  misc_feature (61)..(61): /note="Nucleotide may be methylated to form 5-methylcytosine"
cccaagtctgacaggctattaaacactcaagtggagatgtgaagtagacagtaggatagacgtctgaagctcaggggacaggccaagactgcagatataaatttaagagtcgactgcatgta

SEQ ID NO: 13092 - DNA, 122 bp, Homo sapiens
  misc_feature (61)..(62): /note="This region represents a CpG dinucleotide"
  misc_feature (61)..(61): /note="Nucleotide may be methylated to form 5-methylcytosine"
gggcttctcagaattcgcatgagaagagctgtgtgtggctagatggataagctgcctgggcggggaatgatagcccactagaagcatgcatcaattatgatgtatttggttattagaattga

SEQ ID NO: 13093 - DNA, 122 bp, Homo sapiens
  misc_feature (61)..(62): /note="This region represents a CpG dinucleotide"
  misc_feature (61)..(61): /note="Nucleotide may be methylated to form 5-methylcytosine"
acagtcattcaaccaacaaagaagcctggctggccagcctcagatgtacttcattcctcacgagtgtggatgtggaaaatatatatacacatgactcactattctcttgctcaagttaccat

SEQ ID NO: 13094 - DNA, 122 bp, Homo sapiens
  misc_feature (61)..(62): /note="This region represents a CpG dinucleotide"
  misc_feature (61)..(61): /note="Nucleotide may be methylated to form 5-methylcytosine"
attgatgactctgcttttaaagagtcatgaattacaatactgaggaaatcaacaaaaactcgtgaactgttcaagtaaatgtgaatttgataaagctgtgtgttctctgtccttcatggaaa

SEQ ID NO: 13095 - DNA, 122 bp, Homo sapiens
  misc_feature (61)..(62): /note="This region represents a CpG dinucleotide"
  misc_feature (61)..(61): /note="Nucleotide may be methylated to form 5-methylcytosine"
atgaattcaaaattccataattccgtaagaattaaagatacattacctctctaggaaagacgaactaaagatggctgccttcgcaacagaatctgtggagtgcccgaaataacgaagcagaa

SEQ ID NO: 13096 - DNA, 122 bp, Homo sapiens
  misc_feature (61)..(62): /note="This region represents a CpG dinucleotide"
  misc_feature (61)..(61): /note="Nucleotide may be methylated to form 5-methylcytosine"
aacagttagcaacattaagtaggtgtgaaaagagttactttccgaagacgtcacccgtcccgctccataagtgacagagttagacatcaaagttgccgcgagcccaaaggagctacgggaat

SEQ ID NO: 13097 - DNA, 122 bp, Homo sapiens
  misc_feature (61)..(62): /note="This region represents a CpG dinucleotide"
  misc_feature (61)..(61): /note="Nucleotide may be methylated to form 5-methylcytosine"
attctccatgtctttggtctatcagagtcttgcttttacttccatttctgtttccagccacggtgactgagtcacagcaacacaggctgctccaaggcctctgttctctgctgactctgcag

SEQ ID NO: 13098 - DNA, 122 bp, Homo sapiens
  misc_feature (61)..(62): /note="This region represents a CpG dinucleotide"
  misc_feature (61)..(61): /note="Nucleotide may be methylated to form 5-methylcytosine"
ttggtaagagcaatgccagggtggcagcaggaccccattggtggtctctgatgtgctggacgtgctgttctgggacttgcttctttcactcacgttacgcgtttgggattcaccctgttgac

SEQ ID NO: 13099 - DNA, 122 bp, Homo sapiens
  misc_feature (61)..(62): /note="This region represents a CpG dinucleotide"
  misc_feature (61)..(61): /note="Nucleotide may be methylated to form 5-methylcytosine"
ttagttgaataaattatagcatatctatgtcagggcactgcccttgatatttacaaataacgctgtagatgaatagtaattggcatgggaagatcttcactgcatcgtttggttccaggatt

SEQ ID NO: 13100 - DNA, 122 bp, Homo sapiens
  misc_feature (61)..(62): /note="This region represents a CpG dinucleotide"
  misc_feature (61)..(61): /note="Nucleotide may be methylated to form 5-methylcytosine"
agaagctcttaatggaaagaaacagacatataaagtgacaatatttataatacaggtggacgattctcagaatgtaggtatgtacaagtagcaactggaacagagagaaaggagtgtagagg

SEQ ID NO: 13101 - DNA, 122 bp, Homo sapiens
  misc_feature (61)..(62): /note="This region represents a CpG dinucleotide"
  misc_feature (61)..(61): /note="Nucleotide may be methylated to form 5-methylcytosine"
aatgaagcaaagtaaactctgctttttttttttggtctgttttgtttgtattacattatacgtcactgcttcttatgttataccagggcttcacatttctgagtgtctcattctttttgttc

SEQ ID NO: 13102 - DNA, 122 bp, Homo sapiens
  misc_feature (61)..(62): /note="This region represents a CpG dinucleotide"
  misc_feature (61)..(61): /note="Nucleotide may be methylated to form 5-methylcytosine"
tggcggcgttttagaaaagctgtatttgaaaagcaaccgattggggtgaaggcgggggagcggaatcctgattacactgtcccaatttcagttgaggtgggcttttaaaagaaatcccaatt

SEQ ID NO: 13103 - DNA, 122 bp, Homo sapiens
  misc_feature (61)..(62): /note="This region represents a CpG dinucleotide"
  misc_feature (61)..(61): /note="Nucleotide may be methylated to form 5-methylcytosine"
tggggctattctgagtaccgctgctataaacattcatttacatgtctttatgtgttttcacgtctctcagggtaaacataaggagtagaactgctgagtcacacgttacatgtatgtttcac

SEQ ID NO: 13104 - DNA, 122 bp, Homo sapiens
  misc_feature (61)..(62): /note="This region represents a CpG dinucleotide"
  misc_feature (61)..(61): /note="Nucleotide may be methylated to form 5-methylcytosine"
aacctgtctcaaaaaaaaatttaaaaatggcatgcttgctgacccacccaaatatgtccacgggcccagccacaggcctgcccttgccattgtctgacagatcaggaagtgaccttggggct

SEQ ID NO: 13105 - DNA, 122 bp, Homo sapiens
  misc_feature (61)..(62): /note="This region represents a CpG dinucleotide"
  misc_feature (61)..(61): /note="Nucleotide may be methylated to form 5-methylcytosine"
tccctattgtattacctacaaaaaatcaattcaaagatctgaaactcctagaagaaaacacggaggaaagctctataacattggtctcagcaattattttttggatttggtgccaaaaacat

SEQ ID NO: 13106 - DNA, 122 bp, Homo sapiens
  misc_feature (61)..(62): /note="This region represents a CpG dinucleotide"
  misc_feature (61)..(61): /note="Nucleotide may be methylated to form 5-methylcytosine"
cttttcgagcaacagagtagaacaggttcttcttggcttaggctggagtcctcgaagctccgtgctgtgggaagtgacaactgagcacccctttgctgtccctgccctgctcagagccctag

SEQ ID NO: 13107 - DNA, 122 bp, Homo sapiens
  misc_feature (61)..(62): /note="This region represents a CpG dinucleotide"
  misc_feature (61)..(61): /note="Nucleotide may be methylated to form 5-methylcytosine"
caaaaaagcagacagaaaaatgtaaaacaagaaatccagtcaccccggttgtcaagagtccgaagaattgcaaaggaccggaacctccctctagccatgctgaagaccctctccccaaagac

SEQ ID NO: 13108 - DNA, 122 bp, Homo sapiens
  misc_feature (61)..(62): /note="This region represents a CpG dinucleotide"
  misc_feature (61)..(61): /note="Nucleotide may be methylated to form 5-methylcytosine"
gccagtttcccaggtgaggctggtcctgcttcaagcgtgggagctccaaccactgctccacgctgcctccactcctgaacctgaaggtggaggagtttcccactgtctcaaataagcaccgg

SEQ ID NO: 13109 - DNA, 122 bp, Homo sapiens
  misc_feature (61)..(62): /note="This region represents a CpG dinucleotide"
  misc_feature (61)..(61): /note="Nucleotide may be methylated to form 5-methylcytosine"
gttttttgctgtttctaaaaatcaattccatcttcggtggacggagatttcctgtcactacggcttttcaaaagcatgtactcccgattcttagggtagttcccagcaggcgattacagctg

SEQ ID NO: 13110 - DNA, 122 bp, Homo sapiens
  misc_feature (61)..(62): /note="This region represents a CpG dinucleotide"
  misc_feature (61)..(61): /note="Nucleotide may be methylated to form 5-methylcytosine"
ctcaggtgttccgccccccttggcctcccaaagtgctgggattacaggcatgagtcaccgcgcccagcctgtttttaaaaatgttgttgatgtcctggattcttatggagataagcacttag

SEQ ID NO: 13111 - DNA, 122 bp, Homo sapiens
  misc_feature (61)..(62): /note="This region represents a CpG dinucleotide"
  misc_feature (61)..(61): /note="Nucleotide may be methylated to form 5-methylcytosine"
ataaagcaacttctattacctgtctctttcagagcaggacactgatagtctgggaggttgcgtaacttgcctgagtggtgaagtcaggactgcaggatttctgtctgacctcggaacccatt

SEQ ID NO: 13112 - DNA, 122 bp, Homo sapiens
  misc_feature (61)..(62): /note="This region represents a CpG dinucleotide"
  misc_feature (61)..(61): /note="Nucleotide may be methylated to form 5-methylcytosine"
cagcccccaccatcatccttacatttgcaggggttgttgagcagggcagcagggcaaaggcgacaaaaaagggagctctgagacctatggaacaaaccttagtgaggccctctagccactac

SEQ ID NO: 13113 - DNA, 122 bp, Homo sapiens
  misc_feature (61)..(62): /note="This region represents a CpG dinucleotide"
  misc_feature (61)..(61): /note="Nucleotide may be methylated to form 5-methylcytosine"
agcttgcaggactggaaaatgagtctaggtgagttaataagtagtgagtgaatgtgaaggcgtaggtcgttactgaccacgactatagacttcatgatcactgtacacttagactacactaa

SEQ ID NO: 13114 - DNA, 122 bp, Homo sapiens
  misc_feature (61)..(62): /note="This region represents a CpG dinucleotide"
  misc_feature (61)..(61): /note="Nucleotide may be methylated to form 5-methylcytosine"
aagggggcggtcccttatgtgaaacctaatctttatagctaggccgatgggtgtgctcaccgccgaggcacgtcattacgatgctctttggctagtcattgtcattagaaatgtaaacactg

SEQ ID NO: 13115 - DNA, 122 bp, Homo sapiens
  misc_feature (61)..(62): /note="This region represents a CpG dinucleotide"
  misc_feature (61)..(61): /note="Nucleotide may be methylated to form 5-methylcytosine"
tgttagtttcttccagtggttcagcggacaattttgaactgaatccagcagagaactcatcggaggttttttgttttttgttttaagtagtagtgataccatttcatccgattccaatgcta

SEQ ID NO: 13116 - DNA, 122 bp, Homo sapiens
  misc_feature (61)..(62): /note="This region represents a CpG dinucleotide"
  misc_feature (61)..(61): /note="Nucleotide may be methylated to form 5-methylcytosine"
cttaagggatgaacacctaaatgatagatgaatgagagataaggagaacaatggccaatgcggttgcaatactgtgcaaaatggcagagtctgcacagaagagaactcatatttttacttgc

SEQ ID NO: 13117 - DNA, 122 bp, Homo sapiens
  misc_feature (61)..(62): /note="This region represents a CpG dinucleotide"
  misc_feature (61)..(61): /note="Nucleotide may be methylated to form 5-methylcytosine"
aggtttccgcacggagaattacgccgcagaagcagcaacagacccgcgtattcatgagctcgtgtcaccgggaggtcgctgccaggccttagcccaaccaccatttcgtttcaggaaatgct

SEQ ID NO: 13118 - DNA, 122 bp, Homo sapiens
  misc_feature (61)..(62): /note="This region represents a CpG dinucleotide"
  misc_feature (61)..(61): /note="Nucleotide may be methylated to form 5-methylcytosine"
gagacactagaatgagtgctttgcctacaccatctcctttcatcttcaccccagtaacaacggccctcagggctcatcgtgggtgttattcactgtccacattttgcagaagaggaaactga

SEQ ID NO: 13119 - DNA, 122 bp, Homo sapiens
  misc_feature (61)..(62): /note="This region represents a CpG dinucleotide"
  misc_feature (61)..(61): /note="Nucleotide may be methylated to form 5-methylcytosine"
cccaacacggtctccttgaacccaggtgaagttacacctgagcgtggtcgttgtgaagaacggtctgtccaggaactcccgagaacgtgtggtcggccttgcggtaagcttgtgcactcgga

SEQ ID NO: 13120 - DNA, 122 bp, Homo sapiens
  misc_feature (61)..(62): /note="This region represents a CpG dinucleotide"
  misc_feature (61)..(61): /note="Nucleotide may be methylated to form 5-methylcytosine"
taccacctttgaaaaatcacatttccattcgaagtaggtagagtctttccatggaaataacgtgattttttaagactccgaggcattgccacagtgacccctagtggagcttataggccagc

SEQ ID NO: 13121 - DNA, 122 bp, Homo sapiens
  misc_feature (61)..(62): /note="This region represents a CpG dinucleotide"
  misc_feature (61)..(61): /note="Nucleotide may be methylated to form 5-methylcytosine"
gtacaaggaattaagctctgattgatgctacaatgtggatgaacctcaaaaacaggatgccgagtgaaggaagccagacacaaaaggctgcatagcatttaatagatttatatgaaatatcc

SEQ ID NO: 13122 - DNA, 122 bp, Homo sapiens
  misc_feature (61)..(62): /note="This region represents a CpG dinucleotide"
  misc_feature (61)..(61): /note="Nucleotide may be methylated to form 5-methylcytosine"
acttgtgcttaattaaaaccttatgcttaaacaaacattggtttagttctcaaattagcacgatgaagtgtatatattttgaatgtatcttataggtagaatggattcaaccaaccacagat

SEQ ID NO: 13123 - DNA, 122 bp, Homo sapiens
  misc_feature (61)..(62): /note="This region represents a CpG dinucleotide"
  misc_feature (61)..(61): /note="Nucleotide may be methylated to form 5-methylcytosine"
cctctcattcctgcctcttttgtccctcttcctctttcccttttgtctatattcagttcccgatacaaagctttgagtagcaaggctgatggacccctgtcccctgggaggacaaccaacct

SEQ ID NO: 13124 - DNA, 122 bp, Homo sapiens
  misc_feature (61)..(62): /note="This region represents a CpG dinucleotide"
  misc_feature (61)..(61): /note="Nucleotide may be methylated to form 5-methylcytosine"
ccgctcataataccactcagaattaataccccatggtcaagaaacattttgaaacactgacgtaaaattttaagcttgtggacgcgcacacattctctctgtctgaaggttctggcaatagg

SEQ ID NO: 13125 - DNA, 122 bp, Homo sapiens
  misc_feature (61)..(62): /note="This region represents a CpG dinucleotide"
  misc_feature (61)..(61): /note="Nucleotide may be methylated to form 5-methylcytosine"
gaggtaggaactaattaccccctgtaacttcaggatgatcagcatgatttggggcagacacgcacacagaggctgataaagtcttttctgatgtaaatcagacaattccttcctagatcaga

SEQ ID NO: 13126 - DNA, 122 bp, Homo sapiens
  misc_feature (61)..(62): /note="This region represents a CpG dinucleotide"
  misc_feature (61)..(61): /note="Nucleotide may be methylated to form 5-methylcytosine"
ttagagccagaaaaaagaagcctgccatcgcatcccatcgcctgtcgtgtgaatcatccacgtggatcactgatgcgactcgagggcacggaagggcccgggtgggactgcactcacgtggg

SEQ ID NO: 13127 - DNA, 122 bp, Homo sapiens
  misc_feature (61)..(62): /note="This region represents a CpG dinucleotide"
  misc_feature (61)..(61): /note="Nucleotide may be methylated to form 5-methylcytosine"
gaaacaggcttaggttatatggctttcccaaggtcatcctggtcacagagctagtaaggacgacttggaattgacccatggtgtagcatgtctgaagtccaaggtcttacctccctctgcta

SEQ ID NO: 13128 - DNA, 122 bp, Homo sapiens
  misc_feature (61)..(62): /note="This region represents a CpG dinucleotide"
  misc_feature (61)..(61): /note="Nucleotide may be methylated to form 5-methylcytosine"
ttctcatgcagctctgcctaccactgttctttttaaatgtctttctgggccgggcgggcgcggtggctcacacctgtaatcccagcactctgggaggccgaggcaggtgagtcatgaggtca

SEQ ID NO: 13129 - DNA, 122 bp, Homo sapiens
  misc_feature (61)..(62): /note="This region represents a CpG dinucleotide"
  misc_feature (61)..(61): /note="Nucleotide may be methylated to form 5-methylcytosine"
cggtggctcatacctattaataaaatcccccagcactttgagagggcaaggcgggagaatcgctttaacccaggaattcaagaccaatttaggcaaataagagagaccgtctttacaaaaaa

SEQ ID NO: 13130 - DNA, 122 bp, Homo sapiens
  misc_feature (61)..(62): /note="This region represents a CpG dinucleotide"
  misc_feature (61)..(61): /note="Nucleotide may be methylated to form 5-methylcytosine"
gctgcccaagactggaagggaaggcagctcttaagaagcaaagcaagtgaatgggaattacgctccacactaagggaaatgcattgggagagggatacatttggggaggaagaatgaaataa

SEQ ID NO: 13131 - DNA, 122 bp, Homo sapiens
  misc_feature (61)..(62): /note="This region represents a CpG dinucleotide"
  misc_feature (61)..(61): /note="Nucleotide may be methylated to form 5-methylcytosine"
gagaatacagggaagaacgaaatcgcctctgatcgtactttctccacggatgtaagtgtccgggctctagtgggggaatgatactcttcgtgcgaaattcacttttaaaaaaggcttagaaa

SEQ ID NO: 13132 - DNA, 122 bp, Homo sapiens
  misc_feature (61)..(62): /note="This region represents a CpG dinucleotide"
  misc_feature (61)..(61): /note="Nucleotide may be methylated to form 5-methylcytosine"
cttaaattcacaacagctttccatgctacctgagttaattacatcattcaaacacattgtcggtgaatgtttttgtcaagatactccgagcgtttgataatagaagtaagataacagaatca

SEQ ID NO: 13133 - DNA, 122 bp, Homo sapiens
  misc_feature (61)..(62): /note="This region represents a CpG dinucleotide"
  misc_feature (61)..(61): /note="Nucleotide may be methylated to form 5-methylcytosine"
agaaaggaattcatgcctttggcatttcctgcctccccaagcactgcaggagtggtttgccgggaaggctggtgttagaccaaaacctgcacctctgggagtcaacaaagagagcctggaga

SEQ ID NO: 13134 - DNA, 122 bp, Homo sapiens
  misc_feature (61)..(62): /note="This region represents a CpG dinucleotide"
  misc_feature (61)..(61): /note="Nucleotide may be methylated to form 5-methylcytosine"
gagtcaagttgacctacatagaagagaaggaactggaagtgcatgtctgtgttctggctccgattgggaaaagctgcttaaccactgtaagttacgggttggataagtgacatatacgactg

SEQ ID NO: 13135 - DNA, 122 bp, Homo sapiens
  misc_feature (61)..(62): /note="This region represents a CpG dinucleotide"
  misc_feature (61)..(61): /note="Nucleotide may be methylated to form 5-methylcytosine"
cgggccaaattgaggactagctaaaacagggatggggtgggagtgcctctccatgagatacgcccactcgtatgccatgtcagtttaccattgccgtggcaacacctggagttacctttcca

SEQ ID NO: 13136 - DNA, 122 bp, Homo sapiens
  misc_feature (61)..(62): /note="This region represents a CpG dinucleotide"
  misc_feature (61)..(61): /note="Nucleotide may be methylated to form 5-methylcytosine"
ttcttcctgtacctgtcaagtgttcctagacggtcatataccaattacacttcaccatttcgccccttagcgcgcatgcatgagtccatttatccaactcttgagatcttatcaggaagctg

SEQ ID NO: 13137 - DNA, 122 bp, Homo sapiens
  misc_feature (61)..(62): /note="This region represents a CpG dinucleotide"
  misc_feature (61)..(61): /note="Nucleotide may be methylated to form 5-methylcytosine"
tctttccttaagctaaaggaatctctccccaaactgcacttcctggagttgggtgcagtgcgatcaggcactcccctggctgccacagctggtgtcacacttggtcacacatcacaagtcta

SEQ ID NO: 13138 - DNA, 122 bp, Homo sapiens
  misc_feature (61)..(62): /note="This region represents a CpG dinucleotide"
  misc_feature (61)..(61): /note="Nucleotide may be methylated to form 5-methylcytosine"
ccctttccactttagacaaacaccagcagttcccctttagttcaatggtattcgcacaggcgttatgaaagctgttaagattcagaaccattgtcagaggacttggcagaatgtaacctaat

SEQ ID NO: 13139 - DNA, 122 bp, Homo sapiens
  misc_feature (61)..(62): /note="This region represents a CpG dinucleotide"
  misc_feature (61)..(61): /note="Nucleotide may be methylated to form 5-methylcytosine"
ttttttttccttaaaggtcctactgactaaatatttttttttaatcaagagacttaggtacgcataagcttcctgctaaattctgtagacaccttctatttatgggttacattatctggttg

SEQ ID NO: 13140 - DNA, 122 bp, Homo sapiens
  misc_feature (61)..(62): /note="This region represents a CpG dinucleotide"
  misc_feature (61)..(61): /note="Nucleotide may be methylated to form 5-methylcytosine"
caaatctgttcccaagatgtccacatttgaaatactcagtgaagccaaataaatacttgccgtgtctttaataatctgtaccatgattacaccagggaagtgctgatgaaaatcccctgttg

SEQ ID NO: 13141 - DNA, 122 bp, Homo sapiens
  misc_feature (61)..(62): /note="This region represents a CpG dinucleotide"
  misc_feature (61)..(61): /note="Nucleotide may be methylated to form 5-methylcytosine"
ctcttgcttagattttgcaaagctctcttaggtagtttccttgctttcactcttggttcccgtgtagactatttgtcatagcaactagtgatccttctagcatatcagagcatgccactctt

SEQ ID NO: 13142 - DNA, 122 bp, Homo sapiens
  misc_feature (61)..(62): /note="This region represents a CpG dinucleotide"
  misc_feature (61)..(61): /note="Nucleotide may be methylated to form 5-methylcytosine"
gagcatggcctgagtctgtgtctgtttatgcccatgtccctggtacagtgcatgctaacacgtgcctctgtacatttgtatagtgggtgcacatgtgtccaggtgtgtgtgtgagtgtgtgt

SEQ ID NO: 13143 - DNA, 122 bp, Homo sapiens
  misc_feature (61)..(62): /note="This region represents a CpG dinucleotide"
  misc_feature (61)..(61): /note="Nucleotide may be methylated to form 5-methylcytosine"
cttgcagttctgaaagcttgctgacagtaggttctctttatctccaccctttcactgaagcgtcttagcccaggagggttgaacccgtattagaagcccatgcctaaattaaatttcttaag

SEQ ID NO: 13144 - DNA, 122 bp, Homo sapiens
  misc_feature (61)..(62): /note="This region represents a CpG dinucleotide"
  misc_feature (61)..(61): /note="Nucleotide may be methylated to form 5-methylcytosine"
tactagctaaggatttctcctttcagcttctactgggctggaataatcaaagatttaattcgtgactgactactcagttcagtatttaagtcagtaagacataatttctttaaaaaaactaa

SEQ ID NO: 13145 - DNA, 122 bp, Homo sapiens
  misc_feature (61)..(62): /note="This region represents a CpG dinucleotide"
  misc_feature (61)..(61): /note="Nucleotide may be methylated to form 5-methylcytosine"
taccatttgcttcctaccattcaaaattacctggaacttatatttatttccagtgttcttcgttttattttcctaattttaactggaagtttgaaccaaaagctagggcaatacaaacacag

SEQ ID NO: 13146 - DNA, 122 bp, Homo sapiens
  misc_feature (61)..(62): /note="This region represents a CpG dinucleotide"
  misc_feature (61)..(61): /note="Nucleotide may be methylated to form 5-methylcytosine"
aaagaggaactggattacaggctttcatagcttcgggctggctgagagccaccccacattcgcctacactctctggctcatgtttgctgctgatggcttatactgcaaactgcaccagtgcc

SEQ ID NO: 13147 - DNA, 122 bp, Homo sapiens
  misc_feature (61)..(62): /note="This region represents a CpG dinucleotide"
  misc_feature (61)..(61): /note="Nucleotide may be methylated to form 5-methylcytosine"
atcagtttccctgagttattcagtcctacctgttatggactgaatgtttgtatccacacccgcccccccaccccaaattcacatgttgaagccctaacctccaatgtgatggtatttggaga

SEQ ID NO: 13148 - DNA, 122 bp, Homo sapiens
  misc_feature (61)..(62): /note="This region represents a CpG dinucleotide"
  misc_feature (61)..(61): /note="Nucleotide may be methylated to form 5-methylcytosine"
gggcagcctggccagcctggcttgtctttgcagtgtcctgtgctgggccaggtgtccagccgggctgggaacggacctttctctcccatggccgggcctggcagctcttactggcaagaagt

SEQ ID NO: 13149 - DNA, 122 bp, Homo sapiens
  misc_feature (61)..(62): /note="This region represents a CpG dinucleotide"
  misc_feature (61)..(61): /note="Nucleotide may be methylated to form 5-methylcytosine"
agcagccaggctgctgaggagtacccccgccaaaggcttttcggggttctctccagcagacgggggcagcctaaggcctccataaaatctccccgaagcagcctatgaacttgccaaaggca

SEQ ID NO: 13150 - DNA, 122 bp, Homo sapiens
  misc_feature (61)..(62): /note="This region represents a CpG dinucleotide"
  misc_feature (61)..(61): /note="Nucleotide may be methylated to form 5-methylcytosine"
atgatcttagaaaccaattcacattaaaatgccaatacctaaaatccgtttatatttcaacgacagcaaaatataccataacacaggccaggtgcagtggctcaggcctgtaattccagcac

SEQ ID NO: 13151 - DNA, 122 bp, Homo sapiens
  misc_feature (61)..(62): /note="This region represents a CpG dinucleotide"
  misc_feature (61)..(61): /note="Nucleotide may be methylated to form 5-methylcytosine"
aatccaccggtggtgaagcacccagaaagcaagtggctacaaaagccgcctgcaagagtgcgcccactactggaaggatgaagaagcctcattgttacaggccggttctgtggcactccgag

SEQ ID NO: 13152 - DNA, 122 bp, Homo sapiens
  misc_feature (61)..(62): /note="This region represents a CpG dinucleotide"
  misc_feature (61)..(61): /note="Nucleotide may be methylated to form 5-methylcytosine"
caattacactggggcttcaattttgcatctaggtagcaatgttatccaggacattgagaccggggctttccatgggctacggggtttgaggagattgcatctaaacaataataaactggaac

SEQ ID NO: 13153 - DNA, 122 bp, Homo sapiens
  misc_feature (61)..(62): /note="This region represents a CpG dinucleotide"
  misc_feature (61)..(61): /note="Nucleotide may be methylated to form 5-methylcytosine"
ttctctaataaatctgcctttctttatctacaactgccttggtaaattattttacacacacgccactggtccagatagccgttgctaacccacaacattatgtttagtgaggttctattctg

SEQ ID NO: 13154 - DNA, 122 bp, Homo sapiens
  misc_feature (61)..(62): /note="This region represents a CpG dinucleotide"
  misc_feature (61)..(61): /note="Nucleotide may be methylated to form 5-methylcytosine"
caagaggttttactggtctggctggttgttattgctgctgttgttgttgcttcgagtaagcggaagagatgatagcagtgtggaggacgactgtgacggggtagaaaggtgggtagtggagg

SEQ ID NO: 13155 - DNA, 122 bp, Homo sapiens
  misc_feature (61)..(62): /note="This region represents a CpG dinucleotide"
  misc_feature (61)..(61): /note="Nucleotide may be methylated to form 5-methylcytosine"
aagtaattaataaattctgaaaatcaagcatgtgaaatttggtaccttttgttaatacaacgtagctgagacactagcaatgacagaagtgattactcactggtattacttaatggactgta

SEQ ID NO: 13156 - DNA, 122 bp, Homo sapiens
  misc_feature (61)..(62): /note="This region represents a CpG dinucleotide"
  misc_feature (61)..(61): /note="Nucleotide may be methylated to form 5-methylcytosine"
gttgccatgcttgtctgcacactcaggcatgtgggtgcacacctatattcatccatgtggcgtgcctggagggtgtggcccgcggtgcccagtatagagcaggcgcatggccacacggctcc

SEQ ID NO: 13157 - DNA, 122 bp, Homo sapiens
  misc_feature (61)..(62): /note="This region represents a CpG dinucleotide"
  misc_feature (61)..(61): /note="Nucleotide may be methylated to form 5-methylcytosine"
ttactggaatttaagaaaaataaactgaagggaatctctattgctttcttccctaaaagacgtgctttttaaaaggcctataagcattacgtaaaaagattaagagaggtgtaaggagctca

SEQ ID NO: 13158 - DNA, 122 bp, Homo sapiens
  misc_feature (61)..(62): /note="This region represents a CpG dinucleotide"
  misc_feature (61)..(61): /note="Nucleotide may be methylated to form 5-methylcytosine"
gacaattaaagttacttaattattaaaaactgtgtgtgctgctgcccagagagaaagaggcggccaggcctggctcccgcagcccctcacaggagtgactggacactgtgggaaccggcccc

SEQ ID NO: 13159 - DNA, 122 bp, Homo sapiens
  misc_feature (61)..(62): /note="This region represents a CpG dinucleotide"
  misc_feature (61)..(61): /note="Nucleotide may be methylated to form 5-methylcytosine"
cagaggttggggaacaggatgcagggcagggccaaaggtcatggtggttgctacctacaccggctcatcctgagtacaaagggttctcagcacagagggaaccccaaatctccccctccatg

SEQ ID NO: 13160 - DNA, 122 bp, Homo sapiens
  misc_feature (61)..(62): /note="This region represents a CpG dinucleotide"
  misc_feature (61)..(61): /note="Nucleotide may be methylated to form 5-methylcytosine"
gacaggagaagactgccaagccaccaccggtcctgcgacatattcaccagctgccggcggcgaggtcagaccccagattcgggtttgcccagcaggcgctcggcttccatgctcgctctcca

SEQ ID NO: 13161 - DNA, 122 bp, Homo sapiens
  misc_feature (61)..(62): /note="This region represents a CpG dinucleotide"
  misc_feature (61)..(61): /note="Nucleotide may be methylated to form 5-methylcytosine"
cccaccccaacctcaagccttgtcttccagaatggctccacaaagaggagagaacagagacggatcaccaccagagcctgagaagagggcctgtgaaaactgccctccttccaatcaaaaag

SEQ ID NO: 13162 - DNA, 122 bp, Homo sapiens
  misc_feature (61)..(62): /note="This region represents a CpG dinucleotide"
  misc_feature (61)..(61): /note="Nucleotide may be methylated to form 5-methylcytosine"
aatcctataagatcagggcccacccttgtgacctcatttaaacttaattgcttccataaacgccctatctccaaatacagttacactgggggttagggcttcagtgtatgaattggaagagg

SEQ ID NO: 13163 - DNA, 122 bp, Homo sapiens
  misc_feature (61)..(62): /note="This region represents a CpG dinucleotide"
  misc_feature (61)..(61): /note="Nucleotide may be methylated to form 5-methylcytosine"
ctagagccatagaggaagcaaatctgtagaaagagagaaaaatgaagcagaggagagacacgttttaataccattcgggggcttgtttccaatcccaggtcagctctgcttgttttctttga

SEQ ID NO: 13164 - DNA, 122 bp, Homo sapiens
  misc_feature (61)..(62): /note="This region represents a CpG dinucleotide"
  misc_feature (61)..(61): /note="Nucleotide may be methylated to form 5-methylcytosine"
aatattgcctatggccattctcacactacaacaacacagttgagtagttgcagtggagaccgtatggtttgcagagtcttaactatttattttctagccctttacagaaaaagtttgctggc

SEQ ID NO: 13165 - DNA, 122 bp, Homo sapiens
  misc_feature (61)..(62): /note="This region represents a CpG dinucleotide"
  misc_feature (61)..(61): /note="Nucleotide may be methylated to form 5-methylcytosine"
gttgccacctggcccatctgtagagtggcccaaatctggtttttgcctcctctagcaagacgggtttggtgtgctaggtgattctgacacacaccaggtccccgccttcctccagcagcctg

SEQ ID NO: 13166 - DNA, 122 bp, Homo sapiens
  misc_feature (61)..(62): /note="This region represents a CpG dinucleotide"
  misc_feature (61)..(61): /note="Nucleotide may be methylated to form 5-methylcytosine"
ctgcaccttcatgagccgccccaggtaagagcggtagtaagacaggtaaatcttgctcagcgtctccacatattcatccctgatctcctttgctgttgctcgttcattgcccagcagaaact

SEQ ID NO: 13167 - DNA, 122 bp, Homo sapiens
  misc_feature (61)..(62): /note="This region represents a CpG dinucleotide"
  misc_feature (61)..(61): /note="Nucleotide may be methylated to form 5-methylcytosine"
ctaatgcatctcttaccaatctacgaagttacaggatggggcatgaaaaaatatatttgacggcacaaaagtatgaagcataggattaagtaaagcagattgaatatgactgttacgggctg

SEQ ID NO: 13168 - DNA, 122 bp, Homo sapiens
  misc_feature (61)..(62): /note="This region represents a CpG dinucleotide"
  misc_feature (61)..(61): /note="Nucleotide may be methylated to form 5-methylcytosine"
tcaaaaatcagttgccccaaataatgtctcaggtatgtattttcaaaggatatctggaaacgctatgtaaagattagaaacagtctgtgtgtagtccatagactggatattatgtaacattt

SEQ ID NO: 13169 - DNA, 122 bp, Homo sapiens
  misc_feature (61)..(62): /note="This region represents a CpG dinucleotide"
  misc_feature (61)..(61): /note="Nucleotide may be methylated to form 5-methylcytosine"
tacagaactctctaacttagaggtgatcgtccatacggcagatcattacaacatgaaaaacgtaagctaagatgttgaacacagccagaactgaaaataaaagagctttctaaaacaaatca

SEQ ID NO: 13170 - DNA, 122 bp, Homo sapiens
  misc_feature (61)..(62): /note="This region represents a CpG dinucleotide"
  misc_feature (61)..(61): /note="Nucleotide may be methylated to form 5-methylcytosine"
gctgatgggagggagtaagtagagtggccccacagtagccatttttatatataaatctttcgaggagactctgaacatgctacaaattaatgttgggtagagatagctttatctgaacccaa

SEQ ID NO: 13171 - DNA, 122 bp, Homo sapiens
  misc_feature (61)..(62): /note="This region represents a CpG dinucleotide"
  misc_feature (61)..(61): /note="Nucleotide may be methylated to form 5-methylcytosine"
gccaacatgacaaaaccctgtctccactgaaagtacaaattagccagacatggtgtcctgcgcctgtaatcccagctactcgggaggctaatgcaggagaatcacttgaatctgggaggcag

SEQ ID NO: 13172 - DNA, 122 bp, Homo sapiens
  misc_feature (61)..(62): /note="This region represents a CpG dinucleotide"
  misc_feature (61)..(61): /note="Nucleotide may be methylated to form 5-methylcytosine"
cctttggggctaggggcctggacttatgtgcccttgcagagaccctcataggatgcagatcgtccccaaggaggggaagtgattttgtgtgaggcaattctcttaggcagaggacaattcct

SEQ ID NO: 13173 - DNA, 122 bp, Homo sapiens
  misc_feature (61)..(62): /note="This region represents a CpG dinucleotide"
  misc_feature (61)..(61): /note="Nucleotide may be methylated to form 5-methylcytosine"
tgacagtagggaattgacatttcctgagccagcgtctggggcatcggaccaagtgcagggcgagctgggcagggaggggtgcagccggctctgccgtcagcctaaagccatgagcgacctgg

SEQ ID NO: 13174 - DNA, 122 bp, Homo sapiens
  misc_feature (61)..(62): /note="This region represents a CpG dinucleotide"
  misc_feature (61)..(61): /note="Nucleotide may be methylated to form 5-methylcytosine"
agatatctgtatatacacacacacatatgtgcacacacacactctctctccattatcgaacgactgactgtaaacctcaccacacagggtggtgccctggccccgaggtcaccccgactttt

SEQ ID NO: 13175 - DNA, 122 bp, Homo sapiens
  misc_feature (61)..(62): /note="This region represents a CpG dinucleotide"
  misc_feature (61)..(61): /note="Nucleotide may be methylated to form 5-methylcytosine"
taggtaatttgtaagaaaagaggtttaattggctcattgttctgcaggctgtacaggaagcgtaacatcagcaactgcttctggggaagcctcaggaagctataacgttgacgcaagagtaa

SEQ ID NO: 13176 - DNA, 122 bp, Homo sapiens
  misc_feature (61)..(62): /note="This region represents a CpG dinucleotide"
  misc_feature (61)..(61): /note="Nucleotide may be methylated to form 5-methylcytosine"
ggcaggccctgagcaggcagctgggtgtccccgctcagatccaggcccgagtgggctgggcggctgcagagccagtcacctgagctacccagggtgggatccctggccccgacctctgtcct

SEQ ID NO: 13177 - DNA, 122 bp, Homo sapiens
  misc_feature (61)..(62): /note="This region represents a CpG dinucleotide"
  misc_feature (61)..(61): /note="Nucleotide may be methylated to form 5-methylcytosine"
agctgtgagccattgcgtctggctcacaaatgatttaaacagacagagcacaatccaaagcgaggattttccaggcaactcccaagccctggcccagaaaaactcacacataaaaaacactc

SEQ ID NO: 13178 - DNA, 122 bp, Homo sapiens
  misc_feature (61)..(62): /note="This region represents a CpG dinucleotide"
  misc_feature (61)..(61): /note="Nucleotide may be methylated to form 5-methylcytosine"
gttggatccccgtgtgcaggcgttacactttcctgtcttctgtatggacgacagtgacatcgccacaagggaatttatcaatattccctgttatctagagaacatcatgatttccaggtgct

SEQ ID NO: 13179 - DNA, 122 bp, Homo sapiens
  misc_feature (61)..(62): /note="This region represents a CpG dinucleotide"
  misc_feature (61)..(61): /note="Nucleotide may be methylated to form 5-methylcytosine"
ttttaagtgtaaatactggattttgtctgttaaaaggattttaggtaaaataaatttaagcggactttatttcggcaaaggaatggttcatgaatcacgcgggaagcaccagaacggaaatc

SEQ ID NO: 13180 - DNA, 122 bp, Homo sapiens
  misc_feature (61)..(62): /note="This region represents a CpG dinucleotide"
  misc_feature (61)..(61): /note="Nucleotide may be methylated to form 5-methylcytosine"
gttcagtttgtggagactcctgttaaggtgtgtacctcagtttattgctatactccttctcgtggccataatagtctccctgatgtgttgttgtcccctcgagagtcttcaatgtctctatg

SEQ ID NO: 13181 - DNA, 122 bp, Homo sapiens
  misc_feature (61)..(62): /note="This region represents a CpG dinucleotide"
  misc_feature (61)..(61): /note="Nucleotide may be methylated to form 5-methylcytosine"
tggaagaaaaccttgtgtgatggtcatctctagttggtaatctgatataagttgagttgccgacagaacccagctgaggagaatgactggtctaatcccagcatggctttcctgctcccttt

SEQ ID NO: 13182 - DNA, 122 bp, Homo sapiens
  misc_feature (61)..(62): /note="This region represents a CpG dinucleotide"
  misc_feature (61)..(61): /note="Nucleotide may be methylated to form 5-methylcytosine"
cacaggcctttccagaggtatcaaaaatagcaatagcagtgaaatacttttgggaatgaacgaatggcaaaattcttggaagccagagccactgcatgtaaattctcgggggaaagagcatg

SEQ ID NO: 13183 - DNA, 122 bp, Homo sapiens
  misc_feature (61)..(62): /note="This region represents a CpG dinucleotide"
  misc_feature (61)..(61): /note="Nucleotide may be methylated to form 5-methylcytosine"
aatatgtggccttttgtgcctggcttctttcactcagcatgatgttttccagttcatctgcgtggtagcatgtgtcagtacctcattccctcttatggctgaatcatattccattgtatgga

SEQ ID NO: 13184 - DNA, 122 bp, Homo sapiens
  misc_feature (61)..(62): /note="This region represents a CpG dinucleotide"
  misc_feature (61)..(61): /note="Nucleotide may be methylated to form 5-methylcytosine"
tcatctgaaatgaccaatgatgcgggaagtaccctttccagatgctggctcagccagggccgagtgacctgttgcagagtccatgagaaaacatgtttgatggcagggttattcttccagga

SEQ ID NO: 13185 - DNA, 122 bp, Homo sapiens
  misc_feature (61)..(62): /note="This region represents a CpG dinucleotide"
  misc_feature (61)..(61): /note="Nucleotide may be methylated to form 5-methylcytosine"
agggagcatcaggcctctaaggagcagagggcgcatgtttggtgcagctccctccctgctcggttcccctccaggcagaaagggctgcagggctcagaattctctggactcaggccagtgat

SEQ ID NO: 13186 - DNA, 122 bp, Homo sapiens
  misc_feature (61)..(62): /note="This region represents a CpG dinucleotide"
  misc_feature (61)..(61): /note="Nucleotide may be methylated to form 5-methylcytosine"
aaaaaagtgccagttcctttcccacatgtgctgagttggaaacagcttggtgccagagcacgtccacaaggatatgtctgcctgttgtgccgtctgctgtatcctcaaaacctgccttgggg

SEQ ID NO: 13187 - DNA, 122 bp, Homo sapiens
  misc_feature (61)..(62): /note="This region represents a CpG dinucleotide"
  misc_feature (61)..(61): /note="Nucleotide may be methylated to form 5-methylcytosine"
acatgcacatctttttcttcagcaaatgtcactgtggtttcaaagcctatgtgtgatgtgcgatcgggcagcatttttaaagtatttcctgctcaaccatagggtgaaatgatgcaggtagt

SEQ ID NO: 13188 - DNA, 122 bp, Homo sapiens
  misc_feature (61)..(62): /note="This region represents a CpG dinucleotide"
  misc_feature (61)..(61): /note="Nucleotide may be methylated to form 5-methylcytosine"
ttcacctcttactgagtaaccataggcaagtcacgaacttctctaagcctcaaactgatacgtaaaaggaaggagggagggaaataatcaccaccttacaggcatgtggatactgtctgttt

SEQ ID NO: 13189 - DNA, 122 bp, Homo sapiens
  misc_feature (61)..(62): /note="This region represents a CpG dinucleotide"
  misc_feature (61)..(61): /note="Nucleotide may be methylated to form 5-methylcytosine"
actgtaggccaagccctgcctgccaggtctacatataaccacagttacatgttgtgtgatcgtatagttaaagccaactgtctaaacacattatcaggatttcgcaaccagtggtaagaata

SEQ ID NO: 13190 - DNA, 122 bp, Homo sapiens
  misc_feature (61)..(62): /note="This region represents a CpG dinucleotide"
  misc_feature (61)..(61): /note="Nucleotide may be methylated to form 5-methylcytosine"
tagatgcagaataatttgttgccatttaaaatatacatctacatgtaaaatacatatctacgtgtagtgacagtgaaagatgtccctaacatattgttaggcaagaaaagcaaaaattcaga

SEQ ID NO: 13191 - DNA, 122 bp, Homo sapiens
  misc_feature (61)..(62): /note="This region represents a CpG dinucleotide"
  misc_feature (61)..(61): /note="Nucleotide may be methylated to form 5-methylcytosine"
aggcgacccaaggaggaattataaaggttttcgttctccttcattatcttttttccaattcggagacttgagactgagcgcatcttggacagtgctagagggttcaaaagataacaccttta

SEQ ID NO: 13192 - DNA, 122 bp, Homo sapiens
  misc_feature (61)..(62): /note="This region represents a CpG dinucleotide"
  misc_feature (61)..(61): /note="Nucleotide may be methylated to form 5-methylcytosine"
agttggaagcctcagatgagctactccagggaaagtgctgggactggcattctggctgcccgtcttcttcccagccttgccttgctgggagacttgacctgtccccctgcactctggccact

SEQ ID NO: 13193 - DNA, 122 bp, Homo sapiens
  misc_feature (61)..(62): /note="This region represents a CpG dinucleotide"
  misc_feature (61)..(61): /note="Nucleotide may be methylated to form 5-methylcytosine"
aaatcattgacttggcagaatagcaagtcacacattaagcaacaagcgaaatacactaatcgtagcttgactgttttgtaaagaatttcacagcacaaaaagttaatatcattgatttggag

SEQ ID NO: 13194 - DNA, 122 bp, Homo sapiens
  misc_feature (61)..(62): /note="This region represents a CpG dinucleotide"
  misc_feature (61)..(61): /note="Nucleotide may be methylated to form 5-methylcytosine"
ctcggggcccgtcagctctgtcattcctttaaagtgctcagacagaagctgggtagctcccgtcagggatggcgtgtggtgggggagtcagggggctgctgatcatgggctctgaggggatt

SEQ ID NO: 13195 - DNA, 122 bp, Homo sapiens
  misc_feature (61)..(62): /note="This region represents a CpG dinucleotide"
  misc_feature (61)..(61): /note="Nucleotide may be methylated to form 5-methylcytosine"
gaggtgactttcttctgaaggaatgtgtggttgtttgcagataatatcaaatccatttcacgtcagatcaggatgacagacagccagaggctattggggtctcacattaaatggctctttta

SEQ ID NO: 13196 - DNA, 122 bp, Homo sapiens
  misc_feature (61)..(62): /note="This region represents a CpG dinucleotide"
  misc_feature (61)..(61): /note="Nucleotide may be methylated to form 5-methylcytosine"
tggggtttgcatgtgacagggaagaggaagagacccagggccgttttggctgttccgtctcgtgtcactgtctcctgcaaggctttgaagcaagaatgctgtagctgtgtccctgtgccctg

SEQ ID NO: 13197 - DNA, 122 bp, Homo sapiens
  misc_feature (61)..(62): /note="This region represents a CpG dinucleotide"
  misc_feature (61)..(61): /note="Nucleotide may be methylated to form 5-methylcytosine"
caggtgcatttagcaacctgtgcacactgctgataagcagcctctgggagtgtcatttgtcgttccaggtctgaataagggccattacataacagcatatcctttataaatatctccatgtc

SEQ ID NO: 13198 - DNA, 122 bp, Homo sapiens
  misc_feature (61)..(62): /note="This region represents a CpG dinucleotide"
  misc_feature (61)..(61): /note="Nucleotide may be methylated to form 5-methylcytosine"
actctaccaacatgggcttgcgatggccattgaaggctcttaagactggcacaatgccaacgggaagggcaggttgccctcaatgtccaggaattgtaggtagccgaatacagtgcagtgct

SEQ ID NO: 13199 - DNA, 122 bp, Homo sapiens
  misc_feature (61)..(62): /note="This region represents a CpG dinucleotide"
  misc_feature (61)..(61): /note="Nucleotide may be methylated to form 5-methylcytosine"
ggctttgaagacggtgggagggacctgcaagcaaagaaatgcaagggcttcttctaaagacgggaaagtcaaggaaacaaattcctccctggaaacaaatgcaggaaggaatgcagccctgc

SEQ ID NO: 13200 - DNA, 122 bp, Homo sapiens
  misc_feature (61)..(62): /note="This region represents a CpG dinucleotide"
  misc_feature (61)..(61): /note="Nucleotide may be methylated to form 5-methylcytosine"
ttccagcccctgccaggattctttctgggtacttggtgaccctggctggagtgtggcaatcgtgggtggacctgggaccacagatgtgactggtgtgaggaagggccattaggggcagagtc

SEQ ID NO: 13201 - DNA, 122 bp, Homo sapiens
  misc_feature (61)..(62): /note="This region represents a CpG dinucleotide"
  misc_feature (61)..(61): /note="Nucleotide may be methylated to form 5-methylcytosine"
aagagatggggaagagctcattggtggagcagtcagaatacacacaacattgatcaattacgttcgttatcttctctaggtggagttcctgttacccccagaacattgacacacaacagggt

SEQ ID NO: 13202 - DNA, 122 bp, Homo sapiens
  misc_feature (61)..(62): /note="This region represents a CpG dinucleotide"
  misc_feature (61)..(61): /note="Nucleotide may be methylated to form 5-methylcytosine"
acttccttcatttccgtgttagctcatacctgacattctgatggaatcaacttttccattcggtgtgtaaccaacagtagatggggattacaacagaagtttgaaatctaggccacgcacgg

SEQ ID NO: 13203 - DNA, 122 bp, Homo sapiens
  misc_feature (61)..(62): /note="This region represents a CpG dinucleotide"
  misc_feature (61)..(61): /note="Nucleotide may be methylated to form 5-methylcytosine"
attgtttactactttactaatgtctgtgatctgatggtatctctgtttcaggagtggtgacgcctaagctatcactggacatatcaaggacttcactaaattagcaggtaccactggtcttc

SEQ ID NO: 13204 - DNA, 122 bp, Homo sapiens
  misc_feature (61)..(62): /note="This region represents a CpG dinucleotide"
  misc_feature (61)..(61): /note="Nucleotide may be methylated to form 5-methylcytosine"
ctatgtcctggtcctttcaccccggggccaaagaggattccaaaatctattagtacaagtcgagtttgattggcagtggtgtttacaatcaactgatcaccagttacagatttctttcttcc

SEQ ID NO: 13205 - DNA, 122 bp, Homo sapiens
  misc_feature (61)..(62): /note="This region represents a CpG dinucleotide"
  misc_feature (61)..(61): /note="Nucleotide may be methylated to form 5-methylcytosine"
accatgccactggtttccacaggtatgagttgcgtttccccaattactatagttttgttccgtttgcctatgttattctttgctttatacacataagcacaactcttaaatagaattcagtt

SEQ ID NO: 13206 - DNA, 122 bp, Homo sapiens
  misc_feature (61)..(62): /note="This region represents a CpG dinucleotide"
  misc_feature (61)..(61): /note="Nucleotide may be methylated to form 5-methylcytosine"
aacgacctggcatgctctgataagaaaacgctttataatctcgccaactaccttaactgccgtacactcccaacacgctcccgccaaagattaaagtgtggaaattggacctgttttttcct

SEQ ID NO: 13207 - DNA, 122 bp, Homo sapiens
  misc_feature (61)..(62): /note="This region represents a CpG dinucleotide"
  misc_feature (61)..(61): /note="Nucleotide may be methylated to form 5-methylcytosine"
ccgagaacaacagcggtaggaaatcattggagttctcaaattgctccccccacccccacccgcctcgagtttatttaagtgacatcaagggattagagcgaagtcggtcagtagagcactgc

SEQ ID NO: 13208 - DNA, 122 bp, Homo sapiens
  misc_feature (61)..(62): /note="This region represents a CpG dinucleotide"
  misc_feature (61)..(61): /note="Nucleotide may be methylated to form 5-methylcytosine"
aggccatctgacttcagaatctgagctctaaccaccatgttatacagtttagcctgctcacgttggttcttagcacttgcaactaagacgtattagctaaatagggctcctcagtctggccc

SEQ ID NO: 13209 - DNA, 122 bp, Homo sapiens
  misc_feature (61)..(62): /note="This region represents a CpG dinucleotide"
  misc_feature (61)..(61): /note="Nucleotide may be methylated to form 5-methylcytosine"
agattcagatgcatgtactgacactcacgtcagtaacatcggctcaggttagactttggtcgtcttatccttcgactacctaagggactcatggccagtatattttacaacccccagtgcca

SEQ ID NO: 13210 - DNA, 122 bp, Homo sapiens
  misc_feature (61)..(62): /note="This region represents a CpG dinucleotide"
  misc_feature (61)..(61): /note="Nucleotide may be methylated to form 5-methylcytosine"
aaatgtctttgccttcactgggaatggcatcaggagggctccctgagagctctttgctgacgccctgcaggtttataaaatgatgcttccccagatcataaccagtaactcatgtgtacaca

SEQ ID NO: 13211 - DNA, 122 bp, Homo sapiens
  misc_feature (61)..(62): /note="This region represents a CpG dinucleotide"
  misc_feature (61)..(61): /note="Nucleotide may be methylated to form 5-methylcytosine"
tcaacagtttgtaagaattgtactgtgcctagtgaaccaaatgcagacctctccaaagctcgctcagaacatttacaagatgaggaaaattcaaattaagagtcaaaggcatttcagggctg

SEQ ID NO: 13212 - DNA, 122 bp, Homo sapiens
  misc_feature (61)..(62): /note="This region represents a CpG dinucleotide"
  misc_feature (61)..(61): /note="Nucleotide may be methylated to form 5-methylcytosine"
ctccaggcgtgagccaccacccccggcctctttcatgaatttcattcagacaatctcttacggcattttctgtcttaatctaggataaggtttcttaacattggctctgttgacatttgggt

SEQ ID NO: 13213 - DNA, 122 bp, Homo sapiens
  misc_feature (61)..(62): /note="This region represents a CpG dinucleotide"
  misc_feature (61)..(61): /note="Nucleotide may be methylated to form 5-methylcytosine"
agattgaagatggacatttatttctcagttgtggaggctggaagtctaagccctagatttcgttcctggtgagagttttcttcccggcatgcacgtggctgccttcttgctgtgtcctcaca

SEQ ID NO: 13214 - DNA, 122 bp, Homo sapiens
  misc_feature (61)..(62): /note="This region represents a CpG dinucleotide"
  misc_feature (61)..(61): /note="Nucleotide may be methylated to form 5-methylcytosine"
ttgtcatcaccttcacctatcaagcagcctggagcttatcgactgtctaggaaaacatcacgagcacattctaggggcaccccacccccgggcacagcacaggaggccaagccaggctggag

SEQ ID NO: 13215 - DNA, 122 bp, Homo sapiens
  misc_feature (61)..(62): /note="This region represents a CpG dinucleotide"
  misc_feature (61)..(61): /note="Nucleotide may be methylated to form 5-methylcytosine"
ataattaaaaagttatgaccatttcagaaaactaggctttatggaagtaactttaaagtacgtggttttataaataagcatttgtaggaggctgagacaggagaatcgcttgaacctgggag

SEQ ID NO: 13216 - DNA, 122 bp, Homo sapiens
  misc_feature (61)..(62): /note="This region represents a CpG dinucleotide"
  misc_feature (61)..(61): /note="Nucleotide may be methylated to form 5-methylcytosine"
gaatgggatggaggagggagaggatacaggggtgaatcacagggcaggctagctaggaggcgagaacagccagcagtctggatgagcacttcagccctcatcacacttgtgccagccctggc

SEQ ID NO: 13217 - DNA, 122 bp, Homo sapiens
  misc_feature (61)..(62): /note="This region represents a CpG dinucleotide"
  misc_feature (61)..(61): /note="Nucleotide may be methylated to form 5-methylcytosine"
tttgatgaagcattccctcagttttttatagtatactggctggctccttctttaggtaagcgtatttttatttaatatgtctgaaagattagggtattttaaaatatgatatgtgtatatca

SEQ ID NO: 13218 - DNA, 122 bp, Homo sapiens
  misc_feature (61)..(62): /note="This region represents a CpG dinucleotide"
  misc_feature (61)..(61): /note="Nucleotide may be methylated to form 5-methylcytosine"
ctggtcgtggtggtgtgcacctgtgcctgtagtcccagcagctactcgggagactgaggacgaaaatagggaagcctgaatataaattagctataaaataaacccaaagaaagtacaaggaa

SEQ ID NO: 13219 - DNA, 122 bp, Homo sapiens
  misc_feature (61)..(62): /note="This region represents a CpG dinucleotide"
  misc_feature (61)..(61): /note="Nucleotide may be methylated to form 5-methylcytosine"
tttaaaactttgacattcagttgcaaatatttaataataaaaatatataagctgataaatcgttttaaataaaatgatgtaaggagaggttaagtagatcttaaagtttctaattcaattgt

SEQ ID NO: 13220 - DNA, 122 bp, Homo sapiens
  misc_feature (61)..(62): /note="This region represents a CpG dinucleotide"
  misc_feature (61)..(61): /note="Nucleotide may be methylated to form 5-methylcytosine"
ggaggagaacgcggaggaactgcaaattcctgcctctcccagcaactgtgaagggacctacgttgattgcgtgcccaccacacatctttaccacgtatgttgtattgtagggagagtggttt

SEQ ID NO: 13221 - DNA, 122 bp, Homo sapiens
  misc_feature (61)..(62): /note="This region represents a CpG dinucleotide"
  misc_feature (61)..(61): /note="Nucleotide may be methylated to form 5-methylcytosine"
aaattaatgccaaattgttccttatcagtgagtcatcggcactgctttctgctcccgtagcgccctgtacagatttccgtcagcacttaccatgtcgtattgtcttttccattaggcaggga

SEQ ID NO: 13222 - DNA, 122 bp, Homo sapiens
  misc_feature (61)..(62): /note="This region represents a CpG dinucleotide"
  misc_feature (61)..(61): /note="Nucleotide may be methylated to form 5-methylcytosine"
ccctgtccctgccaaggtagtgtgtgactctacctttcatccttttccctggaataggaacgtgtatccagcataaaaacatttttgaatggtgaagcccttcagggtcttaacctcctgac

SEQ ID NO: 13223 - DNA, 122 bp, Homo sapiens
  misc_feature (61)..(62): /note="This region represents a CpG dinucleotide"
  misc_feature (61)..(61): /note="Nucleotide may be methylated to form 5-methylcytosine"
aaaaaaaaaaaaaaaaattaaaaacccaatgaggtggctactgttatcatccccattttacggatgaggacatgggtacatagagattaagtaacttgccaaagatctcacaactggtaagt

SEQ ID NO: 13224 - DNA, 122 bp, Homo sapiens
  misc_feature (61)..(62): /note="This region represents a CpG dinucleotide"
  misc_feature (61)..(61): /note="Nucleotide may be methylated to form 5-methylcytosine"
ctggtgaaggagccgggccgtggggacaaggagcggctgtcaaggtaccttgtgtgtgtgcgtgcgtgtgtgtgcgtgtgtgtggtggcggtgaagtgtttgaccggattggataaaaataa

SEQ ID NO: 13225 - DNA, 122 bp, Homo sapiens
  misc_feature (61)..(62): /note="This region represents a CpG dinucleotide"
  misc_feature (61)..(61): /note="Nucleotide may be methylated to form 5-methylcytosine"
ctcctgggcatttctttaaactattcagttacagttgatcagcgcaacataacacctctgcgtagcaggcacagttggttgcctccccataggaaggggaacctatgtttcatattgcatat

SEQ ID NO: 13226 - DNA, 122 bp, Homo sapiens
  misc_feature (61)..(62): /note="This region represents a CpG dinucleotide"
  misc_feature (61)..(61): /note="Nucleotide may be methylated to form 5-methylcytosine"
ggaaggtgtggctgcctcatcttggcatgccagctactgagagcagtcggaatgggtgcccgcacttgggtttggactctgtcatgtggtgttggctttgctggggatgttgtctgctggtc

SEQ ID NO: 13227 - DNA, 122 bp, Homo sapiens
  misc_feature (61)..(62): /note="This region represents a CpG dinucleotide"
  misc_feature (61)..(61): /note="Nucleotide may be methylated to form 5-methylcytosine"
cagtacactaaatgtatggaattatcctctcttacagtcagcacacctttgttgctgtcacgtaagtaggcacagtaaatataaatggaaaagaataaactccctctgttgggtcaacaggt

SEQ ID NO: 13228 - DNA, 122 bp, Homo sapiens
  misc_feature (61)..(62): /note="This region represents a CpG dinucleotide"
  misc_feature (61)..(61): /note="Nucleotide may be methylated to form 5-methylcytosine"
gctgtcttcctagcttgcagacaagtgccttctcaatgtgtcctcacatggcctttcttccgtgcatgagtgaagagaaagctctctggcatcacccttttctcataagggcactaatccta

SEQ ID NO: 13229 - DNA, 122 bp, Homo sapiens
  misc_feature (61)..(62): /note="This region represents a CpG dinucleotide"
  misc_feature (61)..(61): /note="Nucleotide may be methylated to form 5-methylcytosine"
taatgcacggcgttcagcactgacgatgtgtttagcagctgtggctgtgtctcagttcaccgctcattctctgagcccttcctgcaagacctgccctggcctcagaacacggagggaagcag

SEQ ID NO: 13230 - DNA, 122 bp, Homo sapiens
  misc_feature (61)..(62): /note="This region represents a CpG dinucleotide"
  misc_feature (61)..(61): /note="Nucleotide may be methylated to form 5-methylcytosine"
cattttcatttcatttttaataaaccgttttgctgtgtcacccaggctgcagggctttgacgccatcctagctcattgctgcctagatctgctgggctcaagtgatcttcctccttcaacct

SEQ ID NO: 13231 - DNA, 122 bp, Homo sapiens
  misc_feature (61)..(62): /note="This region represents a CpG dinucleotide"
  misc_feature (61)..(61): /note="Nucleotide may be methylated to form 5-methylcytosine"
gcctgcaatgaggttttctgtttcctcattccaagtccatttgcagctcttcagcctcagcgcctgtgtgctgtactactgtgcattgggagaaccagggcaacaatcttaatggcatttgt

SEQ ID NO: 13232 - DNA, 122 bp, Homo sapiens
  misc_feature (61)..(62): /note="This region represents a CpG dinucleotide"
  misc_feature (61)..(61): /note="Nucleotide may be methylated to form 5-methylcytosine"
ggctgttttttttgttattgttgttcttcaaaaaagaaattgtttctttctgcagttttacgacatcctcacaccatttagcactggtgataagatgccaccaaggctacatggtgggaaga

SEQ ID NO: 13233 - DNA, 122 bp, Homo sapiens
  misc_feature (61)..(62): /note="This region represents a CpG dinucleotide"
  misc_feature (61)..(61): /note="Nucleotide may be methylated to form 5-methylcytosine"
tctgcaaaccacattgctgctttgtcagctgggtccctggtaggttctgccaatggagggcgctagagggagcctgggggactggtggagggagaggagttgggctcatcctgtctttgtcc

SEQ ID NO: 13234 - DNA, 122 bp, Homo sapiens
  misc_feature (61)..(62): /note="This region represents a CpG dinucleotide"
  misc_feature (61)..(61): /note="Nucleotide may be methylated to form 5-methylcytosine"
gtgatagaagattgatgtggtagtcatggagatgagcctcccaacaccccccaccccgcccgctgttcaaggaagggcctgctgcccagctgcagggagtttggacagcagacagcctccag

SEQ ID NO: 13235 - DNA, 122 bp, Homo sapiens
  misc_feature (61)..(62): /note="This region represents a CpG dinucleotide"
  misc_feature (61)..(61): /note="Nucleotide may be methylated to form 5-methylcytosine"
ggagaagaggaggtagacctaggagccaacaaatggctatcaatcccaccaaataggctccgcagtggggttgctaaacaacgaagcttccagaagcggaccccagttcccaccctcttgct

SEQ ID NO: 13236 - DNA, 122 bp, Homo sapiens
  misc_feature (61)..(62): /note="This region represents a CpG dinucleotide"
  misc_feature (61)..(61): /note="Nucleotide may be methylated to form 5-methylcytosine"
cagtgtccccttggcaccatgcctgccacatactgtgggctatccccattggcaccaggccgcacacgggaggactcagacaccctgctggactctagccaagctctgaatggctcttccca

SEQ ID NO: 13237 - DNA, 122 bp, Homo sapiens
  misc_feature (61)..(62): /note="This region represents a CpG dinucleotide"
  misc_feature (61)..(61): /note="Nucleotide may be methylated to form 5-methylcytosine"
gtgaagtcagccccttacacctcctccaggcacagctgtggggagcatgtcccgagaaggcgcaggaagaggcccaggccacgtgtcccgtgtggtcagcctggggaccagagttaaaacca

SEQ ID NO: 13238 - DNA, 122 bp, Homo sapiens
  misc_feature (61)..(62): /note="This region represents a CpG dinucleotide"
  misc_feature (61)..(61): /note="Nucleotide may be methylated to form 5-methylcytosine"
tataattttccaagtaataatatcattaaaagtttaactttcttttcacatatcatataacgcttttgactctcctacagagtaataggggaaaaagtttataataaatctgataaaaccca

SEQ ID NO: 13239 - DNA, 122 bp, Homo sapiens
  misc_feature (61)..(62): /note="This region represents a CpG dinucleotide"
  misc_feature (61)..(61): /note="Nucleotide may be methylated to form 5-methylcytosine"
cctttacctcctggagtggtctatgctaatctagcgccagcccagacccctcctgcatatcgatgggcggcagggaccgccgctgaaacaggcagagccctggctcaccggggaaggggtgg

SEQ ID NO: 13240 - DNA, 122 bp, Homo sapiens
  misc_feature (61)..(62): /note="This region represents a CpG dinucleotide"
  misc_feature (61)..(61): /note="Nucleotide may be methylated to form 5-methylcytosine"
gatgattctctctggaataacataaatggctctttgagagaccatgtctttgataagcagcggtgcaactctgacagccaatctgctgaatgtcgaacagagcactcagctttctacaatga

SEQ ID NO: 13241 - DNA, 122 bp, Homo sapiens
  misc_feature (61)..(62): /note="This region represents a CpG dinucleotide"
  misc_feature (61)..(61): /note="Nucleotide may be methylated to form 5-methylcytosine"
ggaggggaaagggggagcaggcacgttacatggtgaaagcaggagcaagtgagagcgaggcgggaaggggagtgccacacacttgcaagaactcactgtcaggaagacagcaccaagctgtg

SEQ ID NO: 13242 - DNA, 122 bp, Homo sapiens
  misc_feature (61)..(62): /note="This region represents a CpG dinucleotide"
  misc_feature (61)..(61): /note="Nucleotide may be methylated to form 5-methylcytosine"
ccaggcacaaggcctgtgtcacctccatctcagacctagagggaggagaatatctggccccgtttcctgtgatttcctcaggccccctgccagagtgtgattagtaaatgcaagtcaggctg

SEQ ID NO: 13243 - DNA, 122 bp, Homo sapiens
  misc_feature (61)..(62): /note="This region represents a CpG dinucleotide"
  misc_feature (61)..(61): /note="Nucleotide may be methylated to form 5-methylcytosine"
cccctctgccactgccacagcagcgattctgtgccagctaccctctgcctggggaagaaacgaagagcctgagggctacagctgggcttacagcacaccacagtcactatgtggagaggagc

SEQ ID NO: 13244 - DNA, 122 bp, Homo sapiens
  misc_feature (61)..(62): /note="This region represents a CpG dinucleotide"
  misc_feature (61)..(61): /note="Nucleotide may be methylated to form 5-methylcytosine"
tctaaatctcttgcgtggaacagtaactttggacaattcacttaactctctcagtgcctccgttttctctgtaaaattggggtgatgactatcatttacctatggtattagggtgaggatta

SEQ ID NO: 13245 - DNA, 122 bp, Homo sapiens
  misc_feature (61)..(62): /note="This region represents a CpG dinucleotide"
  misc_feature (61)..(61): /note="Nucleotide may be methylated to form 5-methylcytosine"
gataggaagcattagaggtagtagtgggggtttgcagttttagacagggagagcagggaacgcttcactgaaaagaaaacagctgagtcaagtgaaggcctgaaggaagtgaggtgccagtc

SEQ ID NO: 13246 - DNA, 122 bp, Homo sapiens
  misc_feature (61)..(62): /note="This region represents a CpG dinucleotide"
  misc_feature (61)..(61): /note="Nucleotide may be methylated to form 5-methylcytosine"
ccccttgggctttgtacaaggtctcacaatgccccctgacttgggtcttggttctactgacgcactgtggcagttttgtctaaggtacatgtgggaatccaccctcctggcaatgtgctggg

SEQ ID NO: 13247 - DNA, 122 bp, Homo sapiens
  misc_feature (61)..(62): /note="This region represents a CpG dinucleotide"
  misc_feature (61)..(61): /note="Nucleotide may be methylated to form 5-methylcytosine"
gatgtttccagaagagactggcctgtgagtgggtgggctgagaagggaagacccaccctccgtgtgaaaaggcaccatccaatcagctggggtccagatgaaacaaaaagagtagagggaca

SEQ ID NO: 13248 - DNA, 122 bp, Homo sapiens
  misc_feature (61)..(62): /note="This region represents a CpG dinucleotide"
  misc_feature (61)..(61): /note="Nucleotide may be methylated to form 5-methylcytosine"
ttcatagagagaggagaaaatgaaatcagaaaaaaaagcaattttttctctgtgtttctacgagcagagacttagaaaaacacttgacatgaagagaagttccagggacatgagttctgaca

SEQ ID NO: 13249 - DNA, 122 bp, Homo sapiens
  misc_feature (61)..(62): /note="This region represents a CpG dinucleotide"
  misc_feature (61)..(61): /note="Nucleotide may be methylated to form 5-methylcytosine"
cattcatttttaggactcttaaaaatgccatgtggggcttctgtaggtacagggaggaggcgtgacattgctaaagagtgtgagtttgtgtgacacaggccatagacacctgccttaacaga

SEQ ID NO: 13250 - DNA, 122 bp, Homo sapiens
  misc_feature (61)..(62): /note="This region represents a CpG dinucleotide"
  misc_feature (61)..(61): /note="Nucleotide may be methylated to form 5-methylcytosine"
aagagggaggtgaagtagaaactcacattttagcctaaaattaccttgcggttgagaaaacgtttgctttgagtaacatgccctctgttggaatatgagcattgacaaggatgaatgatgtt

SEQ ID NO: 13251 - DNA, 122 bp, Homo sapiens
  misc_feature (61)..(62): /note="This region represents a CpG dinucleotide"
  misc_feature (61)..(61): /note="Nucleotide may be methylated to form 5-methylcytosine"
aggagtgaggcaacagcagctgagtctgagctttgactcaaaagagccaacaagttgcaccggtattcatcattcattcactctgtgaatgtagtcaggataacaatggcatttgcatccca

SEQ ID NO: 13252 - DNA, 122 bp, Homo sapiens
  misc_feature (61)..(62): /note="This region represents a CpG dinucleotide"
  misc_feature (61)..(61): /note="Nucleotide may be methylated to form 5-methylcytosine"
cgggtccacacgggcggccaagagtgcttgggccgtgctattgggcagcgacaagttttgcgtcaggaaacgccagagctcctgcgggtttctggccaccgagtccagagagaaggaagaca

SEQ ID NO: 13253 - DNA, 122 bp, Homo sapiens
  misc_feature (61)..(62): /note="This region represents a CpG dinucleotide"
  misc_feature (61)..(61): /note="Nucleotide may be methylated to form 5-methylcytosine"
taatgaaccccactgaggtcttctgctcagtccctggaagattgtcgctcctcagctctacgtctaaatacaaagtgacagtggctgaagtacagaggcgactgtccccacctgaatgctta

SEQ ID NO: 13254 - DNA, 122 bp, Homo sapiens
  misc_feature (61)..(62): /note="This region represents a CpG dinucleotide"
  misc_feature (61)..(61): /note="Nucleotide may be methylated to form 5-methylcytosine"
cacagcaggacgcagctgtgatatgtgggggatagcgtttactaaataaagaaactcaggcgtcatgacctgaggaagctcatcttccactgaggtggtgttaatgaaaggtcacgtggcct

SEQ ID NO: 13255 - DNA, 122 bp, Homo sapiens
  misc_feature (61)..(62): /note="This region represents a CpG dinucleotide"
  misc_feature (61)..(61): /note="Nucleotide may be methylated to form 5-methylcytosine"
ggggggtacctgcagaacagccacatggaccaaggccaccaagacagactgaggtcaggacgggtgaaggagtgctaggatcatctatctggattttacaataaagaaaaagaaagttacta

SEQ ID NO: 13256 - DNA, 122 bp, Homo sapiens
  misc_feature (61)..(62): /note="This region represents a CpG dinucleotide"
  misc_feature (61)..(61): /note="Nucleotide may be methylated to form 5-methylcytosine"
caccagctaaatgtcagacaaagcacaagggaattggagcttgatcaatttcaaaggtttcgttcttagctacagagactgctctgattacctgaagggcatgtactgcttgggaatgctgc

SEQ ID NO: 13257 - DNA, 122 bp, Homo sapiens
  misc_feature (61)..(62): /note="This region represents a CpG dinucleotide"
  misc_feature (61)..(61): /note="Nucleotide may be methylated to form 5-methylcytosine"
acctctggcagaggtgctaatgaacagcagaatggccacaaggcagcatacccaacgtagcgaagaggcaagggagtgaggtaatcctccagctgaatataaaccactgataatgccagctt

SEQ ID NO: 13258 - DNA, 122 bp, Homo sapiens
  misc_feature (61)..(62): /note="This region represents a CpG dinucleotide"
  misc_feature (61)..(61): /note="Nucleotide may be methylated to form 5-methylcytosine"
ggcacccgagacagaactatagcagatgcaagagccaaaaacccacagccgcttgactcacggatatactatgatgtcaagctgcagtcaccggtggtcacaatgggcagcctaagtcatca

SEQ ID NO: 13259 - DNA, 122 bp, Homo sapiens
  misc_feature (61)..(62): /note="This region represents a CpG dinucleotide"
  misc_feature (61)..(61): /note="Nucleotide may be methylated to form 5-methylcytosine"
gaaaacagtaaatgggaattctttggtagtgcagagtctgagtctgttccctctgcccagcgtctctgtttagaacatactgcaggagtgtccactgtaccaagaagggtagaaagggtcaa

SEQ ID NO: 13260 - DNA, 122 bp, Homo sapiens
  misc_feature (61)..(62): /note="This region represents a CpG dinucleotide"
  misc_feature (61)..(61): /note="Nucleotide may be methylated to form 5-methylcytosine"
gaaatcctctgtcttgtttacactacattaaaatctcccttccccaagcccgtccttctccgaaggctgaggtgcttatcctggagccactacttcctgcagcttgaagatgagtaaaccat

SEQ ID NO: 13261 - DNA, 122 bp, Homo sapiens
  misc_feature (61)..(62): /note="This region represents a CpG dinucleotide"
  misc_feature (61)..(61): /note="Nucleotide may be methylated to form 5-methylcytosine"
aataacccaagagaaaaatcaccaacatcccccacccactaaattctctgctgaaagacacgcagacaccgggacacttccttcacacgcgtctctccctgtcagagtccgctaccctccat

SEQ ID NO: 13262 - DNA, 122 bp, Homo sapiens
  misc_feature (61)..(62): /note="This region represents a CpG dinucleotide"
  misc_feature (61)..(61): /note="Nucleotide may be methylated to form 5-methylcytosine"
caatgaaggccagtgcagtggctcccctgtaatcccagcactttgggaggccaaggtgggcgaattgcttgaaccgaggagtttgagaccagcctgatcaacatagtgggaaccccatctct

SEQ ID NO: 13263 - DNA, 122 bp, Homo sapiens
  misc_feature (61)..(62): /note="This region represents a CpG dinucleotide"
  misc_feature (61)..(61): /note="Nucleotide may be methylated to form 5-methylcytosine"
gctgaatgaaggaaatcagtctagataacatctttgtgaaatgtatgcctatgaactctgcgtcacacaatacaaaggaaattgccattgtcctgcacaagttaggtgaacaaagcacataa

SEQ ID NO: 13264 - DNA, 122 bp, Homo sapiens
  misc_feature (61)..(62): /note="This region represents a CpG dinucleotide"
  misc_feature (61)..(61): /note="Nucleotide may be methylated to form 5-methylcytosine"
atcaatttatctatggttaagatataataaatagtgcttgtataagtaatggtccaataacgagacagaaaccacacagtaatttgaaaagagaatgcttaatataaagaatcattaactat

SEQ ID NO: 13265 - DNA, 122 bp, Homo sapiens
  misc_feature (61)..(62): /note="This region represents a CpG dinucleotide"
  misc_feature (61)..(61): /note="Nucleotide may be methylated to form 5-methylcytosine"
caccgcgattcaaactgcccattcttatcttttttgattgtagctgttaagccgatagctcgcggtagggaaggatgggccttctctacaagccgagaaggctcagggagcttcagtcaata

SEQ ID NO: 13266 - DNA, 122 bp, Homo sapiens
  misc_feature (61)..(62): /note="This region represents a CpG dinucleotide"
  misc_feature (61)..(61): /note="Nucleotide may be methylated to form 5-methylcytosine"
cccaactaggatccgctccaggcttccatcatccatgcccttccctaaccaccggccacacgggaacctgaagatcagacaatggactgtcagagcagccagctcctccctgctgctcacag

SEQ ID NO: 13267 - DNA, 122 bp, Homo sapiens
  misc_feature (61)..(62): /note="This region represents a CpG dinucleotide"
  misc_feature (61)..(61): /note="Nucleotide may be methylated to form 5-methylcytosine"
ttagtctgacttctcttctaaaatcaactctaaaatggtattttgtacttgtctcagagacgaattctgccatgatccttatgatctgtgttatgttgggccaaaggtgattactttataaa

SEQ ID NO: 13268 - DNA, 122 bp, Homo sapiens
  misc_feature (61)..(62): /note="This region represents a CpG dinucleotide"
  misc_feature (61)..(61): /note="Nucleotide may be methylated to form 5-methylcytosine"
gtgaaaaataacccaaagtcgaaacattagaattaagagtgacccaggaagtggctaaaccgaaaagaacctcaggatctttcttgtacttacataatcagtcacatgatgtcgctctacac

SEQ ID NO: 13269 - DNA, 122 bp, Homo sapiens
  misc_feature (61)..(62): /note="This region represents a CpG dinucleotide"
  misc_feature (61)..(61): /note="Nucleotide may be methylated to form 5-methylcytosine"
tgaggaccccagggctggtggtgaatgggactggagaagccgtgacttgctgttgtgttgcgattgataacactttcactggcactaaactgggatagtgttaccacaggaaggaaattcct

SEQ ID NO: 13270 - DNA, 122 bp, Homo sapiens
  misc_feature (61)..(62): /note="This region represents a CpG dinucleotide"
  misc_feature (61)..(61): /note="Nucleotide may be methylated to form 5-methylcytosine"
gatccaaagttaggtctaattactataattttgaggtaatgatgagcaaaaatgctatcccgagatgtctgcaacagctgcagtgtaatatgaaaatatctgtgatttctgttggtaacaaa

SEQ ID NO: 13271 - DNA, 122 bp, Homo sapiens
  misc_feature (61)..(62): /note="This region represents a CpG dinucleotide"
  misc_feature (61)..(61): /note="Nucleotide may be methylated to form 5-methylcytosine"
gggtcagggtgccttcttccatggctttatcggtgccacagcctaggcttagcgaaaccacgaggataaaaataggcccttctgttctccgcaccgtgagctttgtgactgatccgaggcgg

SEQ ID NO: 13272 - DNA, 122 bp, Homo sapiens
  misc_feature (61)..(62): /note="This region represents a CpG dinucleotide"
  misc_feature (61)..(61): /note="Nucleotide may be methylated to form 5-methylcytosine"
agacatctggccgttaaccacattcctacgcaggggctacactgcgcatgtccgaaggggcgtgtcaggggtggggcgaggaggaggtaccgttccgatgcagagacggtgccgagggaagg

SEQ ID NO: 13273 - DNA, 122 bp, Homo sapiens
  misc_feature (61)..(62): /note="This region represents a CpG dinucleotide"
  misc_feature (61)..(61): /note="Nucleotide may be methylated to form 5-methylcytosine"
gtaagaataattgaattaaacaaaaatgttaaaggccatctgccaaggtatgaaactcaccgatggtgttagaagtccggatagtgctgcctttgctgggaggcagtgacaaagggggcttc

SEQ ID NO: 13274 - DNA, 122 bp, Homo sapiens
  misc_feature (61)..(62): /note="This region represents a CpG dinucleotide"
  misc_feature (61)..(61): /note="Nucleotide may be methylated to form 5-methylcytosine"
tccctgctctcttcgttgttcctctgtgtttcctgcttactgcttcctccagcctgtgagcgcagcctcccctacagtggtttgcctgacctctcttgaagcaggttgcttttctagctcat

SEQ ID NO: 13275 - DNA, 122 bp, Homo sapiens
  misc_feature (61)..(62): /note="This region represents a CpG dinucleotide"
  misc_feature (61)..(61): /note="Nucleotide may be methylated to form 5-methylcytosine"
ggggacctagagagggacagaagtggctgcagggacaagctctaccatcagggggagtgccgagtgagtggccccggtccaaaagtgcagataaagaaaggatggggtggagcgtttagggg

SEQ ID NO: 13276 - DNA, 122 bp, Homo sapiens
  misc_feature (61)..(62): /note="This region represents a CpG dinucleotide"
  misc_feature (61)..(61): /note="Nucleotide may be methylated to form 5-methylcytosine"
tgtttaggttaaaaacaatgaggcaaaatttatgtgttacttttaagtttttgttgaatacggattggaaatgtagttgatcagggaactgatgaaagtaagataaaggagatacggaagaa

SEQ ID NO: 13277 - DNA, 122 bp, Homo sapiens
  misc_feature (61)..(62): /note="This region represents a CpG dinucleotide"
  misc_feature (61)..(61): /note="Nucleotide may be methylated to form 5-methylcytosine"
ttgtgtcactagccgcactaagcacttccccactagtggccccatgtggttgtgtgtcatcgctgactacctgttacaggtgaggaagctgggtggtgcagagacagaaagccggtggccca

SEQ ID NO: 13278 - DNA, 122 bp, Homo sapiens
  misc_feature (61)..(62): /note="This region represents a CpG dinucleotide"
  misc_feature (61)..(61): /note="Nucleotide may be methylated to form 5-methylcytosine"
ctaaataaatctctaaataaataaacaaataataaatgttattgtccattaagtctacagcgttaggggaagtaaactgacatttgcaaagtcattatgtgtcaagcactgtttgaagtact

SEQ ID NO: 13279 - DNA, 122 bp, Homo sapiens
  misc_feature (61)..(62): /note="This region represents a CpG dinucleotide"
  misc_feature (61)..(61): /note="Nucleotide may be methylated to form 5-methylcytosine"
tcccacagggccactgctcccagcaaagacttgcccttgtccgtagctccctgcgggtggcgctgtgtctcatgcattttgcattgtccatgcccttcacagggcccagatacaatcagcag

SEQ ID NO: 13280 - DNA, 122 bp, Homo sapiens
  misc_feature (61)..(62): /note="This region represents a CpG dinucleotide"
  misc_feature (61)..(61): /note="Nucleotide may be methylated to form 5-methylcytosine"
cagcctttttccaagtcacactgggcctttctaatcctgtaatcaacacaatactttatacggcctcaggcttgtggctcaacagggatgaaccaggccagggtgacagggaccctttcttc

SEQ ID NO: 13281 - DNA, 122 bp, Homo sapiens
  misc_feature (61)..(62): /note="This region represents a CpG dinucleotide"
  misc_feature (61)..(61): /note="Nucleotide may be methylated to form 5-methylcytosine"
taaaatgtaagctggattgcgtcattgcctggtccacaatgcccaggtggctctccatttcgctcagaggaaatgcttgagtttcaacaatggcctccagggccctatatcatctgacccca

SEQ ID NO: 13282 - DNA, 122 bp, Homo sapiens
  misc_feature (61)..(62): /note="This region represents a CpG dinucleotide"
  misc_feature (61)..(61): /note="Nucleotide may be methylated to form 5-methylcytosine"
cagtaagctaaagttatgattgaagagaattttttataaatttaatgtagcctaagtgtacggtgtgtataaaatctgcagtagtgtccagtaatgtcctaggccttcacattcactcacca

SEQ ID NO: 13283 - DNA, 122 bp, Homo sapiens
  misc_feature (61)..(62): /note="This region represents a CpG dinucleotide"
  misc_feature (61)..(61): /note="Nucleotide may be methylated to form 5-methylcytosine"
ttacatttagtcacattttcaaaagagcatgattaatgaaacagaagtgttctcatggagcgtgtgcaccatgtgctagtgacagttatatcagaacgaactacatgtagcatttatcttcc

SEQ ID NO: 13284 - DNA, 122 bp, Homo sapiens
  misc_feature (61)..(62): /note="This region represents a CpG dinucleotide"
  misc_feature (61)..(61): /note="Nucleotide may be methylated to form 5-methylcytosine"
ttttgccataacctattggttcaaagcaagtcataggttctgcccacactcaatgggaagcgaccacagaaggcatgaatatcaggaggcagggattataggggccaccttaagattccttc

SEQ ID NO: 13285 - DNA, 122 bp, Homo sapiens
  misc_feature (61)..(62): /note="This region represents a CpG dinucleotide"
  misc_feature (61)..(61): /note="Nucleotide may be methylated to form 5-methylcytosine"
cagcatgagcaggcccagtcatacatttggttccctgccccagaacagttagtggaagtgcgtgcaccacctgccaaagccagggtggccttgggtattcccacttcagttccctcctttgt

SEQ ID NO: 13286 - DNA, 122 bp, Homo sapiens
  misc_feature (61)..(62): /note="This region represents a CpG dinucleotide"
  misc_feature (61)..(61): /note="Nucleotide may be methylated to form 5-methylcytosine"
ggtcttgcaagtgggacaacagtgtgttctgccagtttgtgtcatcctgccacacctgcacgtcaggcatggagacgtgtccacaaggagcccgtgtctggtgctgagtctcctccaggacg

SEQ ID NO: 13287 - DNA, 122 bp, Homo sapiens
  misc_feature (61)..(62): /note="This region represents a CpG dinucleotide"
  misc_feature (61)..(61): /note="Nucleotide may be methylated to form 5-methylcytosine"
gcttttgctgccttgttttgtccaattctttgttcaaaaagccaagaacctgggcaactacgcttaactggtaacatatgttggggaaccagccaggaggtaagcccaaagtttaggattta

SEQ ID NO: 13288 - DNA, 122 bp, Homo sapiens
  misc_feature (61)..(62): /note="This region represents a CpG dinucleotide"
  misc_feature (61)..(61): /note="Nucleotide may be methylated to form 5-methylcytosine"
aggccagcaggaacccctggatcctactgtttagctcttgctgtggaaattcccatacatcggacaggtaccaaaggctcggagatctcagcctgtctgccccccaacaatgcaagccctgc

SEQ ID NO: 13289 - DNA, 122 bp, Homo sapiens
  misc_feature (61)..(62): /note="This region represents a CpG dinucleotide"
  misc_feature (61)..(61): /note="Nucleotide may be methylated to form 5-methylcytosine"
tgttctccacacacccagtgctgttctttcttggaccatggcagctgtgagtcagcgcaccgtgtagtttgtgcatccttgtgatgaatgcacaggatgacatttgtttccctgagctctgc

SEQ ID NO: 13290 - DNA, 122 bp, Homo sapiens
  misc_feature (61)..(62): /note="This region represents a CpG dinucleotide"
  misc_feature (61)..(61): /note="Nucleotide may be methylated to form 5-methylcytosine"
ctcttgggctaatcagatgctggataacatcaacttcctagagttaaattattacatccacgtattataatgctagtcttcagcaagtgtctccaacccaccccattctcccctagtctcca

SEQ ID NO: 13291 - DNA, 122 bp, Homo sapiens
  misc_feature (61)..(62): /note="This region represents a CpG dinucleotide"
  misc_feature (61)..(61): /note="Nucleotide may be methylated to form 5-methylcytosine"
agcgttctcatatgggggtttggaatagatggctactgagtccatagagctcactaactacgttgtgaacaatctaggactttgggatggttttactcagtgacatgatcaggtttgtattt

SEQ ID NO: 13292 - DNA, 122 bp, Homo sapiens
  misc_feature (61)..(62): /note="This region represents a CpG dinucleotide"
  misc_feature (61)..(61): /note="Nucleotide may be methylated to form 5-methylcytosine"
atcacttgaaaacactctttgactaaagtatgataccactattatacctaataaaatgaacgcttctataatatctttcaatacttgttacttaatccatattcactttccctaatttgttc

SEQ ID NO: 13293 - DNA, 122 bp, Homo sapiens
  misc_feature (61)..(62): /note="This region represents a CpG dinucleotide"
  misc_feature (61)..(61): /note="Nucleotide may be methylated to form 5-methylcytosine"
attcaaaaagtagcagagccagaatgaaaccctggtgcctggtttcaaggcatgcagtctcgccatttactacatactgtcttcaagtgaaaagaaaaacaaaaagggcaaaagtgcaacca

SEQ ID NO: 13294 - DNA, 122 bp, Homo sapiens
  misc_feature (61)..(62): /note="This region represents a CpG dinucleotide"
  misc_feature (61)..(61): /note="Nucleotide may be methylated to form 5-methylcytosine"
tcagttttgtaagcataaaaaggggaaaaataaaacccagagtttagtaaggtttagaaacgctacactcagcaagtcatagctaagtcaccgtcaccaatggtagtcaagtgtgtggtgca

SEQ ID NO: 13295 - DNA, 122 bp, Homo sapiens
  misc_feature (61)..(62): /note="This region represents a CpG dinucleotide"
  misc_feature (61)..(61): /note="Nucleotide may be methylated to form 5-methylcytosine"
tcacttggttagtaagtggctgggatgccttgcttggagatgtgtttctagctgcttagacggcatcgcctctcaggcgaggtgctcagtgagtgtcaaaaccaaaagttgagccgggcaca

SEQ ID NO: 13296 - DNA, 122 bp, Homo sapiens
  misc_feature (61)..(62): /note="This region represents a CpG dinucleotide"
  misc_feature (61)..(61): /note="Nucleotide may be methylated to form 5-methylcytosine"
ctcacaagaagacagtatctttagattgcttaataatagttctcctccttctcaaaagcccgtcacctccccacaattacatattgccctagcttctttcctgcctcctccttttccttcct

SEQ ID NO: 13297 - DNA, 122 bp, Homo sapiens
  misc_feature (61)..(62): /note="This region represents a CpG dinucleotide"
  misc_feature (61)..(61): /note="Nucleotide may be methylated to form 5-methylcytosine"
aagtggtttttttccacccttcaacttttatttgaagttccggggtacatgtgcaggatgcgcaggtttgttacatagataaatgtgccatggtggttggctgcacagatcaccccatcacc

SEQ ID NO: 13298 - DNA, 122 bp, Homo sapiens
  misc_feature (61)..(62): /note="This region represents a CpG dinucleotide"
  misc_feature (61)..(61): /note="Nucleotide may be methylated to form 5-methylcytosine"
tatctgccccatgtcatttgtcttcttgttccttatttgactcttgccagcaaatctcaccgcttgataattgagccagctactgaactgctctagcagctcagattcctttccctagctgt

SEQ ID NO: 13299 - DNA, 122 bp, Homo sapiens
  misc_feature (61)..(62): /note="This region represents a CpG dinucleotide"
  misc_feature (61)..(61): /note="Nucleotide may be methylated to form 5-methylcytosine"
cattttcttaagcagtgaaccatgcagaatactgttgctaaacatcgtttctgccttcctcgtgttctcttggtagtttttactgtttggcttgatcctgctgaggaatgtgcttaccactg

SEQ ID NO: 13300 - DNA, 122 bp, Homo sapiens
  misc_feature (61)..(62): /note="This region represents a CpG dinucleotide"
  misc_feature (61)..(61): /note="Nucleotide may be methylated to form 5-methylcytosine"
gtgttttgctttgcaactaagaccgtgacttcctgtttgatggtttgtcacttcacaggccgccacataaaccccataaaagacactctatggtggctgcaaagaaagcactgttaggttct

SEQ ID NO: 13301 - DNA, 122 bp, Homo sapiens
  misc_feature (61)..(62): /note="This region represents a CpG dinucleotide"
  misc_feature (61)..(61): /note="Nucleotide may be methylated to form 5-methylcytosine"
ggctgcttcctgtgaagggtgtggctgcacagctgcaaaccatcccatccctgcctcacccgcacaggtggtcgctgccacctaggacagcctggactttgccatctccttcttgcggagta

SEQ ID NO: 13302 - DNA, 122 bp, Homo sapiens
  misc_feature (61)..(62): /note="This region represents a CpG dinucleotide"
  misc_feature (61)..(61): /note="Nucleotide may be methylated to form 5-methylcytosine"
gatctccagacactcaggacaagtcagtgtccccaccaaggatggggctttgagaggctccgcccacctctgtttctgcacagcaggtttagcagctccattcttccccagagagccactcc

SEQ ID NO: 13303 - DNA, 122 bp, Homo sapiens
  misc_feature (61)..(62): /note="This region represents a CpG dinucleotide"
  misc_feature (61)..(61): /note="Nucleotide may be methylated to form 5-methylcytosine"
aggacagtaggaaacggaggcactgggaggtggcagaacttggccaaggttgcagttcggcggcggaggaacacaggctgtaccccagccctgctcatgcagttctcaaaggtgtcaagtta

SEQ ID NO: 13304 - DNA, 122 bp, Homo sapiens
  misc_feature (61)..(62): /note="This region represents a CpG dinucleotide"
  misc_feature (61)..(61): /note="Nucleotide may be methylated to form 5-methylcytosine"
accacaatttcctaaatctgacacttttttttttaaaggtaaagaaatcacttttacttacgtaaagagaaggggcaggtcacagactgatggtcaaagatctgaaaatcaaagaaaaaata

SEQ ID NO: 13305 - DNA, 122 bp, Homo sapiens
  misc_feature (61)..(62): /note="This region represents a CpG dinucleotide"
  misc_feature (61)..(61): /note="Nucleotide may be methylated to form 5-methylcytosine"
gaggggccggggcggagctaagatgcggaggagggtgacgcactagctctccagttcgcccgttcctggcctgacccccaccaaggcccataccgcagtaggctcctcgggctgcccctcgg

SEQ ID NO: 13306 - DNA, 122 bp, Homo sapiens
  misc_feature (61)..(62): /note="This region represents a CpG dinucleotide"
  misc_feature (61)..(61): /note="Nucleotide may be methylated to form 5-methylcytosine"
gaagacttatcacagcatattggaagctgactgctagtctgactttccctctagactgcacggcccccaaaggcaggaaatcttgttcatctggtatctccagcacagaagattgctactgg

SEQ ID NO: 13307 - DNA, 122 bp, Homo sapiens
  misc_feature (61)..(62): /note="This region represents a CpG dinucleotide"
  misc_feature (61)..(61): /note="Nucleotide may be methylated to form 5-methylcytosine"
agtgagccactgcataggcccctctagtcctgagtgctccactctctcccagtgacctcacggcagtaactagggagattttatcaactaacatctcagagcaaaaagggaaaattcctcac

SEQ ID NO: 13308 - DNA, 122 bp, Homo sapiens
  misc_feature (61)..(62): /note="This region represents a CpG dinucleotide"
  misc_feature (61)..(61): /note="Nucleotide may be methylated to form 5-methylcytosine"
atatctcacaacaagagagagagagggagggaggagcctgcaccggctgaactatttcagcgtcctggggctgctgtagtgcaggcttacaacatcagaaatttattctctcccagttctgg

SEQ ID NO: 13309 - DNA, 122 bp, Homo sapiens
  misc_feature (61)..(62): /note="This region represents a CpG dinucleotide"
  misc_feature (61)..(61): /note="Nucleotide may be methylated to form 5-methylcytosine"
tggtcctccaggtctttgattgctattagtaagtcccaagacacagtctttacaccaagtcgctgtgtgccttgggcaagaaactctccctctctgagactgtgtttccacactggtagaag

SEQ ID NO: 13310 - DNA, 122 bp, Homo sapiens
  misc_feature (61)..(62): /note="This region represents a CpG dinucleotide"
  misc_feature (61)..(61): /note="Nucleotide may be methylated to form 5-methylcytosine"
aagcctcatcaataaataaaggggtgagcaatagacagtcatatgcaatgatacatatgacgcaatgagggagcaatgatacatatgatgcaatgacagaacaatgatgaagttagaaaata

SEQ ID NO: 13311 - DNA, 122 bp, Homo sapiens
  misc_feature (61)..(62): /note="This region represents a CpG dinucleotide"
  misc_feature (61)..(61): /note="Nucleotide may be methylated to form 5-methylcytosine"
cttgtttatgctttgactaacgggacttacggtatgatgctgaatgtatctgactctgagcgttttagtaatgaccactgaaatattttcctccgaattcctgtaaattttcatcctgagga

SEQ ID NO: 13312 - DNA, 122 bp, Homo sapiens
  misc_feature (61)..(62): /note="This region represents a CpG dinucleotide"
  misc_feature (61)..(61): /note="Nucleotide may be methylated to form 5-methylcytosine"
cttgaagggttttaagaagggaaatgacatgattagatttctgtcttaaaaagaccaatgcggcaacaatttggaagttagatggtaggtggggacatcagttaggaggctaaggtagtgag

SEQ ID NO: 13313 - DNA, 122 bp, Homo sapiens
  misc_feature (61)..(62): /note="This region represents a CpG dinucleotide"
  misc_feature (61)..(61): /note="Nucleotide may be methylated to form 5-methylcytosine"
tatggtcacatggcaagagtcactcttagaagtgtcatgggtagaaggcaagtggctcctcgggatctgtgtcatctgaaagaagctcctggtcagagccccctgagcgagtgatacaaaaa

SEQ ID NO: 13314 - DNA, 122 bp, Homo sapiens
  misc_feature (61)..(62): /note="This region represents a CpG dinucleotide"
  misc_feature (61)..(61): /note="Nucleotide may be methylated to form 5-methylcytosine"
aattagtaggtaatagatttttattataaaatggattataaaatatgaaatgaaaatgtacgtgggccatacaaaggggaaaatgaaatggcaaactccataagacaaagacagatgacaca

SEQ ID NO: 13315 - DNA, 122 bp, Homo sapiens
  misc_feature (61)..(62): /note="This region represents a CpG dinucleotide"
  misc_feature (61)..(61): /note="Nucleotide may be methylated to form 5-methylcytosine"
ttcaacaaagccttggggaatgaatcaccccggagtgtaagatggtgacatcctgggaagcggagatttgattggcatactgcttgatggttttctgagttcatctgaatcgagttcttact

SEQ ID NO: 13316 - DNA, 122 bp, Homo sapiens
  misc_feature (61)..(62): /note="This region represents a CpG dinucleotide"
  misc_feature (61)..(61): /note="Nucleotide may be methylated to form 5-methylcytosine"
acctttgccgcctgtacccgcctccccgacctgcaacccagccccacggacaatccagatcgagttcccacagcatagctcgtctctgctggaatctctgaaccgccacaggctagagggaa

SEQ ID NO: 13317 - DNA, 122 bp, Homo sapiens
  misc_feature (61)..(62): /note="This region represents a CpG dinucleotide"
  misc_feature (61)..(61): /note="Nucleotide may be methylated to form 5-methylcytosine"
tttttaggcctgcccccacagtgcctcattctatttttatgttagacactgtttctctttcgtattgccagatgccctttctactgtggctcaccaaatcctccagcaacagctgttctacc

SEQ ID NO: 13318 - DNA, 122 bp, Homo sapiens
  misc_feature (61)..(62): /note="This region represents a CpG dinucleotide"
  misc_feature (61)..(61): /note="Nucleotide may be methylated to form 5-methylcytosine"
ttggtattgaggatacactggtgaacaaaacagatgtggctagttgggcatggtggctcacgcctgtaatcccagcattttgggaggccgaggtaggcggatcacttgaggccaggagtttg

SEQ ID NO: 13319 - DNA, 122 bp, Homo sapiens
  misc_feature (61)..(62): /note="This region represents a CpG dinucleotide"
  misc_feature (61)..(61): /note="Nucleotide may be methylated to form 5-methylcytosine"
gatgccgtttccctttgtggcctaggtgcagtggaggcttgcctcttgcatcagctgagacgccgtgccgctggcttcctgcgcagtgacaagatggcagccctgttcaccaaggtggggaa

SEQ ID NO: 13320 - DNA, 122 bp, Homo sapiens
  misc_feature (61)..(62): /note="This region represents a CpG dinucleotide"
  misc_feature (61)..(61): /note="Nucleotide may be methylated to form 5-methylcytosine"
aattcaacattaagggccaaccctgaccacagctgagccgtgtgaagaggctgacagcggcgtggccaccacccaggatggagagaaaggcactgtgaggtgttaatggaaaaatccaactt

SEQ ID NO: 13321 - DNA, 122 bp, Homo sapiens
  misc_feature (61)..(62): /note="This region represents a CpG dinucleotide"
  misc_feature (61)..(61): /note="Nucleotide may be methylated to form 5-methylcytosine"
tcagtaattgagtacagatcagccatattttgtacatatccacttgatggcttagcttttcgtatatttaatcagtcatagtggctttcattacatatctagacataacatttctataaatg

SEQ ID NO: 13322 - DNA, 122 bp, Homo sapiens
  misc_feature (61)..(62): /note="This region represents a CpG dinucleotide"
  misc_feature (61)..(61): /note="Nucleotide may be methylated to form 5-methylcytosine"
ggtcagccaaacacagcttcagagcctgggcttctgctccctccacccaccagcccccagcgggccctttcatgggctgggtcactaactgacatccttccaggaaggaaggaaggcgttcc

SEQ ID NO: 13323 - DNA, 122 bp, Homo sapiens
  misc_feature (61)..(62): /note="This region represents a CpG dinucleotide"
  misc_feature (61)..(61): /note="Nucleotide may be methylated to form 5-methylcytosine"
caaactagacacgggcatcaagggagactggcagacgtccatcctggtgccttcagcaggcgagcatctccagccgggaacaatgccagtgcctgagcctcaagataagagccctctgcctt

SEQ ID NO: 13324 - DNA, 122 bp, Homo sapiens
  misc_feature (61)..(62): /note="This region represents a CpG dinucleotide"
  misc_feature (61)..(61): /note="Nucleotide may be methylated to form 5-methylcytosine"
tgtgtgaggaagggtattgcataagtgaagagaggaacttaagattcatgcttaaatacacgcactggaatgctgtgtctctgacaaacagaaatcaaatcagcacaaaggtaatattttac

SEQ ID NO: 13325 - DNA, 122 bp, Homo sapiens
  misc_feature (61)..(62): /note="This region represents a CpG dinucleotide"
  misc_feature (61)..(61): /note="Nucleotide may be methylated to form 5-methylcytosine"
tccacgtggagtgggactgagaggcacaggtggctgaggggacccgcctgggatgtgaggcgcaggtgagtcgatgaacgccccctcctggtgtgagccgcccgctccccaaacgacgtccc

SEQ ID NO: 13326 - DNA, 122 bp, Homo sapiens
  misc_feature (61)..(62): /note="This region represents a CpG dinucleotide"
  misc_feature (61)..(61): /note="Nucleotide may be methylated to form 5-methylcytosine"
gtcataaagaacttgattttgccaacttcctcactggatcaaaggcctttgtcagactttcgccactgtttgtcttatgcagcaagatctctctcagtgacacggctgggaagtaaagtatc

SEQ ID NO: 13327 - DNA, 122 bp, Homo sapiens
  misc_feature (61)..(62): /note="This region represents a CpG dinucleotide"
  misc_feature (61)..(61): /note="Nucleotide may be methylated to form 5-methylcytosine"
aaaataaaagctatttttcctctctgacttggcaaccctgcttgaagttaggtttaggctcgctttttaaatcagtctgtgtgtgtgtgtgtgtgtgtgtgtgtgtgtgtgtgtgtgtgtgt

SEQ ID NO: 13328 - DNA, 122 bp, Homo sapiens
  misc_feature (61)..(62): /note="This region represents a CpG dinucleotide"
  misc_feature (61)..(61): /note="Nucleotide may be methylated to form 5-methylcytosine"
aaccattctgcttcatgagccttgaggaaggcacagtgactcagcctcaggacatgggtccgggcgcagggaatgggtggagaagtggggagccagggcttaatcagggaaacttctccacg

SEQ ID NO: 13329 - DNA, 122 bp, Homo sapiens
  misc_feature (61)..(62): /note="This region represents a CpG dinucleotide"
  misc_feature (61)..(61): /note="Nucleotide may be methylated to form 5-methylcytosine"
gaaatgtctaatcctatgtacaatcctaccactctttatatttcagtaaacttgctaagccgcaaggaacatagactctcatatcactttcacctgaacgggaactattatattcctgacag

SEQ ID NO: 13330 - DNA, 122 bp, Homo sapiens
  misc_feature (61)..(62): /note="This region represents a CpG dinucleotide"
  misc_feature (61)..(61): /note="Nucleotide may be methylated to form 5-methylcytosine"
tgcggggccggccctccatccactcctcggaacgcggcactccgcggcctcccgggtagacggtctccaccactacttgcttctgttcatctctgacggcagagttaaataaaattaatact

SEQ ID NO: 13331 - DNA, 122 bp, Homo sapiens
  misc_feature (61)..(62): /note="This region represents a CpG dinucleotide"
  misc_feature (61)..(61): /note="Nucleotide may be methylated to form 5-methylcytosine"
tccctgtgtatatttccaagattttcctagtgataacatcactctaagtcacttgcttcacgcatgttttttgagtgaaggaaaaagctttggaattaataaccactccttaggcgttgcac

SEQ ID NO: 13332 - DNA, 122 bp, Homo sapiens
  misc_feature (61)..(62): /note="This region represents a CpG dinucleotide"
  misc_feature (61)..(61): /note="Nucleotide may be methylated to form 5-methylcytosine"
aaagtagtcacacacattaagggaaagcatgagatataatgcagactgtcgaagataagacgtgcacatgcgtatttttattacatgtgtttagcattttggttgcaactacctaaagttgt

SEQ ID NO: 13333 - DNA, 122 bp, Homo sapiens
  misc_feature (61)..(62): /note="This region represents a CpG dinucleotide"
  misc_feature (61)..(61): /note="Nucleotide may be methylated to form 5-methylcytosine"
ggctcagcccatgggagggtgcactccagcaccaggacctgactgttctgcaaacattgacgcacagtccccaggttgcagggagagcgaagcttgcatgctctttgccctcaaaagcttag

SEQ ID NO: 13334 - DNA, 122 bp, Homo sapiens
  misc_feature (61)..(62): /note="This region represents a CpG dinucleotide"
  misc_feature (61)..(61): /note="Nucleotide may be methylated to form 5-methylcytosine"
aaaagagaagaaaaggaatcattgctctagcccccaggagtgctgctgttggtagacagccgtaccctggcagctcctccagggatgagcttagctggggacagctgccttgcccacagtca

SEQ ID NO: 13335 - DNA, 122 bp, Homo sapiens
  misc_feature (61)..(62): /note="This region represents a CpG dinucleotide"
  misc_feature (61)..(61): /note="Nucleotide may be methylated to form 5-methylcytosine"
cacatgcacacacacataatcctatactttcttcctatgataggcaccacagggtgtactcgtgtgagtatacaccagccctgcagctacacagcccatcaccacatgagtcagcatggtga

SEQ ID NO: 13336 - DNA, 122 bp, Homo sapiens
  misc_feature (61)..(62): /note="This region represents a CpG dinucleotide"
  misc_feature (61)..(61): /note="Nucleotide may be methylated to form 5-methylcytosine"
gctattgattgaactatttattctaccaatagacaatacctatggtgcttttctgtggcacgtttagataaaatatttgctaacctttcagcacagagggagatgaagccctgctagtgaag

SEQ ID NO: 13337 - DNA, 122 bp, Homo sapiens
  misc_feature (61)..(62): /note="This region represents a CpG dinucleotide"
  misc_feature (61)..(61): /note="Nucleotide may be methylated to form 5-methylcytosine"
atgggggtcccacgatgttgcccagtccagtcttgaactcctgggctcaagtgatcctcccgcagcagcctcacaaagtgctggtgtgaactactgtgccctgtggacagcacatagcacat

SEQ ID NO: 13338 - DNA, 122 bp, Homo sapiens
  misc_feature (61)..(62): /note="This region represents a CpG dinucleotide"
  misc_feature (61)..(61): /note="Nucleotide may be methylated to form 5-methylcytosine"
catagggcccaggactcatcataacaaagtggcccgtaagtccccagaagaggactggagcgtccatgctgggccaggcatgaatgcaccagatacttgataatgacatcattgactgttca

SEQ ID NO: 13339 - DNA, 122 bp, Homo sapiens
  misc_feature (61)..(62): /note="This region represents a CpG dinucleotide"
  misc_feature (61)..(61): /note="Nucleotide may be methylated to form 5-methylcytosine"
tgatttgatctgattctatttcctcctggtctcctgctgttgtgttggtctctgaattgacggtgagcatagtttcttggggagtgtttagttttattgtatccccaactatggatgaagac

SEQ ID NO: 13340 - DNA, 122 bp, Homo sapiens
  misc_feature (61)..(62): /note="This region represents a CpG dinucleotide"
  misc_feature (61)..(61): /note="Nucleotide may be methylated to form 5-methylcytosine"
ctctccaacccaagccaagcgcttgactctcagccattcctcaggccctggctggatgagcgaaggtccttctgccaggaggagccagctccccttgaggtctgactcatgcagtgcaggcc

SEQ ID NO: 13341 - DNA, 122 bp, Homo sapiens
  misc_feature (61)..(62): /note="This region represents a CpG dinucleotide"
  misc_feature (61)..(61): /note="Nucleotide may be methylated to form 5-methylcytosine"
atttgaggcgaatggagaggagggaactgaaacttgttaacatgctatgcactatatacacgtcatgctttacagataccgtcttgttcaactgtattgtaagctaggtattgttatttcta

SEQ ID NO: 13342 - DNA, 122 bp, Homo sapiens
  misc_feature (61)..(62): /note="This region represents a CpG dinucleotide"
  misc_feature (61)..(61): /note="Nucleotide may be methylated to form 5-methylcytosine"
ggcattcatcatttctccccagctgcacccatttcccacggctgctgcaacaatgtgccacgaactgggtggctttgaacaactgacatttattgtctcacaggtctagaggcggaagtcca

SEQ ID NO: 13343 - DNA, 122 bp, Homo sapiens
  misc_feature (61)..(62): /note="This region represents a CpG dinucleotide"
  misc_feature (61)..(61): /note="Nucleotide may be methylated to form 5-methylcytosine"
cccacaagagtgattcagagggtgacactacacacgcagccggtttgctgcggaggaacacggggctggggcgtctgctgcttttagagcaggcctgccctttgtccaggagggaggtatcg

SEQ ID NO: 13344 - DNA, 122 bp, Homo sapiens
  misc_feature (61)..(62): /note="This region represents a CpG dinucleotide"
  misc_feature (61)..(61): /note="Nucleotide may be methylated to form 5-methylcytosine"
cattaatctggccttgtctgtcattttctctccttggcatttgaggtctttgctgcatggcgtgaggactgagtacatcctttctctccccaggagatggagggaaaagagaacagttttac

SEQ ID NO: 13345 - DNA, 122 bp, Homo sapiens
  misc_feature (61)..(62): /note="This region represents a CpG dinucleotide"
  misc_feature (61)..(61): /note="Nucleotide may be methylated to form 5-methylcytosine"
taatttagcaaacatttctgaggacccacttattgggcacttaaagaagtgagtatgacacggccctgccctagaagaccttgcagtctaggaaggaggttcatgctgtgacttctgagctt

SEQ ID NO: 13346 - DNA, 122 bp, Homo sapiens
  misc_feature (61)..(62): /note="This region represents a CpG dinucleotide"
  misc_feature (61)..(61): /note="Nucleotide may be methylated to form 5-methylcytosine"
acacacggtcacggcgtccccaccggagcacggtcacctgtgcctcatcagccacgtggccgccacagggaagagaactggatcgcaaggcaggtgtttcaagtctggtgaaacccagctct

SEQ ID NO: 13347 - DNA, 122 bp, Homo sapiens
  misc_feature (61)..(62): /note="This region represents a CpG dinucleotide"
  misc_feature (61)..(61): /note="Nucleotide may be methylated to form 5-methylcytosine"
aactggtagttgctgacacatactttacacgaacatagtgtttatgtcagtccattctttcgtgagttttctgagtaatttcatggaacattgttggatcagcaatttgttctcccagcaat

SEQ ID NO: 13348 - DNA, 122 bp, Homo sapiens
  misc_feature (61)..(62): /note="This region represents a CpG dinucleotide"
  misc_feature (61)..(61): /note="Nucleotide may be methylated to form 5-methylcytosine"
ggaagagagaagaatttgcaaatgaactgacaatggatttaacaggttttagcctgaggtcgcttaaaattttgaacaccacttgcttaggaaacgggggcagtctggaagcaagcactagt

SEQ ID NO: 13349 - DNA, 122 bp, Homo sapiens
  misc_feature (61)..(62): /note="This region represents a CpG dinucleotide"
  misc_feature (61)..(61): /note="Nucleotide may be methylated to form 5-methylcytosine"
ggctgcaggatatggtggagagacagccttgatgtcatgcttgactgggcatggcagacccgtgacttccttgctgtgtaacctgagcttagttaagttactgggcctcagtgagtctcagg

SEQ ID NO: 13350 - DNA, 122 bp, Homo sapiens
  misc_feature (61)..(62): /note="This region represents a CpG dinucleotide"
  misc_feature (61)..(61): /note="Nucleotide may be methylated to form 5-methylcytosine"
ccccaccaaaattcacatactgaagtcctaacttctagtacctcagaatgtatctttattcgaagacaaggacttcaaaaaggtgattaagatgtggccattagggtgtggtagtccaatct

SEQ ID NO: 13351 - DNA, 122 bp, Homo sapiens
  misc_feature (61)..(62): /note="This region represents a CpG dinucleotide"
  misc_feature (61)..(61): /note="Nucleotide may be methylated to form 5-methylcytosine"
cttcctcactcatgaatcattctaactttaggcactgtaaaagcctagttgaggacgtatcgctggggaggtagcgtgttatacaagtctcaaatcctaccactgaagcagtgcctactctg

SEQ ID NO: 13352 - DNA, 122 bp, Homo sapiens
  misc_feature (61)..(62): /note="This region represents a CpG dinucleotide"
  misc_feature (61)..(61): /note="Nucleotide may be methylated to form 5-methylcytosine"
ctggctatggagcttagatgagagtttaagggattggactcagggcagggccagtttctacgtgtttagcaatagggttgattgtgttttcaagcaacctaaacagctttatcagggaatgt

SEQ ID NO: 13353 - DNA, 122 bp, Homo sapiens
  misc_feature (61)..(62): /note="This region represents a CpG dinucleotide"
  misc_feature (61)..(61): /note="Nucleotide may be methylated to form 5-methylcytosine"
ccttcaaaaggtcatcagcagtacatccttagtaggcctcacaatagtgtgtccacaatacgggttagtgggagtgattgaaaggcttggagagttgtccttctgggtttgctctggttggg

SEQ ID NO: 13354 - DNA, 122 bp, Homo sapiens
  misc_feature (61)..(62): /note="This region represents a CpG dinucleotide"
  misc_feature (61)..(61): /note="Nucleotide may be methylated to form 5-methylcytosine"
ggaaaactaatgcacacttttttcatcatcattttctgaaatctatttttaaattctggacgtggttgaggacacagtgaatagtttcatatcctgcagctctggtattggtaggtggcttt

SEQ ID NO: 13355 - DNA, 122 bp, Homo sapiens
  misc_feature (61)..(62): /note="This region represents a CpG dinucleotide"
  misc_feature (61)..(61): /note="Nucleotide may be methylated to form 5-methylcytosine"
ctgaaggcctattcactgtcagcttgagaccttagctggagttgtgtaacatcttcacaccgcctaggcttcctcacagtgtgatgactaagtccccagtgccagcataccaggaaagagtg

SEQ ID NO: 13356 - DNA, 122 bp, Homo sapiens
  misc_feature (61)..(62): /note="This region represents a CpG dinucleotide"
  misc_feature (61)..(61): /note="Nucleotide may be methylated to form 5-methylcytosine"
tataaacccaaaggctcctcccttccctgcctctggtagcccctcccttctcacttactacgcagctgaccagagaaaagacaaggggtgggaaggcactgagcaggactgagtggggagta

SEQ ID NO: 13357 - DNA, 122 bp, Homo sapiens
  misc_feature (61)..(62): /note="This region represents a CpG dinucleotide"
  misc_feature (61)..(61): /note="Nucleotide may be methylated to form 5-methylcytosine"
tgaaaagcctgcccacagccactaagtatgtatcagcttttcaagcctcactgtcaaatccgaaagaatggccaaggatcactaggtatttgagaaatttatatagtctgaaaactaagacc

SEQ ID NO: 13358 - DNA, 122 bp, Homo sapiens
  misc_feature (61)..(62): /note="This region represents a CpG dinucleotide"
  misc_feature (61)..(61): /note="Nucleotide may be methylated to form 5-methylcytosine"
gaaggatgcactaacacagaactgcagctgggggtggtagcccggggaagatcgctttcccgggggtgatcccaagcctatggagtgcatggctcccctgccggtgcttcttgctaacgggc

SEQ ID NO: 13359 - DNA, 122 bp, Homo sapiens
  misc_feature (61)..(62): /note="This region represents a CpG dinucleotide"
  misc_feature (61)..(61): /note="Nucleotide may be methylated to form 5-methylcytosine"
gcttacctgcatctggtgtcaagaatcagaatgggagagacagaacctggagaaaggctgcgtcttcagagtggggctccactcctccagctccagggctggacctgaaggttgtctttcca

SEQ ID NO: 13360 - DNA, 122 bp, Homo sapiens
  misc_feature (61)..(62): /note="This region represents a CpG dinucleotide"
  misc_feature (61)..(61): /note="Nucleotide may be methylated to form 5-methylcytosine"
atgggcaagtcacctctgctcccagcctcagattccaccttgctgtcatggggacagggacgcctacctcctagagctgtcatgaaggttctgcaggaagagtcacagcaccaaccctctca

SEQ ID NO: 13361 - DNA, 122 bp, Homo sapiens
  misc_feature (61)..(62): /note="This region represents a CpG dinucleotide"
  misc_feature (61)..(61): /note="Nucleotide may be methylated to form 5-methylcytosine"
aaggtctgggtatcctctgcatggttattaattacaaaatagatttcacatgtgttttcacgaggctgcgatttcacaattgcatcttagaatgtgccttcagagctctgagagctcctggg

SEQ ID NO: 13362 - DNA, 122 bp, Homo sapiens
  misc_feature (61)..(62): /note="This region represents a CpG dinucleotide"
  misc_feature (61)..(61): /note="Nucleotide may be methylated to form 5-methylcytosine"
accatctacaacaacaacaaaaaagctcagaaatagtctggtgaaactatgcagtgggcacggtttttctgtggctttcttccttccaccttctcagtcccttctcacacagaactcccagc

SEQ ID NO: 13363 - DNA, 122 bp, Homo sapiens
  misc_feature (61)..(62): /note="This region represents a CpG dinucleotide"
  misc_feature (61)..(61): /note="Nucleotide may be methylated to form 5-methylcytosine"
agagttccgtcggccaaaaccacttgaaactcgctcagcggcgtcggggctccagccaggcgtcaccttccacagcgaacctgcgaaccacagcgtcccctgggggtctccgtccgcgtggc

SEQ ID NO: 13364 - DNA, 122 bp, Homo sapiens
  misc_feature (61)..(62): /note="This region represents a CpG dinucleotide"
  misc_feature (61)..(61): /note="Nucleotide may be methylated to form 5-methylcytosine"
tggagaagtattctctgctgagaagagattttccatcaggctttacgggaacgcaggtgacgtataccctacagccatggtgctttcctttccggtttcatgcttagcaaagagccctctga

SEQ ID NO: 13365 - DNA, 122 bp, Homo sapiens
  misc_feature (61)..(62): /note="This region represents a CpG dinucleotide"
  misc_feature (61)..(61): /note="Nucleotide may be methylated to form 5-methylcytosine"
tgagcacccttctctctcagcatacatccctgcctgctggaggaaagccagggacctgcacgaaacatcagcacgcggcgtcccagcccatgcagttgtcatggacaacaggagttcagagg

SEQ ID NO: 13366 - DNA, 122 bp, Homo sapiens
  misc_feature (61)..(62): /note="This region represents a CpG dinucleotide"
  misc_feature (61)..(61): /note="Nucleotide may be methylated to form 5-methylcytosine"
ataaatcaaattgagagccccttcagcttgtctgtcaggtcaggaatgaactaatttgtacgtaccttttctccctcatcttgtgtcagtccttcactatgtaccagttacataatcttctt

SEQ ID NO: 13367 - DNA, 122 bp, Homo sapiens
  misc_feature (61)..(62): /note="This region represents a CpG dinucleotide"
  misc_feature (61)..(61): /note="Nucleotide may be methylated to form 5-methylcytosine"
aatacattccaagacccccagagggtgtctgaaagcacagatagtaccaaaccctacctacgctgtacatgacagtcgacctgataatcgagttggctattaagtgactaatggctgggtag

SEQ ID NO: 13368 - DNA, 122 bp, Homo sapiens
  misc_feature (61)..(62): /note="This region represents a CpG dinucleotide"
  misc_feature (61)..(61): /note="Nucleotide may be methylated to form 5-methylcytosine"
acagctccacctaaacccacgggtgacttaaaagctgaagccttgtcataatcattgtcacgtactcttattatgatgaaactttgctcctctttttgctgaggagattcacctaagttact

SEQ ID NO: 13369 - DNA, 122 bp, Homo sapiens
  misc_feature (61)..(62): /note="This region represents a CpG dinucleotide"
  misc_feature (61)..(61): /note="Nucleotide may be methylated to form 5-methylcytosine"
gaaaagaaaacgtctgcttagtaaagacagtgctttcccttattgtttttaagttcaaaacgctctagagactcagatattggaatgaatctaaatcaagtcgtgattgaaatcagtagtct

SEQ ID NO: 13370 - DNA, 122 bp, Homo sapiens
  misc_feature (61)..(62): /note="This region represents a CpG dinucleotide"
  misc_feature (61)..(61): /note="Nucleotide may be methylated to form 5-methylcytosine"
ttttggttgttgttgtcacaaatgaaggaggggtgctaccaaacacaccacattgcacaacgcacacacccacaacaaagaatgtcaagagtgccgaggctgagaagccctgccacaaaagc

SEQ ID NO: 13371 - DNA, 122 bp, Homo sapiens
  misc_feature (61)..(62): /note="This region represents a CpG dinucleotide"
  misc_feature (61)..(61): /note="Nucleotide may be methylated to form 5-methylcytosine"
tttgtgctacctctcgtctgtggatctaggcgtgaggaggtagaagggagcccctggtcacgcccctgtgccgccttctagtggcatggcctttaagcagcaaagaatgtgacttgtaagca

SEQ ID NO: 13372 - DNA, 122 bp, Homo sapiens
  misc_feature (61)..(62): /note="This region represents a CpG dinucleotide"
  misc_feature (61)..(61): /note="Nucleotide may be methylated to form 5-methylcytosine"
aaaactttccacagtattcccatgacctatggtattctgtagccagactcctcagccggccgtgcaaggcccataccattcagttcactttggcttttccaaccttgtttctgagccttccc

SEQ ID NO: 13373 - DNA, 122 bp, Homo sapiens
  misc_feature (61)..(62): /note="This region represents a CpG dinucleotide"
  misc_feature (61)..(61): /note="Nucleotide may be methylated to form 5-methylcytosine"
ttgcctcatttttctcctaactggaagtgacaaggcaggcagctctagcctcatgacaagcgtggtggctcacgcctgtaatcccagcactttgggaggccgaagcaggtggattacctgag

SEQ ID NO: 13374 - DNA, 122 bp, Homo sapiens
  misc_feature (61)..(62): /note="This region represents a CpG dinucleotide"
  misc_feature (61)..(61): /note="Nucleotide may be methylated to form 5-methylcytosine"
aactcaaattctatttttatacaaatcagcaaacatgaatttaaggccttcagactagtccgtcacagggaggacttcagtcaaaagattagtttccttcctgttgctgcctcaagataaca

SEQ ID NO: 13375 - DNA, 122 bp, Homo sapiens
  misc_feature (61)..(62): /note="This region represents a CpG dinucleotide"
  misc_feature (61)..(61): /note="Nucleotide may be methylated to form 5-methylcytosine"
aatgagagtagttttaaatttcagaacagcagaaggttctttgaagttggtcactcagcacgtaatgtattgcctttgtatgcagcgagggttcatttattgatatctgatgaaatgctcct

SEQ ID NO: 13376 - DNA, 122 bp, Homo sapiens
  misc_feature (61)..(62): /note="This region represents a CpG dinucleotide"
  misc_feature (61)..(61): /note="Nucleotide may be methylated to form 5-methylcytosine"
gttttccataaataccctgagtttttctcatttgcctaatgctactccttttagctgaaacggcattttctatggattccaacaaagcaaattgttatccactataaaacttcctccccaca

SEQ ID NO: 13377 - DNA, 122 bp, Homo sapiens
  misc_feature (61)..(62): /note="This region represents a CpG dinucleotide"
  misc_feature (61)..(61): /note="Nucleotide may be methylated to form 5-methylcytosine"
aattctgtcactgacaaggtagcaaagccatagcctgatactcctcaggacacctcatcacgcccactgggaacatggcacacactggagattccagtccaaggactttggaatgtcaactt

SEQ ID NO: 13378 - DNA, 122 bp, Homo sapiens
  misc_feature (61)..(62): /note="This region represents a CpG dinucleotide"
  misc_feature (61)..(61): /note="Nucleotide may be methylated to form 5-methylcytosine"
ttacagcagagctccattctaaggcacttggctctcagttttctcagagtgaacatgcctcgtagcttgggtcctatggcaggagtgcaataggacatggatatgcatcacctgttctataa

SEQ ID NO: 13379 - DNA, 122 bp, Homo sapiens
  misc_feature (61)..(62): /note="This region represents a CpG dinucleotide"
  misc_feature (61)..(61): /note="Nucleotide may be methylated to form 5-methylcytosine"
gagtttatgaaatactggtgtaataggcaaccccaaaacaaagtattactcctcacataacgtgtactggattgaactgacacacaggacagggtttctccataaatataactgcctacaca

SEQ ID NO: 13380 - DNA, 122 bp, Homo sapiens
  misc_feature (61)..(62): /note="This region represents a CpG dinucleotide"
  misc_feature (61)..(61): /note="Nucleotide may be methylated to form 5-methylcytosine"
atgcccgagagcccaaggtcccgggacctggtgcaggaagagccgcctgcgcgggggagacgcggggatcaccggccacaccccggacgctcagtcggggccttactcgggggggcggcagc

SEQ ID NO: 13381 - DNA, 122 bp, Homo sapiens
  misc_feature (61)..(62): /note="This region represents a CpG dinucleotide"
  misc_feature (61)..(61): /note="Nucleotide may be methylated to form 5-methylcytosine"
agttatgaccagtgaatacaatgttattagcattcactcatttaataaaagtttattgagcgccaattctgtgccaggacttcagacacgtaagctcagataagcaaacttcagtttcttcc

SEQ ID NO: 13382 - DNA, 122 bp, Homo sapiens
  misc_feature (61)..(62): /note="This region represents a CpG dinucleotide"
  misc_feature (61)..(61): /note="Nucleotide may be methylated to form 5-methylcytosine"
taaagctaagtattaatacgccctggggtgatgccctcatcagcaacaccaggatgtgttcgttctctctctttcttggcacagatttttgtttgtttgtttttgtcttttttttttttgag

SEQ ID NO: 13383 - DNA, 122 bp, Homo sapiens
  misc_feature (61)..(62): /note="This region represents a CpG dinucleotide"
  misc_feature (61)..(61): /note="Nucleotide may be methylated to form 5-methylcytosine"
agttaccctacagagctatagaatactagagctcatttctcctgtctagctgtaattttgcgttcattcaccaacctctccttatcctctcctccccctttcccttcccagcctccagttcc

SEQ ID NO: 13384 - DNA, 122 bp, Homo sapiens
  misc_feature (61)..(62): /note="This region represents a CpG dinucleotide"
  misc_feature (61)..(61): /note="Nucleotide may be methylated to form 5-methylcytosine"
taatagaatcttccttctagggctgttttgaaaaccaaagaacacaatgtatgcagtgcacgtgaaacacagggttcaataaatggtagggaagattcagagaaactaaccatgtagaggga

SEQ ID NO: 13385 - DNA, 122 bp, Homo sapiens
  misc_feature (61)..(62): /note="This region represents a CpG dinucleotide"
  misc_feature (61)..(61): /note="Nucleotide may be methylated to form 5-methylcytosine"
gctggcccccaaagatctgcaggaaggagaagacacaaaatctccttcccatgtgggtcacgccctttcattagtccgtgagctcctgcaaggcctgtgttttgctttcacttgtgtgtgga

SEQ ID NO: 13386 - DNA, 122 bp, Homo sapiens
  misc_feature (61)..(62): /note="This region represents a CpG dinucleotide"
  misc_feature (61)..(61): /note="Nucleotide may be methylated to form 5-methylcytosine"
tcatcctgacgacagctgatgccaacctgaattcagccagtcaggattgagggcacttcacgttccagggagagcaaataaaatcctttggttaggccaggtgtggtggctcatgcctgtaa

SEQ ID NO: 13387 - DNA, 122 bp, Homo sapiens
  misc_feature (61)..(62): /note="This region represents a CpG dinucleotide"
  misc_feature (61)..(61): /note="Nucleotide may be methylated to form 5-methylcytosine"
caggcctttttagcccccgagccaggatggcagcctcttctcctgacctcattatgtcagcgcccggattgtgtgctggggctgggctggggacaggatgttttctgcttctccaggacatt

SEQ ID NO: 13388 - DNA, 122 bp, Homo sapiens
  misc_feature (61)..(62): /note="This region represents a CpG dinucleotide"
  misc_feature (61)..(61): /note="Nucleotide may be methylated to form 5-methylcytosine"
ggaagctgacccgacaaatttgagaaaaccaagtcccagagaggataaatgacttgcccacggtcacgtaacttgatgatgccaagctgatttcctgcctcgaaagccacttttcattatta

SEQ ID NO: 13389 - DNA, 122 bp, Homo sapiens
  misc_feature (61)..(62): /note="This region represents a CpG dinucleotide"
  misc_feature (61)..(61): /note="Nucleotide may be methylated to form 5-methylcytosine"
gagtttccagagaaatgaacagcagacattcacagacataagaatgttttttttttcccccgcccaaggagtgtggttagtggttgtttttaaaactgtacattttactgtacatttttttt

SEQ ID NO: 13390 - DNA, 122 bp, Homo sapiens
  misc_feature (61)..(62): /note="This region represents a CpG dinucleotide"
  misc_feature (61)..(61): /note="Nucleotide may be methylated to form 5-methylcytosine"
gcgtgtaaagaggactccctccatcacttccttgggtgagagatggggcttccctgaacacgtgatctcacccacactccccacacacaccacaccctgtggctgcttctcttcaaatctcc

SEQ ID NO: 13391 - DNA, 122 bp, Homo sapiens
  misc_feature (61)..(62): /note="This region represents a CpG dinucleotide"
  misc_feature (61)..(61): /note="Nucleotide may be methylated to form 5-methylcytosine"
acccacagcagaaggagcttaaaattaattccttcatccattcggtaacagctgatgacacggaaaagagatgcaaagtcatgctttggtggagatgacacgctccacatcagaaaactcag

SEQ ID NO: 13392 - DNA, 122 bp, Homo sapiens
  misc_feature (61)..(62): /note="This region represents a CpG dinucleotide"
  misc_feature (61)..(61): /note="Nucleotide may be methylated to form 5-methylcytosine"
catttaatgatttgaggtgatagggaaatgttttttattgtatttgcttctttgatcttgcggtagatttttaaagcagagagcatggactagtcagaagaccagttgacttaaactcttat

SEQ ID NO: 13393 - DNA, 122 bp, Homo sapiens
  misc_feature (61)..(62): /note="This region represents a CpG dinucleotide"
  misc_feature (61)..(61): /note="Nucleotide may be methylated to form 5-methylcytosine"
agctcaggctagagcccaacaacaaagaataacctgtccagctcaaaatgccagtactgccgaggccaagaaccctgacttatcctgatacataggaaaagggttaagcaagaatcatctgt

SEQ ID NO: 13394 - DNA, 122 bp, Homo sapiens
  misc_feature (61)..(62): /note="This region represents a CpG dinucleotide"
  misc_feature (61)..(61): /note="Nucleotide may be methylated to form 5-methylcytosine"
tgggagtgaggacgtgagctgatttctaatccctctctagcagttgtgcatctggttcagcgtgtcccggggtttccctgggttttgcttgaccgcagcagtaagctgttcctcatttatcc

SEQ ID NO: 13395 - DNA, 122 bp, Homo sapiens
  misc_feature (61)..(62): /note="This region represents a CpG dinucleotide"
  misc_feature (61)..(61): /note="Nucleotide may be methylated to form 5-methylcytosine"
aaagtcccggagctgtgacactcatctccatagcagcagccccaggtccttcaagacagccgtgcctctagggcctctgttaataaaggaatgaaatgcacatcctctttttacaatgccat

SEQ ID NO: 13396 - DNA, 122 bp, Homo sapiens
  misc_feature (61)..(62): /note="This region represents a CpG dinucleotide"
  misc_feature (61)..(61): /note="Nucleotide may be methylated to form 5-methylcytosine"
tccatttgaacaatacaattattcagacaatactaaaccgagctttcaggcaagacctcccgtggccctgacagtcctggggcagagtgggcagcaactccttgctggtggccgtggcggca

SEQ ID NO: 13397 - DNA, 122 bp, Homo sapiens
  misc_feature (61)..(62): /note="This region represents a CpG dinucleotide"
  misc_feature (61)..(61): /note="Nucleotide may be methylated to form 5-methylcytosine"
agcttgccagctggtgtggttttaccacaagctaacaaacattttccagctctgctcttacggaaacaacaggcacccgaagctatgagataataatgtttttatccagagtactgggagta

SEQ ID NO: 13398 - DNA, 122 bp, Homo sapiens
  misc_feature (61)..(62): /note="This region represents a CpG dinucleotide"
  misc_feature (61)..(61): /note="Nucleotide may be methylated to form 5-methylcytosine"
gagtacttagatcaaacctgttttttcagcagaggcaatggcatttacttcagccacacccgtcatcactgatatttaatgctttctgcctttatactcttccactgagagtaaaaggacct

SEQ ID NO: 13399 - DNA, 122 bp, Homo sapiens
  misc_feature (61)..(62): /note="This region represents a CpG dinucleotide"
  misc_feature (61)..(61): /note="Nucleotide may be methylated to form 5-methylcytosine"
aagaaaaaaaaaaaaaaaagaaagaaagaaaaagaaaaaaatactttcctgaaatatttccggaggtattttgaaatacagattgaaaaagcacaccatgtacctaaacatattgacccagg

SEQ ID NO: 13400 - DNA, 122 bp, Homo sapiens
  misc_feature (61)..(62): /note="This region represents a CpG dinucleotide"
  misc_feature (61)..(61): /note="Nucleotide may be methylated to form 5-methylcytosine"
tggtaccaggagctgtcaggaggcgggaatgcagagaatgtggctcactgtgctcccgcccgcccaggctgaatccgcagagaggtttggaaggtgaatgacacaatgtttgtcaagggttt

SEQ ID NO: 13401 - DNA, 122 bp, Homo sapiens
  misc_feature (61)..(62): /note="This region represents a CpG dinucleotide"
  misc_feature (61)..(61): /note="Nucleotide may be methylated to form 5-methylcytosine"
tgtgacagggtgacagtgttaccgttgtttctttataagctgctttgacggaacaggtgtcgtcagggagtgtggaaattcctcttcacacatgtgctgtgccggcagctccctgtttctcc

SEQ ID NO: 13402 - DNA, 122 bp, Homo sapiens
  misc_feature (61)..(62): /note="This region represents a CpG dinucleotide"
  misc_feature (61)..(61): /note="Nucleotide may be methylated to form 5-methylcytosine"
ttctgccaaaatcccttagtaaatcagttattgtcatctgaacttcctactcaggcttgtcgtatatgtacctcaaaatctgttttgcttcacatagggatatgtggctttactgatttctg

SEQ ID NO: 13403 - DNA, 122 bp, Homo sapiens
  misc_feature (61)..(62): /note="This region represents a CpG dinucleotide"
  misc_feature (61)..(61): /note="Nucleotide may be methylated to form 5-methylcytosine"
gcctgttgacgtggcaggcaggcctcagaaccctggaggcccccatcaggcaggtgtgaacgctgcagctggagtaatccgcctgcaatctgcagctgaagcaaatacccaatcatcttcca

SEQ ID NO: 13404 - DNA, 122 bp, Homo sapiens
  misc_feature (61)..(62): /note="This region represents a CpG dinucleotide"
  misc_feature (61)..(61): /note="Nucleotide may be methylated to form 5-methylcytosine"
ccgaggtttgctccagtttgactctctgaggatactctctccctgcattactgaaagtgtcgtggttctacgaattaaagttatataagaagcatgtgagatgctggttaacccttcagaga

SEQ ID NO: 13405 - DNA, 122 bp, Homo sapiens
  misc_feature (61)..(62): /note="This region represents a CpG dinucleotide"
  misc_feature (61)..(61): /note="Nucleotide may be methylated to form 5-methylcytosine"
ggagctgagtgtactgggaagtccaggtgcatccttagggtaggctgcatgtgaaagctgcgtcctttttgcctgtggtgaggtgaatatcaatacagtatttatagaaagtccacataaat

SEQ ID NO: 13406 - DNA, 122 bp, Homo sapiens
  misc_feature (61)..(62): /note="This region represents a CpG dinucleotide"
  misc_feature (61)..(61): /note="Nucleotide may be methylated to form 5-methylcytosine"
gttcatttttttctataggtcagcattttacctatggatggcattttctattttcggtgacggactatgagccaggataaacacattactctcttctttaacaaaaagagcatggttaactc

SEQ ID NO: 13407 - DNA, 122 bp, Homo sapiens
  misc_feature (61)..(62): /note="This region represents a CpG dinucleotide"
  misc_feature (61)..(61): /note="Nucleotide may be methylated to form 5-methylcytosine"
tgttgtgtaagacaagtggtctggtttatctccacatttacgtatgtattggctttctcacgctcactctctctctctctctttctctctcttccccaccccgcccccacccacccccatcc

SEQ ID NO: 13408 - DNA, 122 bp, Homo sapiens
  misc_feature (61)..(62): /note="This region represents a CpG dinucleotide"
  misc_feature (61)..(61): /note="Nucleotide may be methylated to form 5-methylcytosine"
ttttgctacttcctctgttatttccctatctccagtatttatcatcttttgctggactagcgcaataacccaatgcagtcatagatttcatcagtccaacctccacatcacagcccaaggtg

SEQ ID NO: 13409 - DNA, 122 bp, Homo sapiens
  misc_feature (61)..(62): /note="This region represents a CpG dinucleotide"
  misc_feature (61)..(61): /note="Nucleotide may be methylated to form 5-methylcytosine"
gaaatgcacacaagattacacagcaagtattatcgagtgcgtattacatttgaagtgctgcgttgagggctttacatggattagttcattaaactcaatgaattaaatactgttatcattct

SEQ ID NO: 13410 - DNA, 122 bp, Homo sapiens
  misc_feature (61)..(62): /note="This region represents a CpG dinucleotide"
  misc_feature (61)..(61): /note="Nucleotide may be methylated to form 5-methylcytosine"
agagagtggtaggactggaattcaaatcctgatttgcctgataacaaaacttactttccccgctttaccctgtagactcatgtttggctctgtccagtggttgtcattggacatatcccaca

SEQ ID NO: 13411 - DNA, 122 bp, Homo sapiens
  misc_feature (61)..(62): /note="This region represents a CpG dinucleotide"
  misc_feature (61)..(61): /note="Nucleotide may be methylated to form 5-methylcytosine"
atatatttattgaagcttgtccattcttaaaatacaaatgaaaaaatgtggcttcatttccgtcttaatatgtatttgtacagtttagctactggtatgactcaatacattggtgatggcaa

SEQ ID NO: 13412 - DNA, 122 bp, Homo sapiens
  misc_feature (61)..(62): /note="This region represents a CpG dinucleotide"
  misc_feature (61)..(61): /note="Nucleotide may be methylated to form 5-methylcytosine"
atttcctttcctttctttctccctccaaatgttcacatagcctcacatttcaagatttatcgtaatatggtgacacagatgatgaaatgtccctttctctttctaatgctcaaaaaatctag

SEQ ID NO: 13413 - DNA, 122 bp, Homo sapiens
  misc_feature (61)..(62): /note="This region represents a CpG dinucleotide"
  misc_feature (61)..(61): /note="Nucleotide may be methylated to form 5-methylcytosine"
aatcacctgggaaagagccttggacccaacacattagctttccagttgttttctttgatacgtcccagatctgtgaacttgcacaagccactcccattctgcttttttttgttgttgttgag

SEQ ID NO: 13414 - DNA, 122 bp, Homo sapiens
  misc_feature (61)..(62): /note="This region represents a CpG dinucleotide"
  misc_feature (61)..(61): /note="Nucleotide may be methylated to form 5-methylcytosine"
gcactaccatgtgctcgccagagaggatagagagtaacagttactgcctgtggcatttgccgatcttccctaacaggagtgtttccctgaactgtaaaacttcccgcaaattgcacacacag

SEQ ID NO: 13415 - DNA, 122 bp, Homo sapiens
  misc_feature (61)..(62): /note="This region represents a CpG dinucleotide"
  misc_feature (61)..(61): /note="Nucleotide may be methylated to form 5-methylcytosine"
caacaggaattctatagtaaggaggaggagaaggggggctccttccctctcctcgaatgacgttatgggcacatgccttttaaaagttctttaagcaacacagagctgagtcctctttgtca

SEQ ID NO: 13416 - DNA, 122 bp, Homo sapiens
  misc_feature (61)..(62): /note="This region represents a CpG dinucleotide"
  misc_feature (61)..(61): /note="Nucleotide may be methylated to form 5-methylcytosine"
tacggttatgtaaacagctttttcttgattcacttgccaggcttatacctttccccatcacgctagacagacagttctttgcagaaagctttctgatgggtgctacagatacagtggtggta

SEQ ID NO: 13417 - DNA, 122 bp, Homo sapiens
  misc_feature (61)..(62): /note="This region represents a CpG dinucleotide"
  misc_feature (61)..(61): /note="Nucleotide may be methylated to form 5-methylcytosine"
tgttgtctactggagtgttctgctcagggcagggcttctgctgctttataaacaaatgcccgtgggctgggacctggcacatgtgctttcctcacctgagaagtggtgcccacaggaagccc

SEQ ID NO: 13418 - DNA, 122 bp, Homo sapiens
  misc_feature (61)..(62): /note="This region represents a CpG dinucleotide"
  misc_feature (61)..(61): /note="Nucleotide may be methylated to form 5-methylcytosine"
ctgaggggcccctctgctgggcccacccatgagaacctctgtggacccacaccagccaagcgtgtgctgcgactccagggatggccaagaggatgagccacatccttctttgggattgatca

SEQ ID NO: 13419 - DNA, 122 bp, Homo sapiens
  misc_feature (61)..(62): /note="This region represents a CpG dinucleotide"
  misc_feature (61)..(61): /note="Nucleotide may be methylated to form 5-methylcytosine"
ttagttattacagctctcttagtcagtctcctcataactgagtcactagattaactgatgcgtgctgatgtctgtggaatactgagcacttacagctactacattcatctccagtacgcttg

SEQ ID NO: 13420 - DNA, 122 bp, Homo sapiens
  misc_feature (61)..(62): /note="This region represents a CpG dinucleotide"
  misc_feature (61)..(61): /note="Nucleotide may be methylated to form 5-methylcytosine"
gacatatgcaaattggcactgcaggcccagggtgcagctgatgcaaaggccccagagctacgctggcttggctttgaggagcagaagggaggtaggaacacagtgagcatgaggagagtgtt

SEQ ID NO: 13421 - DNA, 122 bp, Homo sapiens
  misc_feature (61)..(62): /note="This region represents a CpG dinucleotide"
  misc_feature (61)..(61): /note="Nucleotide may be methylated to form 5-methylcytosine"
ctgcaggaaatgaacacagacaccaaatggagatactgtgtctgagattgaagccagcaccgtggaatcagagctgccaggagggagacgtggactctcgaccctgtggccacacttggttc

SEQ ID NO: 13422 - DNA, 122 bp, Homo sapiens
  misc_feature (61)..(62): /note="This region represents a CpG dinucleotide"
  misc_feature (61)..(61): /note="Nucleotide may be methylated to form 5-methylcytosine"
ccattaatgattcaccacctgttgcaagttcaataagttatccacacaccaaattgtggtcgcagaattcagtgagataaactaagttagaaagatttggggtgaataaatgtttgctaaat

SEQ ID NO: 13423 - DNA, 122 bp, Homo sapiens
  misc_feature (61)..(62): /note="This region represents a CpG dinucleotide"
  misc_feature (61)..(61): /note="Nucleotide may be methylated to form 5-methylcytosine"
gcctatcagttacaagaggaaggagaaagaggatactggttttcctctgcataaaaaacgcgatggattctcaagaatttattgaaagtctgtgtgtccaccatagtccaggatattttgga

SEQ ID NO: 13424 - DNA, 122 bp, Homo sapiens
  misc_feature (61)..(62): /note="This region represents a CpG dinucleotide"
  misc_feature (61)..(61): /note="Nucleotide may be methylated to form 5-methylcytosine"
gtaaagtaactaaactaagttcacactgcaactgcacggcagaggtaggattcaattccacgctggctggctctacaggacgcgctaaaagcatgaactcagtctgctgaggaaggaggtgg

SEQ ID NO: 13425 - DNA, 122 bp, Homo sapiens
  misc_feature (61)..(62): /note="This region represents a CpG dinucleotide"
  misc_feature (61)..(61): /note="Nucleotide may be methylated to form 5-methylcytosine"
aggctgagaaccactggtttctgttgaaacctcagttcctggctgaagagacacttgcggcgagcttgtctgtatcattagtcacttctggggtccaggggtgagactgggagtggaggaag

SEQ ID NO: 13426 - DNA, 122 bp, Homo sapiens
  misc_feature (61)..(62): /note="This region represents a CpG dinucleotide"
  misc_feature (61)..(61): /note="Nucleotide may be methylated to form 5-methylcytosine"
tgaaaaagaaagtaactctctcgcgtattccacaactagctcttcacctatcaaattacgcgcaatggaaacatcttagtcctcagagcaatcctgggtgcaaggcagaggcggctgttatc

SEQ ID NO: 13427 - DNA, 122 bp, Homo sapiens
  misc_feature (61)..(62): /note="This region represents a CpG dinucleotide"
  misc_feature (61)..(61): /note="Nucleotide may be methylated to form 5-methylcytosine"
atgaggaggctcaggacccctctgctctgataaattcctagtcttgggctgcctgggactcgcacatcaccaacccggcagctggaagaacaagcacacgaggaaataaaaggtgcctgaag

SEQ ID NO: 13428 - DNA, 122 bp, Homo sapiens
  misc_feature (61)..(62): /note="This region represents a CpG dinucleotide"
  misc_feature (61)..(61): /note="Nucleotide may be methylated to form 5-methylcytosine"
gtcctacccagcctgaagaagccacccagtcatttcctgttgcacttccttgtttattttcgacacagttctccccacccctgagaattcttgtcacttcctcctgtactgcccacttctac

SEQ ID NO: 13429 - DNA, 122 bp, Homo sapiens
  misc_feature (61)..(62): /note="This region represents a CpG dinucleotide"
  misc_feature (61)..(61): /note="Nucleotide may be methylated to form 5-methylcytosine"
gaagagcactggagtaaaaaccccagtacaaaccttactggggacagtgggcaaccttgtcgggttagtaaaaacaaatggtgtgggccctggaaaatgagggctggaggctgtgaataaag

SEQ ID NO: 13430 - DNA, 122 bp, Homo sapiens
  misc_feature (61)..(62): /note="This region represents a CpG dinucleotide"
  misc_feature (61)..(61): /note="Nucleotide may be methylated to form 5-methylcytosine"
gtaggagacatcaggcttgaactaaaaaccaccccaacagcttgatctaagagtaccattcggggacaaaaggaaacctgagagtaaaaagagaaagcaagcaaacaaacaatataaccaca

SEQ ID NO: 13431 - DNA, 122 bp, Homo sapiens
  misc_feature (61)..(62): /note="This region represents a CpG dinucleotide"
  misc_feature (61)..(61): /note="Nucleotide may be methylated to form 5-methylcytosine"
aagtgaaaatctttcctccaagttaagaattgggacatcaggtctccccagtaatagctccgtttcagtttgaatttacagaactgatggggcttaataactggcgccccgagtttgttcgg

SEQ ID NO: 13432 - DNA, 122 bp, Homo sapiens
  misc_feature (61)..(62): /note="This region represents a CpG dinucleotide"
  misc_feature (61)..(61): /note="Nucleotide may be methylated to form 5-methylcytosine"
tagaattctccaagactctgccctatgcctttcttcctttggataattttaacctgtattcgttccttgtaatacagtagccacaagtataacaacttgctgtgagttctgtgagatcttct

SEQ ID NO: 13433 - DNA, 122 bp, Homo sapiens
  misc_feature (61)..(62): /note="This region represents a CpG dinucleotide"
  misc_feature (61)..(61): /note="Nucleotide may be methylated to form 5-methylcytosine"
aggaaacgatttgataccatcatggagtgaatagagttggaagcaaggaaagagtattgacgtcaatgcttatcatattagtgaaataaatatggagaggatagttagagaatcttgtgata

SEQ ID NO: 13434 - DNA, 122 bp, Homo sapiens
  misc_feature (61)..(62): /note="This region represents a CpG dinucleotide"
  misc_feature (61)..(61): /note="Nucleotide may be methylated to form 5-methylcytosine"
ccatatgctgtcagaacagtgccggcctgggagctgcatgtgatctgggcttgggttgagcgggttgggagatgctagccatatttggaagaaaaaggcacctgaggctctgaggcttcggt

SEQ ID NO: 13435 - DNA, 122 bp, Homo sapiens
  misc_feature (61)..(62): /note="This region represents a CpG dinucleotide"
  misc_feature (61)..(61): /note="Nucleotide may be methylated to form 5-methylcytosine"
ttctctgtgcacacgtgtggttggcgcaacctagagcaatgccttatgatgagcatttctcgttgaaccccttctgcctgtagaacggctctggcagctggcagcctctggtaggcagctga

SEQ ID NO: 13436 - DNA, 122 bp, Homo sapiens
  misc_feature (61)..(62): /note="This region represents a CpG dinucleotide"
  misc_feature (61)..(61): /note="Nucleotide may be methylated to form 5-methylcytosine"
ccaacagcatgtgctcacttcatgtctgtgtctctcattttggtaattcttacagtagttcgaactttcttattaatattatcatatctgttatggtgatctgtgatcaccaatctttgatg

SEQ ID NO: 13437 - DNA, 122 bp, Homo sapiens
  misc_feature (61)..(62): /note="This region represents a CpG dinucleotide"
  misc_feature (61)..(61): /note="Nucleotide may be methylated to form 5-methylcytosine"
cagctgatctgagtaaactggcttgcctaaccacacagtgcagatctggtcttctgaccccgggggctttccttccatcaccaggctttctcctactcccaatgaaggaaagtaagactggg

SEQ ID NO: 13438 - DNA, 122 bp, Homo sapiens
  misc_feature (61)..(62): /note="This region represents a CpG dinucleotide"
  misc_feature (61)..(61): /note="Nucleotide may be methylated to form 5-methylcytosine"
ccctcgattccctccgaacccccccttaaaaacctacgccgactgctcctcctcttggcccggcctcgaaaggggcccacttaccgctccgcggttaataacaggcctcgcgctccctgaca

SEQ ID NO: 13439 - DNA, 122 bp, Homo sapiens
  misc_feature (61)..(62): /note="This region represents a CpG dinucleotide"
  misc_feature (61)..(61): /note="Nucleotide may be methylated to form 5-methylcytosine"
tcccggccgtgcctgtgcagtgggggaactgcggggatacaggtgagccgcgggggcgcgcgccctcggaacactttctaactctggaggagcgtaaaggaacaagacctcactgagaccgc

SEQ ID NO: 13440 - DNA, 122 bp, Homo sapiens
  misc_feature (61)..(62): /note="This region represents a CpG dinucleotide"
  misc_feature (61)..(61): /note="Nucleotide may be methylated to form 5-methylcytosine"
gaagcagtagactttctgtactttgatttcctaccattgcctaatggtaaacactggaggcggctctatccctgatttggtccctggggtagaagcctgctggaaaagggtaatcataagta

SEQ ID NO: 13441 - DNA, 122 bp, Homo sapiens
  misc_feature (61)..(62): /note="This region represents a CpG dinucleotide"
  misc_feature (61)..(61): /note="Nucleotide may be methylated to form 5-methylcytosine"
gccccgagcacacggacgtggcagcgggcagcgggcagatggtgcacagtctcacatcctcgggcatccggcggcgcggggacccctgtggtctctgcactgcgggcacctgcaagcagagc

SEQ ID NO: 13442 - DNA, 122 bp, Homo sapiens
  misc_feature (61)..(62): /note="This region represents a CpG dinucleotide"
  misc_feature (61)..(61): /note="Nucleotide may be methylated to form 5-methylcytosine"
gatgtcattttctgtcttcttgggggcggccaaaaatcgaccggtgtcggggaccagaggcggccccgcacgcccccgcgtgtgcgtccacgggcgtctgtgcagacggacactgtgccggg

SEQ ID NO: 13443 - DNA, 122 bp, Homo sapiens
  misc_feature (61)..(62): /note="This region represents a CpG dinucleotide"
  misc_feature (61)..(61): /note="Nucleotide may be methylated to form 5-methylcytosine"
aaacactgatacaagtgcagcctggagagatcctctttcagttgttccgcctggattcaccgcatttgctgccttcttgtttacgttgggattcattttaggaacaaccataactattggga

SEQ ID NO: 13444 - DNA, 122 bp, Homo sapiens
  misc_feature (61)..(62): /note="This region represents a CpG dinucleotide"
  misc_feature (61)..(61): /note="Nucleotide may be methylated to form 5-methylcytosine"
gtgttcagtgtaaccattgactataggacctggtttgatgtgggaggcatttggggcttgcggaaagctttatgtgctctgccccgtacaaagggcagccttggggcagccgatgcccttgc

SEQ ID NO: 13445 - DNA, 122 bp, Homo sapiens
  misc_feature (61)..(62): /note="This region represents a CpG dinucleotide"
  misc_feature (61)..(61): /note="Nucleotide may be methylated to form 5-methylcytosine"
tgaagggcggggcctggagggggcgggtccggattcttttctcagctgggccgtggatgtcgcctgctctcatcctcttgccctccaggactgggtcctccgggttctgattggtggattgt

SEQ ID NO: 13446 - DNA, 122 bp, Homo sapiens
  misc_feature (61)..(62): /note="This region represents a CpG dinucleotide"
  misc_feature (61)..(61): /note="Nucleotide may be methylated to form 5-methylcytosine"
atccactggctttgggcttggctatggcacaggctttggctaatgggatgtgagggaacacgatgttcacttaccacatttgagcagaagcctaaacgtgactgtgtggcttagctagggcc

SEQ ID NO: 13447 - DNA, 122 bp, Homo sapiens
  misc_feature (61)..(62): /note="This region represents a CpG dinucleotide"
  misc_feature (61)..(61): /note="Nucleotide may be methylated to form 5-methylcytosine"
cagccctagcccagcacagttcctggcagctaatggcagcccaaatatttgttgaaggaacgagtgcatgattgatctgaaggtgttatttattaggccataagtattaaacatttttcata

SEQ ID NO: 13448 - DNA, 122 bp, Homo sapiens
  misc_feature (61)..(62): /note="This region represents a CpG dinucleotide"
  misc_feature (61)..(61): /note="Nucleotide may be methylated to form 5-methylcytosine"
tttgtgctatatgaaactttcccccatctacacacgttctgggaacatggaatattggcacgagaaaagatagtgtaatttaggctgtgcacatgaaaaccttcagaagcatcttgggaaac

SEQ ID NO: 13449 - DNA, 122 bp, Homo sapiens
  misc_feature (61)..(62): /note="This region represents a CpG dinucleotide"
  misc_feature (61)..(61): /note="Nucleotide may be methylated to form 5-methylcytosine"
tctcaatcacaatgtggtttcaatccaagataatctttcatatctgaaatttgtttttcacgcttaatattgctaagcatattttcagtgctctgatacttcttttggttttgttttgcttt

SEQ ID NO: 13450 - DNA, 122 bp, Homo sapiens
  misc_feature (61)..(62): /note="This region represents a CpG dinucleotide"
  misc_feature (61)..(61): /note="Nucleotide may be methylated to form 5-methylcytosine"
tactcaggtcaaattctggtccaagaggctctgccaggctggctagagcattatgcctgccgactccacacccaggtggcagccaggaacacagtgttcaggttcgtgggccacagaggtta

SEQ ID NO: 13451 - DNA, 122 bp, Homo sapiens
  misc_feature (61)..(62): /note="This region represents a CpG dinucleotide"
  misc_feature (61)..(61): /note="Nucleotide may be methylated to form 5-methylcytosine"
tcaggaataggcagaggcagacatcctggccagagtgactcagcaagtttagcacacaggcgcataactccacttgttaaatagcctgtttgtgtaagcttgtacttggctcagagccacta

SEQ ID NO: 13452 - DNA, 122 bp, Homo sapiens
  misc_feature (61)..(62): /note="This region represents a CpG dinucleotide"
  misc_feature (61)..(61): /note="Nucleotide may be methylated to form 5-methylcytosine"
taagatccagcaacaggggattgctgtttaaaaaaaagactgtggtgcttgtttagaatgcgccgctgtgcagacataaaagtgacaacgtgacagtgtatttatggacatcggaggaagtt

SEQ ID NO: 13453 - DNA, 122 bp, Homo sapiens
  misc_feature (61)..(62): /note="This region represents a CpG dinucleotide"
  misc_feature (61)..(61): /note="Nucleotide may be methylated to form 5-methylcytosine"
agtacacagtttcctcagggagataaacatcagctttcaattattacccttagacaaatgcgagtagatgtaatttctgagtgttgaaactagctttttgccttgttcttaaagacagttat

SEQ ID NO: 13454 - DNA, 122 bp, Homo sapiens
  misc_feature (61)..(62): /note="This region represents a CpG dinucleotide"
  misc_feature (61)..(61): /note="Nucleotide may be methylated to form 5-methylcytosine"
tagggagaaaagggaagagataagggcatttcccacatgattgacatggttcatgtgttccgagaggcttaagtagtttttttacagatagatttggggactatactagttgggcagtttca

SEQ ID NO: 13455 - DNA, 122 bp, Homo sapiens
  misc_feature (61)..(62): /note="This region represents a CpG dinucleotide"
  misc_feature (61)..(61): /note="Nucleotide may be methylated to form 5-methylcytosine"
ttaagggactttgcttaggaacctgaaactgtgactcagagacaggccagacaatctctgcgcagcagggattgaaagagaaaaagagagagaatcctattcttttgaaacgagattttgag

SEQ ID NO: 13456 - DNA, 122 bp, Homo sapiens
  misc_feature (61)..(62): /note="This region represents a CpG dinucleotide"
  misc_feature (61)..(61): /note="Nucleotide may be methylated to form 5-methylcytosine"
gaaagccctgccccagaaatagcctgggccctccagcccccttcactgcagagctttctacggcacagaagagatccaagcctgagcaggccccagctctgggtcctcccaggagcaccaac

SEQ ID NO: 13457 - DNA, 122 bp, Homo sapiens
  misc_feature (61)..(62): /note="This region represents a CpG dinucleotide"
  misc_feature (61)..(61): /note="Nucleotide may be methylated to form 5-methylcytosine"
tttcctgatccacatttcatttgtggttgtcatcctattataaaagttgaatcctcaggccgggcgcggtggcttacgcctgtaatcccagcactttgggaggccgaggcgggcggatcacg

SEQ ID NO: 13458 - DNA, 122 bp, Homo sapiens
  misc_feature (61)..(62): /note="This region represents a CpG dinucleotide"
  misc_feature (61)..(61): /note="Nucleotide may be methylated to form 5-methylcytosine"
aagaagacacttagcaaccctaattgcgtttcaaaatgcaattcacattctgaaatcatacgtaagtcttcgcttgtgtatgattttcaaatcaagtgaagacttgtgtatgatttcaaaat

SEQ ID NO: 13459 - DNA, 122 bp, Homo sapiens
  misc_feature (61)..(62): /note="This region represents a CpG dinucleotide"
  misc_feature (61)..(61): /note="Nucleotide may be methylated to form 5-methylcytosine"
cgagttccttttattttttgtttaagcccagaaacataggtctagtgtcccacctcctgtcgttagccaattctggttccacatgaccatccctttacatctgaatcacagcacaaagcagg

SEQ ID NO: 13460 - DNA, 122 bp, Homo sapiens
  misc_feature (61)..(62): /note="This region represents a CpG dinucleotide"
  misc_feature (61)..(61): /note="Nucleotide may be methylated to form 5-methylcytosine"
taagtattggtataatataatctcaaattgtctctttcagaattctcatgcaaagactcccgggttgccacagagatccctgtccatagggaggctctttcccatctctcctccctcccact

SEQ ID NO: 13461 - DNA, 122 bp, Homo sapiens
  misc_feature (61)..(62): /note="This region represents a CpG dinucleotide"
  misc_feature (61)..(61): /note="Nucleotide may be methylated to form 5-methylcytosine"
ttcactcaactaatttggaacagtgatcttgacactagaaaatgctcttatcctgctctgcggcctgggttgctccgcctgtgggtggacccgctcagctgaagcaaaaaattatccacaca

SEQ ID NO: 13462 - DNA, 122 bp, Homo sapiens
  misc_feature (61)..(62): /note="This region represents a CpG dinucleotide"
  misc_feature (61)..(61): /note="Nucleotide may be methylated to form 5-methylcytosine"
aagcagggaatagaggaagtggttttgtctcaggcctaaaaaccatttgctatctcacagcgcctgttagtaagtcacctccccttcagtgtttaccaaacattcagaggccctgcacctac

SEQ ID NO: 13463 - DNA, 122 bp, Homo sapiens
  misc_feature (61)..(62): /note="This region represents a CpG dinucleotide"
  misc_feature (61)..(61): /note="Nucleotide may be methylated to form 5-methylcytosine"
ctgtccactactcagtgggaatcagaatggaagaaggttaggaataaaggaaaaagcagacggtataaaagtgcacagagcagatggacttcagattcagacaaaccaggtttgactcctga

SEQ ID NO: 13464 - DNA, 122 bp, Homo sapiens
  misc_feature (61)..(62): /note="This region represents a CpG dinucleotide"
  misc_feature (61)..(61): /note="Nucleotide may be methylated to form 5-methylcytosine"
ccccagaggaagtctctgcttgcacttgtgttttcttcctcatttggattgtttaggtctcggaagtttgctcagcaagagtctaccttcgcccagcctccgcagagctggcaaggcagggg

SEQ ID NO: 13465 - DNA, 122 bp, Homo sapiens
  misc_feature (61)..(62): /note="This region represents a CpG dinucleotide"
  misc_feature (61)..(61): /note="Nucleotide may be methylated to form 5-methylcytosine"
gccatcgttgagcaaacacagctctattaaatgagagtataacgaacatcacaggcaatccgctaaaagattgtaaatctcactcttgtacatagccaagcagatataacccattacatata

SEQ ID NO: 13466 - DNA, 122 bp, Homo sapiens
  misc_feature (61)..(62): /note="This region represents a CpG dinucleotide"
  misc_feature (61)..(61): /note="Nucleotide may be methylated to form 5-methylcytosine"
aaatttcctggaaatttacatctccccagggacacttaaaccagtggttctgaatgaggacgtgactttgagctccaggagtcaaagtgtctagagatacttttggttgtcataaccgggcc

SEQ ID NO: 13467 - DNA, 122 bp, Homo sapiens
  misc_feature (61)..(62): /note="This region represents a CpG dinucleotide"
  misc_feature (61)..(61): /note="Nucleotide may be methylated to form 5-methylcytosine"
aatgatctagccatactaatctgtcacttctggtatcttttgactgagctctgtttgccacgtgtaacaggatcagacgaagtgtgtcatgcttcattctgtatctagggaatcagaggtct

SEQ ID NO: 13468 - DNA, 122 bp, Homo sapiens
  misc_feature (61)..(62): /note="This region represents a CpG dinucleotide"
  misc_feature (61)..(61): /note="Nucleotide may be methylated to form 5-methylcytosine"
gacctggggctggagctggcggagctggtgccgcgcctgttccagttggattccaaaggccgcggggaccttctggaggtaaatctgcagaatggcattttgtttgtgaattctcggatcga

SEQ ID NO: 13469 - DNA, 122 bp, Homo sapiens
  misc_feature (61)..(62): /note="This region represents a CpG dinucleotide"
  misc_feature (61)..(61): /note="Nucleotide may be methylated to form 5-methylcytosine"
ggtctcactctgtctcagagtctagcgagtatagagtgtatggcctgcctgctgggccaccgcagccttctggtcttctggcctttgcctggactgactgccctgactgccagctgtgtctc

SEQ ID NO: 13470 - DNA, 122 bp, Homo sapiens
  misc_feature (61)..(62): /note="This region represents a CpG dinucleotide"
  misc_feature (61)..(61): /note="Nucleotide may be methylated to form 5-methylcytosine"
atgaaagagtataactattgacatgctccattacaaactttgttgtgtcaccagttcttccgtatcttgatccaagatgacatcttgtctggccatggaggtggttaagactaaatgaaaat

SEQ ID NO: 13471 - DNA, 122 bp, Homo sapiens
  misc_feature (61)..(62): /note="This region represents a CpG dinucleotide"
  misc_feature (61)..(61): /note="Nucleotide may be methylated to form 5-methylcytosine"
cacttcctctttatctgcaaagcgagggcatctgtgcatgaacagggtaggcaagcctgacgttgagggagtcgttgtgctgaaccaaggatgtctgctggtaatggagcactagctccttc

SEQ ID NO: 13472 - DNA, 122 bp, Homo sapiens
  misc_feature (61)..(62): /note="This region represents a CpG dinucleotide"
  misc_feature (61)..(61): /note="Nucleotide may be methylated to form 5-methylcytosine"
cattccccagcaagggagaaataattcagattacatcctcctgctgttggatcagggcagcgcatttcaatttaagcccatacagccagagacaggttcatgtagaatggaataaattaata

SEQ ID NO: 13473 - DNA, 122 bp, Homo sapiens
  misc_feature (61)..(62): /note="This region represents a CpG dinucleotide"
  misc_feature (61)..(61): /note="Nucleotide may be methylated to form 5-methylcytosine"
gtcgtagtgtccaaggtcagttgacctccctggagggtgggaggggggcagggttgtggccgctgactcacataaagctgtgttttagtcagataaggaacatgcagatcatatatctttct

SEQ ID NO: 13474 - DNA, 122 bp, Homo sapiens
  misc_feature (61)..(62): /note="This region represents a CpG dinucleotide"
  misc_feature (61)..(61): /note="Nucleotide may be methylated to form 5-methylcytosine"
ctaggcagaaggaagctggcctgagccaatcacacgatgacctctccaacgcaacggccacgcccagtgtccgaaagaaggccggcagcttttctcgccgccttatcaagcgcttttccttc

SEQ ID NO: 13475 - DNA, 122 bp, Homo sapiens
  misc_feature (61)..(62): /note="This region represents a CpG dinucleotide"
  misc_feature (61)..(61): /note="Nucleotide may be methylated to form 5-methylcytosine"
taagatgccatacatggtgaaaaagtcaccttaccacagtgaaatgatgtgatgactaagcggacagacagatgttaatgaggaacatggtccagctgctgcaaagtagcaaagcttcccag

SEQ ID NO: 13476 - DNA, 122 bp, Homo sapiens
  misc_feature (61)..(62): /note="This region represents a CpG dinucleotide"
  misc_feature (61)..(61): /note="Nucleotide may be methylated to form 5-methylcytosine"
tggctaatttggaccagtggcaagcagaagcaactaattgagagaaaaaaggcagagaaacgtaggcagagaggtcttttgatcccaggaattagtttctcttgaatacagcctcttcctgt

SEQ ID NO: 13477 - DNA, 122 bp, Homo sapiens
  misc_feature (61)..(62): /note="This region represents a CpG dinucleotide"
  misc_feature (61)..(61): /note="Nucleotide may be methylated to form 5-methylcytosine"
tgagactccggtggtgctggggctgttgggtcagaacagagcagggttagcccagccctgcgagtctggcagactcagcccccaattggagctatgtgctagccctgtgatcctagacaggt

SEQ ID NO: 13478 - DNA, 122 bp, Homo sapiens
  misc_feature (61)..(62): /note="This region represents a CpG dinucleotide"
  misc_feature (61)..(61): /note="Nucleotide may be methylated to form 5-methylcytosine"
agaatccattgctgttcacagaccagccaatctgaattctcctcatgtggtgtctgatagcgtgtgagcagctctttgttttctggctggagtccgtcccagccaatcctttagctgcacca

SEQ ID NO: 13479 - DNA, 122 bp, Homo sapiens
  misc_feature (61)..(62): /note="This region represents a CpG dinucleotide"
  misc_feature (61)..(61): /note="Nucleotide may be methylated to form 5-methylcytosine"
ctccctccccacagctagccgagggaaagaacggagggcagtaaaaagattcagatgtttcggaaagttgaccagatctcccaaaccctcttaaggttttgcagcggaaaaaaaaaataagt

SEQ ID NO: 13480 - DNA, 122 bp, Homo sapiens
  misc_feature (61)..(62): /note="This region represents a CpG dinucleotide"
  misc_feature (61)..(61): /note="Nucleotide may be methylated to form 5-methylcytosine"
gccctacctctgtttgtcctaggcatcctttccctcttacatattatagatgtacagagacgcaaaacagaagaacaactttatttgtggaatttacataccagggcttcttgcctacaaga

SEQ ID NO: 13481 - DNA, 122 bp, Homo sapiens
  misc_feature (61)..(62): /note="This region represents a CpG dinucleotide"
  misc_feature (61)..(61): /note="Nucleotide may be methylated to form 5-methylcytosine"
tccaaatctcccaaactgagaaaagctgcaggaggaatgaggcagttggagagagaggaccgcaggcatcccgcagctgaggctcaggactgagctctaaaatgaaagcacccctatgggac

SEQ ID NO: 13482 - DNA, 122 bp, Homo sapiens
  misc_feature (61)..(62): /note="This region represents a CpG dinucleotide"
  misc_feature (61)..(61): /note="Nucleotide may be methylated to form 5-methylcytosine"
gagtgtagaggatgggcgtttctaaccctttaccatataccctttagtactacagtcatgcgtcacttaaggacagggatgcgttctgagaaatgcattgtcaggtgattgcatcattgtac

SEQ ID NO: 13483 - DNA, 122 bp, Homo sapiens
  misc_feature (61)..(62): /note="This region represents a CpG dinucleotide"
  misc_feature (61)..(61): /note="Nucleotide may be methylated to form 5-methylcytosine"
cccatgaagtctaatgttccattcgctgccatggtccaggggactcccaccagcttccaccggcttcaacaggatctccactagagagcccagacttatctagtcctgtcggggaaaaggga

SEQ ID NO: 13484 - DNA, 122 bp, Homo sapiens
  misc_feature (61)..(62): /note="This region represents a CpG dinucleotide"
  misc_feature (61)..(61): /note="Nucleotide may be methylated to form 5-methylcytosine"
tccctttctctttcccacagatcctaatgggaccatacttcctatattctcagccaccagcgggtgagcattttgctaatccaggcagactggatgtgcttcagctctgtgggctttagggc

SEQ ID NO: 13485 - DNA, 122 bp, Homo sapiens
  misc_feature (61)..(62): /note="This region represents a CpG dinucleotide"
  misc_feature (61)..(61): /note="Nucleotide may be methylated to form 5-methylcytosine"
aacattattattctagtgctggtctgcttcccttctttctcttaaataatctgctttaagcgttcaaagggtctactcatctcaggacatgactatagctaatttgctgagagcctctgaac

SEQ ID NO: 13486 - DNA, 122 bp, Homo sapiens
  misc_feature (61)..(62): /note="This region represents a CpG dinucleotide"
  misc_feature (61)..(61): /note="Nucleotide may be methylated to form 5-methylcytosine"
tgtgctaggtactaacagcagccagagtgtaaattacaaaagctatgactattttccttccgttaccattgaggagaatttttaaacccatagcctttgattttactgtgaagcacattgat

SEQ ID NO: 13487 - DNA, 122 bp, Homo sapiens
  misc_feature (61)..(62): /note="This region represents a CpG dinucleotide"
  misc_feature (61)..(61): /note="Nucleotide may be methylated to form 5-methylcytosine"
tctgcagcacccagcacaaagcctgagcaaggcagatgcagggaatgcttgcagcatgaacgagccaatgagtaaggcagcttcccagcagagcacatgtgaatcagcagtatttcccactc

SEQ ID NO: 13488 - DNA, 122 bp, Homo sapiens
  misc_feature (61)..(62): /note="This region represents a CpG dinucleotide"
  misc_feature (61)..(61): /note="Nucleotide may be methylated to form 5-methylcytosine"
ggagactatttcacacaatttaatacaggaagtcgataatgaggaacacacccttgttcccgtcattcacgtataaagagtggctaccttaaagagtcacgtttcttttttaaagatacact

SEQ ID NO: 13489 - DNA, 122 bp, Homo sapiens
  misc_feature (61)..(62): /note="This region represents a CpG dinucleotide"
  misc_feature (61)..(61): /note="Nucleotide may be methylated to form 5-methylcytosine"
tgagcaaaccctcctgcagagggccctgtcatttattccacattgtgtgagctcctcttacgtgttagaccctgggaattacagtggcaaacagatgcaagctttgccttcactgagcctgt

SEQ ID NO: 13490 - DNA, 122 bp, Homo sapiens
  misc_feature (61)..(62): /note="This region represents a CpG dinucleotide"
  misc_feature (61)..(61): /note="Nucleotide may be methylated to form 5-methylcytosine"
tgggggagcagtatggccgcccacggagccggctgctggtctccctttcccataacctcccggaagatccacaccacgaatgatctgatggggacaaaaaccccgggactcgagggaccgtt

SEQ ID NO: 13491 - DNA, 122 bp, Homo sapiens
  misc_feature (61)..(62): /note="This region represents a CpG dinucleotide"
  misc_feature (61)..(61): /note="Nucleotide may be methylated to form 5-methylcytosine"
ctcacaaagctcaggacaaaggcctcctcccccatgaagctttgcccaagctagaatgaccgtcaccctcctaagtgttgccacagggcattatgcttccattcggctcacattacaagtat

SEQ ID NO: 13492 - DNA, 122 bp, Homo sapiens
  misc_feature (61)..(62): /note="This region represents a CpG dinucleotide"
  misc_feature (61)..(61): /note="Nucleotide may be methylated to form 5-methylcytosine"
gcgagcctctctgtgggcaaagccataggtgtgcatggtccttgttcccataggcgacatcggggtgtgtgattgcacgtgggggtgtgaggcctcgccagcaccgccactcactggtcctg

SEQ ID NO: 13493 - DNA, 122 bp, Homo sapiens
  misc_feature (61)..(62): /note="This region represents a CpG dinucleotide"
  misc_feature (61)..(61): /note="Nucleotide may be methylated to form 5-methylcytosine"
tgtgggttagtggggagcggtgcagccatgctgatcgggagtctgcactggcacagctggcggcctgcacagcaccctcatcggaaagtgatccatcacccgacagtcgtgttgccatccag

SEQ ID NO: 13494 - DNA, 122 bp, Homo sapiens
  misc_feature (61)..(62): /note="This region represents a CpG dinucleotide"
  misc_feature (61)..(61): /note="Nucleotide may be methylated to form 5-methylcytosine"
tatgggaaatgagtcaaggttgagagtataagacagctggtaatcaggagtagaccaggccgggggagccactgtgagcagcatgaaatcgtggcatccatagcactggaaggtaaaagttg

SEQ ID NO: 13495 - DNA, 122 bp, Homo sapiens
  misc_feature (61)..(62): /note="This region represents a CpG dinucleotide"
  misc_feature (61)..(61): /note="Nucleotide may be methylated to form 5-methylcytosine"
caataaacagtgcctgagcacagggactacctaaaaaagttaagtcatatttgctaccctcgtgttgatgtaaggattcaaacatccaaacaaatatgatagaaagtggattgttattataa

SEQ ID NO: 13496 - DNA, 122 bp, Homo sapiens
  misc_feature (61)..(62): /note="This region represents a CpG dinucleotide"
  misc_feature (61)..(61): /note="Nucleotide may be methylated to form 5-methylcytosine"
gctccgccaatttggggagcactttgagcaccactcaaggatgactttaacagacattggcgaccccttaaatatgagaagaaaggaaacatgatgagagagtagagtcagagataaggctg

SEQ ID NO: 13497 - DNA, 122 bp, Homo sapiens
  misc_feature (61)..(62): /note="This region represents a CpG dinucleotide"
  misc_feature (61)..(61): /note="Nucleotide may be methylated to form 5-methylcytosine"
ggcaagcctagggaagggacgccatgtgcggcacgggcatctagtgtcccagagtccgcacgggttgctgggggaaaaagagggatagtcgcccagccagggcaggggtgggagttgggggg

SEQ ID NO: 13498 - DNA, 122 bp, Homo sapiens
  misc_feature (61)..(62): /note="This region represents a CpG dinucleotide"
  misc_feature (61)..(61): /note="Nucleotide may be methylated to form 5-methylcytosine"
gacccccgcccaacattcccaggccccatttctaaacacacaattaagatgccacccctacggaaggcaaagcaaacctttgtctctgcagctacttggggtgggtggggcatgtgaaactg

SEQ ID NO: 13499 - DNA, 122 bp, Homo sapiens
  misc_feature (61)..(62): /note="This region represents a CpG dinucleotide"
  misc_feature (61)..(61): /note="Nucleotide may be methylated to form 5-methylcytosine"
taaccactggggaccattaagtgtcacctactctaattaacctgctgtcataaagctgcacgagtcattgtgttaaatatgcatctggaagccaaaatggcaaacccaccacatgcatgttc

SEQ ID NO: 13500 - DNA, 122 bp, Homo sapiens
  misc_feature (61)..(62): /note="This region represents a CpG dinucleotide"
  misc_feature (61)..(61): /note="Nucleotide may be methylated to form 5-methylcytosine"
ccgtaaaatgggcatagtaagaatatgtacttcatggggtgttggacaggtaaactgaggcgaatgcatctgagtcataatgggtgatgtgtattgaatgcaagctgcctgccaagccttgg

SEQ ID NO: 13501 - DNA, 122 bp, Homo sapiens
  misc_feature (61)..(62): /note="This region represents a CpG dinucleotide"
  misc_feature (61)..(61): /note="Nucleotide may be methylated to form 5-methylcytosine"
ccaaaagctctgcacaccaaagcaaacaatcaacaaaatgagaaggcaatgtaaaaaatgcgcaaaaatacttgtaaactgtgtatctgacaaagagctaatactcaaaacgtataactcct

SEQ ID NO: 13502 - DNA, 122 bp, Homo sapiens
  misc_feature (61)..(62): /note="This region represents a CpG dinucleotide"
  misc_feature (61)..(61): /note="Nucleotide may be methylated to form 5-methylcytosine"
ggcaagcaccactgcgcctggctgatttttctattttttttttgtagagacgaggtttcacgatgtctagcccaggctagtcttgagctcctgggctcaaatgatctgcctgcctcagcctc

SEQ ID NO: 13503 - DNA, 122 bp, Homo sapiens
  misc_feature (61)..(62): /note="This region represents a CpG dinucleotide"
  misc_feature (61)..(61): /note="Nucleotide may be methylated to form 5-methylcytosine"
tccctttttccggggaaggtttttagtgtgatgctcaatccatactcagtaaaccctcagcggcagtcctaagcaaacaaagaagtgaggttaagcattaatcctcttaatccaatgcaata

SEQ ID NO: 13504 - DNA, 122 bp, Homo sapiens
  misc_feature (61)..(62): /note="This region represents a CpG dinucleotide"
  misc_feature (61)..(61): /note="Nucleotide may be methylated to form 5-methylcytosine"
ggattaaatatttttttgttggtgtttgttgtttgacattagattgccaaagacatggaacgctgggctaagagtttgaataagcagaaagaaaactttaaaaatagctttcagcctgtcaa

SEQ ID NO: 13505 - DNA, 122 bp, Homo sapiens
  misc_feature (61)..(62): /note="This region represents a CpG dinucleotide"
  misc_feature (61)..(61): /note="Nucleotide may be methylated to form 5-methylcytosine"
ttgagatctatttcacaggcctttgtgaggcttaactgggatctcacatacaaaggacttcgtgcctggcttgtcccctctctctgtgaacaccctagacaacctgatattccaggccttgg

SEQ ID NO: 13506 - DNA, 122 bp, Homo sapiens
  misc_feature (61)..(62): /note="This region represents a CpG dinucleotide"
  misc_feature (61)..(61): /note="Nucleotide may be methylated to form 5-methylcytosine"
ctctgggtctcgacttccttgtgagtgaaataaaggggtgggaccagatgctctttgagccgctccagtgtcaccctgtctggcttaggggctcttgctctggggtctacagagaggctgtg

SEQ ID NO: 13507 - DNA, 122 bp, Homo sapiens
  misc_feature (61)..(62): /note="This region represents a CpG dinucleotide"
  misc_feature (61)..(61): /note="Nucleotide may be methylated to form 5-methylcytosine"
gccatgagaaagaggaaataagccagctgcaagataatcagttaattgtagtttctggggcgtaagaacagccttggatttagaccttctgagttgccattcttgtgggttttcactgtttt

SEQ ID NO: 13508 - DNA, 122 bp, Homo sapiens
  misc_feature (61)..(62): /note="This region represents a CpG dinucleotide"
  misc_feature (61)..(61): /note="Nucleotide may be methylated to form 5-methylcytosine"
ctttttgtaattctttgtttatctagttgactttctccttgagaccagcctttccttctccgcttcaatctacaggaaatcctccctctcctatagagagaaagacaactttctcctaggga

SEQ ID NO: 13509 - DNA, 122 bp, Homo sapiens
  misc_feature (61)..(62): /note="This region represents a CpG dinucleotide"
  misc_feature (61)..(61): /note="Nucleotide may be methylated to form 5-methylcytosine"
tggctagattaggtggtgtaggacgttatatacaaatacagtgtcatagagtgacttttccgaggcacactgtttacccagaaggagttcttcagtgcttttggttgttttcatttgacttt

SEQ ID NO: 13510 - DNA, 122 bp, Homo sapiens
  misc_feature (61)..(62): /note="This region represents a CpG dinucleotide"
  misc_feature (61)..(61): /note="Nucleotide may be methylated to form 5-methylcytosine"
cactatttaaattaaaaatcagatggtctgctgtagataggtttccagagcctcttatgtcgtaacactgaccctgttccattgtgagcactgaggagatagacacagagtgaagattagtg

SEQ ID NO: 13511 - DNA, 122 bp, Homo sapiens
  misc_feature (61)..(62): /note="This region represents a CpG dinucleotide"
  misc_feature (61)..(61): /note="Nucleotide may be methylated to form 5-methylcytosine"
cttgacttgtgtagtattgatgggcattttccctcaatcttctgccattataaacaaggccgggcagagtggctcatgcctgtaatcccagcactttgtgaggcgaaggcgggcagatcacc

SEQ ID NO: 13512 - DNA, 122 bp, Homo sapiens
  misc_feature (61)..(62): /note="This region represents a CpG dinucleotide"
  misc_feature (61)..(61): /note="Nucleotide may be methylated to form 5-methylcytosine"
aatattatgctctgattcaagaaatggaagatatccaatacagaatgcttatggaaagctcgtgtgtttcttcaaattcaagacagcatcttgagaacatgtaattatttcctctcttccct

SEQ ID NO: 13513 - DNA, 122 bp, Homo sapiens
  misc_feature (61)..(62): /note="This region represents a CpG dinucleotide"
  misc_feature (61)..(61): /note="Nucleotide may be methylated to form 5-methylcytosine"
gggttatctggaagtcttggtgagacagtgtctgcaaaatgcttatcgccaagccaggcacgtcatcattgcccaaggtatggcagctgcagccatcacggccctcattttgcagatgccga

SEQ ID NO: 13514 - DNA, 122 bp, Homo sapiens
  misc_feature (61)..(62): /note="This region represents a CpG dinucleotide"
  misc_feature (61)..(61): /note="Nucleotide may be methylated to form 5-methylcytosine"
ccctatcaagcaaacacatgcactcagtgctttaatctaatgaatgacttggtagttacacgtgtatagatactaatgttataattaccatatgcctagtgatcctgctggcctgccatccc

SEQ ID NO: 13515 - DNA, 122 bp, Homo sapiens
  misc_feature (61)..(62): /note="This region represents a CpG dinucleotide"
  misc_feature (61)..(61): /note="Nucleotide may be methylated to form 5-methylcytosine"
gcttccattccccagctgctaggagtgttggctgctcccttctccagagaactgtgttcacgcaaggggccctgccactcctgggaggttacgacatctccattccactcccctgcctagca

SEQ ID NO: 13516 - DNA, 122 bp, Homo sapiens
  misc_feature (61)..(62): /note="This region represents a CpG dinucleotide"
  misc_feature (61)..(61): /note="Nucleotide may be methylated to form 5-methylcytosine"
gacacggccagtaagctgtggagtctggatttgaactaggctctcttggagtttggagcccggtcttttcatttctggcagagacctgtggcttcagggggcggagcccagcccatggggga

SEQ ID NO: 13517 - DNA, 122 bp, Homo sapiens
  misc_feature (61)..(62): /note="This region represents a CpG dinucleotide"
  misc_feature (61)..(61): /note="Nucleotide may be methylated to form 5-methylcytosine"
actttgttttaagaacaaagatggttcctagaaaaggaaggaattttctttagcaattagcggtcactgtttggacaacttggattttaccaagaggagtgggaggaacagtccggtcatgt

SEQ ID NO: 13518 - DNA, 122 bp, Homo sapiens
  misc_feature (61)..(62): /note="This region represents a CpG dinucleotide"
  misc_feature (61)..(61): /note="Nucleotide may be methylated to form 5-methylcytosine"
aatcacagtgagaaaccaccatacactcaaaagagaggctaaaatacaaaagaataaaaacgaatgacaacactaaatgttgacgaggatggaaaacaagtggaaatctcattttatattgc

SEQ ID NO: 13519 - DNA, 122 bp, Homo sapiens
  misc_feature (61)..(62): /note="This region represents a CpG dinucleotide"
  misc_feature (61)..(61): /note="Nucleotide may be methylated to form 5-methylcytosine"
ggctacataattccaacgaactcatcttgttcagtctgccacaggccctgcccttgatgacgtcccacaggtcctgcccttgatgaggccccacaggacactcagaaagctgcatgaccagg

SEQ ID NO: 13520 - DNA, 122 bp, Homo sapiens
  misc_feature (61)..(62): /note="This region represents a CpG dinucleotide"
  misc_feature (61)..(61): /note="Nucleotide may be methylated to form 5-methylcytosine"
ttccgtgtgtgggtgggatggaaagaaagaggagtccaggtcaattagacctggttatctcgctaggacttatatcagaacagaaatcagaatgaattgttatggaaaggggatgttgcatt

SEQ ID NO: 13521 - DNA, 122 bp, Homo sapiens
  misc_feature (61)..(62): /note="This region represents a CpG dinucleotide"
  misc_feature (61)..(61): /note="Nucleotide may be methylated to form 5-methylcytosine"
gaggtgctggccacgagactggtgagcgggcggcaggacaggtgcccgactcagggctggcgtttgcaggcggtgctggagcggccggtggctgaggtggcggccccggtggtgaaagagct

SEQ ID NO: 13522 - DNA, 122 bp, Homo sapiens
  misc_feature (61)..(62): /note="This region represents a CpG dinucleotide"
  misc_feature (61)..(61): /note="Nucleotide may be methylated to form 5-methylcytosine"
gaggtcagtgacgtggtgagcatttcatgctccttactgatgagcagagggccggtatcacgtgctgccttcctagggagggctgggtagtgcgtcaaggaaatgggcccagagctgtgtct

SEQ ID NO: 13523 - DNA, 122 bp, Homo sapiens
  misc_feature (61)..(62): /note="This region represents a CpG dinucleotide"
  misc_feature (61)..(61): /note="Nucleotide may be methylated to form 5-methylcytosine"
aggttctcagatggtgtcagggctgctttgcagctgtttggggacacccagcacagggcacgctgggaaccatgttccctgtgaactctgcaggctgtagatctttgcatcaagataacagt

SEQ ID NO: 13524 - DNA, 122 bp, Homo sapiens
  misc_feature (61)..(62): /note="This region represents a CpG dinucleotide"
  misc_feature (61)..(61): /note="Nucleotide may be methylated to form 5-methylcytosine"
caccgtcagactgagggcgggtgcacgtggctgcagacagcagctgctgagaatgacacgcgactctgatgaaagcgatacagcttagccggtctggctgttcaccgtcctgctgcactcta

SEQ ID NO: 13525 - DNA, 122 bp, Homo sapiens
  misc_feature (61)..(62): /note="This region represents a CpG dinucleotide"
  misc_feature (61)..(61): /note="Nucleotide may be methylated to form 5-methylcytosine"
taacaaagaataattaattctattatatagaaatcaacaacaaccaccacaaaacattggcggtgggtccactggttgtgaaattatagtgtagttttaatctgcttaatcttatggaagga

SEQ ID NO: 13526 - DNA, 122 bp, Homo sapiens
  misc_feature (61)..(62): /note="This region represents a CpG dinucleotide"
  misc_feature (61)..(61): /note="Nucleotide may be methylated to form 5-methylcytosine"
gtgaaagagaattagagtatacctccctacattttacaactcacattaaaactgtcataacgccctgaaagtataggggagaaagtaagagctgaattgctatttttctgacattagtaagc

SEQ ID NO: 13527 - DNA, 122 bp, Homo sapiens
  misc_feature (61)..(62): /note="This region represents a CpG dinucleotide"
  misc_feature (61)..(61): /note="Nucleotide may be methylated to form 5-methylcytosine"
gggaaatgagatttccctctaaagcagcatttgagtttgtcatacagttcatgtgtctgccgcttctgagaggaggcaatggtaatacatatacagaaaaaatgctgggcaacctatcttgg

SEQ ID NO: 13528 - DNA, 122 bp, Homo sapiens
  misc_feature (61)..(62): /note="This region represents a CpG dinucleotide"
  misc_feature (61)..(61): /note="Nucleotide may be methylated to form 5-methylcytosine"
ttactcatcataacctgttttcttggaaacagatccctcctgggagagcaggaagtttgacgtcaattttaaggtttccccaagtactggcagggaattgctctgtgggtgcctcctacgag

SEQ ID NO: 13529 - DNA, 122 bp, Homo sapiens
  misc_feature (61)..(62): /note="This region represents a CpG dinucleotide"
  misc_feature (61)..(61): /note="Nucleotide may be methylated to form 5-methylcytosine"
ccccgccttccccccaaaggaaggaggcgggagtagggagagaagggcggcgctcggcaacgtaaaagcgatctcccattagcgctcatcgccgccaatcgaggcttccttctctcccattg

SEQ ID NO: 13530 - DNA, 122 bp, Homo sapiens
  misc_feature (61)..(62): /note="This region represents a CpG dinucleotide"
  misc_feature (61)..(61): /note="Nucleotide may be methylated to form 5-methylcytosine"
tgagattgctgtgaagattagatacagggtttattcccttatcttatataaaatgcttagcgaagtgcctggaacattattaagtgcgcaatcagtgttagtccttgctccttccttgtgga

SEQ ID NO: 13531 - DNA, 122 bp, Homo sapiens
  misc_feature (61)..(62): /note="This region represents a CpG dinucleotide"
  misc_feature (61)..(61): /note="Nucleotide may be methylated to form 5-methylcytosine"
gcagaacagctctctcctctacccccagctctgttgggatctgaggtgaggcgctggaggcgggatggagagcagtggaaaaggaggtatctgataccctgcagtaagcttctttttcctgt

SEQ ID NO: 13532 - DNA, 122 bp, Homo sapiens
  misc_feature (61)..(62): /note="This region represents a CpG dinucleotide"
  misc_feature (61)..(61): /note="Nucleotide may be methylated to form 5-methylcytosine"
tccctagagctggctaattctgagagtcggcgaaggtcttagctgagagcacagctctcacgtacaaaccaaccaatcctgaatctacagccccaaactccttatctaactctcacacaaca

SEQ ID NO: 13533 - DNA, 122 bp, Homo sapiens
  misc_feature (61)..(62): /note="This region represents a CpG dinucleotide"
  misc_feature (61)..(61): /note="Nucleotide may be methylated to form 5-methylcytosine"
gggcaccggctcatctaattcatttgtgtacagatccacaaaactgcacctggctgtggccgtcagtaagtgctatataaatgcttcataagtgtttgttgaaggaagttgaaatgtagtcg

SEQ ID NO: 13534 - DNA, 122 bp, Homo sapiens
  misc_feature (61)..(62): /note="This region represents a CpG dinucleotide"
  misc_feature (61)..(61): /note="Nucleotide may be methylated to form 5-methylcytosine"
gatattgattatgaggctgttaaaatatttttggctactgttgcctcaaatgtatttgaacgaactctaattccatagaatgttactaaatgttgcataggggaaaacagaagtgtctgtag

SEQ ID NO: 13535 - DNA, 122 bp, Homo sapiens
  misc_feature (61)..(62): /note="This region represents a CpG dinucleotide"
  misc_feature (61)..(61): /note="Nucleotide may be methylated to form 5-methylcytosine"
cccttcgatgtcaggagtgaatgcagcaatgcagacgtgccccacttatacaaggatactcgtgtatatgcatgtatgcacgtatgtatgtactggattcagcaatgacatccgcaaagcct

SEQ ID NO: 13536 - DNA, 122 bp, Homo sapiens
  misc_feature (61)..(62): /note="This region represents a CpG dinucleotide"
  misc_feature (61)..(61): /note="Nucleotide may be methylated to form 5-methylcytosine"
tgggattccacttacccatccttgattttatttgtcctctccacattgtcaatgtccattcggatcttgtacttgacatgatggggcagctcaatgctgcctggagtaattccagtgaacac

SEQ ID NO: 13537 - DNA, 122 bp, Homo sapiens
  misc_feature (61)..(62): /note="This region represents a CpG dinucleotide"
  misc_feature (61)..(61): /note="Nucleotide may be methylated to form 5-methylcytosine"
ctgggcctctggaggtgattcatgaggctctgccctcaggaacaggattattacccagtccgtagtacccaatagatgatcttgctgccccacgcgaggatacagccaggaggtctacagcc

SEQ ID NO: 13538 - DNA, 122 bp, Homo sapiens
  misc_feature (61)..(62): /note="This region represents a CpG dinucleotide"
  misc_feature (61)..(61): /note="Nucleotide may be methylated to form 5-methylcytosine"
gtggtattactttttctagtcaagtgaccattcatactaacatgctataagttcctcaatcgtaaatgcccaccagccatggtgtgcatagcttcagctaatgatagcattttgagctgtat

SEQ ID NO: 13539 - DNA, 122 bp, Homo sapiens
  misc_feature (61)..(62): /note="This region represents a CpG dinucleotide"
  misc_feature (61)..(61): /note="Nucleotide may be methylated to form 5-methylcytosine"
cttcgcccgggaggcggtgggtgcgggtgcagctcgggccctgctgcctggagatgaggacgctggtcgagctcgggccctgggctggggactttgggcctgacctgctgctcaccctgctc

SEQ ID NO: 13540 - DNA, 122 bp, Homo sapiens
  misc_feature (61)..(62): /note="This region represents a CpG dinucleotide"
  misc_feature (61)..(61): /note="Nucleotide may be methylated to form 5-methylcytosine"
ctaatcagtgatgtttcatcaaaagaattacaactcagcttttcccataattcctgtcaccgttgcaagaatggagagatgcaggtgaacagccagccctgcatccgctgcagctccacact

SEQ ID NO: 13541 - DNA, 122 bp, Homo sapiens
  misc_feature (61)..(62): /note="This region represents a CpG dinucleotide"
  misc_feature (61)..(61): /note="Nucleotide may be methylated to form 5-methylcytosine"
aaaaatatatcacaaaatttaaaatacagaaaccagctttttacacagaaaattacaacccgcaagtgccacaccgagaggcggctgcagccagtctgagccctggggacgcatgtgctgtg

SEQ ID NO: 13542 - DNA, 122 bp, Homo sapiens
  misc_feature (61)..(62): /note="This region represents a CpG dinucleotide"
  misc_feature (61)..(61): /note="Nucleotide may be methylated to form 5-methylcytosine"
cttttaggcttattttctttttcctgttccttgagaaaacaatacagaaacagggctgggcgcggtggctcaagcctgtaatcccagcactttgggaggccaagacgggcggatcacaaggt

SEQ ID NO: 13543 - DNA, 122 bp, Homo sapiens
  misc_feature (61)..(62): /note="This region represents a CpG dinucleotide"
  misc_feature (61)..(61): /note="Nucleotide may be methylated to form 5-methylcytosine"
attcaacatattttaagctactgaaaatcaagtgctttcccatttgggttttggctggagcggtttgtttgttttggagtaacaggtgtgcaactgcaacatgtatatgtcttaaatttttg

SEQ ID NO: 13544 - DNA, 122 bp, Homo sapiens
  misc_feature (61)..(62): /note="This region represents a CpG dinucleotide"
  misc_feature (61)..(61): /note="Nucleotide may be methylated to form 5-methylcytosine"
tactgattctactgttgctgggtaagtgggcagtttccagcttagggctagtataaatagcgctgctaagaacgtcctggtgcaagtcttctggcaaacacataacactgctgagtcacagg

SEQ ID NO: 13545 - DNA, 122 bp, Homo sapiens
  misc_feature (61)..(62): /note="This region represents a CpG dinucleotide"
  misc_feature (61)..(61): /note="Nucleotide may be methylated to form 5-methylcytosine"
aagggcaaatctcaaaggcccttaaatggattggaaagccaaatggcaatttccttgcctcgggctggattaaaccaaggcaatcacatttccatctgctctttcaataattttatcaatac

SEQ ID NO: 13546 - DNA, 122 bp, Homo sapiens
  misc_feature (61)..(62): /note="This region represents a CpG dinucleotide"
  misc_feature (61)..(61): /note="Nucleotide may be methylated to form 5-methylcytosine"
cacaggctgggagttctcacgccctgcaggctttcatcatcctgacctttccaactagaacgtcgtcttttgctggctaatttgtaactgcccttcaagattcactggggatcagaaggctt

SEQ ID NO: 13547 - DNA, 122 bp, Homo sapiens
  misc_feature (61)..(62): /note="This region represents a CpG dinucleotide"
  misc_feature (61)..(61): /note="Nucleotide may be methylated to form 5-methylcytosine"
tctgttcaacagatttacactgactgggccaaccactacctagcaaaatcaggccacaagcggctgatcaaggacttgcaacaagacattgcagatggagtactcctagcagaaatcatcca

SEQ ID NO: 13548 - DNA, 122 bp, Homo sapiens
  misc_feature (61)..(62): /note="This region represents a CpG dinucleotide"
  misc_feature (61)..(61): /note="Nucleotide may be methylated to form 5-methylcytosine"
tataatattttcccctttccaagtcatctgcccaatataagagaaatatttggataatatcgtcctcttcctcttcttcttccccctcctttttctcttcctcttctatggcaaatttctat

SEQ ID NO: 13549 - DNA, 122 bp, Homo sapiens
  misc_feature (61)..(62): /note="This region represents a CpG dinucleotide"
  misc_feature (61)..(61): /note="Nucleotide may be methylated to form 5-methylcytosine"
ccctaactctgctgctgaaacagatactgctgtccaccctcctaccattctctcttttgtcgattgctgtgatgtgtcactatcctggttcgcctctcctctgtcccttcctgctcccccta

SEQ ID NO: 13550 - DNA, 122 bp, Homo sapiens
  misc_feature (61)..(62): /note="This region represents a CpG dinucleotide"
  misc_feature (61)..(61): /note="Nucleotide may be methylated to form 5-methylcytosine"
agtttcagtttctttttctttaaaatgggaatggcaatgcttagcttatgagggtcattacggggctgaaatgttggtaaagcagcacatgatatataggtaagtatgccctgcagatcaat

SEQ ID NO: 13551 - DNA, 122 bp, Homo sapiens
  misc_feature (61)..(62): /note="This region represents a CpG dinucleotide"
  misc_feature (61)..(61): /note="Nucleotide may be methylated to form 5-methylcytosine"
agaaacttccagctgaactctgttaacaagttaacaatttcaactgaatgcaaagtttcccggacagaatctgggagagagggtaaaccgggagagcaggtaccagcacagaagccatggca

SEQ ID NO: 13552 - DNA, 122 bp, Homo sapiens
  misc_feature (61)..(62): /note="This region represents a CpG dinucleotide"
  misc_feature (61)..(61): /note="Nucleotide may be methylated to form 5-methylcytosine"
acacagttttcaccttgactgcttgaaaatgaaaacttgagtgcacaagtatttagtgtacgggcatcaactccatgtcagcctttgcagagccatttttatgtgaaggaaatgtactgaaa

SEQ ID NO: 13553 - DNA, 122 bp, Homo sapiens
  misc_feature (61)..(62): /note="This region represents a CpG dinucleotide"
  misc_feature (61)..(61): /note="Nucleotide may be methylated to form 5-methylcytosine"
atcattccttactgcttggaaaagtgagactccgttgcacctctaggaatctttttaaaacgccctgtatgttccttaacactgcctgtaggaatcctgtagccctagccccgtgggatttc

SEQ ID NO: 13554 - DNA, 122 bp, Homo sapiens
  misc_feature (61)..(62): /note="This region represents a CpG dinucleotide"
  misc_feature (61)..(61): /note="Nucleotide may be methylated to form 5-methylcytosine"
cccgacccattcacggcccctcccgcagcccctttcttcgggccctttgtggcctcaccgcggctgcctggctgctctggctgaggatagccatgagtgtttgtccccagagccggcctttg

SEQ ID NO: 13555 - DNA, 122 bp, Homo sapiens
  misc_feature (61)..(62): /note="This region represents a CpG dinucleotide"
  misc_feature (61)..(61): /note="Nucleotide may be methylated to form 5-methylcytosine"
tttggctctatcactgtgagaacctgggcaacttaatctgtcaggacctcggatcatcatcgctgaaatgaggatgacctcatattacttcaaaaggttgtggtgagggtagaattaatacg

SEQ ID NO: 13556 - DNA, 122 bp, Homo sapiens
  misc_feature (61)..(62): /note="This region represents a CpG dinucleotide"
  misc_feature (61)..(61): /note="Nucleotide may be methylated to form 5-methylcytosine"
tttcataactttccatccaaatcatgcctaaatcatttttcagttctttggagcagatgacgattaagggggaaagggaaggagggatcaaaatgttcacttaaatggaatttagtttgttt

SEQ ID NO: 13557 - DNA, 122 bp, Homo sapiens
  misc_feature (61)..(62): /note="This region represents a CpG dinucleotide"
  misc_feature (61)..(61): /note="Nucleotide may be methylated to form 5-methylcytosine"
cttgtctggcttcccagccgctgctctgacgtcctcgtggacggtttgggcatttctacgcggttgtgcgaccaacaactgcccgttcaggtcaaggtccccatctacaggagaaagggatg

SEQ ID NO: 13558 - DNA, 122 bp, Homo sapiens
  misc_feature (61)..(62): /note="This region represents a CpG dinucleotide"
  misc_feature (61)..(61): /note="Nucleotide may be methylated to form 5-methylcytosine"
ttgcttggaccagcagaaaccatgcagtcaaggacaactggagtcagcatgggctgggtgcgagcccttggtggggtggggaggagactccaggtcatacctcctggaggatgttttaatca

SEQ ID NO: 13559 - DNA, 122 bp, Homo sapiens
  misc_feature (61)..(62): /note="This region represents a CpG dinucleotide"
  misc_feature (61)..(61): /note="Nucleotide may be methylated to form 5-methylcytosine"
atgtttatttgcacaaaatctctaaagtcctagggccaggagactactggtcattttgtccgtcttcctgcctcctagctaggacactttaagtcataataataatattcctgaagggtttc

SEQ ID NO: 13560 - DNA, 122 bp, Homo sapiens
  misc_feature (61)..(62): /note="This region represents a CpG dinucleotide"
  misc_feature (61)..(61): /note="Nucleotide may be methylated to form 5-methylcytosine"
ttgatttggctggggctcaggctggcctgtttgtgaatttcacaattcacagatgttagccgctctcgggctaagtaaaggaagagaatgtcaagttttaaatagcttctcccttccatcct

SEQ ID NO: 13561 - DNA, 122 bp, Homo sapiens
  misc_feature (61)..(62): /note="This region represents a CpG dinucleotide"
  misc_feature (61)..(61): /note="Nucleotide may be methylated to form 5-methylcytosine"
ctgggccgggatgtgagtgctgctgtgctgtctccaaagcccacactctttcctctgtgccgctccataaatgctacttgttcccctctgtctctgtgggaggacgttgccattcaggaggg

SEQ ID NO: 13562 - DNA, 122 bp, Homo sapiens
  misc_feature (61)..(62): /note="This region represents a CpG dinucleotide"
  misc_feature (61)..(61): /note="Nucleotide may be methylated to form 5-methylcytosine"
agcccaccaggcacctgcatcacagcatcgcctgggtcatagcctgagtttgagaaccatcgccctgcatggcctgaccagccgaggctagtggcagctctgtgcaacgtgtctacttcctc

SEQ ID NO: 13563 - DNA, 122 bp, Homo sapiens
  misc_feature (61)..(62): /note="This region represents a CpG dinucleotide"
  misc_feature (61)..(61): /note="Nucleotide may be methylated to form 5-methylcytosine"
tatggccaccctgactaaagcgtgacctccttttgctgcacgttttattcttagagcttgcgttcagcgccacaccaccacctatcacactggagagacaaatagttcatatctgccaaatc

SEQ ID NO: 13564 - DNA, 122 bp, Homo sapiens
  misc_feature (61)..(62): /note="This region represents a CpG dinucleotide"
  misc_feature (61)..(61): /note="Nucleotide may be methylated to form 5-methylcytosine"
cccatggcgccaacccccagggaggagaaaggtgtgtacagtccctagtcttcctgttgacggagcagtcaggcacattctcaggctgtcttgctccttgacagcacctcctctgtcagctg

SEQ ID NO: 13565 - DNA, 122 bp, Homo sapiens
  misc_feature (61)..(62): /note="This region represents a CpG dinucleotide"
  misc_feature (61)..(61): /note="Nucleotide may be methylated to form 5-methylcytosine"
atgttttctcaagaggttcccctgcagagataatgtcacagggtgatcaacctggcaagtcgtgcagggtgggaagctgggatgctcacaggaatattcatggggatgggggaatccacact

SEQ ID NO: 13566 - DNA, 122 bp, Homo sapiens
  misc_feature (61)..(62): /note="This region represents a CpG dinucleotide"
  misc_feature (61)..(61): /note="Nucleotide may be methylated to form 5-methylcytosine"
cttctgccccccaccgggggagctgtgtaggtttctcctttggaaaatttattgttggggcgattgctattattgccggctgtaagggaagataagacacaaaaatcctttgtctttgtgca

SEQ ID NO: 13567 - DNA, 122 bp, Homo sapiens
  misc_feature (61)..(62): /note="This region represents a CpG dinucleotide"
  misc_feature (61)..(61): /note="Nucleotide may be methylated to form 5-methylcytosine"
ctgtcatcaggtgacccagggcatcctgtcctggagcccggacatcctttgaaaacaaatcgtggggctcccctaatccccgttgcagaaccaaacagggtgaagggatttggagactcagg

SEQ ID NO: 13568 - DNA, 122 bp, Homo sapiens
  misc_feature (61)..(62): /note="This region represents a CpG dinucleotide"
  misc_feature (61)..(61): /note="Nucleotide may be methylated to form 5-methylcytosine"
gtcatagtgtgcctgggagcaggaagcacagagagcaaagaaacaggcttagacattggccgaagtactccctggacccaatgacaatgggactgctaagcctattctagtctgtcatgtcc

SEQ ID NO: 13569 - DNA, 122 bp, Homo sapiens
  misc_feature (61)..(62): /note="This region represents a CpG dinucleotide"
  misc_feature (61)..(61): /note="Nucleotide may be methylated to form 5-methylcytosine"
ctgtatggctaacctttctgctgcagtccagggtgttgacactgacatgctgcagtgtaccgtcggtgatttatttaggataaatatgtctcaggtggcatttaatccttcataaaaccagt

SEQ ID NO: 13570 - DNA, 122 bp, Homo sapiens
  misc_feature (61)..(62): /note="This region represents a CpG dinucleotide"
  misc_feature (61)..(61): /note="Nucleotide may be methylated to form 5-methylcytosine"
gagagccctggccaggactcacatagcaggaacaccagcatgtaggctaacattgcttctcgtttttaagtcaaagttctattccaaacacaagttttttttttctcaaatccacaatctaa

SEQ ID NO: 13571 - DNA, 122 bp, Homo sapiens
  misc_feature (61)..(62): /note="This region represents a CpG dinucleotide"
  misc_feature (61)..(61): /note="Nucleotide may be methylated to form 5-methylcytosine"
aagaatagatcttttttttttttaacttggggtttttgaggagggattttagaggagtggcggggaagctactcagtcgagataaactccttaaaagcatgggcaaaattcccttttctgtg

SEQ ID NO: 13572 - DNA, 122 bp, Homo sapiens
  misc_feature (61)..(62): /note="This region represents a CpG dinucleotide"
  misc_feature (61)..(61): /note="Nucleotide may be methylated to form 5-methylcytosine"
atctggacaagccacagcagagactctgatttggagacttcatggacactcctgccagtgcgctgctgctattgctgctacttccagatgctggtagaaccatttaggtctcttgctttcag

SEQ ID NO: 13573 - DNA, 122 bp, Homo sapiens
  misc_feature (61)..(62): /note="This region represents a CpG dinucleotide"
  misc_feature (61)..(61): /note="Nucleotide may be methylated to form 5-methylcytosine"
tattttctgggacagtcggtctgttcatgagaaagggcggttgtgcaatcgttctccctacgtcaactctgagaagtcggttgtgccctgcagatattgatgtcagcctgtttgctctctgg

SEQ ID NO: 13574 - DNA, 122 bp, Homo sapiens
  misc_feature (61)..(62): /note="This region represents a CpG dinucleotide"
  misc_feature (61)..(61): /note="Nucleotide may be methylated to form 5-methylcytosine"
agtttgagtacaacttagcgaggtcctctgcaagacagcaatcaaggtgtcagacaggagcgtggtttcatctgaggaaaaatctccttgccaactcacatggccttgagcagcattcagtt

SEQ ID NO: 13575 - DNA, 122 bp, Homo sapiens
  misc_feature (61)..(62): /note="This region represents a CpG dinucleotide"
  misc_feature (61)..(61): /note="Nucleotide may be methylated to form 5-methylcytosine"
ccaagacataagctactgttataatacataattagtgtatgcactcccaagaagggaagtcgaatctaatttgtaaaagactgatttcctcatatcgctgtagatgacagcactctttgtaa

SEQ ID NO: 13576 - DNA, 122 bp, Homo sapiens
  misc_feature (61)..(62): /note="This region represents a CpG dinucleotide"
  misc_feature (61)..(61): /note="Nucleotide may be methylated to form 5-methylcytosine"
gcatgtaatgaaagctgatgttagacctatttttagaagagttcatggctctcaagaaaacggagtcaatggtgacattttactgagaatgataacaaaaccagcatgacaggaacctggag

SEQ ID NO: 13577 - DNA, 122 bp, Homo sapiens
  misc_feature (61)..(62): /note="This region represents a CpG dinucleotide"
  misc_feature (61)..(61): /note="Nucleotide may be methylated to form 5-methylcytosine"
ttcgctcttcacaatacatcttgctgctgctcactcgctcactgactcactctttgtgtccgtgccacctttaagagctgtaacactcactgcaaaaattcccagcttcattctggaagtca

SEQ ID NO: 13578 - DNA, 122 bp, Homo sapiens
  misc_feature (61)..(62): /note="This region represents a CpG dinucleotide"
  misc_feature (61)..(61): /note="Nucleotide may be methylated to form 5-methylcytosine"
tgccctaggatgactcttacggttctggctctctaggtgcttctatgtataaactgcaggcgtcaatgctctagaaataggccatccatcagcttgtgccatctgtaaggctgtgtctcagt

SEQ ID NO: 13579 - DNA, 122 bp, Homo sapiens
  misc_feature (61)..(62): /note="This region represents a CpG dinucleotide"
  misc_feature (61)..(61): /note="Nucleotide may be methylated to form 5-methylcytosine"
ccagtgtcctgtggggacacccagaaaggagcaccgtgggggatcccctgaaagggctgacggccgtgatgatttactcccacttagagcctgaacacaaaactgtggctttcttgagggac

SEQ ID NO: 13580 - DNA, 122 bp, Homo sapiens
  misc_feature (61)..(62): /note="This region represents a CpG dinucleotide"
  misc_feature (61)..(61): /note="Nucleotide may be methylated to form 5-methylcytosine"
ccagttgcatagctcttccagaaatatttcttgacgcacttatttagcactttctattgccgttactgagcagattacagaatcctcccggccctttcaccaaacccgtctagagctggtat

SEQ ID NO: 13581 - DNA, 122 bp, Homo sapiens
  misc_feature (61)..(62): /note="This region represents a CpG dinucleotide"
  misc_feature (61)..(61): /note="Nucleotide may be methylated to form 5-methylcytosine"
acatatgacacagattagtttcaaaggtcataactgtgtggccagagttaagtgattagtcgagaagggcaaaacataacaagaccaagtgtcagtttgcaatgaggcatcaccaatagcta

SEQ ID NO: 13582 - DNA, 122 bp, Homo sapiens
  misc_feature (61)..(62): /note="This region represents a CpG dinucleotide"
  misc_feature (61)..(61): /note="Nucleotide may be methylated to form 5-methylcytosine"
atcaggtgatacgcccagctcagcctcccaaagtgctgggattacaggcatgagccaccacgcctggccaaccaggacttagtcttattgccacagccctgcagttgcaaggaagactgaaa

SEQ ID NO: 13583 - DNA, 122 bp, Homo sapiens
  misc_feature (61)..(62): /note="This region represents a CpG dinucleotide"
  misc_feature (61)..(61): /note="Nucleotide may be methylated to form 5-methylcytosine"
tgaaatttagagcatacagttttagcaattttcctgtgctcccattagggccttcttaagcgtaatacagtagtctctcccccatctgtggtttcattttcgttggttttagttactggagg

SEQ ID NO: 13584 - DNA, 122 bp, Homo sapiens
  misc_feature (61)..(62): /note="This region represents a CpG dinucleotide"
  misc_feature (61)..(61): /note="Nucleotide may be methylated to form 5-methylcytosine"
gctaacacatcctactgccaaatgccagagctggcaggacctatagaaagctggctaacacggggcacatgtattacccttaagtcctgagcccagggcagacgtcactaagcaccgaccat

SEQ ID NO: 13585 - DNA, 122 bp, Homo sapiens
  misc_feature (61)..(62): /note="This region represents a CpG dinucleotide"
  misc_feature (61)..(61): /note="Nucleotide may be methylated to form 5-methylcytosine"
cctcagcctcaatgctaacctgaggggcggtgcctctggtcccctcgtgggcttgggtggcgctgggagatgattaggggcctgtagtgcctggcacagggctgccccaacagtggtggttg

SEQ ID NO: 13586 - DNA, 122 bp, Homo sapiens
  misc_feature (61)..(62): /note="This region represents a CpG dinucleotide"
  misc_feature (61)..(61): /note="Nucleotide may be methylated to form 5-methylcytosine"
ctatttgagagatttccccaatcttagggattttctcttccctcccttttgtgtgaaccacggacatttccaaaaggcaggtctgtacaaaaagttctattcagagaggtgctccccctcct

SEQ ID NO: 13587 - DNA, 122 bp, Homo sapiens
  misc_feature (61)..(62): /note="This region represents a CpG dinucleotide"
  misc_feature (61)..(61): /note="Nucleotide may be methylated to form 5-methylcytosine"
ttgtttttaatatgacctacaagtagagcttacttagcagtagatttatgtaaattttgacgcaaaataatcttatcaatggactttgtttctttttatagccttttacacttcactgaaaa

SEQ ID NO: 13588 - DNA, 122 bp, Homo sapiens
  misc_feature (61)..(62): /note="This region represents a CpG dinucleotide"
  misc_feature (61)..(61): /note="Nucleotide may be methylated to form 5-methylcytosine"
cccacctctccgggtcccgccccctgggcgactgttggggtagtgagtgacagcggaggacggggggaggcagggacccagccctcacgtgcccctccttcccttgtctgcagccacggggc

SEQ ID NO: 13589 - DNA, 122 bp, Homo sapiens
  misc_feature (61)..(62): /note="This region represents a CpG dinucleotide"
  misc_feature (61)..(61): /note="Nucleotide may be methylated to form 5-methylcytosine"
ctatgcatacttatcttagtgttcaaaacaatcctcataaactgtaactatcatcattcgcgtgttgcagattaggccactgaaactcacggaggggaagaaacttggctagaagtcacaaa

SEQ ID NO: 13590 - DNA, 122 bp, Homo sapiens
  misc_feature (61)..(62): /note="This region represents a CpG dinucleotide"
  misc_feature (61)..(61): /note="Nucleotide may be methylated to form 5-methylcytosine"
ttcctctgtgtatttgactttcttctatgacctccaaaatattctaccctggtttttttccgtctatcatttcttctctgtgtctatgcctcttccatagccctatacctaaatgttggtat

SEQ ID NO: 13591 - DNA, 122 bp, Homo sapiens
  misc_feature (61)..(62): /note="This region represents a CpG dinucleotide"
  misc_feature (61)..(61): /note="Nucleotide may be methylated to form 5-methylcytosine"
tgaacctgtgtgtttctgatgactcaacaattctgctcctaggtggatgcccatgagagacgtgcacatatgctcaccagttaggagatttgtcacagtgctgcttcatgacagccacagat

SEQ ID NO: 13592 - DNA, 122 bp, Homo sapiens
  misc_feature (61)..(62): /note="This region represents a CpG dinucleotide"
  misc_feature (61)..(61): /note="Nucleotide may be methylated to form 5-methylcytosine"
ctcacagatacctgtgggttctgtgctgttccagcccagcaggtcagggtgcagtcggctcgcccctgattggccagcagctccttcccttccagacttggcctccaggacctgcccttctt

SEQ ID NO: 13593 - DNA, 122 bp, Homo sapiens
  misc_feature (61)..(62): /note="This region represents a CpG dinucleotide"
  misc_feature (61)..(61): /note="Nucleotide may be methylated to form 5-methylcytosine"
caaaagcaggtttcccagaaaaggaggaattctgcctcaagattcaatgtgtaaatcctgcgtgagtttgagtttccagcatgccctgtgggtttccatacgttccctgtgaactttggact

SEQ ID NO: 13594 - DNA, 122 bp, Homo sapiens
  misc_feature (61)..(62): /note="This region represents a CpG dinucleotide"
  misc_feature (61)..(61): /note="Nucleotide may be methylated to form 5-methylcytosine"
gtgagaccaagaacccaccaattccggacacaccaggaccttccgctgctcgctcctcctcgtcccttctacccgctggggtcagcctcatcgaccccgtctcaactctgacacagtctctc

SEQ ID NO: 13595 - DNA, 122 bp, Homo sapiens
  misc_feature (61)..(62): /note="This region represents a CpG dinucleotide"
  misc_feature (61)..(61): /note="Nucleotide may be methylated to form 5-methylcytosine"
gaatctcctgcaatcaggagtagtggcttggggaagttgctggtgatactcagaaaaccacgaagacaccacagcccagccgtggtagtctgttccttgatggaaaagcctttttcttatta

SEQ ID NO: 13596 - DNA, 122 bp, Homo sapiens
  misc_feature (61)..(62): /note="This region represents a CpG dinucleotide"
  misc_feature (61)..(61): /note="Nucleotide may be methylated to form 5-methylcytosine"
aaatcaatggaagatgaaaatgatccaaaccccaaaaataaatacatatgggaaaagttacgatctggaccaactgcattcaaaggaaatgcagttttattagtttcaaggacatacagtaa

SEQ ID NO: 13597 - DNA, 122 bp, Homo sapiens
  misc_feature (61)..(62): /note="This region represents a CpG dinucleotide"
  misc_feature (61)..(61): /note="Nucleotide may be methylated to form 5-methylcytosine"
gagcattagatgaggctatgcagttgactcactggtgtctctttcctcacttataaaatacgaataataaatacatgtgtttctcggactatggagaacaatgtttgcattgttctttggga

SEQ ID NO: 13598 - DNA, 122 bp, Homo sapiens
  misc_feature (61)..(62): /note="This region represents a CpG dinucleotide"
  misc_feature (61)..(61): /note="Nucleotide may be methylated to form 5-methylcytosine"
gataaaccctgctgagtaagtgactgagtcagaagtggagaaagattgaacaaagactctcgttcttaccctgctgttgtgaaagagaattgcggctggcactttatttcttgggcttcaga

SEQ ID NO: 13599 - DNA, 122 bp, Homo sapiens
  misc_feature (61)..(62): /note="This region represents a CpG dinucleotide"
  misc_feature (61)..(61): /note="Nucleotide may be methylated to form 5-methylcytosine"
ccaaatataggttccacacccttttctaactccagccatgtgaatgtcctgataagcacacggcaaaaaataagctaagtgaaatattctcattgcctcatgatctctagagtgtatgtcat

SEQ ID NO: 13600 - DNA, 122 bp, Homo sapiens
  misc_feature (61)..(62): /note="This region represents a CpG dinucleotide"
  misc_feature (61)..(61): /note="Nucleotide may be methylated to form 5-methylcytosine"
aagttctagagaagggggttcagggttccggctctctggctctcacagctgaggccaaaacgtcaggcgccacaccagtatctcggcttgccatttcgtcaccagctgaatgccagtcgcaa

SEQ ID NO: 13601 - DNA, 122 bp, Homo sapiens
  misc_feature (61)..(62): /note="This region represents a CpG dinucleotide"
  misc_feature (61)..(61): /note="Nucleotide may be methylated to form 5-methylcytosine"
cgtgagagtgggggctagggattcctccctgggtgcgggtgtaaccaatttctggtctgccgatggccttgggaaagggcctcccatctgcttccaacaacccccttacaatgtcagaaaat

SEQ ID NO: 13602 - DNA, 122 bp, Homo sapiens
  misc_feature (61)..(62): /note="This region represents a CpG dinucleotide"
  misc_feature (61)..(61): /note="Nucleotide may be methylated to form 5-methylcytosine"
gtttggagcttgcctgtgttgatgggattaaggcagggatgatttatgtgtaaatttatgcgttagtaacagcagtaaccgctgtagttacactagggttctaagagcaaatgttgattaaa

SEQ ID NO: 13603 - DNA, 122 bp, Homo sapiens
  misc_feature (61)..(62): /note="This region represents a CpG dinucleotide"
  misc_feature (61)..(61): /note="Nucleotide may be methylated to form 5-methylcytosine"
tctggggtcggtcctaaaataaaaggtgagttcctgaatgatgggactaaagaggagagacggaacaataatgtaaggttttcagagggagtagtcacaaaagctttcagaggaagtactgg

SEQ ID NO: 13604 - DNA, 122 bp, Homo sapiens
  misc_feature (61)..(62): /note="This region represents a CpG dinucleotide"
  misc_feature (61)..(61): /note="Nucleotide may be methylated to form 5-methylcytosine"
acgcccgccactcttctgctgaacattcattcacacgtgcctcaggaaaatcttcggacacgcacatcaagccatctggcatgggagtgtttaattttgagagtgatcttttgtttattgag

SEQ ID NO: 13605 - DNA, 122 bp, Homo sapiens
  misc_feature (61)..(62): /note="This region represents a CpG dinucleotide"
  misc_feature (61)..(61): /note="Nucleotide may be methylated to form 5-methylcytosine"
tgacctcgtgatccgcccgcctcggcctgccaaagtgctgcgattacaggcgtgagccaccgcgcgcagccttaaatgtttttttaagggtccgttttgttttattttgctccctggtctag

SEQ ID NO: 13606 - DNA, 122 bp, Homo sapiens
  misc_feature (61)..(62): /note="This region represents a CpG dinucleotide"
  misc_feature (61)..(61): /note="Nucleotide may be methylated to form 5-methylcytosine"
tcatcatacgtgaaaatcattccctgcagctcttcccagatgtcatgtgttaagcaggttcgatatataatgaaactaggaaggcactactgtcctttgctgacaccttcccttcttggttt

SEQ ID NO: 13607 - DNA, 122 bp, Homo sapiens
  misc_feature (61)..(62): /note="This region represents a CpG dinucleotide"
  misc_feature (61)..(61): /note="Nucleotide may be methylated to form 5-methylcytosine"
tgttaaagataaaataatttttccttctctgagccatctgattgacgtggtaatgggccccgcagacagggagaaggtcaggttgcaatgtaatcagttttttctagagtgacgtataatca

SEQ ID NO: 13608 - DNA, 122 bp, Homo sapiens
  misc_feature (61)..(62): /note="This region represents a CpG dinucleotide"
  misc_feature (61)..(61): /note="Nucleotide may be methylated to form 5-methylcytosine"
agaggtgaaaataaaagtatatgactggctgagtgtaacaaaactacatgacaggaattacgactcacatacagcctggagtcacctttctgttacaccctgttcatcagtgatggaaaggc

SEQ ID NO: 13609 - DNA, 122 bp, Homo sapiens
  misc_feature (61)..(62): /note="This region represents a CpG dinucleotide"
  misc_feature (61)..(61): /note="Nucleotide may be methylated to form 5-methylcytosine"
attttatcttcagatccttagctccttaagggcagagactgtcttgaaactgggcactaccgttagcatggcaaatttcttctgggcatctcctcagacacaccctccaacacccacaccct

SEQ ID NO: 13610 - DNA, 122 bp, Homo sapiens
  misc_feature (61)..(62): /note="This region represents a CpG dinucleotide"
  misc_feature (61)..(61): /note="Nucleotide may be methylated to form 5-methylcytosine"
tcacaggacctgaccggctaatctgtgaaggatgactcattcatcaatgctgaagatgaccgcagcactgagctgcagctctgtcttccaccaggcttcctttgcacaacgtcacccaattt

SEQ ID NO: 13611 - DNA, 122 bp, Homo sapiens
  misc_feature (61)..(62): /note="This region represents a CpG dinucleotide"
  misc_feature (61)..(61): /note="Nucleotide may be methylated to form 5-methylcytosine"
agttgaatcactgtatcactgtgaatacctttatggggcaagtcaaccattttcaggaaacgaaggctacaatgacagcattttacttaggaaggctaaacgagtcacatgaagagaataaa

SEQ ID NO: 13612 - DNA, 122 bp, Homo sapiens
  misc_feature (61)..(62): /note="This region represents a CpG dinucleotide"
  misc_feature (61)..(61): /note="Nucleotide may be methylated to form 5-methylcytosine"
aatggtcacgttagattggcctcagacaaccacaaaagttaacaagcagtcccaaagtaccgtgaggtttaaccactggaaatgtaaactgccggtcctgtctttgcccttctacttcctcg

SEQ ID NO: 13613 - DNA, 122 bp, Homo sapiens
  misc_feature (61)..(62): /note="This region represents a CpG dinucleotide"
  misc_feature (61)..(61): /note="Nucleotide may be methylated to form 5-methylcytosine"
ggtgcttttaaatacaggtactattcttaccttcattttatgggtgatgaaactgaagcacggagaggttaggcaacttctccatggccacacagcttgtgagtggtagcattcaaacccat

SEQ ID NO: 13614 - DNA, 122 bp, Homo sapiens
  misc_feature (61)..(62): /note="This region represents a CpG dinucleotide"
  misc_feature (61)..(61): /note="Nucleotide may be methylated to form 5-methylcytosine"
aagctctaaggagacacaggtactgacctcctgggactcacagtctggctggaaactaagcgtaaacagataagcaagatacgatggggcaaggaaatgctggaatcataatggttacctgt

SEQ ID NO: 13615 - DNA, 122 bp, Homo sapiens
  misc_feature (61)..(62): /note="This region represents a CpG dinucleotide"
  misc_feature (61)..(61): /note="Nucleotide may be methylated to form 5-methylcytosine"
aaaggcaagaccaagattcccctaggggaattccaatgctgaaaaccccggagcatccagcgggcagccaataccaaatgctgaaaagctggagtagctgagtatcaaccagtggggttccc

SEQ ID NO: 13616 - DNA, 122 bp, Homo sapiens
  misc_feature (61)..(62): /note="This region represents a CpG dinucleotide"
  misc_feature (61)..(61): /note="Nucleotide may be methylated to form 5-methylcytosine"
aacacagtgtcagatgcatagttggcatgcaataaatatttgctgaaagaatgactgaagcgggtccattgaatttagcaataagcagttactgttactgttgaccttggtgagacagtttc

SEQ ID NO: 13617 - DNA, 122 bp, Homo sapiens
  misc_feature (61)..(62): /note="This region represents a CpG dinucleotide"
  misc_feature (61)..(61): /note="Nucleotide may be methylated to form 5-methylcytosine"
ccagagaagcacacaatgtctttggcatgcatcctcatcaaggtattagtaaatacaaaacgatgttaggtgtagataaagtaggaatttgcatacttggagtgatttaagggcatcatcac

SEQ ID NO: 13618 - DNA, 122 bp, Homo sapiens
  misc_feature (61)..(62): /note="This region represents a CpG dinucleotide"
  misc_feature (61)..(61): /note="Nucleotide may be methylated to form 5-methylcytosine"
agtaataccgtagtgtgatagatgagggaacaatagcatgagtttggccaaatcgctattcgtaatgtttgtttaacagatgaagaagtcaggtgacattttccattggtgtgttgtgcaat

SEQ ID NO: 13619 - DNA, 122 bp, Homo sapiens
  misc_feature (61)..(62): /note="This region represents a CpG dinucleotide"
  misc_feature (61)..(61): /note="Nucleotide may be methylated to form 5-methylcytosine"
ttctgaatagtataaaaatctaattccctgtgcttatcggcttcaactgtgcttacacaacgtttgtttctaattcgtactcttgcctcttggtttctgtagtttttcaacccatttctgtc

SEQ ID NO: 13620 - DNA, 122 bp, Homo sapiens
  misc_feature (61)..(62): /note="This region represents a CpG dinucleotide"
  misc_feature (61)..(61): /note="Nucleotide may be methylated to form 5-methylcytosine"
actcttttcacttctatatcacatttattcttcctttaatatgtgaccttatactggcctcgcccttcacaattcctctgtcgcttacgtattttactttctgtgggcagaacattgtttcc

SEQ ID NO: 13621 - DNA, 122 bp, Homo sapiens
  misc_feature (61)..(62): /note="This region represents a CpG dinucleotide"
  misc_feature (61)..(61): /note="Nucleotide may be methylated to form 5-methylcytosine"
aggaaactaagacacactttctatttggaaagcacattccaaaaacactagctttgttttcgcaatcagaaagccaattcctgtcactagaaaaaacaaaagttgatgcagtttcaatttcg

SEQ ID NO: 13622 - DNA, 122 bp, Homo sapiens
  misc_feature (61)..(62): /note="This region represents a CpG dinucleotide"
  misc_feature (61)..(61): /note="Nucleotide may be methylated to form 5-methylcytosine"
tgagaggaggaagctgcccaggttagcgatggctgctttgcttttgcagaggtgtggctccgcttcatcaaggtttgctggccgaggcttccctatgtacacagtaaaactgtggccttttc

SEQ ID NO: 13623 - DNA, 122 bp, Homo sapiens
  misc_feature (61)..(62): /note="This region represents a CpG dinucleotide"
  misc_feature (61)..(61): /note="Nucleotide may be methylated to form 5-methylcytosine"
catttagcccatctggttaagttaaccatggaataaacaaacaaacaaaatctctgtccacgccacagactgcagcttgtctgtgggcagctctgtcactaaggattgccagtggttagaag

SEQ ID NO: 13624 - DNA, 122 bp, Homo sapiens
  misc_feature (61)..(62): /note="This region represents a CpG dinucleotide"
  misc_feature (61)..(61): /note="Nucleotide may be methylated to form 5-methylcytosine"
ctgagctgactaatacactcagtttcctcatttgaaaagcagggataaaactagtacttgcggcatgacgttattgtgagaatccaatgaggaaacacacgtaatgccttcctgcttcattt

SEQ ID NO: 13625 - DNA, 122 bp, Homo sapiens
  misc_feature (61)..(62): /note="This region represents a CpG dinucleotide"
  misc_feature (61)..(61): /note="Nucleotide may be methylated to form 5-methylcytosine"
gctcatgtgctggtgactcacctgagctgggctgagggcagggaagaggctcgggagacacgctgctgctccttgaccatcctgccacatgctgcccagcccgagtgatggaaactaaggca

SEQ ID NO: 13626 - DNA, 122 bp, Homo sapiens
  misc_feature (61)..(62): /note="This region represents a CpG dinucleotide"
  misc_feature (61)..(61): /note="Nucleotide may be methylated to form 5-methylcytosine"
tgcagtagcctctgccttggagcagaaataggaaatgcccctccagccaatagtccagctcggtcactgtttttgtgccatgggagcctctgagtctaggaatgcctatcactctcttctca

SEQ ID NO: 13627 - DNA, 122 bp, Homo sapiens
  misc_feature (61)..(62): /note="This region represents a CpG dinucleotide"
  misc_feature (61)..(61): /note="Nucleotide may be methylated to form 5-methylcytosine"
attcttgcttcctgtttctggcccattttcccttagaggttattgggctttgccagagctcgcagcacactgtggctcaatttactgtggtatacatagtatgtacatagtccaagacagca

SEQ ID NO: 13628 - DNA, 122 bp, Homo sapiens
  misc_feature (61)..(62): /note="This region represents a CpG dinucleotide"
  misc_feature (61)..(61): /note="Nucleotide may be methylated to form 5-methylcytosine"
gttttctcttagcctcagttagctatgacacacagccatgccttactgctctgagtgatgcgtgtgttatccacagcctcacgtggccagctagactgactcaggcctcggcaggtgcttgg

SEQ ID NO: 13629 - DNA, 122 bp, Homo sapiens
  misc_feature (61)..(62): /note="This region represents a CpG dinucleotide"
  misc_feature (61)..(61): /note="Nucleotide may be methylated to form 5-methylcytosine"
tgctacattttgatttttagatgctcaagtagaatctgtaggccaaaaacactgtcttgccgaaatgcagttataatttcctaacagagttatttctgttgttgatacttgtctacagatta

SEQ ID NO: 13630 - DNA, 122 bp, Homo sapiens
  misc_feature (61)..(62): /note="This region represents a CpG dinucleotide"
  misc_feature (61)..(61): /note="Nucleotide may be methylated to form 5-methylcytosine"
ttcctcagtgtctaatagtgttagaatagctctgtaatgtgaactgttactttttcctcccgctgggcttgttctaagacaggaagcttatttgaaaggtagaaggaaatgaagttctgggg

SEQ ID NO: 13631 - DNA, 122 bp, Homo sapiens
  misc_feature (61)..(62): /note="This region represents a CpG dinucleotide"
  misc_feature (61)..(61): /note="Nucleotide may be methylated to form 5-methylcytosine"
tgtccatttccttgagtttctctgttatcttcattacttccttccttgtacttgcttcagcgcattagtcagggcccagtcaggaaacaaaaaccacaccggcaatttgaatagcaacttgt

SEQ ID NO: 13632 - DNA, 122 bp, Homo sapiens
  misc_feature (61)..(62): /note="This region represents a CpG dinucleotide"
  misc_feature (61)..(61): /note="Nucleotide may be methylated to form 5-methylcytosine"
aggttctcgtttcatcatttctccggtggcccagcaggcccaacagggacatgtccgtcacggtggtgtgttacatcatgtcagatggcaattgaatgcgctgttaacataagctgacagga

SEQ ID NO: 13633 - DNA, 122 bp, Homo sapiens
  misc_feature (61)..(62): /note="This region represents a CpG dinucleotide"
  misc_feature (61)..(61): /note="Nucleotide may be methylated to form 5-methylcytosine"
ccggagtgatggatgcggcaggagtgttcaagcagtgcctctcccatctgcagcttcgtccggtttccagtcaagcactactgcacgcccagcaccccagctcctccaccattcctctgcct

SEQ ID NO: 13634 - DNA, 122 bp, Homo sapiens
  misc_feature (61)..(62): /note="This region represents a CpG dinucleotide"
  misc_feature (61)..(61): /note="Nucleotide may be methylated to form 5-methylcytosine"
tcaaaaatgatgcttagcacacagtgatgcaacggaaatgcccttatcctaagctgtgcacgctctaatcctagcaaggaggaaacaatagacaaggggtatatggttttctttataatgta

SEQ ID NO: 13635 - DNA, 122 bp, Homo sapiens
  misc_feature (61)..(62): /note="This region represents a CpG dinucleotide"
  misc_feature (61)..(61): /note="Nucleotide may be methylated to form 5-methylcytosine"
aggggcccagtcgtgcttggtgcagtccagtagggttcccacgtacgttttgttcctccacgtgacattgaccactaggacacctgcaggaggcaggggatgaaaaaggatcatagttacca

SEQ ID NO: 13636 - DNA, 122 bp, Homo sapiens
  misc_feature (61)..(62): /note="This region represents a CpG dinucleotide"
  misc_feature (61)..(61): /note="Nucleotide may be methylated to form 5-methylcytosine"
cttcaagtatacaaataattcctcatttgtaatatatttagggctcttcacagatctaaacgatttctgtgattctatttcaaagaaaagctcaacctacctatgtacattttgtttcaatt

SEQ ID NO: 13637 - DNA, 122 bp, Homo sapiens
  misc_feature (61)..(62): /note="This region represents a CpG dinucleotide"
  misc_feature (61)..(61): /note="Nucleotide may be methylated to form 5-methylcytosine"
gcagtcaaacatgtaagtctggacttcagaggagtgttctgggctaaaatgataaatttacgaggcatctgacatagttgatatttaagacataagataagaagaaaccacctatgaggaat

SEQ ID NO: 13638 - DNA, 122 bp, Homo sapiens
  misc_feature (61)..(62): /note="This region represents a CpG dinucleotide"
  misc_feature (61)..(61): /note="Nucleotide may be methylated to form 5-methylcytosine"
ggcaactgactgactccacccagcctcatgactcctgaccctgctcagaggctgactcagcgcagaaggactgctttccacaccctatgatttgatccccaaccaatcagcagcacctctgc

SEQ ID NO: 13639 - DNA, 122 bp, Homo sapiens
  misc_feature (61)..(62): /note="This region represents a CpG dinucleotide"
  misc_feature (61)..(61): /note="Nucleotide may be methylated to form 5-methylcytosine"
atactctttacataaattaagataattttctctttcctgaaaacataacagcatgccacgcgttctggatgaaaatgaggaactgtttacaccatgggcccaattaaactctgcgagaattc

SEQ ID NO: 13640 - DNA, 122 bp, Homo sapiens
  misc_feature (61)..(62): /note="This region represents a CpG dinucleotide"
  misc_feature (61)..(61): /note="Nucleotide may be methylated to form 5-methylcytosine"
cttcatcagcttcatggtaaatctgcctctgacaggcaattgtgcaattcacaatccaggcgtatttgttgagcactttcagagacattaagtctgggtccttatccaatggactttcttga

SEQ ID NO: 13641 - DNA, 122 bp, Homo sapiens
  misc_feature (61)..(62): /note="This region represents a CpG dinucleotide"
  misc_feature (61)..(61): /note="Nucleotide may be methylated to form 5-methylcytosine"
gagcttgtggtttacactctatctctgtgagcacccaaggccaaagcaggctgcccaagacggagaagagaagaacaccccatggcccagcagttcaagccacccagggcagccacctccat

SEQ ID NO: 13642 - DNA, 122 bp, Homo sapiens
  misc_feature (61)..(62): /note="This region represents a CpG dinucleotide"
  misc_feature (61)..(61): /note="Nucleotide may be methylated to form 5-methylcytosine"
tgagtgaaagttcccagctcgtggaggagagaagagcagttctgtgggtttggccttagacgacaaaggctagggttcactgccccgtgcagacacagtccacaggcactgtcactctgaca

SEQ ID NO: 13643 - DNA, 122 bp, Homo sapiens
  misc_feature (61)..(62): /note="This region represents a CpG dinucleotide"
  misc_feature (61)..(61): /note="Nucleotide may be methylated to form 5-methylcytosine"
atggacacgcaataatgattcaaatagataaacacagaaacacaaacactaagggaggtacggctggaatttttctgcaacgtgtacaattcaatgtactttcacttttcatttcaaccctc

SEQ ID NO: 13644 - DNA, 122 bp, Homo sapiens
  misc_feature (61)..(62): /note="This region represents a CpG dinucleotide"
  misc_feature (61)..(61): /note="Nucleotide may be methylated to form 5-methylcytosine"
tttgtgcagaggaagtggcaaagggccgaaaactggtgagacagaggctggacaggcctccgggggcagcatggtacagggactgcaatctgagccagggaaaaacagggcgaagtcaaggg

SEQ ID NO: 13645 - DNA, 122 bp, Homo sapiens
  misc_feature (61)..(62): /note="This region represents a CpG dinucleotide"
  misc_feature (61)..(61): /note="Nucleotide may be methylated to form 5-methylcytosine"
tcccagctgatgctgtggcctctgtcaagggacatgcacgatggggagctcactatctttcgcaggagttcttttatcctcaaagattgagtgtttataaatgaactggattttcctgacgt

SEQ ID NO: 13646 - DNA, 122 bp, Homo sapiens
  misc_feature (61)..(62): /note="This region represents a CpG dinucleotide"
  misc_feature (61)..(61): /note="Nucleotide may be methylated to form 5-methylcytosine"
cagggaaaaccatgtgcacagacagaaactggcttccctaaatccagttcctagcagagacgagacaaaaattcacatcaactgactccaaacctgcagataaaattgagaggcaggacaac

SEQ ID NO: 13647 - DNA, 122 bp, Homo sapiens
  misc_feature (61)..(62): /note="This region represents a CpG dinucleotide"
  misc_feature (61)..(61): /note="Nucleotide may be methylated to form 5-methylcytosine"
agtggcaagcagagacagtgttctttggggctctttaaaactgcaatcagccaggtgcggcggctcacgcccgtaatcccagcactttgggaggccgaggtgggtggatcacctgaggtcgg

SEQ ID NO: 13648 - DNA, 122 bp, Homo sapiens
  misc_feature (61)..(62): /note="This region represents a CpG dinucleotide"
  misc_feature (61)..(61): /note="Nucleotide may be methylated to form 5-methylcytosine"
tctctcataaaaacaaaggacaccattgttagtatctgactcacatcagtgctgtgacaacgcaaggtgtctcagcacctggaagaaaccagcagcattagtaagtgttcccattatagaac

SEQ ID NO: 13649 - DNA, 122 bp, Homo sapiens
  misc_feature (61)..(62): /note="This region represents a CpG dinucleotide"
  misc_feature (61)..(61): /note="Nucleotide may be methylated to form 5-methylcytosine"
agggctggatggactcatggagcctcagggcgggttggggaagctggcgaggccgagccccgctttgggcttctgggcgccctgacctcgctcccggaaccctggggactgggaggcgggag

SEQ ID NO: 13650 - DNA, 122 bp, Homo sapiens
  misc_feature (61)..(62): /note="This region represents a CpG dinucleotide"
  misc_feature (61)..(61): /note="Nucleotide may be methylated to form 5-methylcytosine"
aaagggccagagtcatagagattccaccttcatgaatgctgaatttgccaagaatgatatcggacagagaggagaagaggaagaagtaagccagacattcaagttatcagtcagttaataac

SEQ ID NO: 13651 - DNA, 122 bp, Homo sapiens
  misc_feature (61)..(62): /note="This region represents a CpG dinucleotide"
  misc_feature (61)..(61): /note="Nucleotide may be methylated to form 5-methylcytosine"
aatgggtagttattgcatttgccaaaaccacagttactgtaaacactgtcagaggtggtgcgcagagcaagagttctgaatgagtaggggacattcactacatctaatagagaaaaatgaag

SEQ ID NO: 13652 - DNA, 122 bp, Homo sapiens
  misc_feature (61)..(62): /note="This region represents a CpG dinucleotide"
  misc_feature (61)..(61): /note="Nucleotide may be methylated to form 5-methylcytosine"
cctgtgctgctgtttgtgaggcacattggtatgaaaatcttccatttcccccactggcctcgtctgttggaatgtatgacatggggctgtgcagttgacaaatttttgagatgtctgcacac

SEQ ID NO: 13653 - DNA, 122 bp, Homo sapiens
  misc_feature (61)..(62): /note="This region represents a CpG dinucleotide"
  misc_feature (61)..(61): /note="Nucleotide may be methylated to form 5-methylcytosine"
tcctcctcctccctcctccctcctccctcctcccccttcctcctcctccccctcctcccccgactggccccgcccccactgccggccccgcccccactgccggcccgggccccacccacgcc

SEQ ID NO: 13654 - DNA, 122 bp, Homo sapiens
  misc_feature (61)..(62): /note="This region represents a CpG dinucleotide"
  misc_feature (61)..(61): /note="Nucleotide may be methylated to form 5-methylcytosine"
ctccaagatacacctgtttattaaaccttccgccaagatacacccatttatgaaacccttcgccatgatgcacctgtttattaaacccttcccctagatacacccgtttattaaacccttcg

SEQ ID NO: 13655 - DNA, 122 bp, Homo sapiens
  misc_feature (61)..(62): /note="This region represents a CpG dinucleotide"
  misc_feature (61)..(61): /note="Nucleotide may be methylated to form 5-methylcytosine"
ccttctgcattcgcctggattaagttctgggagtagaggtgctattctacctcggtgatgcgaagaaaagccgcagcactgagcctgattgatgtgctttgcttaaagtttgcaaaattcca

SEQ ID NO: 13656 - DNA, 122 bp, Homo sapiens
  misc_feature (61)..(62): /note="This region represents a CpG dinucleotide"
  misc_feature (61)..(61): /note="Nucleotide may be methylated to form 5-methylcytosine"
ggagagcaacagctcacgactaggattccagctatgctacttatgactatcagggcccagcgtaggccagagcccagggatgtctaccatctctgcagggggtcatcagtaaggctcttgac

SEQ ID NO: 13657 - DNA, 122 bp, Homo sapiens
  misc_feature (61)..(62): /note="This region represents a CpG dinucleotide"
  misc_feature (61)..(61): /note="Nucleotide may be methylated to form 5-methylcytosine"
gatgggttgcatggagaccaacgcttacaaggcgagggaacagcagggctgaggaagggacggggaagccgtaaaaatgcagcttcccacttgctgcaataggatccctatcactactcaga

SEQ ID NO: 13658 - DNA, 122 bp, Homo sapiens
  misc_feature (61)..(62): /note="This region represents a CpG dinucleotide"
  misc_feature (61)..(61): /note="Nucleotide may be methylated to form 5-methylcytosine"
accttgtgcaagttacttcacccctgggtgagtcagtgtcttcattataggagagaaaaacggaaaaggtcccacctcatagggttatgaggcttaaatgagcttagcatttgcctggcgtg

SEQ ID NO: 13659 - DNA, 122 bp, Homo sapiens
  misc_feature (61)..(62): /note="This region represents a CpG dinucleotide"
  misc_feature (61)..(61): /note="Nucleotide may be methylated to form 5-methylcytosine"
gacagccataaacaacagaaaaactgaagccactcaccagccatggcttctcctgctccccggacaggaaaaagctgtgaaagcaaaaacaatttcaacaggcttgctctcctctcagtgga

SEQ ID NO: 13660 - DNA, 122 bp, Homo sapiens
  misc_feature (61)..(62): /note="This region represents a CpG dinucleotide"
  misc_feature (61)..(61): /note="Nucleotide may be methylated to form 5-methylcytosine"
ttgagcaggcttagaactggctggtttgaagaatttcagtggggccggtggggagggtggcgactcagagggttgtccttagtcatctggtacttggccctggggcaatgaggacaggtgca

SEQ ID NO: 13661 - DNA, 122 bp, Homo sapiens
  misc_feature (61)..(62): /note="This region represents a CpG dinucleotide"
  misc_feature (61)..(61): /note="Nucleotide may be methylated to form 5-methylcytosine"
taaaaatttatttcataatttatctctgttgatgtatgtgttattaacaactgaaaggaacgttcgtgtatgtgctctagacttagtgattgcatataatctgttatggttcttatgattat

SEQ ID NO: 13662 - DNA, 122 bp, Homo sapiens
  misc_feature (61)..(62): /note="This region represents a CpG dinucleotide"
  misc_feature (61)..(61): /note="Nucleotide may be methylated to form 5-methylcytosine"
ctcgttgattgtagccgtcctgtcgtgtgtgcagtgttatttcattgtggttttgacttgcgtttccctgatgtctcatgatgtttattgcttatggacttttggcttaggggtctctttct

SEQ ID NO: 13663 - DNA, 122 bp, Homo sapiens
  misc_feature (61)..(62): /note="This region represents a CpG dinucleotide"
  misc_feature (61)..(61): /note="Nucleotide may be methylated to form 5-methylcytosine"
aatctattcaaacagctgcctctgttaccttgacttgtctcagatatcgtcgacccgagacgagtcctggcactaggaatgtaaggctgtctctgttattttgacttgctccagcaagggag

SEQ ID NO: 13664 - DNA, 122 bp, Homo sapiens
  misc_feature (61)..(62): /note="This region represents a CpG dinucleotide"
  misc_feature (61)..(61): /note="Nucleotide may be methylated to form 5-methylcytosine"
agaggttacttcctcttttctatgagtgctgagtctcaagcttgcaaacaccccaagtgacgccatctgtctgtagcaggaccctttgctccgggccctctccaggagggcctatgcccaga

SEQ ID NO: 13665 - DNA, 122 bp, Homo sapiens
  misc_feature (61)..(62): /note="This region represents a CpG dinucleotide"
  misc_feature (61)..(61): /note="Nucleotide may be methylated to form 5-methylcytosine"
ctccccggccagggtctcctcccatctgtctttatatgcccttggttcttaacacagtcccgagccaaggacaggtgcttaacaaacatctactgagtcatgaatgaccctctgtgattctg

SEQ ID NO: 13666 - DNA, 122 bp, Homo sapiens
  misc_feature (61)..(62): /note="This region represents a CpG dinucleotide"
  misc_feature (61)..(61): /note="Nucleotide may be methylated to form 5-methylcytosine"
tgtaaatgttgttcttggggttgctattagtactatcatcatctccatcatcagagacagcgttgtttgctctaggttgtgatcctccacacaatagcctcaatccgcttgtcaggactatg

SEQ ID NO: 13667 - DNA, 122 bp, Homo sapiens
  misc_feature (61)..(62): /note="This region represents a CpG dinucleotide"
  misc_feature (61)..(61): /note="Nucleotide may be methylated to form 5-methylcytosine"
ggaaagaatgttctttactcccatgcagattcagcatcccttttctataacagagcaaaccgagctttactgggttagctccacatttgactgcagacactgtcccttaagctagattttta

SEQ ID NO: 13668 - DNA, 122 bp, Homo sapiens
  misc_feature (61)..(62): /note="This region represents a CpG dinucleotide"
  misc_feature (61)..(61): /note="Nucleotide may be methylated to form 5-methylcytosine"
ccgggatgaagcctgaagaaccccaatctcaagaactgacgaggtagactttcaaggttacgttccatcaatcactggaaaacttctcctggagcctctgctcctcagctgttttcatgtga

SEQ ID NO: 13669 - DNA, 122 bp, Homo sapiens
  misc_feature (61)..(62): /note="This region represents a CpG dinucleotide"
  misc_feature (61)..(61): /note="Nucleotide may be methylated to form 5-methylcytosine"
cctgcatcggcttccggagtgtggaaccaccattcaaagctgttaaagacatggaagtgccgtggatgacgccatagctcagctctgccagcaacttaaccaaggttccagttccggaatat

SEQ ID NO: 13670 - DNA, 122 bp, Homo sapiens
  misc_feature (61)..(62): /note="This region represents a CpG dinucleotide"
  misc_feature (61)..(61): /note="Nucleotide may be methylated to form 5-methylcytosine"
agtatcaatgcaactaaataatgaagacatttttctgttggttatgctaacaccatgctgcgttctcccaagttgtgtgttttaagtgtatttttaactcccagatctggcattggccaaaa

SEQ ID NO: 13671 - DNA, 122 bp, Homo sapiens
  misc_feature (61)..(62): /note="This region represents a CpG dinucleotide"
  misc_feature (61)..(61): /note="Nucleotide may be methylated to form 5-methylcytosine"
agtggtattagatggaatgttgatctctttctaatttcaagatgccatgctgtcaaaggacgtcaaagaaaccagctgtggtttctggtaatctcccgaatgttctgcctcactgctttctg

SEQ ID NO: 13672 - DNA, 122 bp, Homo sapiens
  misc_feature (61)..(62): /note="This region represents a CpG dinucleotide"
  misc_feature (61)..(61): /note="Nucleotide may be methylated to form 5-methylcytosine"
agcacttaagaacaactgacaccaaagggtttggtttcatgtacttgaacttgggtgacacgaatatttcagtggtgaatcagtcctagaaaggggaggtgggtaaggtagggagtgtttat

SEQ ID NO: 13673 - DNA, 122 bp, Homo sapiens
  misc_feature (61)..(62): /note="This region represents a CpG dinucleotide"
  misc_feature (61)..(61): /note="Nucleotide may be methylated to form 5-methylcytosine"
aaactgagccagctacagggtggagatgaagagactcacccacatcacatcctaagtgagcgtgagagccagaattagaacccaggtctcctgacttgctctacagtcctgtctacttcctc

SEQ ID NO: 13674 - DNA, 122 bp, Homo sapiens
  misc_feature (61)..(62): /note="This region represents a CpG dinucleotide"
  misc_feature (61)..(61): /note="Nucleotide may be methylated to form 5-methylcytosine"
aacgctttcttagcactgctccccgcaggcagccccaccgtcagcagagctgggtcctggcggttaccttggctaggcttagccatatccgtgtcctggcatccccaggggtgtttgtggtg

SEQ ID NO: 13675 - DNA, 122 bp, Homo sapiens
  misc_feature (61)..(62): /note="This region represents a CpG dinucleotide"
  misc_feature (61)..(61): /note="Nucleotide may be methylated to form 5-methylcytosine"
tgtggtgggaggcaggtgaatcaccatgctgatgatcacacagcaagtctgtgtctgtcacgtctgtgtctgtcatgtctcctgccatggggggcatccgcatgctcctccgcccctcacgc

SEQ ID NO: 13676 - DNA, 122 bp, Homo sapiens
  misc_feature (61)..(62): /note="This region represents a CpG dinucleotide"
  misc_feature (61)..(61): /note="Nucleotide may be methylated to form 5-methylcytosine"
cgccaggcatgctgggagaagtagtttcttcaccgctttcggccgttgttcgcagggctgcgagactacaatcccagcatgcaaggggaatgggttggtgatgatacctggagagggcggtg

SEQ ID NO: 13677 - DNA, 122 bp, Homo sapiens
  misc_feature (61)..(62): /note="This region represents a CpG dinucleotide"
  misc_feature (61)..(61): /note="Nucleotide may be methylated to form 5-methylcytosine"
tgagcgagtgaatgaatgaataagctgcctaaagcagatgcgtttatgcgtgcattctctcgagtgaaggaagaaggaagaggtagggacggaggaggagagagagcacgcgcgggaaagat

SEQ ID NO: 13678 - DNA, 122 bp, Homo sapiens
  misc_feature (61)..(62): /note="This region represents a CpG dinucleotide"
  misc_feature (61)..(61): /note="Nucleotide may be methylated to form 5-methylcytosine"
gctacttttatctgtggggtattgttccaaaaccaaggccatatatttttatgtgttttacgtaagtgcatgtgtaatttattgatagcaaggtttgcatgcatttgttctgtgaatcagct

SEQ ID NO: 13679 - DNA, 122 bp, Homo sapiens
  misc_feature (61)..(62): /note="This region represents a CpG dinucleotide"
  misc_feature (61)..(61): /note="Nucleotide may be methylated to form 5-methylcytosine"
cgatctttcccctggcctccagtttgcctggcaaagtcacaggaagtatctccatggcaccgcatcagccctcacagagcaggaaaccttgatttctacagaggctgtttcctcccagcctt

SEQ ID NO: 13680 - DNA, 122 bp, Homo sapiens
  misc_feature (61)..(62): /note="This region represents a CpG dinucleotide"
  misc_feature (61)..(61): /note="Nucleotide may be methylated to form 5-methylcytosine"
aggttctcttaactgctgtatatttgtcatcatcactaacatttaatgaacacttaaccacgtgtcatggcattttacatagtgctttagacatattctgtgatttaattctctcaactacc

SEQ ID NO: 13681 - DNA, 122 bp, Homo sapiens
  misc_feature (61)..(62): /note="This region represents a CpG dinucleotide"
  misc_feature (61)..(61): /note="Nucleotide may be methylated to form 5-methylcytosine"
aagaaaactaatgttgttattcccagagttcacagccattctaaaacatttgttactctccgcagtccaaagatgaggaaacttcttacttctctggaccaaaatatcctcatcttggactg

SEQ ID NO: 13682 - DNA, 122 bp, Homo sapiens
  misc_feature (61)..(62): /note="This region represents a CpG dinucleotide"
  misc_feature (61)..(61): /note="Nucleotide may be methylated to form 5-methylcytosine"
tcatgtataaaatgaaaggctttagttatttctagaggagtcccatccaacactatttggcgactgttaatatgttataattattagacagtggaaaagcctttattgactaattgatttaa

SEQ ID NO: 13683 - DNA, 122 bp, Homo sapiens
  misc_feature (61)..(62): /note="This region represents a CpG dinucleotide"
  misc_feature (61)..(61): /note="Nucleotide may be methylated to form 5-methylcytosine"
ctgctaaatgggcagggtgcggccctggggcagccattttgcctagcccaagggatagcacgtgcaaagtaggagagagatgaagataaaacagtacctaacgtgccaaggttataggcacc

SEQ ID NO: 13684 - DNA, 122 bp, Homo sapiens
  misc_feature (61)..(62): /note="This region represents a CpG dinucleotide"
  misc_feature (61)..(61): /note="Nucleotide may be methylated to form 5-methylcytosine"
gcaggtgaaggctctactatcctcagatgcaagaattcctgcagagtgactgggggcgggcgcaggggcctgcagctctggggtccgtggctcaggaaagactgaaggctgccctgctcagc

SEQ ID NO: 13685 - DNA, 122 bp, Homo sapiens
  misc_feature (61)..(62): /note="This region represents a CpG dinucleotide"
  misc_feature (61)..(61): /note="Nucleotide may be methylated to form 5-methylcytosine"
agtagagactgttttccatcagcatttgtaacatgactcattatttcacaatttctcatccgcccttcctctattcctaccctcaaatgctctgtggtagaaaacttcgaccttgctgagag

SEQ ID NO: 13686 - DNA, 122 bp, Homo sapiens
  misc_feature (61)..(62): /note="This region represents a CpG dinucleotide"
  misc_feature (61)..(61): /note="Nucleotide may be methylated to form 5-methylcytosine"
aaccaaccactttccttacttttcccaaggactaagtaactattagagcagacattaaaccgtaaccaccaccagctatacccgatgactcaactcaggttataattaggggaaggaaacgc

SEQ ID NO: 13687 - DNA, 122 bp, Homo sapiens
  misc_feature (61)..(62): /note="This region represents a CpG dinucleotide"
  misc_feature (61)..(61): /note="Nucleotide may be methylated to form 5-methylcytosine"
ctccagctgtgcgacagccaaggctacactgtttggctcacatacttccttattttgttccgcatgagaaaaagggcagaaggagccatgtggggtcactcaggagactgagggtgcaccag

SEQ ID NO: 13688 - DNA, 122 bp, Homo sapiens
  misc_feature (61)..(62): /note="This region represents a CpG dinucleotide"
  misc_feature (61)..(61): /note="Nucleotide may be methylated to form 5-methylcytosine"
atttctaacctccatgtccctctttcacttcttctgtggtgtctcacatgtgtttgtgtacgtgtgtgtatgcatgcacacatccaagtgtatatatgtatcgcaccttgggcaaaatttaa

SEQ ID NO: 13689 - DNA, 122 bp, Homo sapiens
  misc_feature (61)..(62): /note="This region represents a CpG dinucleotide"
  misc_feature (61)..(61): /note="Nucleotide may be methylated to form 5-methylcytosine"
caactcccattttaaattgcctgccatgctgagtagagtgaatcatccctctgtccagcacgtccatgctgcatattcttcccgctcattagtcacttggtagctgtcttggctgtcagatc

SEQ ID NO: 13690 - DNA, 122 bp, Homo sapiens
  misc_feature (61)..(62): /note="This region represents a CpG dinucleotide"
  misc_feature (61)..(61): /note="Nucleotide may be methylated to form 5-methylcytosine"
tgccttaccacttcccattagccaaattccccaacacatatttctgctgggaaagctgaacgcaaactattttgctcatgtacagtgcagccagcttccctgtggctctcagaggagacaca

SEQ ID NO: 13691 - DNA, 122 bp, Homo sapiens
  misc_feature (61)..(62): /note="This region represents a CpG dinucleotide"
  misc_feature (61)..(61): /note="Nucleotide may be methylated to form 5-methylcytosine"
ttgtgggttctggcaagtccaaaatctttagagcaagttggaaattctggtaagagctgacgttgcagtattgcatctgaaggttgaaaactcaggcagaatgtctatgttgctgtctggtg

SEQ ID NO: 13692 - DNA, 122 bp, Homo sapiens
  misc_feature (61)..(62): /note="This region represents a CpG dinucleotide"
  misc_feature (61)..(61): /note="Nucleotide may be methylated to form 5-methylcytosine"
tcatcaaacatctattaatatctcaagaatgtgcccatcaggacaccatccatgctgctgcgcttttccaggccacacagaggggacaccctccaggtgcaccctgcatgaatatcaggctc

SEQ ID NO: 13693 - DNA, 122 bp, Homo sapiens
  misc_feature (61)..(62): /note="This region represents a CpG dinucleotide"
  misc_feature (61)..(61): /note="Nucleotide may be methylated to form 5-methylcytosine"
ctatatctttctcttgttctctctctgtttctctggagaaccctgactaataatatactacgtaagggagattagaaagtatttaaggagctccaccaaaaggaagctgctccctgataaga

SEQ ID NO: 13694 - DNA, 122 bp, Homo sapiens
  misc_feature (61)..(62): /note="This region represents a CpG dinucleotide"
  misc_feature (61)..(61): /note="Nucleotide may be methylated to form 5-methylcytosine"
agcactcggatcattcatttgttgggattaaatgagaaaatgcaaggcaagcacttagcacggagcctgagctgtgatcagtgcccagctaaggttagcattcctgctcctcttgctagcag

SEQ ID NO: 13695 - DNA, 122 bp, Homo sapiens
  misc_feature (61)..(62): /note="This region represents a CpG dinucleotide"
  misc_feature (61)..(61): /note="Nucleotide may be methylated to form 5-methylcytosine"
aagagaagcttgtgtatctttttttttccttttttccctcttctctcctcccctttttaacgaacacctgaaaggattctcatcaaagaagtctgagtaacactgttttgtaaggaagcatt

SEQ ID NO: 13696 - DNA, 122 bp, Homo sapiens
  misc_feature (61)..(62): /note="This region represents a CpG dinucleotide"
  misc_feature (61)..(61): /note="Nucleotide may be methylated to form 5-methylcytosine"
tggcagctgacaacgcagacacgctctacggaggcctgctgataaagggctcagccttgccgtgtgctgcttctcatcactgcacacaagtgccatgctttgccaccaccaccaagcacatc

SEQ ID NO: 13697 - DNA, 122 bp, Homo sapiens
  misc_feature (61)..(62): /note="This region represents a CpG dinucleotide"
  misc_feature (61)..(61): /note="Nucleotide may be methylated to form 5-methylcytosine"
ggctcaggtgcatccgcccaatctgggatcattagtcagatctggtgacaatggtgaaggcgggaagcctccccaaggacaaatactatggttattttaagcctctctgtgtcatcactgtg

SEQ ID NO: 13698 - DNA, 122 bp, Homo sapiens
  misc_feature (61)..(62): /note="This region represents a CpG dinucleotide"
  misc_feature (61)..(61): /note="Nucleotide may be methylated to form 5-methylcytosine"
ggactggaaaaggttaaccggcttcagctctacactgctgacttagactgacagcaattgcgttccttctcttgctctctggttctctcaaacagtgttactgtagctaatctctccccacc

SEQ ID NO: 13699 - DNA, 122 bp, Homo sapiens
  misc_feature (61)..(62): /note="This region represents a CpG dinucleotide"
  misc_feature (61)..(61): /note="Nucleotide may be methylated to form 5-methylcytosine"
gtgattcagaaagggcgaacttgagtaacttgggcaaatgcccagagaaattgaatattacgtaaatgtgaccatctgcaattgaggtttgagcagtgcctgatgctacacacccttgggac

SEQ ID NO: 13700 - DNA, 122 bp, Homo sapiens
  misc_feature (61)..(62): /note="This region represents a CpG dinucleotide"
  misc_feature (61)..(61): /note="Nucleotide may be methylated to form 5-methylcytosine"
attaattcagtgacatcaatattgacctcatacagacaaaagatgaaagctgggttttctcgtgtaccaagtacaaaacatgtgctaaaaagttaacatacacagttgtaagagatcaacgt

SEQ ID NO: 13701 - DNA, 122 bp, Homo sapiens
  misc_feature (61)..(62): /note="This region represents a CpG dinucleotide"
  misc_feature (61)..(61): /note="Nucleotide may be methylated to form 5-methylcytosine"
tccccagatggggtgagggtgggctggtgcagtggcccagccttggggcgtcaggtaggccgccaacccttgagttgagtcacatagggaaggcaccgggaaggaggcattgcaacagagga

SEQ ID NO: 13702 - DNA, 122 bp, Homo sapiens
  misc_feature (61)..(62): /note="This region represents a CpG dinucleotide"
  misc_feature (61)..(61): /note="Nucleotide may be methylated to form 5-methylcytosine"
gttagccttgctatgtgctcttgggggtggtgcttcacccctctgggacagtgagcttcacgtacctgactctgggccatgcaggggccaggctgggcctcctgacacccactggactccct

SEQ ID NO: 13703 - DNA, 122 bp, Homo sapiens
  misc_feature (61)..(62): /note="This region represents a CpG dinucleotide"
  misc_feature (61)..(61): /note="Nucleotide may be methylated to form 5-methylcytosine"
aatccctcttcttattttttctaccctctttacagtcaaggtggctcacagcagcctcaccgcctgctgcagcaggacaattggcggagtgaggaggccactgcctagtcccgggagagggt

SEQ ID NO: 13704 - DNA, 122 bp, Homo sapiens
  misc_feature (61)..(62): /note="This region represents a CpG dinucleotide"
  misc_feature (61)..(61): /note="Nucleotide may be methylated to form 5-methylcytosine"
attcagctcttttgtcactacttgccagactaatcactcagaattgtaaccctttaaacgcgtcccctcccttctttatgttccaccatttttaaaacagaggaaccaaagcatcagcctgt

SEQ ID NO: 13705 - DNA, 122 bp, Homo sapiens
  misc_feature (61)..(62): /note="This region represents a CpG dinucleotide"
  misc_feature (61)..(61): /note="Nucleotide may be methylated to form 5-methylcytosine"
aggtcaagggaagacctccatattatttttctcttcctcatacatttatttatttagagacggagtctccctctgtcgcctaggttggagtgcagtggcgcgatctcggctcactgcagcct

SEQ ID NO: 13706 - DNA, 122 bp, Homo sapiens
  misc_feature (61)..(62): /note="This region represents a CpG dinucleotide"
  misc_feature (61)..(61): /note="Nucleotide may be methylated to form 5-methylcytosine"
atctgcttgtatgatcacaaaccaccacaaaagaaaagatcgtgaagattacactgtaaacggactctcaaatgatcaggaggtggtcacttcgcaacttgctccctccacccaactcaaaa

SEQ ID NO: 13707 - DNA, 122 bp, Homo sapiens
  misc_feature (61)..(62): /note="This region represents a CpG dinucleotide"
  misc_feature (61)..(61): /note="Nucleotide may be methylated to form 5-methylcytosine"
tcataattcagatgtcacctcctcagagaggtcttccctgactgctctagctaaaattaccgcctctcctccactccccaacagcagatacatatattatttttctccctgtaactctaact

SEQ ID NO: 13708 - DNA, 122 bp, Homo sapiens
  misc_feature (61)..(62): /note="This region represents a CpG dinucleotide"
  misc_feature (61)..(61): /note="Nucleotide may be methylated to form 5-methylcytosine"
ggaacttgaccttcactggctactttacagataacattcataggtcaccacggtaatggtcgcaacagttgtttttcagaaactagggcaagctcctgtccagttcaaaccagttaggacca

SEQ ID NO: 13709 - DNA, 122 bp, Homo sapiens
  misc_feature (61)..(62): /note="This region represents a CpG dinucleotide"
  misc_feature (61)..(61): /note="Nucleotide may be methylated to form 5-methylcytosine"
atgtggatgaacctagaggatgttaagtgaaataagccacacacagatagacaaataccacgtgatctcactcttatgtggaatttttttttaaataagttgcttagccgggcatgatggca

SEQ ID NO: 13710 - DNA, 122 bp, Homo sapiens
  misc_feature (61)..(62): /note="This region represents a CpG dinucleotide"
  misc_feature (61)..(61): /note="Nucleotide may be methylated to form 5-methylcytosine"
ctgtgcatcctctgaggcccatttcaggagcttctcctattcttctttcccagttgcccccgaaacatgactgtcccttcattttccctgttttctccctcctctgtgatcacactgttacc

SEQ ID NO: 13711 - DNA, 122 bp, Homo sapiens
  misc_feature (61)..(62): /note="This region represents a CpG dinucleotide"
  misc_feature (61)..(61): /note="Nucleotide may be methylated to form 5-methylcytosine"
tcccccatctgggcggcgggcggggctcacaggctttagcaattagcgggcgcgggtgggcgcgcggcgcgggcggaggaagggccggagcaggtgagccgcggcggagcctcattagggcg

SEQ ID NO: 13712 - DNA, 122 bp, Homo sapiens
  misc_feature (61)..(62): /note="This region represents a CpG dinucleotide"
  misc_feature (61)..(61): /note="Nucleotide may be methylated to form 5-methylcytosine"
acctaagccaaggtggccctctcagtttcttttgtaatagctgtactgtcaacagaggcacgcagccccaggccactttctaagacccaaaccagccagatatctctttgacaacatctata

SEQ ID NO: 13713 - DNA, 122 bp, Homo sapiens
  misc_feature (61)..(62): /note="This region represents a CpG dinucleotide"
  misc_feature (61)..(61): /note="Nucleotide may be methylated to form 5-methylcytosine"
gggcttgacagcgggccgggcagcccgttggtcttaaggccagagtccccaggttggccacgtttgccacataagagaataagggatgaaaaggaggaactggaggatctgtaggccgagtc

SEQ ID NO: 13714 - DNA, 122 bp, Homo sapiens
  misc_feature (61)..(62): /note="This region represents a CpG dinucleotide"
  misc_feature (61)..(61): /note="Nucleotide may be methylated to form 5-methylcytosine"
gggcctttccctcctcacctgtaaaactgttagtttggcccaatcatgtagaagcttctccgccccacacacatacacactcctgtctttagagtctgtctgggcacagggcagctccctac

SEQ ID NO: 13715 - DNA, 122 bp, Homo sapiens
  misc_feature (61)..(62): /note="This region represents a CpG dinucleotide"
  misc_feature (61)..(61): /note="Nucleotide may be methylated to form 5-methylcytosine"
ccgtacgcccgagaactgaggtagcccgcgcgggaaacgccgcagtgcaagccgggcgaccggcaaatgtcgcgagaatacgtccaggcctaacgggattttcgccttccggcaggagtggg

SEQ ID NO: 13716 - DNA, 122 bp, Homo sapiens
  misc_feature (61)..(62): /note="This region represents a CpG dinucleotide"
  misc_feature (61)..(61): /note="Nucleotide may be methylated to form 5-methylcytosine"
tggatcaaagtaaatgcaaagcaatttagtcttttcttcttcatgcctttaggattattgcgatggatgtcagttattatctcaaatgccatcgagagatgctcagggctgcttgaattggt

SEQ ID NO: 13717 - DNA, 122 bp, Homo sapiens
  misc_feature (61)..(62): /note="This region represents a CpG dinucleotide"
  misc_feature (61)..(61): /note="Nucleotide may be methylated to form 5-methylcytosine"
gcctgcctcactggtttcggagggctggagagcagctcagctcgctagctgcgcgcttcccggcacaggcagtgccactgcgcaggttgatcagcgaaacagcatccattttaatctgcggg

SEQ ID NO: 13718 - DNA, 122 bp, Homo sapiens
  misc_feature (61)..(62): /note="This region represents a CpG dinucleotide"
  misc_feature (61)..(61): /note="Nucleotide may be methylated to form 5-methylcytosine"
ctttcccatttctcaccattgccacttaatggtctgaggggggcttttcctgttactgcacgcaccagagccaacagctgaaaacagtaggcaacagtactctccctactaaagagcgctgc

SEQ ID NO: 13719 - DNA, 122 bp, Homo sapiens
  misc_feature (61)..(62): /note="This region represents a CpG dinucleotide"
  misc_feature (61)..(61): /note="Nucleotide may be methylated to form 5-methylcytosine"
gtttatatagagtacaaatggaagtaaaagagtaattgcaatttgaccccaaaaaagctacgtggcgctcccatctggctgttcctgtactgaagttctcagtaagtttctactttaaaaca

SEQ ID NO: 13720 - DNA, 122 bp, Homo sapiens
  misc_feature (61)..(62): /note="This region represents a CpG dinucleotide"
  misc_feature (61)..(61): /note="Nucleotide may be methylated to form 5-methylcytosine"
agtatcctaaatagatcctggctgtgtgatttcaggcgctcgaggagtgccctcctggaacgtcagtttccttcctcaaagccccgagggcaggttcttaacactggctggaggtcaaatag

SEQ ID NO: 13721 - DNA, 122 bp, Homo sapiens
  misc_feature (61)..(62): /note="This region represents a CpG dinucleotide"
  misc_feature (61)..(61): /note="Nucleotide may be methylated to form 5-methylcytosine"
gaaagaaacatgtcatacaaaacgcccctagagctacgctgtccaatatgaataaaagtacgtaaagtcactcatgataatctttcagatctattggcttaaatgcattatgaaaactaatt

SEQ ID NO: 13722 - DNA, 122 bp, Homo sapiens
  misc_feature (61)..(62): /note="This region represents a CpG dinucleotide"
  misc_feature (61)..(61): /note="Nucleotide may be methylated to form 5-methylcytosine"
tgacagactaagcatcctggaatgtcagtatcatcatgtcattcttctgggctccttaaccgccaatcacaccagactcaggttcccttaattggttccaaccaatctcactttccaattct

SEQ ID NO: 13723 - DNA, 122 bp, Homo sapiens
  misc_feature (61)..(62): /note="This region represents a CpG dinucleotide"
  misc_feature (61)..(61): /note="Nucleotide may be methylated to form 5-methylcytosine"
ctgagagtccaacggtggtggagagtggtgctccccggccgcctctccctcgggcatgaccggtcccagcctgggctgcagctcctgctacctcctgggccggaaccaaaaggcgctccttc

SEQ ID NO: 13724 - DNA, 122 bp, Homo sapiens
  misc_feature (61)..(62): /note="This region represents a CpG dinucleotide"
  misc_feature (61)..(61): /note="Nucleotide may be methylated to form 5-methylcytosine"
acctgttgcatatgggcgctcccgctgatgcaaaacggcgttctgaacagggaaggcatgcgtgctgcgcagcagggctcccgcagcggggtgtgggttcagggtgctggacttcaaaaccg

SEQ ID NO: 13725 - DNA, 122 bp, Homo sapiens
  misc_feature (61)..(62): /note="This region represents a CpG dinucleotide"
  misc_feature (61)..(61): /note="Nucleotide may be methylated to form 5-methylcytosine"
ccagtttaaatcttcctgtaagcatgataaggaagttccctctgatttaatccttacacacgaaaaagtagccttaaataacctgatattaactcatcagttttatttttatttatttattt

SEQ ID NO: 13726 - DNA, 122 bp, Homo sapiens
  misc_feature (61)..(62): /note="This region represents a CpG dinucleotide"
  misc_feature (61)..(61): /note="Nucleotide may be methylated to form 5-methylcytosine"
tttcctgagggaagggctctagggagaacttcgagagctgttgttgaaacagccctgatacggtttcaggaatggaaatcccagaaagacagaaaggtgaaaacttaggtgattcatctcct

SEQ ID NO: 13727 - DNA, 122 bp, Homo sapiens
  misc_feature (61)..(62): /note="This region represents a CpG dinucleotide"
  misc_feature (61)..(61): /note="Nucleotide may be methylated to form 5-methylcytosine"
gagccaacaacagggaaacaacttgttctttcttatttgctgggacattaatagctccaccgagtaatattcatgtcctttaagcagttcggcattctggaaataattggcatgcaaaaatt

SEQ ID NO: 13728 - DNA, 122 bp, Homo sapiens
  misc_feature (61)..(62): /note="This region represents a CpG dinucleotide"
  misc_feature (61)..(61): /note="Nucleotide may be methylated to form 5-methylcytosine"
ctgtgttgtttataccaacatcgttgctgtggaaatagctgtttcaacattaggaactcacgactgactcaagtaaggtgtggagcagaagtcttatttaaacagtggcaggacccataaaa

SEQ ID NO: 13729 - DNA, 122 bp, Homo sapiens
  misc_feature (61)..(62): /note="This region represents a CpG dinucleotide"
  misc_feature (61)..(61): /note="Nucleotide may be methylated to form 5-methylcytosine"
ttccctcccagtgggtggtgaaagttgttctttagctcattatctcccccttcagccttccgataaaggaagatgatgaagttaaaagaagcagggaggctcagcccctctgtagaaaaggt

SEQ ID NO: 13730 - DNA, 122 bp, Homo sapiens
  misc_feature (61)..(62): /note="This region represents a CpG dinucleotide"
  misc_feature (61)..(61): /note="Nucleotide may be methylated to form 5-methylcytosine"
agtcaaggcacagtctctcaggaagtggagaaaagggagattgtaggtgggaagagggtacgcagcaaggtaatggtgctgccttgagaaccaccaggcaattgatatccaaccactttcct

SEQ ID NO: 13731 - DNA, 122 bp, Homo sapiens
  misc_feature (61)..(62): /note="This region represents a CpG dinucleotide"
  misc_feature (61)..(61): /note="Nucleotide may be methylated to form 5-methylcytosine"
ggggtgggggatggggcgagttactctccacaaagggcttctgggaaatcaagcagcactcgctctgctgggtcttcaaggaaagggacagggcccaaagactcacggtgctacgactgtcc

SEQ ID NO: 13732 - DNA, 122 bp, Homo sapiens
  misc_feature (61)..(62): /note="This region represents a CpG dinucleotide"
  misc_feature (61)..(61): /note="Nucleotide may be methylated to form 5-methylcytosine"
acttgctgtatcttaggcaaacaaaatattctatggactatactgtaaacttcatgatctcgtattttaatggttggtagtaggaaacagttttagcaggataattcggtctaaatttaggt

SEQ ID NO: 13733 - DNA, 122 bp, Homo sapiens
  misc_feature (61)..(62): /note="This region represents a CpG dinucleotide"
  misc_feature (61)..(61): /note="Nucleotide may be methylated to form 5-methylcytosine"
ctaaaatgtcttaatatttctctctaaaatcatcaggcagctacaatcaggtggacaagtcgttccttaaaatttaatatcatttaataattaataattgcacaatagcatatatgcgtagt

SEQ ID NO: 13734 - DNA, 122 bp, Homo sapiens
  misc_feature (61)..(62): /note="This region represents a CpG dinucleotide"
  misc_feature (61)..(61): /note="Nucleotide may be methylated to form 5-methylcytosine"
agtgcgggcttgccgtggagtaacacagatcccctctggcaactcgtctgggacgaagggcgtttttgcttagtgttgatcacgcaaatcacatctgaaaagaagctgcttaaaatgggtgt

SEQ ID NO: 13735 - DNA, 122 bp, Homo sapiens
  misc_feature (61)..(62): /note="This region represents a CpG dinucleotide"
  misc_feature (61)..(61): /note="Nucleotide may be methylated to form 5-methylcytosine"
tgttaatgttggtggagttccagccactgcactttttttgaggcagactcactgtggctccggctggagtgcagtggcatggtcatagctcatggcagcccccaactcccgggctcatgtaa

SEQ ID NO: 13736 - DNA, 122 bp, Homo sapiens
  misc_feature (61)..(62): /note="This region represents a CpG dinucleotide"
  misc_feature (61)..(61): /note="Nucleotide may be methylated to form 5-methylcytosine"
acatttcgggaagagacgggaaagggagattcagaggagcagagatcagcaaacattttccgtaaagggccaggtatgaataatttaggctttgtgatccaccagtctctgttggaatgact

SEQ ID NO: 13737 - DNA, 122 bp, Homo sapiens
  misc_feature (61)..(62): /note="This region represents a CpG dinucleotide"
  misc_feature (61)..(61): /note="Nucleotide may be methylated to form 5-methylcytosine"
aagtgggcatctctgtgttccaataaaactttatttacaaaaacagcagctggcccagtgcggcctcagggcttagcttgtgggcctctgctccaacatttggttattgtcagtttggccag

SEQ ID NO: 13738 - DNA, 122 bp, Homo sapiens
  misc_feature (61)..(62): /note="This region represents a CpG dinucleotide"
  misc_feature (61)..(61): /note="Nucleotide may be methylated to form 5-methylcytosine"
gccaatcatatttttctcagaatgaaggtgcaaaaattaaatcatgcatgcaaagcagttcgtaggtgctccatagtatgtggttagccttataatgcttacttaggatccgatgtaggaag

SEQ ID NO: 13739 - DNA, 122 bp, Homo sapiens
  misc_feature (61)..(62): /note="This region represents a CpG dinucleotide"
  misc_feature (61)..(61): /note="Nucleotide may be methylated to form 5-methylcytosine"
gtggagggcaggcatatttctttcatctattcattcagtcagtcgcttattctttcaacacgtatttattgctgactgtgtgcattgcgcagtgctgagtgagcctggaaatacagcatgca

SEQ ID NO: 13740 - DNA, 122 bp, Homo sapiens
  misc_feature (61)..(62): /note="This region represents a CpG dinucleotide"
  misc_feature (61)..(61): /note="Nucleotide may be methylated to form 5-methylcytosine"
tgtcagcttagaatagacattttcagacatttaagctttaaaaaatctgttcccatataccgcaggaagctactgtaggacatgctccaccaaaatgaggatgcaaaccaaaaaagtgcaag

SEQ ID NO: 13741 - DNA, 122 bp, Homo sapiens
  misc_feature (61)..(62): /note="This region represents a CpG dinucleotide"
  misc_feature (61)..(61): /note="Nucleotide may be methylated to form 5-methylcytosine"
gacccactgcccagccacccagcatggagtggggcactctgcacacctcccggcaacctccggatggtgtcaccacatggctggcccactgccaccaggccctgccctttgaggactcagta

SEQ ID NO: 13742 - DNA, 122 bp, Homo sapiens
  misc_feature (61)..(62): /note="This region represents a CpG dinucleotide"
  misc_feature (61)..(61): /note="Nucleotide may be methylated to form 5-methylcytosine"
gctcaatatggaaggcatcttttctctaaagagtgtgagctccctgccaagcagcacaggcgcttaataggctttcagagcagcaattctagaacctcccttgtggctttctgatctcccac

SEQ ID NO: 13743 - DNA, 122 bp, Homo sapiens
  misc_feature (61)..(62): /note="This region represents a CpG dinucleotide"
  misc_feature (61)..(61): /note="Nucleotide may be methylated to form 5-methylcytosine"
tgaaggcaggaggcatggatttcttctgcttcccacttgctagtgaccctgggcaagtcacgtcacagctctggcctcatttcccttatgttgagtggaagtgccctgaaactctgagaatt

SEQ ID NO: 13744 - DNA, 122 bp, Homo sapiens
  misc_feature (61)..(62): /note="This region represents a CpG dinucleotide"
  misc_feature (61)..(61): /note="Nucleotide may be methylated to form 5-methylcytosine"
ttgtaagccagccggactatcaggaagtgtgaatcaacaggataaatttctctctcatagcgcaagtgctggtcatccaaccagctcattgttgtttatgttgactgtttcaaactctttct

SEQ ID NO: 13745 - DNA, 122 bp, Homo sapiens
  misc_feature (61)..(62): /note="This region represents a CpG dinucleotide"
  misc_feature (61)..(61): /note="Nucleotide may be methylated to form 5-methylcytosine"
cattggcttcctttccttgtcctctctcatgatcatccttagtgagctcatgattcctggcgaggagccgttagacctcttgatctcatgagtcaccgacttgacacagttatgtttacctc

SEQ ID NO: 13746 - DNA, 122 bp, Homo sapiens
  misc_feature (61)..(62): /note="This region represents a CpG dinucleotide"
  misc_feature (61)..(61): /note="Nucleotide may be methylated to form 5-methylcytosine"
ctcttgcccagggatctgggcagagcgtgggagggcctgtggggcctggggttctctctgcgcacgaaatccggggcgggcactatgtgattcgagcccgctgcgccctgggctcctcgtgt

SEQ ID NO: 13747 - DNA, 122 bp, Homo sapiens
  misc_feature (61)..(62): /note="This region represents a CpG dinucleotide"
  misc_feature (61)..(61): /note="Nucleotide may be methylated to form 5-methylcytosine"
gattttaggttccacagaaattaccttgccaagattactggagggcaaagcatcttaatacgtgtggctcattgtgaggattaagtcaccaataatgaacagagaacccataagctaattta

SEQ ID NO: 13748 - DNA, 122 bp, Homo sapiens
  misc_feature (61)..(62): /note="This region represents a CpG dinucleotide"
  misc_feature (61)..(61): /note="Nucleotide may be methylated to form 5-methylcytosine"
ttgttgagaaaacctggatttcccacaatgtggaagcaacgaggaaggggtttctggtcccggttctgaaggctgtgaccttcagcgcacatctatacaatgctgatagccccggcacctct

SEQ ID NO: 13749 - DNA, 122 bp, Homo sapiens
  misc_feature (61)..(62): /note="This region represents a CpG dinucleotide"
  misc_feature (61)..(61): /note="Nucleotide may be methylated to form 5-methylcytosine"
tttcactgcaaaatatgctcccactccatatgctccaaataagggccatttgtacactatcgtcatctaccatagttttgtctgtcctataacaaaattttatgagtatttttatttaattt

SEQ ID NO: 13750 - DNA, 122 bp, Homo sapiens
  misc_feature (61)..(62): /note="This region represents a CpG dinucleotide"
  misc_feature (61)..(61): /note="Nucleotide may be methylated to form 5-methylcytosine"
gctgcaaggcttaaatgaggtaaaatcacattcgtggttcatcacatgggcttaagcttccgacagctctgaatttggaaccatgctctgtaactattagctggccttggcagaatactaaa

SEQ ID NO: 13751 - DNA, 122 bp, Homo sapiens
  misc_feature (61)..(62): /note="This region represents a CpG dinucleotide"
  misc_feature (61)..(61): /note="Nucleotide may be methylated to form 5-methylcytosine"
tgatcttgcagaactgcagtgagggctgtgagtgtggggtgtctcaactgcacctggacacgcagaaggcactctgtgaacactgactttcattggcccaggcctctgaatccatgacagtt

SEQ ID NO: 13752 - DNA, 122 bp, Homo sapiens
  misc_feature (61)..(62): /note="This region represents a CpG dinucleotide"
  misc_feature (61)..(61): /note="Nucleotide may be methylated to form 5-methylcytosine"
caaccccaaccagagtgacctgattgagcaggcagccgagatgctttatggattgatccacgcccgctacatccttaccaaccgtggcatcgcccagatggtgaggcctctctgctcctacc

SEQ ID NO: 13753 - DNA, 122 bp, Homo sapiens
  misc_feature (61)..(62): /note="This region represents a CpG dinucleotide"
  misc_feature (61)..(61): /note="Nucleotide may be methylated to form 5-methylcytosine"
agccccaggtagggctgaggggtagcaccgggctcctccatagcgcgaaggctgctctggcggtcaccacagtaacactggccacaacaaacggtggagaacacgcagccttgggtctggaa

SEQ ID NO: 13754 - DNA, 122 bp, Homo sapiens
  misc_feature (61)..(62): /note="This region represents a CpG dinucleotide"
  misc_feature (61)..(61): /note="Nucleotide may be methylated to form 5-methylcytosine"
ttttctaccacacagcgagcaaggccaacttccctaaactaagaatgctgagattcttttcgacttataatgttctgactgtctctctctgtttccccttacctcagaatttgtttaataga

SEQ ID NO: 13755 - DNA, 122 bp, Homo sapiens
  misc_feature (61)..(62): /note="This region represents a CpG dinucleotide"
  misc_feature (61)..(61): /note="Nucleotide may be methylated to form 5-methylcytosine"
tatggtttaaaggtattccctaaagttcatgtgttgtaaacgtaatccccaatgccacagcgttgggaagtggggctgaataagagatgatgaggtcatgaagggagagtcctcatggatta

SEQ ID NO: 13756 - DNA, 122 bp, Homo sapiens
  misc_feature (61)..(62): /note="This region represents a CpG dinucleotide"
  misc_feature (61)..(61): /note="Nucleotide may be methylated to form 5-methylcytosine"
gggctttactttgcacaaactcaggtggaatcagtcaggatccagccaggagacaggaaacgcagcagtaatttgaacaggaaaaattcagtatacagaatcgttaacaaaggaaaagaagg

SEQ ID NO: 13757 - DNA, 122 bp, Homo sapiens
  misc_feature (61)..(62): /note="This region represents a CpG dinucleotide"
  misc_feature (61)..(61): /note="Nucleotide may be methylated to form 5-methylcytosine"
tcctggcagaccctccttatttggaatgctggctaagcattttgccatctactctccacacggccaacagcagttgctagtgtgtgtttaagcttgttttgtttctgctttttaaaggaatc

SEQ ID NO: 13758 - DNA, 122 bp, Homo sapiens
  misc_feature (61)..(62): /note="This region represents a CpG dinucleotide"
  misc_feature (61)..(61): /note="Nucleotide may be methylated to form 5-methylcytosine"
atttctggccccacttcggtatgagtgcattttttagccaaagtgccatgttcaagggcacgctttgcctaaggcctatggatttatttcaggattgaatatttgacaagcaaacaggacag

SEQ ID NO: 13759 - DNA, 122 bp, Homo sapiens
  misc_feature (61)..(62): /note="This region represents a CpG dinucleotide"
  misc_feature (61)..(61): /note="Nucleotide may be methylated to form 5-methylcytosine"
aaaaggcatttttgaaaaagctgaatatgaactaggtgttttatgatattaaggaagtatcgttaattttgttaggtgtggtaatgataccgagattatgaaagaaaatatcagctgggtgt

SEQ ID NO: 13760 - DNA, 122 bp, Homo sapiens
  misc_feature (61)..(62): /note="This region represents a CpG dinucleotide"
  misc_feature (61)..(61): /note="Nucleotide may be methylated to form 5-methylcytosine"
atcattgaagatattccatatctctctttagcataatcctacaaaaaaagttttttgcatcgtgactttttatgtaaacactaagagcacagtaaacacataaatactaataatagaatata

SEQ ID NO: 13761 - DNA, 122 bp, Homo sapiens
  misc_feature (61)..(62): /note="This region represents a CpG dinucleotide"
  misc_feature (61)..(61): /note="Nucleotide may be methylated to form 5-methylcytosine"
ctttggcagctcatgaatctctctgagcctgtttcttcatctgtacctaccattccaggtcgtgagggttaagtatgatattgcatgtagagcacctagcatgaagcctggcacgtggtgat

SEQ ID NO: 13762 - DNA, 122 bp, Homo sapiens
  misc_feature (61)..(62): /note="This region represents a CpG dinucleotide"
  misc_feature (61)..(61): /note="Nucleotide may be methylated to form 5-methylcytosine"
aaagtgaaatgtcataaccaccacgacccacacctaggcacatgcataagcccaggcgatcgtgttccagactttctaggctcagaggatgacacgtcatcttcgcctggctatatttttat

SEQ ID NO: 13763 - DNA, 122 bp, Homo sapiens
  misc_feature (61)..(62): /note="This region represents a CpG dinucleotide"
  misc_feature (61)..(61): /note="Nucleotide may be methylated to form 5-methylcytosine"
acagagatagttagatctgtataaacaagagtctgagtctgaccttccttggagggaagccggaggcaaaaaacacttagaacagaaagtgaggtggatgctctagttaatagagagttact

SEQ ID NO: 13764 - DNA, 122 bp, Homo sapiens
  misc_feature (61)..(62): /note="This region represents a CpG dinucleotide"
  misc_feature (61)..(61): /note="Nucleotide may be methylated to form 5-methylcytosine"
atcaccatctgggatccagtaagctcccccatggggcctaaactagactaagttggtttccgtcactcacagccagaggagtcctgcctaagaaattgggaaagagagcggagaagacaaaa

SEQ ID NO: 13765 - DNA, 122 bp, Homo sapiens
  misc_feature (61)..(62): /note="This region represents a CpG dinucleotide"
  misc_feature (61)..(61): /note="Nucleotide may be methylated to form 5-methylcytosine"
gcagtgagcagtgttttcgggatgagtgcctccctgccaacgagggacggacagtgtgaccgccaccccggggaatctggtgtggaggtggggctgtccagtcccgagtggtgctgaagcca

SEQ ID NO: 13766 - DNA, 122 bp, Homo sapiens
  misc_feature (61)..(62): /note="This region represents a CpG dinucleotide"
  misc_feature (61)..(61): /note="Nucleotide may be methylated to form 5-methylcytosine"
tgtgtttatagtccttgttatagcacagatcacatgatattagggctccttgggctcccccgtgagctccaggaaggactgtcttagccacctccagaactccagcacaatgccaagcatat

SEQ ID NO: 13767 - DNA, 122 bp, Homo sapiens
  misc_feature (61)..(62): /note="This region represents a CpG dinucleotide"
  misc_feature (61)..(61): /note="Nucleotide may be methylated to form 5-methylcytosine"
aactcctctttgtacaagttcctgtaactcgtgcatgcatgggctctttctaggcatcttcgtcatgcgtggcaggctcttctctgccaaatatgtcagttccacccactcttcaaagccca

SEQ ID NO: 13768 - DNA, 122 bp, Homo sapiens
  misc_feature (61)..(62): /note="This region represents a CpG dinucleotide"
  misc_feature (61)..(61): /note="Nucleotide may be methylated to form 5-methylcytosine"
ttagctgtgtgatcttgggcaagttatttaactcctctgagccttgctttactcaccctacggtgaagacaggaagagtaattactaaataatgttggttgagtattaaatgagacaatgca

SEQ ID NO: 13769 - DNA, 122 bp, Homo sapiens
  misc_feature (61)..(62): /note="This region represents a CpG dinucleotide"
  misc_feature (61)..(61): /note="Nucleotide may be methylated to form 5-methylcytosine"
gcagggtgcagggcccctgtgacattccctccctctgttgccttctcaggtctcaggctacgtctccagggcagaccaatggggacagctccttggaagtgctggcgactcgcttccaggta

SEQ ID NO: 13770 - DNA, 122 bp, Homo sapiens
  misc_feature (61)..(62): /note="This region represents a CpG dinucleotide"
  misc_feature (61)..(61): /note="Nucleotide may be methylated to form 5-methylcytosine"
atcagctccaagtaagttatgacaaagaacccaggactagctacaaatcctcctgacattcgcccttcgcaagctgatatttgagagcccagctgactcagaaggaggcagagctgcaggtg

SEQ ID NO: 13771 - DNA, 122 bp, Homo sapiens
  misc_feature (61)..(62): /note="This region represents a CpG dinucleotide"
  misc_feature (61)..(61): /note="Nucleotide may be methylated to form 5-methylcytosine"
gcccaggagcctccatccgaaatccaaagaccgcggaggaggacggtttaaggaacaggacgaatgtgataatattggcatctaaccttctagtgtttgagtaattcgttgcttagctactt

SEQ ID NO: 13772 - DNA, 122 bp, Homo sapiens
  misc_feature (61)..(62): /note="This region represents a CpG dinucleotide"
  misc_feature (61)..(61): /note="Nucleotide may be methylated to form 5-methylcytosine"
ccagaggcgctctccgacctgcagcccccagggctcctggccctttcccgtttgccactgcggcttgttgtcaagaaatggaacttcagaaaacccccagatatacactgcgttaggtaagg

SEQ ID NO: 13773 - DNA, 122 bp, Homo sapiens
  misc_feature (61)..(62): /note="This region represents a CpG dinucleotide"
  misc_feature (61)..(61): /note="Nucleotide may be methylated to form 5-methylcytosine"
gctcactgaatgtggagtctctctgactcaccctgcacagcccaggaagccagattagggcggaaaaaggtattcagagtttgctgaggctagtggtggtcaggctgtgtgggaactctgga

SEQ ID NO: 13774 - DNA, 122 bp, Homo sapiens
  misc_feature (61)..(62): /note="This region represents a CpG dinucleotide"
  misc_feature (61)..(61): /note="Nucleotide may be methylated to form 5-methylcytosine"
taacttaaatttaaaacattgtaaagataaacagaaaacacagagttctcagtacaaatacgtcagcaaatttagactgccgattctgcaggaaaatggtgaatcatggctggaaaagtgaa

SEQ ID NO: 13775 - DNA, 122 bp, Homo sapiens
  misc_feature (61)..(62): /note="This region represents a CpG dinucleotide"
  misc_feature (61)..(61): /note="Nucleotide may be methylated to form 5-methylcytosine"
gcgccagctcagtgctggccacaggcgaaaggcagccggaatgcaccgtcccgtgtgggccggacaccccgtgaggctgagcagttgctaagttctgtgacccgggccagggtggctggaca

SEQ ID NO: 13776 - DNA, 122 bp, Homo sapiens
  misc_feature (61)..(62): /note="This region represents a CpG dinucleotide"
  misc_feature (61)..(61): /note="Nucleotide may be methylated to form 5-methylcytosine"
acaaaatatatgaagcaactgttttcaagttactgggcatcagccaacaaagcactgatccgtgtgatggaaaacagatgtagccagcagaaaacggccccagctcattgcctaagagagaa

SEQ ID NO: 13777 - DNA, 122 bp, Homo sapiens
  misc_feature (61)..(62): /note="This region represents a CpG dinucleotide"
  misc_feature (61)..(61): /note="Nucleotide may be methylated to form 5-methylcytosine"
atttgtctttggaaaagtcactcatgattctttgggctttggtttcctcatcttttataccggcttaataatgaccaccgtagagttgtcatggaagttaaatgaactcatgtaccataagt

SEQ ID NO: 13778 - DNA, 122 bp, Homo sapiens
  misc_feature (61)..(62): /note="This region represents a CpG dinucleotide"
  misc_feature (61)..(61): /note="Nucleotide may be methylated to form 5-methylcytosine"
aagatgtcttattcattcctatttcccaatgtcctcatcttcctacaactaagcttcacacgtgactcaatgaatatctgtcagatgaatgaatgaatgaatgaatgaacatcatctcctcc

SEQ ID NO: 13779 - DNA, 122 bp, Homo sapiens
  misc_feature (61)..(62): /note="This region represents a CpG dinucleotide"
  misc_feature (61)..(61): /note="Nucleotide may be methylated to form 5-methylcytosine"
tattatttgtttgccacacttgtcacttattatcaggaaagtaaatttttttcctgaggccgtactcacaacatgtgtgcttacattgcatttgcaagacttggccacatggctacaccaag

SEQ ID NO: 13780 - DNA, 122 bp, Homo sapiens
  misc_feature (61)..(62): /note="This region represents a CpG dinucleotide"
  misc_feature (61)..(61): /note="Nucleotide may be methylated to form 5-methylcytosine"
ataagcacttcttcctggtgtgcccaggtaggccgtgacatactgggttcagccttgaaccgcaccctacagcccctgtggcaggactcacgggctcgcctgcctgtcttcctgaagaacct

SEQ ID NO: 13781 - DNA, 122 bp, Homo sapiens
  misc_feature (61)..(62): /note="This region represents a CpG dinucleotide"
  misc_feature (61)..(61): /note="Nucleotide may be methylated to form 5-methylcytosine"
gaagcacctcatctgactacagaaaacaacgacatctggagaagttatttcctgcataatcgggaaaaagaaatgaatcaatcacttttaaaacaggttcttccttttctactgtcatctat

SEQ ID NO: 13782 - DNA, 122 bp, Homo sapiens
  misc_feature (61)..(62): /note="This region represents a CpG dinucleotide"
  misc_feature (61)..(61): /note="Nucleotide may be methylated to form 5-methylcytosine"
aaagctacaaacaccaggcacatgtcattctggctgaaggcaaatgatgggacaggcccccggagctcccctaggacagaagctcaccttcagccccacggctgcactcagagatggccccg

SEQ ID NO: 13783 - DNA, 122 bp, Homo sapiens
  misc_feature (61)..(62): /note="This region represents a CpG dinucleotide"
  misc_feature (61)..(61): /note="Nucleotide may be methylated to form 5-methylcytosine"
gccaagctatttttaacaatcagatctcgagggaaccaataagacaagaactcatgatctcggcaccaagccattcttaagggatgtgccccatgactcaaacacctctcattggccccacc

SEQ ID NO: 13784 - DNA, 122 bp, Homo sapiens
  misc_feature (61)..(62): /note="This region represents a CpG dinucleotide"
  misc_feature (61)..(61): /note="Nucleotide may be methylated to form 5-methylcytosine"
tgcgcatgcgagggatctaggttgcgtgctccttatgagaatccaatgctaaaagtaatgcgcttgaatcatcccgaaaccacccccccgacccctgtccgtggaaaaattgtctttcatga

SEQ ID NO: 13785 - DNA, 122 bp, Homo sapiens
  misc_feature (61)..(62): /note="This region represents a CpG dinucleotide"
  misc_feature (61)..(61): /note="Nucleotide may be methylated to form 5-methylcytosine"
ttcaacctgatcccagtgctaaattagataagtgcagccaccaggatgagcactctgcctcgtcatactcccaggacaattttgagcctccccatcagtgtcaaattacctgtattggtgct

SEQ ID NO: 13786 - DNA, 122 bp, Homo sapiens
  misc_feature (61)..(62): /note="This region represents a CpG dinucleotide"
  misc_feature (61)..(61): /note="Nucleotide may be methylated to form 5-methylcytosine"
ataaactagaagagagtaaaaaatattactctgtggtgggagaacagggaattagggtaacggaggttcagcaggtgcagccagttcacataagcaaaagaacagcaggtccagccagtttg

SEQ ID NO: 13787 - DNA, 122 bp, Homo sapiens
  misc_feature (61)..(62): /note="This region represents a CpG dinucleotide"
  misc_feature (61)..(61): /note="Nucleotide may be methylated to form 5-methylcytosine"
gtgtcccctttattggcaaggggcctgatgctctctgccttctctcatgagtgtctttcacgctaacgtgtacaagattgccaaaagcatagggagtttccactttggacaatgagggtttg

SEQ ID NO: 13788 - DNA, 122 bp, Homo sapiens
  misc_feature (61)..(62): /note="This region represents a CpG dinucleotide"
  misc_feature (61)..(61): /note="Nucleotide may be methylated to form 5-methylcytosine"
taaggtaagcagcctataaaagttgtgaccatggttcagccaagatgttctgacatcaaacgctaggccctgtcctctaacctgttcattttaccttgcctgctgtttctaataggcaccta

SEQ ID NO: 13789 - DNA, 122 bp, Homo sapiens
  misc_feature (61)..(62): /note="This region represents a CpG dinucleotide"
  misc_feature (61)..(61): /note="Nucleotide may be methylated to form 5-methylcytosine"
agtcacagaaggacaaaaacatgccctgctaagactgcaggtgaacttttgagaataccacggaggagaactagtattggtactggactttcagccccaggtccaccaagccagtaaagcca

SEQ ID NO: 13790 - DNA, 122 bp, Homo sapiens
  misc_feature (61)..(62): /note="This region represents a CpG dinucleotide"
  misc_feature (61)..(61): /note="Nucleotide may be methylated to form 5-methylcytosine"
ttatattttagattgcatttccccaagtgaagctgctccagggaagggagctggcttccacgtacactttgttgctgtacttgtcatcgtctgaggggactcagaaattcagtcaccattaa

SEQ ID NO: 13791 - DNA, 122 bp, Homo sapiens
  misc_feature (61)..(62): /note="This region represents a CpG dinucleotide"
  misc_feature (61)..(61): /note="Nucleotide may be methylated to form 5-methylcytosine"
cagtataagtaccccatttggtggttgcccttctcttccagaatcttcacctttgtgacacgtgcccacaatgaatcatgtcctcaaggcagtcctgggtggttatggctcatggtgacttt

SEQ ID NO: 13792 - DNA, 122 bp, Homo sapiens
  misc_feature (61)..(62): /note="This region represents a CpG dinucleotide"
  misc_feature (61)..(61): /note="Nucleotide may be methylated to form 5-methylcytosine"
caagggtaagagaaacaaaacattccagtccctgaagattaacagtctaagcgtcacactcggaactcttcagatctttcaaataccccctccttcacattcttctttagggactgacaaat

SEQ ID NO: 13793 - DNA, 122 bp, Homo sapiens
  misc_feature (61)..(62): /note="This region represents a CpG dinucleotide"
  misc_feature (61)..(61): /note="Nucleotide may be methylated to form 5-methylcytosine"
cagacattacttttgctgtaacaaccattcttagctacctgaacaaggcctcataatagccgggggaaaagggagtatataacaggctatgacctaaaaggcctgctatatgttttagctat

SEQ ID NO: 13794 - DNA, 122 bp, Homo sapiens
  misc_feature (61)..(62): /note="This region represents a CpG dinucleotide"
  misc_feature (61)..(61): /note="Nucleotide may be methylated to form 5-methylcytosine"
tatcagtgtgttggattttttctttatttgtaagagctctttatgtataaggctgttggccgaatctagtggctcagcctgtaatcccaaaactttaggactcagaggcaaggcaggaggat

SEQ ID NO: 13795 - DNA, 122 bp, Homo sapiens
  misc_feature (61)..(62): /note="This region represents a CpG dinucleotide"
  misc_feature (61)..(61): /note="Nucleotide may be methylated to form 5-methylcytosine"
atctgacttcaatttctgtcctttttcattcagggtttacttgaggtttatatatagaggcgtcttaggttatttgtttagtttgcatgtctaaaaattttattagaaagttaagcttgaca

SEQ ID NO: 13796 - DNA, 122 bp, Homo sapiens
  misc_feature (61)..(62): /note="This region represents a CpG dinucleotide"
  misc_feature (61)..(61): /note="Nucleotide may be methylated to form 5-methylcytosine"
tcagcttccagaacaccaaaatgctccagatagttccacctcggcaggcaggacaagaggcgttaactctgtttactccttggcagatatcacggccccagtggcttcttcctctttataaa

SEQ ID NO: 13797 - DNA, 122 bp, Homo sapiens
  misc_feature (61)..(62): /note="This region represents a CpG dinucleotide"
  misc_feature (61)..(61): /note="Nucleotide may be methylated to form 5-methylcytosine"
aggaatgacacatgtctaaactatgtttcagtgagcaattcccaaactgatttgaccatgcgtttcctttacaaacctataagttccaggaaacaatgctgagaagtgttattttattatcc

SEQ ID NO: 13798 - DNA, 122 bp, Homo sapiens
  misc_feature (61)..(62): /note="This region represents a CpG dinucleotide"
  misc_feature (61)..(61): /note="Nucleotide may be methylated to form 5-methylcytosine"
taacacgtctgattcatgaggttgtaagttctcctgcagaacaagaagatagaaaactaccgcttttatccccacggagtcatctctggggaataaagaacgctcacagaaagaagagacag

SEQ ID NO: 13799 - DNA, 122 bp, Homo sapiens
  misc_feature (61)..(62): /note="This region represents a CpG dinucleotide"
  misc_feature (61)..(61): /note="Nucleotide may be methylated to form 5-methylcytosine"
acaggagggtgggcggtgctaagataaagtagcttaataaccagcctagttcccaacgtacgtgtatggtcaatttccaagtggcctgactctggatgactcaagagggcttttccttctct

SEQ ID NO: 13800 - DNA, 122 bp, Homo sapiens
  misc_feature (61)..(62): /note="This region represents a CpG dinucleotide"
  misc_feature (61)..(61): /note="Nucleotide may be methylated to form 5-methylcytosine"
gacagtgggtccagggctgacatgtggaacagccactgtgtgctgtgccggccagttaaccgttctcccctttaatctgtgcaacaataataaatattatttagctcagaacaaaaaacaga

SEQ ID NO: 13801 - DNA, 122 bp, Homo sapiens
  misc_feature (61)..(62): /note="This region represents a CpG dinucleotide"
  misc_feature (61)..(61): /note="Nucleotide may be methylated to form 5-methylcytosine"
ggagaggggcatgcacgtgtggctgctgttactctcgcgcgtgctgttggtgcaggtggacgtcatggcaacagccagagggcgtgagacaggttgcaggctcagtgccggcaccggtgggt

SEQ ID NO: 13802 - DNA, 122 bp, Homo sapiens
  misc_feature (61)..(62): /note="This region represents a CpG dinucleotide"
  misc_feature (61)..(61): /note="Nucleotide may be methylated to form 5-methylcytosine"
attcaatcagaaactctacatatacactttggaatttacacatttgatagctgcaaagctcgcaagcaagctctccagccaacatgcctgcctgtctccgcccaggtgtggcaagccccaca

SEQ ID NO: 13803 - DNA, 122 bp, Homo sapiens
  misc_feature (61)..(62): /note="This region represents a CpG dinucleotide"
  misc_feature (61)..(61): /note="Nucleotide may be methylated to form 5-methylcytosine"
tttcattcagccagatttacccagagttcagaacaggcatccttgtacatagccatacagcgtttgtttctgacttcagtggtggagaaagtgctactttgcaagatagttgacttccttgt

SEQ ID NO: 13804 - DNA, 122 bp, Homo sapiens
  misc_feature (61)..(62): /note="This region represents a CpG dinucleotide"
  misc_feature (61)..(61): /note="Nucleotide may be methylated to form 5-methylcytosine"
aaatctacctggccaaatttcttacaggctctctcaggacatctcctagagcaaagctcacggtgtaaagtactattgtaagacaataagggccaggtgctatagctcatgcctgtaatccc

SEQ ID NO: 13805 - DNA, 122 bp, Homo sapiens
  misc_feature (61)..(62): /note="This region represents a CpG dinucleotide"
  misc_feature (61)..(61): /note="Nucleotide may be methylated to form 5-methylcytosine"
acattttccacattgctgctggagtgatcttttaaaaatgcaactccgatgttgcctgtccgtcgggtacattcttcaatagctcttctttgccttcagtcttgctgtcatcctgttctccc

SEQ ID NO: 13806 - DNA, 122 bp, Homo sapiens
  misc_feature (61)..(62): /note="This region represents a CpG dinucleotide"
  misc_feature (61)..(61): /note="Nucleotide may be methylated to form 5-methylcytosine"
atatgtcacttttgacttgagtgtcatggtatctatggccttcaacctgcatggttttatcgtttcagtaatcttgggaggaaggtattattaagttcatttgataaataggagactgagcc

SEQ ID NO: 13807 - DNA, 122 bp, Homo sapiens
  misc_feature (61)..(62): /note="This region represents a CpG dinucleotide"
  misc_feature (61)..(61): /note="Nucleotide may be methylated to form 5-methylcytosine"
tccttaggatggataacatgccacatcctcctagctcaaccaacttcagcactgcagtgtcggacagctccatacacctctgcaaggaattccaagtcaggcaggggccacttgtctctctg

SEQ ID NO: 13808 - DNA, 122 bp, Homo sapiens
  misc_feature (61)..(62): /note="This region represents a CpG dinucleotide"
  misc_feature (61)..(61): /note="Nucleotide may be methylated to form 5-methylcytosine"
agaagatcaagtacgccttcagcctgctggtgaggacgcgcccgcccctgggccggggcgcgggcacgacgaacctgtcccgtccccgcacccacgccaaccacctccctccccacgcccca

SEQ ID NO: 13809 - DNA, 122 bp, Homo sapiens
  misc_feature (61)..(62): /note="This region represents a CpG dinucleotide"
  misc_feature (61)..(61): /note="Nucleotide may be methylated to form 5-methylcytosine"
tggggcatggctcagggatcctgcctggttcatgcgggtggggtcaatatgtcaagggcccgcacaactatctgcttatgggtcccgggggatacaaggatgcagctaagctgctgtgtact

SEQ ID NO: 13810 - DNA, 122 bp, Homo sapiens
  misc_feature (61)..(62): /note="This region represents a CpG dinucleotide"
  misc_feature (61)..(61): /note="Nucleotide may be methylated to form 5-methylcytosine"
agtcagtgagtgtgactacaggctaggggtggcctgtgaagctgtttcttggtttcaggacgtggaagtacagcttctcaactggtctgaagacatgtctgccagggtcagtctactgggct

SEQ ID NO: 13811 - DNA, 122 bp, Homo sapiens
  misc_feature (61)..(62): /note="This region represents a CpG dinucleotide"
  misc_feature (61)..(61): /note="Nucleotide may be methylated to form 5-methylcytosine"
aagattggtcactcggcaaacctcatgatcggcaggattgtcccaaaggtcacttgacagcgcacatgatcgatccaggatggcaaaatagcccaagggaaaaaacagaaagcatgagaaat

SEQ ID NO: 13812 - DNA, 122 bp, Homo sapiens
  misc_feature (61)..(62): /note="This region represents a CpG dinucleotide"
  misc_feature (61)..(61): /note="Nucleotide may be methylated to form 5-methylcytosine"
aaatgtaagacctgaaactataaaaatcctggaagaaaacctaggaaatcctcttctggacgttggcctaggcaaagaatttatgttgaagatgcccaaagcaaatgcaacaaaatcaaaaa

SEQ ID NO: 13813 - DNA, 122 bp, Homo sapiens
  misc_feature (61)..(62): /note="This region represents a CpG dinucleotide"
  misc_feature (61)..(61): /note="Nucleotide may be methylated to form 5-methylcytosine"
cgtcgggatccaactcccttctccccccaccctcagacccgcaagcaccaacccccgcctcgtgtgcccagatccgaccccgcccctcgacaacctcccgtgagccctccgtctccattccg

SEQ ID NO: 13814 - DNA, 122 bp, Homo sapiens
  misc_feature (61)..(62): /note="This region represents a CpG dinucleotide"
  misc_feature (61)..(61): /note="Nucleotide may be methylated to form 5-methylcytosine"
ctctgggacatgagatatgggtcaagtgagtgtgtacctggcccgcccaggtacaggtgacggtaaacaggccaagtctgggtgtacctgtggacaggagagtccaggctaggtgattagag

SEQ ID NO: 13815 - DNA, 122 bp, Homo sapiens
  misc_feature (61)..(62): /note="This region represents a CpG dinucleotide"
  misc_feature (61)..(61): /note="Nucleotide may be methylated to form 5-methylcytosine"
cccctgctccccaacccgcaaatgggtggtgagacctgagggactctcaaattcctccagcgatcccgccgtctctgtgcctggccctctttatctgggatcgagccactcacacccttgct

SEQ ID NO: 13816 - DNA, 122 bp, Homo sapiens
  misc_feature (61)..(62): /note="This region represents a CpG dinucleotide"
  misc_feature (61)..(61): /note="Nucleotide may be methylated to form 5-methylcytosine"
acaccctgaacagcatcatcaagcctcagtaatgtcttctgattacacatgtttgatctgcgtgaattccatttctctcttgccttcttcatcctagtaactacagcctctccccgataaca

SEQ ID NO: 13817 - DNA, 122 bp, Homo sapiens
  misc_feature (61)..(62): /note="This region represents a CpG dinucleotide"
  misc_feature (61)..(61): /note="Nucleotide may be methylated to form 5-methylcytosine"
aatgtgagacagatcaatggaatacacacaataacagataaaggaaatacacaggaaatgcgtgcaagaaaaacacctgggtccctgaatgacaggaaatagtgctgtctaatagtgcacta

SEQ ID NO: 13818 - DNA, 122 bp, Homo sapiens
  misc_feature (61)..(62): /note="This region represents a CpG dinucleotide"
  misc_feature (61)..(61): /note="Nucleotide may be methylated to form 5-methylcytosine"
tctgtactgatgtgtcacttattaaatacttttgtaccatgagtaaaacttcaggtgtttcgcaagaaccaccattctcaatgagttgtattctttctttaatgtagccactgccataaggt

SEQ ID NO: 13819 - DNA, 122 bp, Homo sapiens
  misc_feature (61)..(62): /note="This region represents a CpG dinucleotide"
  misc_feature (61)..(61): /note="Nucleotide may be methylated to form 5-methylcytosine"
ggtggggtagagtctaagttgtttccggtctgagccttcaagttgctgggctgtccttggcgtggcgagtcccaggagaaccagtgagacaagactggtggttctcaaagactcatatgtcc

SEQ ID NO: 13820 - DNA, 122 bp, Homo sapiens
  misc_feature (61)..(62): /note="This region represents a CpG dinucleotide"
  misc_feature (61)..(61): /note="Nucleotide may be methylated to form 5-methylcytosine"
ctctgtagttgagcactgtaccactgaggtggcttcttgatctttaacagatgcagctcacgcaggaagtgcattggttaggtaaagtcaatttcctctcctggaggtaggttcctcacttt

SEQ ID NO: 13821 - DNA, 122 bp, Homo sapiens
  misc_feature (61)..(62): /note="This region represents a CpG dinucleotide"
  misc_feature (61)..(61): /note="Nucleotide may be methylated to form 5-methylcytosine"
ctctagtaacagggcacatgtacacaggaatatcaacaggagcaaatatcgcttgtcttacggaagaatggaattccagagagactcactgcaagatcagcttctgtttacagaggggttaa

SEQ ID NO: 13822 - DNA, 122 bp, Homo sapiens
  misc_feature (61)..(62): /note="This region represents a CpG dinucleotide"
  misc_feature (61)..(61): /note="Nucleotide may be methylated to form 5-methylcytosine"
gtgacctgggcatgccaccaccctccccactgctcccaacctgataagcacatatatacccggtgaattcatgtctcacaattagagtcctatgacatagtgtctgcaggctttggctgatg

SEQ ID NO: 13823 - DNA, 122 bp, Homo sapiens
  misc_feature (61)..(62): /note="This region represents a CpG dinucleotide"
  misc_feature (61)..(61): /note="Nucleotide may be methylated to form 5-methylcytosine"
agttggcttcttctgttgtgttcttagcttccaaaatagtagtctctcctcagagccagacgcgcaatgccatcatgttaatgaggtgcctcatgtgcttcaatagccactgactgatggta

SEQ ID NO: 13824 - DNA, 122 bp, Homo sapiens
  misc_feature (61)..(62): /note="This region represents a CpG dinucleotide"
  misc_feature (61)..(61): /note="Nucleotide may be methylated to form 5-methylcytosine"
agtctagtggaaaagacacacccacacagataaaaatgatgatataaagattaagtctagcgagagagagatgatggtgaagttcctaggtaaaatgataacacacatccacctcatttaaa

SEQ ID NO: 13825 - DNA, 122 bp, Homo sapiens
  misc_feature (61)..(62): /note="This region represents a CpG dinucleotide"
  misc_feature (61)..(61): /note="Nucleotide may be methylated to form 5-methylcytosine"
ttgtcctatctccctgtgtgtgcaggactggctcagtctgcagcttttattagaaatcaacggaagccaccagaacacagagccctgaatgaacactgtggacctggatcatccgacctgaa

SEQ ID NO: 13826 - DNA, 122 bp, Homo sapiens
  misc_feature (61)..(62): /note="This region represents a CpG dinucleotide"
  misc_feature (61)..(61): /note="Nucleotide may be methylated to form 5-methylcytosine"
attcaaacctgggtcagcatggaaaccacacccaggctctcaagccctggccatgggaaacgcagcattgaacaggggctaagggagccctgttgtgaatcccagcaccacccagtaaccat

SEQ ID NO: 13827 - DNA, 122 bp, Homo sapiens
  misc_feature (61)..(62): /note="This region represents a CpG dinucleotide"
  misc_feature (61)..(61): /note="Nucleotide may be methylated to form 5-methylcytosine"
ggacagagccatagcagactcatagcctacgtgtatcatgagcaagaaatacattgatgacgtaacaactgagattttgggggattgtttgttatgcagtgaagctgactaatacagttaca

SEQ ID NO: 13828 - DNA, 122 bp, Homo sapiens
  misc_feature (61)..(62): /note="This region represents a CpG dinucleotide"
  misc_feature (61)..(61): /note="Nucleotide may be methylated to form 5-methylcytosine"
gaggcctactcaatgcattatttcatccgagcctgcccagtgctcacactctcatagaggcggggaataaactgacaacaaatcgcaaccctggctttcgcagaactctggcgggggaagag

SEQ ID NO: 13829 - DNA, 122 bp, Homo sapiens
  misc_feature (61)..(62): /note="This region represents a CpG dinucleotide"
  misc_feature (61)..(61): /note="Nucleotide may be methylated to form 5-methylcytosine"
agccgacgctacgaaggcctgagggacagcgaggcatcctgggaggcgccctggctcagacgctcctgtgggagggcgtctgcgtcctcagtttccccaggacgcgtaaggagaaaaccggg

SEQ ID NO: 13830 - DNA, 122 bp, Homo sapiens
  misc_feature (61)..(62): /note="This region represents a CpG dinucleotide"
  misc_feature (61)..(61): /note="Nucleotide may be methylated to form 5-methylcytosine"
cttaagaactgtcttctttcactgaacatcccatggctggaagagttaaatcagaagcaacggtggaggaaagggggcagaatcttaaatagtatcagaaaatgatttaagacttttatcac

SEQ ID NO: 13831 - DNA, 122 bp, Homo sapiens
  misc_feature (61)..(62): /note="This region represents a CpG dinucleotide"
  misc_feature (61)..(61): /note="Nucleotide may be methylated to form 5-methylcytosine"
gtaggccacagaggcggcccaggcaggcagggtggagtagctggctgtgctatccgaggtcgctgtcctaatcagagcagggccgggagagccaggacaggaagtatggagagcagggagcg

SEQ ID NO: 13832 - DNA, 122 bp, Homo sapiens
  misc_feature (61)..(62): /note="This region represents a CpG dinucleotide"
  misc_feature (61)..(61): /note="Nucleotide may be methylated to form 5-methylcytosine"
aaaaggacctcctagcattccaagtaaacagaaacatccagatttcagtaaagattaagacgagactttctgataagatttgatacgtcgagatcacctttgtggccagataacaataaaac

SEQ ID NO: 13833 - DNA, 122 bp, Homo sapiens
  misc_feature (61)..(62): /note="This region represents a CpG dinucleotide"
  misc_feature (61)..(61): /note="Nucleotide may be methylated to form 5-methylcytosine"
acctgagctctccgattccaaagcctgtacatttttcaggagcctcatgaggctgagccacgtcacactggcagcccacactctggaatgagtcagtccccagggagcagaacagcatccgt

SEQ ID NO: 13834 - DNA, 122 bp, Homo sapiens
  misc_feature (61)..(62): /note="This region represents a CpG dinucleotide"
  misc_feature (61)..(61): /note="Nucleotide may be methylated to form 5-methylcytosine"
gagaaaacaaatgggaaactaatgtgtatagagcatcacttatgtgtcaggctctgttatcgttccatataaagctctcagaacaccccagctaggcagttgtgcaaccattttataaagga

SEQ ID NO: 13835 - DNA, 122 bp, Homo sapiens
  misc_feature (61)..(62): /note="This region represents a CpG dinucleotide"
  misc_feature (61)..(61): /note="Nucleotide may be methylated to form 5-methylcytosine"
gagatttttaaagcagttctctttgtaacatcaacattacaatctatatcctgaaaactacgaagttttatattcctccttcccctcactaggcctcccctggcctgcttgtgtatttgctt

SEQ ID NO: 13836 - DNA, 122 bp, Homo sapiens
  misc_feature (61)..(62): /note="This region represents a CpG dinucleotide"
  misc_feature (61)..(61): /note="Nucleotide may be methylated to form 5-methylcytosine"
tcattatagctattccttttcctagcttctctatttttgccaatgtaacttttccatccccgtgactaagagatgaataagagatgtaagaggaagagctggtttggcgcagagcacagtga

SEQ ID NO: 13837 - DNA, 122 bp, Homo sapiens
  misc_feature (61)..(62): /note="This region represents a CpG dinucleotide"
  misc_feature (61)..(61): /note="Nucleotide may be methylated to form 5-methylcytosine"
ttaaacattctttaagcatttagtaggaactactgctctgggtagaacagagaaggagaacgaagggtataacgcccctgtttgcatgcccagctctgcaaaacatgcctgcagttcactag

SEQ ID NO: 13838 - DNA, 122 bp, Homo sapiens
  misc_feature (61)..(62): /note="This region represents a CpG dinucleotide"
  misc_feature (61)..(61): /note="Nucleotide may be methylated to form 5-methylcytosine"
aggctatctatgctgatatacatcttggaaggacatgagttcccagaggggtatgtgtgccgtcagctgaagatgcctacgtaaggtcaccttgactttgacaatgattgagatcctgctcc

SEQ ID NO: 13839 - DNA, 122 bp, Homo sapiens
  misc_feature (61)..(62): /note="This region represents a CpG dinucleotide"
  misc_feature (61)..(61): /note="Nucleotide may be methylated to form 5-methylcytosine"
gaggagggctttggctgggctacagattaaattgaaatgacagattaacgggaaaaaaaacgtatttaattatatacgtatgcacagaagtcccaccaagtatgagattcgaagaaagacgg

SEQ ID NO: 13840 - DNA, 122 bp, Homo sapiens
  misc_feature (61)..(62): /note="This region represents a CpG dinucleotide"
  misc_feature (61)..(61): /note="Nucleotide may be methylated to form 5-methylcytosine"
aaagcttcccagattaaagctccccggggccctctatctctgcacgtcttgtcaactgtacgaaggtgtggttttctacaagaatcctcctcagacagcactgcatactttctatggtatca

SEQ ID NO: 13841 - DNA, 122 bp, Homo sapiens
  misc_feature (61)..(62): /note="This region represents a CpG dinucleotide"
  misc_feature (61)..(61): /note="Nucleotide may be methylated to form 5-methylcytosine"
cagggaaaaaagaaacaatcagggaaatacttaaatcatgatacagccactggagaactacgcagtctttgatgtcgcaacagagaaatgttatttgaaaaaggaggatacaggccaggcgt

SEQ ID NO: 13842 - DNA, 122 bp, Homo sapiens
  misc_feature (61)..(62): /note="This region represents a CpG dinucleotide"
  misc_feature (61)..(61): /note="Nucleotide may be methylated to form 5-methylcytosine"
gtggagcagggttgggagtgcatcagggtgtcgggcagcagggctagcctgagccagctccgcaggtgcttctggctgaggcgaggctgaccctgggagcaccgctggaatagtggccactg

SEQ ID NO: 13843 - DNA, 122 bp, Homo sapiens
  misc_feature (61)..(62): /note="This region represents a CpG dinucleotide"
  misc_feature (61)..(61): /note="Nucleotide may be methylated to form 5-methylcytosine"
gccaaggccgtgatttcttctgccttacaagatcactgctcatcagtattgcttatggcacgatggatatgttggtcatagctctagttggggcatttctattgattattctaattattggg

SEQ ID NO: 13844 - DNA, 122 bp, Homo sapiens
  misc_feature (61)..(62): /note="This region represents a CpG dinucleotide"
  misc_feature (61)..(61): /note="Nucleotide may be methylated to form 5-methylcytosine"
taacagcgtgcattacgtattcagatactgctttgcttcatcctctctaaaatttaacaccgaggagtttaagaaatgaagataaggaactcgaattatttttaaactttggatcaatgtaa

SEQ ID NO: 13845 - DNA, 122 bp, Homo sapiens
  misc_feature (61)..(62): /note="This region represents a CpG dinucleotide"
  misc_feature (61)..(61): /note="Nucleotide may be methylated to form 5-methylcytosine"
ctctgtcataaagactgcccacaggggagcctgtgagttggaatggctgggaatcaggagcgttgtagtgattgtgctcagtccttacctaggagttatgtcaggaaaagcctggccttagc

SEQ ID NO: 13846 - DNA, 122 bp, Homo sapiens
  misc_feature (61)..(62): /note="This region represents a CpG dinucleotide"
  misc_feature (61)..(61): /note="Nucleotide may be methylated to form 5-methylcytosine"
gggggccacataatcagatgagccactttgggcagccaaagtgagtggatcaccggaggtcgggaattggaaaccagcctggccaacattgtgaaaccctgtctctactaaaaaacaaaaaa

SEQ ID NO: 13847 - DNA, 122 bp, Homo sapiens
  misc_feature (61)..(62): /note="This region represents a CpG dinucleotide"
  misc_feature (61)..(61): /note="Nucleotide may be methylated to form 5-methylcytosine"
gcaggctcacagccacggctgctgcctccagtgcggtcgttctgtggcctgagagcgtcacgtgctcctcatcctggaccatcaggggctggcgcacccatcaacagctgggtgaccctgga

SEQ ID NO: 13848 - DNA, 122 bp, Homo sapiens
  misc_feature (61)..(62): /note="This region represents a CpG dinucleotide"
  misc_feature (61)..(61): /note="Nucleotide may be methylated to form 5-methylcytosine"
tcccagaatctctcacaacttccctatgtggattaatttgtgatcacttgccagggccagcgagcaataaggcaccaattgcttctatcttaattaagttacttagggaagaaagagaaaga

SEQ ID NO: 13849 - DNA, 122 bp, Homo sapiens
  misc_feature (61)..(62): /note="This region represents a CpG dinucleotide"
  misc_feature (61)..(61): /note="Nucleotide may be methylated to form 5-methylcytosine"
gcatttattttggggacaagtactgaagtcattgctgcccgaaagtgctccaggcgggcccgcctgtctctgctttcccaggagagccctgaggtgagggaaccagacccacaggcaggcct

SEQ ID NO: 13850 - DNA, 122 bp, Homo sapiens
  misc_feature (61)..(62): /note="This region represents a CpG dinucleotide"
  misc_feature (61)..(61): /note="Nucleotide may be methylated to form 5-methylcytosine"
ttctggataacacggcagccatacatctgtagtgccaatgacaggacgtggcctcgaatccgttctgccaaagccagcttctgttcaagactgccaaactagacataatgtgtgggtaaaca

SEQ ID NO: 13851 - DNA, 122 bp, Homo sapiens
  misc_feature (61)..(62): /note="This region represents a CpG dinucleotide"
  misc_feature (61)..(61): /note="Nucleotide may be methylated to form 5-methylcytosine"
tcatatcccacaagttaatggctgagttccacaagactgcccctgacttcggatatgaatcgtgagctccaggctgtggcctgtgcttctggccaaccagccataaagtgggggttcctatg

SEQ ID NO: 13852 - DNA, 122 bp, Homo sapiens
  misc_feature (61)..(62): /note="This region represents a CpG dinucleotide"
  misc_feature (61)..(61): /note="Nucleotide may be methylated to form 5-methylcytosine"
ctggaaatccactatggagaattgagggtcagatgccatggggaacaaatgtaaaagcaacgcccaaaggtccagtgtggacgattaatttctgagaacagcaagagtcgggagggcacctt

SEQ ID NO: 13853 - DNA, 122 bp, Homo sapiens
  misc_feature (61)..(62): /note="This region represents a CpG dinucleotide"
  misc_feature (61)..(61): /note="Nucleotide may be methylated to form 5-methylcytosine"
gagatgctccagcagggccagggtacagagcctccaccgccctcccatcggccaggggcacgcaaggggcaaaggtctccagcgagagcacaaatctgacacaatttacttctgacaaggca

SEQ ID NO: 13854 - DNA, 122 bp, Homo sapiens
  misc_feature (61)..(62): /note="This region represents a CpG dinucleotide"
  misc_feature (61)..(61): /note="Nucleotide may be methylated to form 5-methylcytosine"
ggttgttgtgcaagtagaggccgttcttgaggaaggccggcagcgcggccagctcaggtacggagatgtgtcccagccggttggaggagaggtccagagtaagcaggtgggtggcgctcaga

SEQ ID NO: 13855 - DNA, 122 bp, Homo sapiens
  misc_feature (61)..(62): /note="This region represents a CpG dinucleotide"
  misc_feature (61)..(61): /note="Nucleotide may be methylated to form 5-methylcytosine"
catccacagcctccggaggatgcagtggctgcccacgtgatagcagggccaggattcacccgggttgcagcctcatccaaagctgcagggtgctgcaagtaaaatgtgtccctgcctcagaa

SEQ ID NO: 13856 - DNA, 122 bp, Homo sapiens
  misc_feature (61)..(62): /note="This region represents a CpG dinucleotide"
  misc_feature (61)..(61): /note="Nucleotide may be methylated to form 5-methylcytosine"
ctccaagtgcgcatgcgtgcagtctgcgcgggaaagagtgccgcctcagctgagggcaagcgaggagatggctgtgaggcaggcggcgacggcgggcactcccgggcccaggagagaggaag

SEQ ID NO: 13857 - DNA, 122 bp, Homo sapiens
  misc_feature (61)..(62): /note="This region represents a CpG dinucleotide"
  misc_feature (61)..(61): /note="Nucleotide may be methylated to form 5-methylcytosine"
tgtgtagcttcatttatagatgtggcaactgaatcacaggtgaagtcacatccaagggtgcgcaggtagaaaggggccaagccatcgttggtaactgctcctgctgccttggtaggtgtgtc

SEQ ID NO: 13858 - DNA, 122 bp, Homo sapiens
  misc_feature (61)..(62): /note="This region represents a CpG dinucleotide"
  misc_feature (61)..(61): /note="Nucleotide may be methylated to form 5-methylcytosine"
aagctgtaaccacagacacagaagttgggtgctctggcattgccagtggatgaaaaggggcgtggcctgaaagctgaggttcctgtatgtaaacagcttggaatttagctagctgctgctag

SEQ ID NO: 13859 - DNA, 122 bp, Homo sapiens
  misc_feature (61)..(62): /note="This region represents a CpG dinucleotide"
  misc_feature (61)..(61): /note="Nucleotide may be methylated to form 5-methylcytosine"
ccagggagcaccagacacactggagcaaaggcagttggtaggcccttgggctgtgcaaaacggtggctctgagcctggcatgttttttaatccttaggtttttccctctaaaaagggggcaa

SEQ ID NO: 13860 - DNA, 122 bp, Homo sapiens
  misc_feature (61)..(62): /note="This region represents a CpG dinucleotide"
  misc_feature (61)..(61): /note="Nucleotide may be methylated to form 5-methylcytosine"
acctagagcagaaaaaggaaatggactaaaggctctgactcacatcccaaacccaggaggcgctctaagcgcccactcagcagacatcccatcagccaggtcgggtgctcctcagtcatcac

SEQ ID NO: 13861 - DNA, 122 bp, Homo sapiens
  misc_feature (61)..(62): /note="This region represents a CpG dinucleotide"
  misc_feature (61)..(61): /note="Nucleotide may be methylated to form 5-methylcytosine"
ttaagtaatctactcaaagtgccactgttaataagcatggggccacaatttaaactcaggcgtcatgatttcagagtccactgaaatcataatgaaaggttttcagatgataaaaaacccac

SEQ ID NO: 13862 - DNA, 122 bp, Homo sapiens
  misc_feature (61)..(62): /note="This region represents a CpG dinucleotide"
  misc_feature (61)..(61): /note="Nucleotide may be methylated to form 5-methylcytosine"
atggtgaaagttcatgttgttgatctaaaggcagaatctgtagctgctcctataactgttcgtgcttacttaaatcagacagttacagaattcaaacaactgatttcaaaggtaagttttaa

SEQ ID NO: 13863 - DNA, 122 bp, Homo sapiens
  misc_feature (61)..(62): /note="This region represents a CpG dinucleotide"
  misc_feature (61)..(61): /note="Nucleotide may be methylated to form 5-methylcytosine"
gagtagagaagatgaccaggctcatagccttctgtggttcctcgcacagtgccctggggacgtggctaggtgtttacacactgccacaagcagggccaaattctgtctacacattcagtgtg

SEQ ID NO: 13864 - DNA, 122 bp, Homo sapiens
  misc_feature (61)..(62): /note="This region represents a CpG dinucleotide"
  misc_feature (61)..(61): /note="Nucleotide may be methylated to form 5-methylcytosine"
ttgttgaattcacctttaaagtaggtttacaaatgtgaatcatgcaggcaggcctactcccggaagagtgtgctagcagaccttttgaaattggtgctttttttgaatctcacatttctaga

SEQ ID NO: 13865 - DNA, 122 bp, Homo sapiens
  misc_feature (61)..(62): /note="This region represents a CpG dinucleotide"
  misc_feature (61)..(61): /note="Nucleotide may be methylated to form 5-methylcytosine"
ggtaatgtgtgttggcaccatgcctggcactagcaggtgctgtggaggtactgctgtcatcgttgccaccatcctcaggagggttgagttggcaccgagataaacatggaagataatacgca

SEQ ID NO: 13866 - DNA, 122 bp, Homo sapiens
  misc_feature (61)..(62): /note="This region represents a CpG dinucleotide"
  misc_feature (61)..(61): /note="Nucleotide may be methylated to form 5-methylcytosine"
tgaaatatttaattgccaatgtataagacagccaggggaagcagcatcctcagcaaagtacgaagtagacaaaatgttcagagaaagacaaacaaggatacaggaaattttgctgatgatag

SEQ ID NO: 13867 - DNA, 122 bp, Homo sapiens
  misc_feature (61)..(62): /note="This region represents a CpG dinucleotide"
  misc_feature (61)..(61): /note="Nucleotide may be methylated to form 5-methylcytosine"
aaagctactgacttgaacaaaagcagtactgtacctgctcctggccgccagaaacaatgacgagcgccttgataagattagatgtaattttaaatgcagcagggacaaagactccctcccat

SEQ ID NO: 13868 - DNA, 122 bp, Homo sapiens
  misc_feature (61)..(62): /note="This region represents a CpG dinucleotide"
  misc_feature (61)..(61): /note="Nucleotide may be methylated to form 5-methylcytosine"
actgtcctaatgaatgtacaattttgcagacaccagttagtctgggatcttgcctatagtcgttactcaatcaatattacttgaactgaaggacaagacagcaatctgtgagaccaaaaaaa

SEQ ID NO: 13869 - DNA, 122 bp, Homo sapiens
  misc_feature (61)..(62): /note="This region represents a CpG dinucleotide"
  misc_feature (61)..(61): /note="Nucleotide may be methylated to form 5-methylcytosine"
gcggggacttcatttcctacactcccgggttcctcccatcctgcaccgggatctcaagtgcgacaatgtctttatcacgggacctactggctctgtcaaaatcggggacctgggcctggcca

SEQ ID NO: 13870 - DNA, 122 bp, Homo sapiens
  misc_feature (61)..(62): /note="This region represents a CpG dinucleotide"
  misc_feature (61)..(61): /note="Nucleotide may be methylated to form 5-methylcytosine"
ggcagggaacagctttattttaactccgggtttgtggagagagggcaggacgaggcggagcgggtttgagggggaggacctagctggtttttcccagcatcccccaggccacttctctcacc

SEQ ID NO: 13871 - DNA, 122 bp, Homo sapiens
  misc_feature (61)..(62): /note="This region represents a CpG dinucleotide"
  misc_feature (61)..(61): /note="Nucleotide may be methylated to form 5-methylcytosine"
ggcaaatatttgcttttgttatcaaaggtactatgcttgctgggccctggaacaccagtgcgtggtcatgggaatcagagacttcaatgggtgcatatttctaaaggcttttgccctcggag

SEQ ID NO: 13872 - DNA, 122 bp, Homo sapiens
  misc_feature (61)..(62): /note="This region represents a CpG dinucleotide"
  misc_feature (61)..(61): /note="Nucleotide may be methylated to form 5-methylcytosine"
catcttttaaacatggaaggaggcatctgtgaggtcaggctagacaagtaccagtctaaacggagacaagagtgagataaggtttctgttttgtattagctcctttaagatgagtgtcctag

SEQ ID NO: 13873 - DNA, 122 bp, Homo sapiens
  misc_feature (61)..(62): /note="This region represents a CpG dinucleotide"
  misc_feature (61)..(61): /note="Nucleotide may be methylated to form 5-methylcytosine"
tctcgcggttgtggagaagcagcccatgctacacagaagaactgcagttgctaaactggccgcatacttcctctgctaggaacgaggaaggcacagggcttgcagaagggcaggttcctgtt

SEQ ID NO: 13874 - DNA, 122 bp, Homo sapiens
  misc_feature (61)..(62): /note="This region represents a CpG dinucleotide"
  misc_feature (61)..(61): /note="Nucleotide may be methylated to form 5-methylcytosine"
agagctttctggataacacggcagccatacatctgtagtgccaatgacaggacgtggcctcgaatccgttctgccaaagccagcttctgttcaagactgccaaactagacataatgtgtggg

SEQ ID NO: 13875 - DNA, 122 bp, Homo sapiens
  misc_feature (61)..(62): /note="This region represents a CpG dinucleotide"
  misc_feature (61)..(61): /note="Nucleotide may be methylated to form 5-methylcytosine"
ccacacaacttgctcaccctccccactggctcctgtcagaatcactcccttctttctcagcgctcctgggtggtgtgtagcacttgcaagtttggccttaagtactcccttcttttcccaac

SEQ ID NO: 13876 - DNA, 122 bp, Homo sapiens
  misc_feature (61)..(62): /note="This region represents a CpG dinucleotide"
  misc_feature (61)..(61): /note="Nucleotide may be methylated to form 5-methylcytosine"
gggcccgtgctacagacggagcagggcgggcttggattcgaggtctgctaccgacaggctcgatgctgttactcagctgctctaagcctcagccctttgtctgggaaaagcccgcctcacag

SEQ ID NO: 13877 - DNA, 122 bp, Homo sapiens
  misc_feature (61)..(62): /note="This region represents a CpG dinucleotide"
  misc_feature (61)..(61): /note="Nucleotide may be methylated to form 5-methylcytosine"
cccctctggactttgctcctcgagtcttatccaagagactctgggaattgtttgggtttacgcagcccaggtaactggataatcagccttcatggaggacacagaaagtcacgtctacatgc

SEQ ID NO: 13878 - DNA, 122 bp, Homo sapiens
  misc_feature (61)..(62): /note="This region represents a CpG dinucleotide"
  misc_feature (61)..(61): /note="Nucleotide may be methylated to form 5-methylcytosine"
tgggtgtagccggggctgccatgtcctttcctactggctgagtgtctgtttggtttggtccgtgcttgtgctaaaactcttcctgaactattctgtctaatccctcctgcgtatgtcaactt

SEQ ID NO: 13879 - DNA, 122 bp, Homo sapiens
  misc_feature (61)..(62): /note="This region represents a CpG dinucleotide"
  misc_feature (61)..(61): /note="Nucleotide may be methylated to form 5-methylcytosine"
gaaagcctacatcaggccagatgttccctaaacactggaaagtgggtttggggtaagtttcggacacataatccttccattagagagattaaaaggatgctttagagataagccgacttcac

SEQ ID NO: 13880 - DNA, 122 bp, Homo sapiens
  misc_feature (61)..(62): /note="This region represents a CpG dinucleotide"
  misc_feature (61)..(61): /note="Nucleotide may be methylated to form 5-methylcytosine"
cattagccaacctcttttcatcccccttctccaattatgccatttgtttagactatgaaacgtatatagaaagaatatttatctttctatatcaataaaagttggtttttactgttaagggt

SEQ ID NO: 13881 - DNA, 122 bp, Homo sapiens
  misc_feature (61)..(62): /note="This region represents a CpG dinucleotide"
  misc_feature (61)..(61): /note="Nucleotide may be methylated to form 5-methylcytosine"
aatgtcatcttgaatgtaattccatttgttcttttctacatggggaactgacacccagagcgatgaagtaacttgatttgaacaagatcacacagctagtttatggcagaacttaaaaagtt

SEQ ID NO: 13882 - DNA, 122 bp, Homo sapiens
  misc_feature (61)..(62): /note="This region represents a CpG dinucleotide"
  misc_feature (61)..(61): /note="Nucleotide may be methylated to form 5-methylcytosine"
acagatacagcaaaatgtcacagaaacaaatctttcaagagaatccgagatgctggaatgcgtatttcaccagaatttactccgagagcattaaaaaaaaaaagttaaggctcagatactga

SEQ ID NO: 13883 - DNA, 122 bp, Homo sapiens
  misc_feature (61)..(62): /note="This region represents a CpG dinucleotide"
  misc_feature (61)..(61): /note="Nucleotide may be methylated to form 5-methylcytosine"
atggcgcgatatgtctatgggttgggcactataccaagtactttccaagtactctcactccgtgctcaaaataccaccaggaaataggtattctagataaggaatctaaaactcctccaggt

SEQ ID NO: 13884 - DNA, 122 bp, Homo sapiens
  misc_feature (61)..(62): /note="This region represents a CpG dinucleotide"
  misc_feature (61)..(61): /note="Nucleotide may be methylated to form 5-methylcytosine"
gtatgatattagtcatacgtgtgcgaggcagtggtgacagcctagggaggcagttctgctcggggggatactttggtatgtaggggttacctaagctgagtctttttctcctgagtcttcag

SEQ ID NO: 13885 - DNA, 122 bp, Homo sapiens
  misc_feature (61)..(62): /note="This region represents a CpG dinucleotide"
  misc_feature (61)..(61): /note="Nucleotide may be methylated to form 5-methylcytosine"
caggtgcttgtctattccggaaaatttatatcttgcggttttgtggttaagagaaaatgacgctaccaatgaaaggtccccttttaggcccccagggctgggctagcaggccccactgtggt

SEQ ID NO: 13886 - DNA, 122 bp, Homo sapiens
  misc_feature (61)..(62): /note="This region represents a CpG dinucleotide"
  misc_feature (61)..(61): /note="Nucleotide may be methylated to form 5-methylcytosine"
ctgcaggtgcaacgggaatagctgcaaatcctaagcagctccatagcaacatgtgcagctcgtgatgatgatatcatcttgtgggacacactgcaggaaaatgtgtggaacaaggcttatgt

SEQ ID NO: 13887 - DNA, 122 bp, Homo sapiens
  misc_feature (61)..(62): /note="This region represents a CpG dinucleotide"
  misc_feature (61)..(61): /note="Nucleotide may be methylated to form 5-methylcytosine"
cagagcctgccaggggaagtcacactctcatgaaagagctagccagcaagaaactagaaccgtggacatgtaagataggcacatgcgtggcgagtccgaagcgggaagcaagcagagggtgt

SEQ ID NO: 13888 - DNA, 122 bp, Homo sapiens
  misc_feature (61)..(62): /note="This region represents a CpG dinucleotide"
  misc_feature (61)..(61): /note="Nucleotide may be methylated to form 5-methylcytosine"
gcagatttcatgctgtttcttctttttcttcaaggagtccacatactctagatctacccacgtcaccacattgcctgacacgttggggctgcggctttgaactgccgttttgtttgcatttc

SEQ ID NO: 13889 - DNA, 122 bp, Homo sapiens
  misc_feature (61)..(62): /note="This region represents a CpG dinucleotide"
  misc_feature (61)..(61): /note="Nucleotide may be methylated to form 5-methylcytosine"
attgaggtctctacttcctttgagcttactgttagtggaggatagagataataataaacgcgtttcaatgagagagcatcccatggtgagatgaccattgctatgaagcatataacacaggg

SEQ ID NO: 13890 - DNA, 122 bp, Homo sapiens
  misc_feature (61)..(62): /note="This region represents a CpG dinucleotide"
  misc_feature (61)..(61): /note="Nucleotide may be methylated to form 5-methylcytosine"
aggtaagccatcatcacatacatcatgaacaaaggcaaaacactgggttgctctgtaggacgagtgtgactgtcatgataaaggaacagaaagcaaaaagaggacttagtagacttccggga

SEQ ID NO: 13891 - DNA, 122 bp, Homo sapiens
  misc_feature (61)..(62): /note="This region represents a CpG dinucleotide"
  misc_feature (61)..(61): /note="Nucleotide may be methylated to form 5-methylcytosine"
atatctaaacaccgcatggttaatcctgaacatctacttcctgagcgattcaaccagttacgctctgagctccacaatcaataaaatgtactggagtcttgaatccattgaagtgctttaaa

SEQ ID NO: 13892 - DNA, 122 bp, Homo sapiens
  misc_feature (61)..(62): /note="This region represents a CpG dinucleotide"
  misc_feature (61)..(61): /note="Nucleotide may be methylated to form 5-methylcytosine"
cacccgctgcgggtgcctgaacgaaccgggcttcctcagtgacaacgatcttttcagaaacgccgagcccaggcccgtcggcagcagaaagtgccgcgtgtctgcccccgagagcggagagc

SEQ ID NO: 13893 - DNA, 122 bp, Homo sapiens
  misc_feature (61)..(62): /note="This region represents a CpG dinucleotide"
  misc_feature (61)..(61): /note="Nucleotide may be methylated to form 5-methylcytosine"
cacagtgcattatgtcagaatagaggaagcagttcagcccgtaaatctgtgccaccggcacgcagggtgttgtgttgtctccaatgtgccttgtcaacaccacagggctaatagcagtgtca

SEQ ID NO: 13894 - DNA, 122 bp, Homo sapiens
  misc_feature (61)..(62): /note="This region represents a CpG dinucleotide"
  misc_feature (61)..(61): /note="Nucleotide may be methylated to form 5-methylcytosine"
gctgctcacctcctgctgtgtggcctggttcctaacaggccagggagcagaactggtctgcggccctgggagttggggacccctggtctaaattatatgagtctatgaagttttagactggt

SEQ ID NO: 13895 - DNA, 122 bp, Homo sapiens
  misc_feature (61)..(62): /note="This region represents a CpG dinucleotide"
  misc_feature (61)..(61): /note="Nucleotide may be methylated to form 5-methylcytosine"
taaggaagtttcccttctgttttgcaatttcccttaatgaatcaacgttctcaaatgaagcgcatttaatcttaggaagacagcactcttctcaatgctgaatgagttttgcagataaatat

SEQ ID NO: 13896 - DNA, 122 bp, Homo sapiens
  misc_feature (61)..(62): /note="This region represents a CpG dinucleotide"
  misc_feature (61)..(61): /note="Nucleotide may be methylated to form 5-methylcytosine"
tgacttcacgcctgttactacagctggagggaaaccgatttcagaatctatctgatatgtcggatttctttgtggcatccacttcatcgctcagcagccagccatgatgtcataagcccatc

SEQ ID NO: 13897 - DNA, 122 bp, Homo sapiens
  misc_feature (61)..(62): /note="This region represents a CpG dinucleotide"
  misc_feature (61)..(61): /note="Nucleotide may be methylated to form 5-methylcytosine"
gttgtggactgactgggattttctgcactagcttttaatctaattgttacttggttacatcgattgtttcagctctttcataagcagcttaaggaaccacttccccaaataatcttgggtct

SEQ ID NO: 13898 - DNA, 122 bp, Homo sapiens
  misc_feature (61)..(62): /note="This region represents a CpG dinucleotide"
  misc_feature (61)..(61): /note="Nucleotide may be methylated to form 5-methylcytosine"
aaccgcagagctgctccctcaggatgcctgggataacttccatagggcagatgctgctgacgtgctatttccaaagggttcctggcataggactgtgaaaggtttcctggagcctccctaga

SEQ ID NO: 13899 - DNA, 122 bp, Homo sapiens
  misc_feature (61)..(62): /note="This region represents a CpG dinucleotide"
  misc_feature (61)..(61): /note="Nucleotide may be methylated to form 5-methylcytosine"
agtctacaggaggaagtgagagaaagtaagagcaatactcatgggaagtgttcacatgctcgtgaaaacagcagcccttggattcaagagggaaacatttatttgccctctggacataaagt

SEQ ID NO: 13900 - DNA, 122 bp, Homo sapiens
  misc_feature (61)..(62): /note="This region represents a CpG dinucleotide"
  misc_feature (61)..(61): /note="Nucleotide may be methylated to form 5-methylcytosine"
acagctcccttgggccagagcctgcagtggaagcctcacattcctaataggaggggcatgcgtcagaaaggagaatttagagtgtcagggttgggatgggtagaggagctggagacccagga

SEQ ID NO: 13901 - DNA, 122 bp, Homo sapiens
  misc_feature (61)..(62): /note="This region represents a CpG dinucleotide"
  misc_feature (61)..(61): /note="Nucleotide may be methylated to form 5-methylcytosine"
gtcagagcctgtgttcttaaccaccaggaaacacatggctttagacttttaccacagacacgtgcgcccaatatgcaaaccagccaacccacaaaaactgctttgcatttttaagcagttgc

SEQ ID NO: 13902 - DNA, 122 bp, Homo sapiens
  misc_feature (61)..(62): /note="This region represents a CpG dinucleotide"
  misc_feature (61)..(61): /note="Nucleotide may be methylated to form 5-methylcytosine"
tatacagatttagagcctaggaacagttggctataccatatatcctaggggtgtagcaggcgctactatctagttgtgtgtgagtagtcactctgatgtttgcacaatgatgaaataggcta

SEQ ID NO: 13903 - DNA, 122 bp, Homo sapiens
  misc_feature (61)..(62): /note="This region represents a CpG dinucleotide"
  misc_feature (61)..(61): /note="Nucleotide may be methylated to form 5-methylcytosine"
attattgctctctgtttagaaatgctatgttgatgtattacacctcagaacaactatgaacgtgccatctgcagcaggaaggtttattagactacaaatcaggatacagatgttggagggaa

SEQ ID NO: 13904 - DNA, 122 bp, Homo sapiens
  misc_feature (61)..(62): /note="This region represents a CpG dinucleotide"
  misc_feature (61)..(61): /note="Nucleotide may be methylated to form 5-methylcytosine"
ggcttttgttgtaaacgtctagaagttcagttaaattacaagatctaccagatctaccggcgggcagaattattactttgaagttactgaagttatgcgtcctgctggaagaccttgtaatt

SEQ ID NO: 13905 - DNA, 122 bp, Homo sapiens
  misc_feature (61)..(62): /note="This region represents a CpG dinucleotide"
  misc_feature (61)..(61): /note="Nucleotide may be methylated to form 5-methylcytosine"
tataaagaataacattaataaagttgacgcaatcaactaaaaataaaattaaatagtgaacgagagtgaagagataaaaagaaacttattaatttattaattgcttaaaataggaaatttac

SEQ ID NO: 13906 - DNA, 122 bp, Homo sapiens
  misc_feature (61)..(62): /note="This region represents a CpG dinucleotide"
  misc_feature (61)..(61): /note="Nucleotide may be methylated to form 5-methylcytosine"
tttcgctgcatatttttcttactctttgttccctgactccagtgatttgataagaggaatcgacagagatccaaagaaaagcaagagacctcattaaggttcacttgaagcatgttctccca

SEQ ID NO: 13907 - DNA, 122 bp, Homo sapiens
  misc_feature (61)..(62): /note="This region represents a CpG dinucleotide"
  misc_feature (61)..(61): /note="Nucleotide may be methylated to form 5-methylcytosine"
ctccccctcaaaagcattttctataactgacttggaaatcatttgggcaaccattattcccgtcactttccaagatagtctcttaataaaaacttttaaatttaaaaaattttaggcaagca

SEQ ID NO: 13908 - DNA, 122 bp, Homo sapiens
  misc_feature (61)..(62): /note="This region represents a CpG dinucleotide"
  misc_feature (61)..(61): /note="Nucleotide may be methylated to form 5-methylcytosine"
gcttctaggggggagcccccacgctaaaggtaaagacaaattgcataaaatgtctggacacgatgcgaacaggtgagaatagcgtaggtacaggccgccagggaggaagaaacttggaactt

SEQ ID NO: 13909 - DNA, 122 bp, Homo sapiens
  misc_feature (61)..(62): /note="This region represents a CpG dinucleotide"
  misc_feature (61)..(61): /note="Nucleotide may be methylated to form 5-methylcytosine"
gcaaccctaaggcaaatttgcatcctccctatagtatcacaggcaatgcacttttgaaagcgccacctcctggctggaggtcaaccaacacaaaacaaaaatataaccaaggacccaaggac

SEQ ID NO: 13910 - DNA, 122 bp, Homo sapiens
  misc_feature (61)..(62): /note="This region represents a CpG dinucleotide"
  misc_feature (61)..(61): /note="Nucleotide may be methylated to form 5-methylcytosine"
atgggcatgttcagacacatccattggatttttttttttttttttttagtctaagaaaggcgaagtgagcccatagtcagtttctaaaagggactatcacttaagaaggataagtagcttta

SEQ ID NO: 13911 - DNA, 122 bp, Homo sapiens
  misc_feature (61)..(62): /note="This region represents a CpG dinucleotide"
  misc_feature (61)..(61): /note="Nucleotide may be methylated to form 5-methylcytosine"
aaagccagttactaggcttgctaagctctgcttaaagttacagggccttgcctttggggccgcaggctgcctcatgcacgcctctcttgttgtggatgctgggctcttccatgacaacatag

SEQ ID NO: 13912 - DNA, 122 bp, Homo sapiens
  misc_feature (61)..(62): /note="This region represents a CpG dinucleotide"
  misc_feature (61)..(61): /note="Nucleotide may be methylated to form 5-methylcytosine"
tagccagggtggaacaccactgttgaggagacaccccagagacaccgaactggttcatcgcggccacttatgaatcagctggctctgcctgtcatgccgcgaaccagtcaagaaatacctgc

SEQ ID NO: 13913 - DNA, 122 bp, Homo sapiens
  misc_feature (61)..(62): /note="This region represents a CpG dinucleotide"
  misc_feature (61)..(61): /note="Nucleotide may be methylated to form 5-methylcytosine"
tgggggctgtgtccgtctgcctgcctgcccccctgcactgggcccttctgactttaattacgtcctccttggctaaattcacaggtggctttccttggaggaggcgtttacctctccccaag

SEQ ID NO: 13914 - DNA, 122 bp, Homo sapiens
  misc_feature (61)..(62): /note="This region represents a CpG dinucleotide"
  misc_feature (61)..(61): /note="Nucleotide may be methylated to form 5-methylcytosine"
tgaggctcagcttccggaaacaatgtcgaaaccacactgcaagcctggcctgtgaggacacgcctgccagggccactgggcaccagactccacagttagcaccactgtctcttttgggcccc

SEQ ID NO: 13915 - DNA, 122 bp, Homo sapiens
  misc_feature (61)..(62): /note="This region represents a CpG dinucleotide"
  misc_feature (61)..(61): /note="Nucleotide may be methylated to form 5-methylcytosine"
gcccttgtctaccacagttttccttgaaaattttactacattacatttctgacaaagagacgccaatagaggaggagctattaagaagctatcaccgggaaaaatgatgacaatgcacaatt

SEQ ID NO: 13916 - DNA, 122 bp, Homo sapiens
  misc_feature (61)..(62): /note="This region represents a CpG dinucleotide"
  misc_feature (61)..(61): /note="Nucleotide may be methylated to form 5-methylcytosine"
tcattgcctgcatcacaacaggcgtcgtccggctgatagcttatcgcaggctctgaggggcgggacccaactgattgtcaaaggcggcagattgtagtttttgttttggccggaaaggctta

SEQ ID NO: 13917 - DNA, 122 bp, Homo sapiens
  misc_feature (61)..(62): /note="This region represents a CpG dinucleotide"
  misc_feature (61)..(61): /note="Nucleotide may be methylated to form 5-methylcytosine"
aactgacagatatttaagaaactgtttgaagaaggtttaaacattcaaaagcaaagattacgagacctaagaaactatgccaaagaaaagcgagatgaacaaaggagacgccaccaggatga

SEQ ID NO: 13918 - DNA, 122 bp, Homo sapiens
  misc_feature (61)..(62): /note="This region represents a CpG dinucleotide"
  misc_feature (61)..(61): /note="Nucleotide may be methylated to form 5-methylcytosine"
gtttaaatcattcaactaattaaatgatgggattattcctctgcctacggtgacatcattcgcggtaattagtactctatttggactgtggcagtaagattcctgatatcaacaccaacctg

SEQ ID NO: 13919 - DNA, 122 bp, Homo sapiens
  misc_feature (61)..(62): /note="This region represents a CpG dinucleotide"
  misc_feature (61)..(61): /note="Nucleotide may be methylated to form 5-methylcytosine"
tcctccctaccccacttactcaggacacaccaggagggtgcagaaggactggctgcccaacggaaggagattttatcactgatattgcttgaacttactggtgtgtggcaattaaaatggtt

SEQ ID NO: 13920 - DNA, 122 bp, Homo sapiens
  misc_feature (61)..(62): /note="This region represents a CpG dinucleotide"
  misc_feature (61)..(61): /note="Nucleotide may be methylated to form 5-methylcytosine"
gcctcgtcctggggccaccagtggtgtcggctttgctcagtgtgtgattctccgagtggccgcctgggtttgagcaaccctccctccccgtcccgtggtgatcctgaatgactgccctggcc

SEQ ID NO: 13921 - DNA, 122 bp, Homo sapiens
  misc_feature (61)..(62): /note="This region represents a CpG dinucleotide"
  misc_feature (61)..(61): /note="Nucleotide may be methylated to form 5-methylcytosine"
tcagattcagattcacatatgcacaggaagcagtctatctgggagacaggaggaagcaagcgtttccacactgcattatgagtaactctgcagctgctgtcaattatctggagagaaacaca

SEQ ID NO: 13922 - DNA, 122 bp, Homo sapiens
  misc_feature (61)..(62): /note="This region represents a CpG dinucleotide"
  misc_feature (61)..(61): /note="Nucleotide may be methylated to form 5-methylcytosine"
gactgtggcttagtgtggctcatgaggggatgcacagagcattatcagtatggagacacacgcttccagctcatgatgagctgagtgcagagcaggagcagtgacaatggtaaggccttgaa

SEQ ID NO: 13923 - DNA, 122 bp, Homo sapiens
  misc_feature (61)..(62): /note="This region represents a CpG dinucleotide"
  misc_feature (61)..(61): /note="Nucleotide may be methylated to form 5-methylcytosine"
ccagtgaggtaggtcctattattatcccatttttacacctgaagaaactgcagctgagagcggttaagtaatttgcctaagtcacacttcaaaccccatatttaaatttgattactccagga

SEQ ID NO: 13924 - DNA, 122 bp, Homo sapiens
  misc_feature (61)..(62): /note="This region represents a CpG dinucleotide"
  misc_feature (61)..(61): /note="Nucleotide may be methylated to form 5-methylcytosine"
tgtcactctctactgggtctctatgtattttcattcattgtcatggttacatctattatccgtacatgcagggttctaaaacttaagagggattccagaggttcctaaaacaataaacaaaa

SEQ ID NO: 13925 - DNA, 122 bp, Homo sapiens
  misc_feature (61)..(62): /note="This region represents a CpG dinucleotide"
  misc_feature (61)..(61): /note="Nucleotide may be methylated to form 5-methylcytosine"
cacttcctgcatcatgttacccttccatcagatatctaccttctacctgtgcacctgtgacgtaatgtgctgacacatcgacaaaccacaagagagaaaataagacctggcaaatggagcat

SEQ ID NO: 13926 - DNA, 122 bp, Homo sapiens
  misc_feature (61)..(62): /note="This region represents a CpG dinucleotide"
  misc_feature (61)..(61): /note="Nucleotide may be methylated to form 5-methylcytosine"
tttttgaggggtctagggagtagtgataggtcctaggaacaagctctacacgcgagcctgcgtggtgctccagagcatgctcatttgctaggtttttgcacaggagctgtgcaatagcccac

SEQ ID NO: 13927 - DNA, 122 bp, Homo sapiens
  misc_feature (61)..(62): /note="This region represents a CpG dinucleotide"
  misc_feature (61)..(61): /note="Nucleotide may be methylated to form 5-methylcytosine"
catggtaggtagttactattcgataccacaaaaatgtctcttgcccttaaaaccagaacacgaggctcaccagacagatgactgaatggagtatggaaaatctttatttctgtttttcttag

SEQ ID NO: 13928 - DNA, 122 bp, Homo sapiens
  misc_feature (61)..(62): /note="This region represents a CpG dinucleotide"
  misc_feature (61)..(61): /note="Nucleotide may be methylated to form 5-methylcytosine"
aaaaaaaaagacagaaactgtatgtagctcaacatgcatacaatatttgctgtctggctccgtattgaaaaacgtttgccatcccctggtttatataattaagaaccacttactgagttagt

SEQ ID NO: 13929 - DNA, 122 bp, Homo sapiens
  misc_feature (61)..(62): /note="This region represents a CpG dinucleotide"
  misc_feature (61)..(61): /note="Nucleotide may be methylated to form 5-methylcytosine"
tcagacttgctgggatggggcctgggaagctgcctgttttgcaaacgttccaggaaatgacgttcactaaaatttaaaatgtactacattcaggaaatcattctcctcacaggcagccagca

SEQ ID NO: 13930 - DNA, 122 bp, Homo sapiens
  misc_feature (61)..(62): /note="This region represents a CpG dinucleotide"
  misc_feature (61)..(61): /note="Nucleotide may be methylated to form 5-methylcytosine"
aaagccattgcggccccagaaggtaaatggctttcgcaggaacacaggtctcctgactcacggcctaaccttcctttcccccacaccaaagctcgcgcggcaccagctagagtgaaggtcaa

SEQ ID NO: 13931 - DNA, 122 bp, Homo sapiens
  misc_feature (61)..(62): /note="This region represents a CpG dinucleotide"
  misc_feature (61)..(61): /note="Nucleotide may be methylated to form 5-methylcytosine"
agaactaaaatttcactacagaggacattttactccaaactgttgaagacagtgctttctcgttcacagaagaggcttttctagcggcacgaaagaatttggaagcggcagtgttacggtaa

SEQ ID NO: 13932 - DNA, 122 bp, Homo sapiens
  misc_feature (61)..(62): /note="This region represents a CpG dinucleotide"
  misc_feature (61)..(61): /note="Nucleotide may be methylated to form 5-methylcytosine"
cccaataaatcaaagaagggctgagaatcctgaccaccacccccagtaaggatcaagttccgctttctggaagaggcctagaggtggattgcaggacttcccagtttaaccaggtgacaaag

SEQ ID NO: 13933 - DNA, 122 bp, Homo sapiens
  misc_feature (61)..(62): /note="This region represents a CpG dinucleotide"
  misc_feature (61)..(61): /note="Nucleotide may be methylated to form 5-methylcytosine"
tttatatcatgttcttcacactgtcatcttgagagcagtcccctcattcttcaaagacttcgtcatctaaagtgaatttgttcagactttcctctgtaagttttcagaagttattgattttt

SEQ ID NO: 13934 - DNA, 122 bp, Homo sapiens
  misc_feature (61)..(62): /note="This region represents a CpG dinucleotide"
  misc_feature (61)..(61): /note="Nucleotide may be methylated to form 5-methylcytosine"
taccgtaactgtgatacacaatgtgaaaacacctaggatagtgcctgctgtgcagaaacacgttaacaagcagtagcagcgttagtaagtaacagtgtaaagtgaactgcagaaatgcaccc

SEQ ID NO: 13935 - DNA, 122 bp, Homo sapiens
  misc_feature (61)..(62): /note="This region represents a CpG dinucleotide"
  misc_feature (61)..(61): /note="Nucleotide may be methylated to form 5-methylcytosine"
acgttattgtgagaatccaatgaggaaacacacgtaatgccttcctgcttcattttcctacggcatcttcaacgcctggaacagcctctggcagacagtggatgttcaataaatacccactg

SEQ ID NO: 13936 - DNA, 122 bp, Homo sapiens
  misc_feature (61)..(62): /note="This region represents a CpG dinucleotide"
  misc_feature (61)..(61): /note="Nucleotide may be methylated to form 5-methylcytosine"
ggaaattttctgagtcagagtatttgttaggttaattaggtgactcattatgggaccttacgcagattctgaatgggagttggtcactgaaaacacccaccatatgattgtgactagaggac

SEQ ID NO: 13937 - DNA, 122 bp, Homo sapiens
  misc_feature (61)..(62): /note="This region represents a CpG dinucleotide"
  misc_feature (61)..(61): /note="Nucleotide may be methylated to form 5-methylcytosine"
tgtggcaagttcagcttccttctcactttcagcttcaaatggacttttggactacctgggcgttcctttatttgtctctttctgatttcctatgtcaaagataaacaaggtggaaggacaga

SEQ ID NO: 13938 - DNA, 122 bp, Homo sapiens
  misc_feature (61)..(62): /note="This region represents a CpG dinucleotide"
  misc_feature (61)..(61): /note="Nucleotide may be methylated to form 5-methylcytosine"
tgaaccagcttgtcaagatgagcactgagttaaaaatcctctctgccgcttctgtgggctcgcaagtggatctgactgtgacaggctgaagaacagcagtccctggccacctcccccaatta

SEQ ID NO: 13939 - DNA, 122 bp, Homo sapiens
  misc_feature (61)..(62): /note="This region represents a CpG dinucleotide"
  misc_feature (61)..(61): /note="Nucleotide may be methylated to form 5-methylcytosine"
ttaaaattttgcagctggttattctgggtccacacttcccttaagagttgcgatacttaccgtgaacggtccctaacttcgttcttgagctagtaacatcacgaactctgctagaaagaaga

SEQ ID NO: 13940 - DNA, 122 bp, Homo sapiens
  misc_feature (61)..(62): /note="This region represents a CpG dinucleotide"
  misc_feature (61)..(61): /note="Nucleotide may be methylated to form 5-methylcytosine"
aggactctccataggttatggccagtcttagctgtgcctgcatccgggcctgcctgtgggcgtgggtcacacgggataatgttacctgcgtgctgtgtggttgcaggaagcgggttctggag

SEQ ID NO: 13941 - DNA, 122 bp, Homo sapiens
  misc_feature (61)..(62): /note="This region represents a CpG dinucleotide"
  misc_feature (61)..(61): /note="Nucleotide may be methylated to form 5-methylcytosine"
accaagcatggagcccttctgagcatggggtgctgagcaacctcacaggtcaaacatccacgaacctggccctgtctggtaaccacagtgaaccatcgcaagatacagcactatgtgcccag

SEQ ID NO: 13942 - DNA, 122 bp, Homo sapiens
  misc_feature (61)..(62): /note="This region represents a CpG dinucleotide"
  misc_feature (61)..(61): /note="Nucleotide may be methylated to form 5-methylcytosine"
tattatgtgagagagaatacacttacatcttgtttaagccactgttttttaaaaagtgggcgagaagggaaattctagacaaacaggcaggcatgagcaaaggcagaaaactggaaaatgtg

SEQ ID NO: 13943 - DNA, 122 bp, Homo sapiens
  misc_feature (61)..(62): /note="This region represents a CpG dinucleotide"
  misc_feature (61)..(61): /note="Nucleotide may be methylated to form 5-methylcytosine"
tacacagctgggctgggctggcccaggactccgcgcttccccaagaaagccaggcagcagcggctctgacaacaaagacacccacgtggagctgaaacgaagcacttcagacagccagaagt

SEQ ID NO: 13944 - DNA, 122 bp, Homo sapiens
  misc_feature (61)..(62): /note="This region represents a CpG dinucleotide"
  misc_feature (61)..(61): /note="Nucleotide may be methylated to form 5-methylcytosine"
gcagtgtacgagggttctggttcctccatgtccttgtcagtgtattttattattattttgcgtgtggatgtctagttgccttacaccacttgttgaaatacaaaggcatttttaggagaatt

SEQ ID NO: 13945 - DNA, 122 bp, Homo sapiens
  misc_feature (61)..(62): /note="This region represents a CpG dinucleotide"
  misc_feature (61)..(61): /note="Nucleotide may be methylated to form 5-methylcytosine"
aagaggtgactagttaggaagtcattacaataatccagccagaaaaagatagtcacttagcgtggagtagtagtagggatgacagagaacatagtcaaaatttttgtcaaactttctcgtac

SEQ ID NO: 13946 - DNA, 122 bp, Homo sapiens
  misc_feature (61)..(62): /note="This region represents a CpG dinucleotide"
  misc_feature (61)..(61): /note="Nucleotide may be methylated to form 5-methylcytosine"
tggagactgacgataagtggctgttcaagggttgtaggaaaagggagacattctcccccgcgagtttagtaaagattctattcttaggctctagagagaaggtgaaaggaagttgaggatgc

SEQ ID NO: 13947 - DNA, 122 bp, Homo sapiens
  misc_feature (61)..(62): /note="This region represents a CpG dinucleotide"
  misc_feature (61)..(61): /note="Nucleotide may be methylated to form 5-methylcytosine"
taaaacagctaatatttatcaggtatgtattgtaggtcagatactctgtggcatgctttacgtgcagttttattttactaaagcagaaactaaagctcagggagataaatttccccaaggtc

SEQ ID NO: 13948 - DNA, 122 bp, Homo sapiens
  misc_feature (61)..(62): /note="This region represents a CpG dinucleotide"
  misc_feature (61)..(61): /note="Nucleotide may be methylated to form 5-methylcytosine"
gataatcagagagtggagtgagtgcattttgcaagctacaaggtgccttcccaagggaagcgtgaagtcacctgggtgaaggtattgggaagtgaggccctgtcacagatcctgccccacaa

SEQ ID NO: 13949 - DNA, 122 bp, Homo sapiens
  misc_feature (61)..(62): /note="This region represents a CpG dinucleotide"
  misc_feature (61)..(61): /note="Nucleotide may be methylated to form 5-methylcytosine"
tggaaaactgaatttcagctctctactgtgttatctagaatatctctgtctcattttttccgtctataaaattacagcgtatttagtctgatctgtctacttcacaggagtttcagaatagc

SEQ ID NO: 13950 - DNA, 122 bp, Homo sapiens
  misc_feature (61)..(62): /note="This region represents a CpG dinucleotide"
  misc_feature (61)..(61): /note="Nucleotide may be methylated to form 5-methylcytosine"
tcattactaacaggacatgattcccagcctctgccatcagttgtttagcaattataataacgacattaagcttccttcaatattctctactaaatgcctgctttcagtaagtcattgctcta

SEQ ID NO: 13951 - DNA, 122 bp, Homo sapiens
  misc_feature (61)..(62): /note="This region represents a CpG dinucleotide"
  misc_feature (61)..(61): /note="Nucleotide may be methylated to form 5-methylcytosine"
acatgtctaattcagggcccttcctgtgtcttagcagtgacttaactaaaataaacatgtcgaatgtaaatctgggaagtaccactgggctttcaattgtcatattgcacagtagccattta

SEQ ID NO: 13952 - DNA, 122 bp, Homo sapiens
  misc_feature (61)..(62): /note="This region represents a CpG dinucleotide"
  misc_feature (61)..(61): /note="Nucleotide may be methylated to form 5-methylcytosine"
agagaacgctctagtttctcttcctcttttgttttcttcttcctcttcttttaaggacaccgatgctattggattaggaccccacccttatgaccccatgtaaccttactttcctcttggta

SEQ ID NO: 13953 - DNA, 122 bp, Homo sapiens
  misc_feature (61)..(62): /note="This region represents a CpG dinucleotide"
  misc_feature (61)..(61): /note="Nucleotide may be methylated to form 5-methylcytosine"
tcatttaacatggtacatgtactaattctaaactttacaacaatcctgtgaggtaagtaacgaattgtcattctcattttacagtggaggataaagaggctgaaggagtttaagtcatttgc

SEQ ID NO: 13954 - DNA, 122 bp, Homo sapiens
  misc_feature (61)..(62): /note="This region represents a CpG dinucleotide"
  misc_feature (61)..(61): /note="Nucleotide may be methylated to form 5-methylcytosine"
tgagcctcacaagtacctgcatgttgctccactccttttcccagaccacctggagtcctccgcaatccagcaatgaatgggctagaacctggtcctctggcaccctgcatagggagatggct

SEQ ID NO: 13955 - DNA, 122 bp, Homo sapiens
  misc_feature (61)..(62): /note="This region represents a CpG dinucleotide"
  misc_feature (61)..(61): /note="Nucleotide may be methylated to form 5-methylcytosine"
tgtaaatagtaccatggtagcttgtcttcaaagatgacccccctgcatagaatcatgtgtcgtcacacaaatgcacccttgcataaccctttctttttgaatccgactgaccctgaaactca

SEQ ID NO: 13956 - DNA, 122 bp, Homo sapiens
  misc_feature (61)..(62): /note="This region represents a CpG dinucleotide"
  misc_feature (61)..(61): /note="Nucleotide may be methylated to form 5-methylcytosine"
gggcaaggtggtgacggttccaggtagaaccctcatgccagattctagataagataatcccgtcactctgggttcaggagggaggtactacgattagcccgattttgagtgacttacacaag

SEQ ID NO: 13957 - DNA, 122 bp, Homo sapiens
  misc_feature (61)..(62): /note="This region represents a CpG dinucleotide"
  misc_feature (61)..(61): /note="Nucleotide may be methylated to form 5-methylcytosine"
agtttcaaggggtggggttctgtcagactgtgatactgccttccttacagacagctgaaacggaaagttaagttgccaggagacctgcagctccctgggagcttgttgtatctctgtgtttg

SEQ ID NO: 13958 - DNA, 122 bp, Homo sapiens
  misc_feature (61)..(62): /note="This region represents a CpG dinucleotide"
  misc_feature (61)..(61): /note="Nucleotide may be methylated to form 5-methylcytosine"
gagttggagttggaacttgcagtattaaaactctttctgtttcacttaacatgaagccaacgtatactggcctaagcaaagaagagatttatataacagaaacagaaaagttcacagggctt

SEQ ID NO: 13959 - DNA, 122 bp, Homo sapiens
  misc_feature (61)..(62): /note="This region represents a CpG dinucleotide"
  misc_feature (61)..(61): /note="Nucleotide may be methylated to form 5-methylcytosine"
tcattgttttggggttgttgttagagttccaactattttctattgcttatgctggagcaacgtgacattttgttatcaacagagcaagcccagtttgggcctttccctcagttacaacatca

SEQ ID NO: 13960 - DNA, 122 bp, Homo sapiens
  misc_feature (61)..(62): /note="This region represents a CpG dinucleotide"
  misc_feature (61)..(61): /note="Nucleotide may be methylated to form 5-methylcytosine"
taggtttggatttcttgatctgacctgtaaagatagagaacaattcagaaaatcagaacacgaagtcagaagaggctagccctgggtcaaaccatgaaaaggctcaaaatcagccccctccc

SEQ ID NO: 13961 - DNA, 122 bp, Homo sapiens
  misc_feature (61)..(62): /note="This region represents a CpG dinucleotide"
  misc_feature (61)..(61): /note="Nucleotide may be methylated to form 5-methylcytosine"
aaaaaaaaaaaggcctgaggcgtaaaccactttgtgaagcttgaacttcttccttgaacacgctttctgggaagtagctggctgttagtatctgaccaaagtgtgcctctcattgactgaac

SEQ ID NO: 13962 - DNA, 122 bp, Homo sapiens
  misc_feature (61)..(62): /note="This region represents a CpG dinucleotide"
  misc_feature (61)..(61): /note="Nucleotide may be methylated to form 5-methylcytosine"
taccatgaatccctctaatcttctcctgagttcctcaaaccgctgtcatactgattaatacgtaacctactgacactgaaaaggacactgctttgtttctgaatcatgaagttttgctgatt

SEQ ID NO: 13963 - DNA, 122 bp, Homo sapiens
  misc_feature (61)..(62): /note="This region represents a CpG dinucleotide"
  misc_feature (61)..(61): /note="Nucleotide may be methylated to form 5-methylcytosine"
gtgaatgagtcagcagaaccaacaaaaatgatcagatttgaggccaggcgtgttggctcacgcctgtaatcccaacactttgggaggccgaggcagctggatcacttgaggtcaggggttcg

SEQ ID NO: 13964 - DNA, 122 bp, Homo sapiens
  misc_feature (61)..(62): /note="This region represents a CpG dinucleotide"
  misc_feature (61)..(61): /note="Nucleotide may be methylated to form 5-methylcytosine"
ggcatgctggtggaaattgggggaggaatgggtcaaattaatctccattcagcccccactcggtctttccaatgcctgctcagcaataagtgactcactgatggcttctgtgatgccacagc

SEQ ID NO: 13965 - DNA, 122 bp, Homo sapiens
  misc_feature (61)..(62): /note="This region represents a CpG dinucleotide"
  misc_feature (61)..(61): /note="Nucleotide may be methylated to form 5-methylcytosine"
gactgacttccctgaggagagactgccttctaatggcgtgaccatctgctccacttccttcgtgtttggtcagtgaatcacggcaagtcacaggccacctgagcattctactcacttctttt

SEQ ID NO: 13966 - DNA, 122 bp, Homo sapiens
  misc_feature (61)..(62): /note="This region represents a CpG dinucleotide"
  misc_feature (61)..(61): /note="Nucleotide may be methylated to form 5-methylcytosine"
agcctgtccctgcattgagagcaaatacgctccctgcaagcaaaaactctacttaaaaggcgaaggacttcagcttagagaatttgaaataactggattgtaactgggtttgcacaaggtta

SEQ ID NO: 13967 - DNA, 122 bp, Homo sapiens
  misc_feature (61)..(62): /note="This region represents a CpG dinucleotide"
  misc_feature (61)..(61): /note="Nucleotide may be methylated to form 5-methylcytosine"
tgcgaaaccttttacacacattatttcattaaatctttttctttgagacagaatctctgtcgcctaggctggaatgcagtggtgcaatctcagcttgctgcaatttccgcctgctaggttca

SEQ ID NO: 13968 - DNA, 122 bp, Homo sapiens
  misc_feature (61)..(62): /note="This region represents a CpG dinucleotide"
  misc_feature (61)..(61): /note="Nucleotide may be methylated to form 5-methylcytosine"
ttgatgttgaaattactttaaagacctgttgattatgtggtattagggccattgtgacctcgctgtagctaagatcagtccactgcagcaggagtttcaagaacagcagcacaaaaataatg

SEQ ID NO: 13969 - DNA, 122 bp, Homo sapiens
  misc_feature (61)..(62): /note="This region represents a CpG dinucleotide"
  misc_feature (61)..(61): /note="Nucleotide may be methylated to form 5-methylcytosine"
agtgataaaggaaacatttcctcagttctacattagcataggctttaaccttgacacacacgtaactgaactgttatttgaaagtcacatttgcaatgagatcatcactcatgaccacatct

SEQ ID NO: 13970 - DNA, 122 bp, Homo sapiens
  misc_feature (61)..(62): /note="This region represents a CpG dinucleotide"
  misc_feature (61)..(61): /note="Nucleotide may be methylated to form 5-methylcytosine"
agtgcactttccggtccctccaggtcagcaggctgcccagcagcggcgaggctgcagccacgcccaccatgtccatgaccgtggtcaccaaggagaagaacaagaagggtgaggtggggcag

SEQ ID NO: 13971 - DNA, 122 bp, Homo sapiens
  misc_feature (61)..(62): /note="This region represents a CpG dinucleotide"
  misc_feature (61)..(61): /note="Nucleotide may be methylated to form 5-methylcytosine"
tttgtcctaacctgccttgtgttaatcattcatttaatgaatattcactgagaccgattacgtatctggtgttctacaaggcactgcgcatattcagaggcatattcatctttgtcacagct

SEQ ID NO: 13972 - DNA, 122 bp, Homo sapiens
  misc_feature (61)..(62): /note="This region represents a CpG dinucleotide"
  misc_feature (61)..(61): /note="Nucleotide may be methylated to form 5-methylcytosine"
ataaatatacatgcaggtgctgaacatcttgtaaaaacccacaaacataactcctgcacacgtaaactccgtctaaatgatataaggccatgatatgcagctgtgtgaagttgcatatggat

SEQ ID NO: 13973 - DNA, 122 bp, Homo sapiens
  misc_feature (61)..(62): /note="This region represents a CpG dinucleotide"
  misc_feature (61)..(61): /note="Nucleotide may be methylated to form 5-methylcytosine"
ggaaactgtctccagaagcttccctccccacgacagataatgagcagcaagtgcttctggcgacttagggtgatgtgaaatcacgctgggaatcctgctcctcctcaggtcctggcagtttc

SEQ ID NO: 13974 - DNA, 122 bp, Homo sapiens
  misc_feature (61)..(62): /note="This region represents a CpG dinucleotide"
  misc_feature (61)..(61): /note="Nucleotide may be methylated to form 5-methylcytosine"
cccagaatgtcgctgtagttccttagagacctatgtgctcttccataaatactgtatcatcgtgggtttcctgacacgcaggttccagtagattgaggtgggaggaagaacaggctgagtga

SEQ ID NO: 13975 - DNA, 122 bp, Homo sapiens
  misc_feature (61)..(62): /note="This region represents a CpG dinucleotide"
  misc_feature (61)..(61): /note="Nucleotide may be methylated to form 5-methylcytosine"
ctggtgaatcatcagggcctaggacaaacatcactcacttggtcatctgaaggccaggaacgattgtgtcattatgtatgtgcatttctcaactaagccttcaagagggtgatgggacgaga

SEQ ID NO: 13976 - DNA, 122 bp, Homo sapiens
  misc_feature (61)..(62): /note="This region represents a CpG dinucleotide"
  misc_feature (61)..(61): /note="Nucleotide may be methylated to form 5-methylcytosine"
gccgtgatggggtctccagcctccttagcagggtgctgagtacatttggcagcatgcgggcgtggaactagtgtccctcacttgcccccatcactcatagggttgggcctgcagccctcacc

SEQ ID NO: 13977 - DNA, 122 bp, Homo sapiens
  misc_feature (61)..(62): /note="This region represents a CpG dinucleotide"
  misc_feature (61)..(61): /note="Nucleotide may be methylated to form 5-methylcytosine"
tctctgtgcgcccattgtgagtctctgtaaacaatggattcctctgtttctcccagggcacgtggtccaacactgccttcaaggttaggtgtccacagttcgagtgcaagcccagatccact

SEQ ID NO: 13978 - DNA, 122 bp, Homo sapiens
  misc_feature (61)..(62): /note="This region represents a CpG dinucleotide"
  misc_feature (61)..(61): /note="Nucleotide may be methylated to form 5-methylcytosine"
gctgggaatgtttctcttcccaaaataaaatttttcactgactcactgatccttagaatgcgctagagtcattcttttgttttaagggcttagctctgtgtgagagtgtaaataaatacatt

SEQ ID NO: 13979 - DNA, 122 bp, Homo sapiens
  misc_feature (61)..(62): /note="This region represents a CpG dinucleotide"
  misc_feature (61)..(61): /note="Nucleotide may be methylated to form 5-methylcytosine"
caggaagctactgtcaagagatgttacaaaggggcgggggagagtagggagttgaggtggcgggtaaggatatgccaagtgtcaagtagatagtgcaggaaagaaatgcacatttctccaag

SEQ ID NO: 13980 - DNA, 122 bp, Homo sapiens
  misc_feature (61)..(62): /note="This region represents a CpG dinucleotide"
  misc_feature (61)..(61): /note="Nucleotide may be methylated to form 5-methylcytosine"
aagtatgactgcctctcctaggctaacctgcaaaagccagaggctgggtttctgtggcaccgtgctcactgaagcagtattttcctagtcatagcagccacctcccatctgccacctcgtct

SEQ ID NO: 13981 - DNA, 122 bp, Homo sapiens
  misc_feature (61)..(62): /note="This region represents a CpG dinucleotide"
  misc_feature (61)..(61): /note="Nucleotide may be methylated to form 5-methylcytosine"
ttattgcaagggtctcagaagagctcacactgctccagggcacaggagacacatgtcatccggatgccacatttgtctttggcaaaaagaaatccacatgctgaaccaagcgaggggctcag

SEQ ID NO: 13982 - DNA, 122 bp, Homo sapiens
  misc_feature (61)..(62): /note="This region represents a CpG dinucleotide"
  misc_feature (61)..(61): /note="Nucleotide may be methylated to form 5-methylcytosine"
aattctgtcaaaaaaaaaaaaaccttaggcctgtagaccttaagctctcaccatctcaaacgtattaaaccagttacacaatgccaaatgctgtataagaggcacttggaggagtcaaattc

SEQ ID NO: 13983 - DNA, 122 bp, Homo sapiens
  misc_feature (61)..(62): /note="This region represents a CpG dinucleotide"
  misc_feature (61)..(61): /note="Nucleotide may be methylated to form 5-methylcytosine"
gaatactcttggcttatccatgagtgatagagcctacagactgtgactaagaagggcttccgtagataaatatctctcaagaggtcgttattatctcaaaccactgaatttatccttgtgat

SEQ ID NO: 13984 - DNA, 122 bp, Homo sapiens
  misc_feature (61)..(62): /note="This region represents a CpG dinucleotide"
  misc_feature (61)..(61): /note="Nucleotide may be methylated to form 5-methylcytosine"
ttacaggaaagcacccaaaggaaaaaaaaaaaaaagcatcattactatttgaggaattaacgtgccacccagaaaatcctcaggggtcagatgaggactgtcagaaattctgcataggttca

SEQ ID NO: 13985 - DNA, 122 bp, Homo sapiens
  misc_feature (61)..(62): /note="This region represents a CpG dinucleotide"
  misc_feature (61)..(61): /note="Nucleotide may be methylated to form 5-methylcytosine"
gttagaagatacctgaaggcagaaactgcggctttgtcaactgttgatttcctcatggcgcgcagtgtaaatttactagtactttatttagtagaggcttagtacttactggttggcagatt

SEQ ID NO: 13986 - DNA, 122 bp, Homo sapiens
  misc_feature (61)..(62): /note="This region represents a CpG dinucleotide"
  misc_feature (61)..(61): /note="Nucleotide may be methylated to form 5-methylcytosine"
tagcaaagcaagtgttgaaacttaacactgaatactaaactgattccctaccggatctgccggaagagaagcatgcagccatttgggaagctgagggtcaaggtcatttatattccaggtat

SEQ ID NO: 13987 - DNA, 122 bp, Homo sapiens
  misc_feature (61)..(62): /note="This region represents a CpG dinucleotide"
  misc_feature (61)..(61): /note="Nucleotide may be methylated to form 5-methylcytosine"
ccaagacctgggagccttagtccatatgagtcaacctttccttgttgtgcttaaacctgacgctgactgactgtcaactgacagaacagaagcttcttcatagcacactataaaagtgctaa

SEQ ID NO: 13988 - DNA, 122 bp, Homo sapiens
  misc_feature (61)..(62): /note="This region represents a CpG dinucleotide"
  misc_feature (61)..(61): /note="Nucleotide may be methylated to form 5-methylcytosine"
agccaggtttagaatcacctaggtgctgacatggcagcaagactaaggttaagactaagacggctaagactttcaggaagcttactatatatacccgatgaggtttcaagtactttataaaa

SEQ ID NO: 13989 - DNA, 122 bp, Homo sapiens
  misc_feature (61)..(62): /note="This region represents a CpG dinucleotide"
  misc_feature (61)..(61): /note="Nucleotide may be methylated to form 5-methylcytosine"
taaagcttcccacttggcacctcacccagaggctagctcacattagtgtgtcagagggagcgctgctcaggctttactcttccggtcctagttggctacactgtcccctcaccccttacagt

SEQ ID NO: 13990 - DNA, 122 bp, Homo sapiens
  misc_feature (61)..(62): /note="This region represents a CpG dinucleotide"
  misc_feature (61)..(61): /note="Nucleotide may be methylated to form 5-methylcytosine"
gcgcccagccacctgtgtccttttgatgtccgttcatcactgcatgtgtgtgtgcatgcccgtgtaggtgtgggcgtgtctgtctctgtgagcccttccttactttctggctctgtgctcat

SEQ ID NO: 13991 - DNA, 122 bp, Homo sapiens
  misc_feature (61)..(62): /note="This region represents a CpG dinucleotide"
  misc_feature (61)..(61): /note="Nucleotide may be methylated to form 5-methylcytosine"
gagcaaggagacaaggtccagcgaggcaggtcaagatctaatgggaagcctgagtaattgcgtgaaatgccagccagcatctagagctcacctttacggccaatgaggacgtgactcatggc

SEQ ID NO: 13992 - DNA, 122 bp, Homo sapiens
  misc_feature (61)..(62): /note="This region represents a CpG dinucleotide"
  misc_feature (61)..(61): /note="Nucleotide may be methylated to form 5-methylcytosine"
taacacaatagtaagtgaaaaggacaggaaaaccatttataaaaaaagatgtcaaaaggacgtgctccaaaaactggtgccagtggccaactctggttagtagaattatatcctttcctttt

SEQ ID NO: 13993 - DNA, 122 bp, Homo sapiens
  misc_feature (61)..(62): /note="This region represents a CpG dinucleotide"
  misc_feature (61)..(61): /note="Nucleotide may be methylated to form 5-methylcytosine"
gtgatttattggcctacagcaacagtaaccttcctagaaagtttgcatttattgaggacccgtcatgtgtcaggcacattctgagcactatatatgtattaattcatctaatccttgatgaa

SEQ ID NO: 13994 - DNA, 122 bp, Homo sapiens
  misc_feature (61)..(62): /note="This region represents a CpG dinucleotide"
  misc_feature (61)..(61): /note="Nucleotide may be methylated to form 5-methylcytosine"
cccccgctgaggtttgagccctgtgcatattctagcacttgccacactctgtcttgttagcgcctgtggctgtctgctctgcatctgtgagcacagtccttgctggtctgattcatcaggtg

SEQ ID NO: 13995 - DNA, 122 bp, Homo sapiens
  misc_feature (61)..(62): /note="This region represents a CpG dinucleotide"
  misc_feature (61)..(61): /note="Nucleotide may be methylated to form 5-methylcytosine"
ctcgagtgaccaggccccatggccacacccaaatacaccatgtctccaggtgcagtgtggcgtagatgttagaattcctacagtgctactccctagctgtgaggctttgggtgacttaacct

SEQ ID NO: 13996 - DNA, 122 bp, Homo sapiens
  misc_feature (61)..(62): /note="This region represents a CpG dinucleotide"
  misc_feature (61)..(61): /note="Nucleotide may be methylated to form 5-methylcytosine"
cttatgcctggtgcactgagcatgcagcatgaacaccagcccttatcatttctatgacatcgttgggtcataagtgacattaaacagcagctggttgcctcacattttaaagatgtttttgg

SEQ ID NO: 13997 - DNA, 122 bp, Homo sapiens
  misc_feature (61)..(62): /note="This region represents a CpG dinucleotide"
  misc_feature (61)..(61): /note="Nucleotide may be methylated to form 5-methylcytosine"
ataaagtttgggaattacttgtatggatttaatttcctcagaataccctcattgttccttcgcaggaaatattcatgagtcaactatccagaatcatagttattattcaagcggtgtgggtt

SEQ ID NO: 13998 - DNA, 122 bp, Homo sapiens
  misc_feature (61)..(62): /note="This region represents a CpG dinucleotide"
  misc_feature (61)..(61): /note="Nucleotide may be methylated to form 5-methylcytosine"
cacgctgcttactcaggaacccttcacaatctggaactggaaagagatttctagcccccacgaggaacaaagcttgacgatgaggaaatgacaacctcccttgtttgctaactattctcagg

SEQ ID NO: 13999 - DNA, 122 bp, Homo sapiens
  misc_feature (61)..(62): /note="This region represents a CpG dinucleotide"
  misc_feature (61)..(61): /note="Nucleotide may be methylated to form 5-methylcytosine"
aaagcctttcctctcagaatggttgtctagaccgtagggctacggggctcagcagtttcccgagtgctctctctacaaaggaggggacattggaaattgtagtgtaggagggtgaacatctc

SEQ ID NO: 14000 - DNA, 122 bp, Homo sapiens
  misc_feature (61)..(62): /note="This region represents a CpG dinucleotide"
  misc_feature (61)..(61): /note="Nucleotide may be methylated to form 5-methylcytosine"
ctgccagagcgacggagcgcgcgagcagcgcggcatcaacaggcagaaggtgccacggggcggacgggacccactgcccgggtccagactttccatccgagaaagcaaaagctttcagtatc

SEQ ID NO: 14001 - DNA, 122 bp, Homo sapiens
  misc_feature (61)..(62): /note="This region represents a CpG dinucleotide"
  misc_feature (61)..(61): /note="Nucleotide may be methylated to form 5-methylcytosine"
attccaggcgggagccgccgagcacagcctggggcctggatgtttatgtgagacagtaggcggcactctaagcatctcggaactgttggtgttcgcttttcggcactctattgtatgtcata

SEQ ID NO: 14002 - DNA, 122 bp, Homo sapiens
  misc_feature (61)..(62): /note="This region represents a CpG dinucleotide"
  misc_feature (61)..(61): /note="Nucleotide may be methylated to form 5-methylcytosine"
ttgtatttttaaaagctgtacgtaagaatcctttttcttgaagatgtagacaggtgaatgcggaatatgatatctgacatgattgtaggacactggctgtaataaagtataactgagtatct

SEQ ID NO: 14003 - DNA, 122 bp, Homo sapiens
  misc_feature (61)..(62): /note="This region represents a CpG dinucleotide"
  misc_feature (61)..(61): /note="Nucleotide may be methylated to form 5-methylcytosine"
caaataccaagcacttttagccttcggctcaacttttatacacatatctgcatgctgagacgtgtctagaagtaagtcaccaaagtttttgcttatattagttcccaagtaaagcagaagac

SEQ ID NO: 14004 - DNA, 122 bp, Homo sapiens
  misc_feature (61)..(62): /note="This region represents a CpG dinucleotide"
  misc_feature (61)..(61): /note="Nucleotide may be methylated to form 5-methylcytosine"
attgtctggctggccgatttccccattgagatgcttatctgacatggcttctgccaccatcgtcctgcacttctccattaaagagcagccattcagctgtgagttccccattgcttcagctg

SEQ ID NO: 14005 - DNA, 122 bp, Homo sapiens
  misc_feature (61)..(62): /note="This region represents a CpG dinucleotide"
  misc_feature (61)..(61): /note="Nucleotide may be methylated to form 5-methylcytosine"
ggtctacctgcctgcaaacccatgtgcttaatgctacacacaatacctcttgtataacctcgcaacatttaaataataaaaacgaaccttactgatatgactttattagtccatataaattc

SEQ ID NO: 14006 - DNA, 122 bp, Homo sapiens
  misc_feature (61)..(62): /note="This region represents a CpG dinucleotide"
  misc_feature (61)..(61): /note="Nucleotide may be methylated to form 5-methylcytosine"
tgattttattctgcttccaagttttaaaaaatccattcacattttaataaaattctgaggcggtatctgccgctctgtactgcagatacatttagcaggatacatttacactgcttgtggtt

SEQ ID NO: 14007 - DNA, 122 bp, Homo sapiens
  misc_feature (61)..(62): /note="This region represents a CpG dinucleotide"
  misc_feature (61)..(61): /note="Nucleotide may be methylated to form 5-methylcytosine"
caaagggtgtttggcaggaagtcattttgaaacgtggtttctgtcctacacccatatcttcgtcatctacatggacacacttagaaatatcttggcacctggccacggatgaaggaccatgt

SEQ ID NO: 14008 - DNA, 122 bp, Homo sapiens
  misc_feature (61)..(62): /note="This region represents a CpG dinucleotide"
  misc_feature (61)..(61): /note="Nucleotide may be methylated to form 5-methylcytosine"
taaggatgtttttctgctgctatcattcattttcttcctatgagttcctctgttatattgcgtcaccatcactgaggttggcatttcttcattctttgtttcaattgactcatttcctttct

SEQ ID NO: 14009 - DNA, 122 bp, Homo sapiens
  misc_feature (61)..(62): /note="This region represents a CpG dinucleotide"
  misc_feature (61)..(61): /note="Nucleotide may be methylated to form 5-methylcytosine"
ccccagtcctggctagcttcccttagggctaaaatgatcactatctcaacctgcctgagacgcattccccgcacactacctctgatctacatcattccaggctgagttgagtctagtcagct

SEQ ID NO: 14010 - DNA, 122 bp, Homo sapiens
  misc_feature (61)..(62): /note="This region represents a CpG dinucleotide"
  misc_feature (61)..(61): /note="Nucleotide may be methylated to form 5-methylcytosine"
aactccgctgtttgcttagactttctgtgtattgactcaatgcccacattactaagcgcccgtctttaaaaattagccacagtctagcacgtataaacagataggacaattaacacctgaaa

SEQ ID NO: 14011 - DNA, 122 bp, Homo sapiens
  misc_feature (61)..(62): /note="This region represents a CpG dinucleotide"
  misc_feature (61)..(61): /note="Nucleotide may be methylated to form 5-methylcytosine"
ccccatcgtttgtccagtcagatccggattcatcacacacacattctgctctctgtataacgagaaaagaaaaaaatgtaagataaaaggaaaaatacttagcaagttgttattaattttta

SEQ ID NO: 14012 - DNA, 122 bp, Homo sapiens
  misc_feature (61)..(62): /note="This region represents a CpG dinucleotide"
  misc_feature (61)..(61): /note="Nucleotide may be methylated to form 5-methylcytosine"
gtgggaggcgttggagagggataccatgcggcaggttgggtgaaggctccgatgtcttatcgggacaaatgagcatgacagtcccctctagccaacgccggttgctccaaggggtgcaggtg

SEQ ID NO: 14013 - DNA, 122 bp, Homo sapiens
  misc_feature (61)..(62): /note="This region represents a CpG dinucleotide"
  misc_feature (61)..(61): /note="Nucleotide may be methylated to form 5-methylcytosine"
cctctagagggaggtggagtcaagaactcagatcctatgaatagctgcatccctggcctacgcagcactcctatccttttcccagcttcttccccccagcctctgcaccccccaaaaatgtc

SEQ ID NO: 14014 - DNA, 122 bp, Homo sapiens
  misc_feature (61)..(62): /note="This region represents a CpG dinucleotide"
  misc_feature (61)..(61): /note="Nucleotide may be methylated to form 5-methylcytosine"
tctggattgtgttgcttaggaggccactaaatgacccagggctttgaaggttttcatccccgtggcctgaaattcacagcactggagtcatccttttaagtgaatgcattcgatgattaggc

SEQ ID NO: 14015 - DNA, 122 bp, Homo sapiens
  misc_feature (61)..(62): /note="This region represents a CpG dinucleotide"
  misc_feature (61)..(61): /note="Nucleotide may be methylated to form 5-methylcytosine"
ctaaagtttctttgtttgttctgctttgtagcttcctttgacttttgtttctaaggcttgcggggggctgccatttggtttctcttcaagaattaacaaaccacttactcttgaattctctt

SEQ ID NO: 14016 - DNA, 122 bp, Homo sapiens
  misc_feature (61)..(62): /note="This region represents a CpG dinucleotide"
  misc_feature (61)..(61): /note="Nucleotide may be methylated to form 5-methylcytosine"
ggatgccggtagtgtggctcagtccacgtcagaaggcatcagaacccgggaagctgatggcgcgactcagcccgaggccacaggcgtgagacccggggctgccagtgcgagtcctagagccc

SEQ ID NO: 14017 - DNA, 122 bp, Homo sapiens
  misc_feature (61)..(62): /note="This region represents a CpG dinucleotide"
  misc_feature (61)..(61): /note="Nucleotide may be methylated to form 5-methylcytosine"
tgagaactggcatttatggggcacggactgtgcaccaggcactgtgctgaatgctttctgcgcatgattttgtttgacactcacaacatctgtgtgaggtggggcctgtcactctcccagtt

SEQ ID NO: 14018 - DNA, 122 bp, Homo sapiens
  misc_feature (61)..(62): /note="This region represents a CpG dinucleotide"
  misc_feature (61)..(61): /note="Nucleotide may be methylated to form 5-methylcytosine"
tccaaattctgaaattcgaaatattaataatagctagctgcgatttggcctgcatcgccccggcgctgctctatgggcgacggggcagcctcccgggctgcgagtttcctgaacgtcacccg

SEQ ID NO: 14019 - DNA, 122 bp, Homo sapiens
  misc_feature (61)..(62): /note="This region represents a CpG dinucleotide"
  misc_feature (61)..(61): /note="Nucleotide may be methylated to form 5-methylcytosine"
gggagtggaatagtcatctcttgaaaatagagatttcaatgtgcgattaatcttgtaaggcgacttagtttgggattcccagaagcagattctgagatgaagattcttgagcgagtgattta

SEQ ID NO: 14020 - DNA, 122 bp, Homo sapiens
  misc_feature (61)..(62): /note="This region represents a CpG dinucleotide"
  misc_feature (61)..(61): /note="Nucleotide may be methylated to form 5-methylcytosine"
tacagaatgaacgattctcacagatataactcgttcatgaggaaaccagtaagacggtaacgttggcttaaagtgcatttgcagaaccaggtatttacaggcatttagaaaagcagaataaa

SEQ ID NO: 14021 - DNA, 122 bp, Homo sapiens
  misc_feature (61)..(62): /note="This region represents a CpG dinucleotide"
  misc_feature (61)..(61): /note="Nucleotide may be methylated to form 5-methylcytosine"
tgagtcagagtgagtccaggttcacctgatggccagaatcatgccctttatagtgccccacgacactcacagccctgcagggcagaagggtctataagtggcccctcgcatgattcaagatg

SEQ ID NO: 14022 - DNA, 122 bp, Homo sapiens
  misc_feature (61)..(62): /note="This region represents a CpG dinucleotide"
  misc_feature (61)..(61): /note="Nucleotide may be methylated to form 5-methylcytosine"
ctggtttggtatgtggcagatgctcagatgtgtccatctgtcgtgacctctagagtactccgcctctacttctactctctgaagtgattcttcttttgtgtgtgtgctggtgtcatgcaaag

SEQ ID NO: 14023 - DNA, 122 bp, Homo sapiens
  misc_feature (61)..(62): /note="This region represents a CpG dinucleotide"
  misc_feature (61)..(61): /note="Nucleotide may be methylated to form 5-methylcytosine"
gccgctggcaagctggtggctgggcacagctgcttctccttgggatgtggtagctgcagccgcctgctcagtccatccttcctgatgggggttggcattgcacggtgcgatgggtttgtgaa

SEQ ID NO: 14024 - DNA, 122 bp, Homo sapiens
  misc_feature (61)..(62): /note="This region represents a CpG dinucleotide"
  misc_feature (61)..(61): /note="Nucleotide may be methylated to form 5-methylcytosine"
gcaattgctatcagatgctgaatgtctgtggtcacatactcagcttcctgtttataaatgcgctctgttttcagtgagtcagcagtttcttgttctacagagaggtaaaactggtggtgtca

SEQ ID NO: 14025 - DNA, 122 bp, Homo sapiens
  misc_feature (61)..(62): /note="This region represents a CpG dinucleotide"
  misc_feature (61)..(61): /note="Nucleotide may be methylated to form 5-methylcytosine"
aagaaccccaaatctcccagctataaacactttccagtagtttaacttttcctcaaggcacgtgatatggtttagctctgtgttcccacccaaatctcatatcgaattgtaattctcacatg

SEQ ID NO: 14026 - DNA, 122 bp, Homo sapiens
  misc_feature (61)..(62): /note="This region represents a CpG dinucleotide"
  misc_feature (61)..(61): /note="Nucleotide may be methylated to form 5-methylcytosine"
cgtctcaaaaaatatatatatatatacatatatatatataatgcgtatgatgtgtcccaacgtattcactgtggtgtggtcttggagttagagactttgctgttcatcctggggcaagttgt

SEQ ID NO: 14027 - DNA, 122 bp, Homo sapiens
  misc_feature (61)..(62): /note="This region represents a CpG dinucleotide"
  misc_feature (61)..(61): /note="Nucleotide may be methylated to form 5-methylcytosine"
tggaagcttggctctaactctgtgcaagaccattccatgttagcgcttgaggcaggcaggcgcctgtcatctcattggcacaaagggccttggatcaagagagagcagaattagaaaacacc

SEQ ID NO: 14028 - DNA, 122 bp, Homo sapiens
  misc_feature (61)..(62): /note="This region represents a CpG dinucleotide"
  misc_feature (61)..(61): /note="Nucleotide may be methylated to form 5-methylcytosine"
agggacaggtctacccagtgctgcctgctgccacggtctcgcttcctggggggttgggaacgagactttgtggcttgtagaaagccatcttcaataaccagcaaggaagggtcctgagagag

SEQ ID NO: 14029 - DNA, 122 bp, Homo sapiens
  misc_feature (61)..(62): /note="This region represents a CpG dinucleotide"
  misc_feature (61)..(61): /note="Nucleotide may be methylated to form 5-methylcytosine"
ttggcaaagacaaaaatggctcagaggaaccacagaccaaaatatatttcctactagaaccgcccacccctcagtgtgccacttgcttggcgagttcatctctcccatctgcatgtggcatt

SEQ ID NO: 14030 - DNA, 122 bp, Homo sapiens
  misc_feature (61)..(62): /note="This region represents a CpG dinucleotide"
  misc_feature (61)..(61): /note="Nucleotide may be methylated to form 5-methylcytosine"
tactgagctgtactcagatagcatttggggaaagtacgtgagtcacacataaaaacagaccgttcttaatgcaatgggaagggtgttaactataaaaggaccctgtccagctggctcaggga

SEQ ID NO: 14031 - DNA, 122 bp, Homo sapiens
  misc_feature (61)..(62): /note="This region represents a CpG dinucleotide"
  misc_feature (61)..(61): /note="Nucleotide may be methylated to form 5-methylcytosine"
tgaatgtttgtccctcaaataggattccagaacagtgctgctggggtctacatgcatgtccgtcagagaggataccagaacactgatgctcggttctgagtgtttctccctcacatcgaatt

SEQ ID NO: 14032 - DNA, 122 bp, Homo sapiens
  misc_feature (61)..(62): /note="This region represents a CpG dinucleotide"
  misc_feature (61)..(61): /note="Nucleotide may be methylated to form 5-methylcytosine"
ctcccctctgcaagtcatggtcttcccatatttgcattgctagcttgatgcctcattcctcggactagattccttcatatttgaggtcttaggtagacatcttcccaatgaaagcagaatgt

SEQ ID NO: 14033 - DNA, 122 bp, Homo sapiens
  misc_feature (61)..(62): /note="This region represents a CpG dinucleotide"
  misc_feature (61)..(61): /note="Nucleotide may be methylated to form 5-methylcytosine"
gtgctgggattataggcatgagccaaggattgcctttccttgaaagtgactcatacgctccgctttcctccacagtcatttcaccctctccctggtttggtaactgaagccttctgaaatga

SEQ ID NO: 14034 - DNA, 122 bp, Homo sapiens
  misc_feature (61)..(62): /note="This region represents a CpG dinucleotide"
  misc_feature (61)..(61): /note="Nucleotide may be methylated to form 5-methylcytosine"
cgcacccccggctctgaggtcagggctggcaggagtaatccaccctttccaggtgtgtggcgcaaacacggacgcaaagatctcccctagggtctgtaacaatttccaggctgaaaggtgat

SEQ ID NO: 14035 - DNA, 122 bp, Homo sapiens
  misc_feature (61)..(62): /note="This region represents a CpG dinucleotide"
  misc_feature (61)..(61): /note="Nucleotide may be methylated to form 5-methylcytosine"
ctcaaatgtttagctcccacttataagggagaacatgcgttatttggttttctgtttctgcgtttgcacaatagcctccagctgcatccatgttgctgcaaaggaaatgattccattctttt

SEQ ID NO: 14036 - DNA, 122 bp, Homo sapiens
  misc_feature (61)..(62): /note="This region represents a CpG dinucleotide"
  misc_feature (61)..(61): /note="Nucleotide may be methylated to form 5-methylcytosine"
tagctgccagagccaaacagactgttccatgtgagaaaaccaacctccagattcctggggcgtttctggtgtagtgaccttccagagggaaatctacccctactcctatccagtactcttcc

SEQ ID NO: 14037 - DNA, 122 bp, Homo sapiens
  misc_feature (61)..(62): /note="This region represents a CpG dinucleotide"
  misc_feature (61)..(61): /note="Nucleotide may be methylated to form 5-methylcytosine"
tagctaatgtgaaacagagcacaggacttgtctaacaaggaatttgcatattctcatccacgtagcctggtgtaggttctgcctggggccatgggtaatgaatgcctgcacagcctctccag

SEQ ID NO: 14038 - DNA, 122 bp, Homo sapiens
  misc_feature (61)..(62): /note="This region represents a CpG dinucleotide"
  misc_feature (61)..(61): /note="Nucleotide may be methylated to form 5-methylcytosine"
atgctaagtgaaagaagccagatacaaaggtcacatatgataaggttctatttatatgaacgatcttggtaaatctgtagagaaagaacacagatttgtggtttggtttctaagatcacagc

SEQ ID NO: 14039 - DNA, 122 bp, Homo sapiens
  misc_feature (61)..(62): /note="This region represents a CpG dinucleotide"
  misc_feature (61)..(61): /note="Nucleotide may be methylated to form 5-methylcytosine"
tggctcaaggtcacggggttcgtggtggcatctgcagcttctgggtctggccaactctggcgctcacatgctcacattctttcttcaatattttactcaaaacaatggttggggccaggtgc

SEQ ID NO: 14040 - DNA, 122 bp, Homo sapiens
  misc_feature (61)..(62): /note="This region represents a CpG dinucleotide"
  misc_feature (61)..(61): /note="Nucleotide may be methylated to form 5-methylcytosine"
cctccaagagaaagacctcttcctctgggtgctgctctgcctaggccagccaggagagggcggacgggacaccaaggggctgggcaaagagctgactcatccaggagcaacgggcctccata

SEQ ID NO: 14041 - DNA, 122 bp, Homo sapiens
  misc_feature (61)..(62): /note="This region represents a CpG dinucleotide"
  misc_feature (61)..(61): /note="Nucleotide may be methylated to form 5-methylcytosine"
tatgctgggagctcccattgttgttaacctgcatcagcagtgtttcagaatgtcggtgcccgtgagctgcctgggttggaagaacaacattgttcatgaggcgtgtgcccttgggcgtgtct

SEQ ID NO: 14042 - DNA, 122 bp, Homo sapiens
  misc_feature (61)..(62): /note="This region represents a CpG dinucleotide"
  misc_feature (61)..(61): /note="Nucleotide may be methylated to form 5-methylcytosine"
tcagttttgttatgagttgctaaaatggtgaaatgctgctccgccattggatgtgcttctcgctgcttgccaaattcgaagttaaaaggactgacatttcacgtgtaagattttgctgtagt

SEQ ID NO: 14043 - DNA, 122 bp, Homo sapiens
  misc_feature (61)..(62): /note="This region represents a CpG dinucleotide"
  misc_feature (61)..(61): /note="Nucleotide may be methylated to form 5-methylcytosine"
tcccagaggcgcctccctggccatagctgagtcaaccacagttgctttcctggaaatgggcgactgcaatgctatttggacttttcagttgatctggggtgatgtaaactcggggagcatct

SEQ ID NO: 14044 - DNA, 122 bp, Homo sapiens
  misc_feature (61)..(62): /note="This region represents a CpG dinucleotide"
  misc_feature (61)..(61): /note="Nucleotide may be methylated to form 5-methylcytosine"
ttaggatttggatgtgatcccaaatttctacaccctgaagctcagtcttctgtcatttggcgtgttagctttctgtcaggaaaccttttgctgttctttttttaatgtgtccagggctcttt

SEQ ID NO: 14045 - DNA, 122 bp, Homo sapiens
  misc_feature (61)..(62): /note="This region represents a CpG dinucleotide"
  misc_feature (61)..(61): /note="Nucleotide may be methylated to form 5-methylcytosine"
atttgaggacggagatcaaggagttcaaggacccataagacatgaacttcgttgtcccttcgttttcctgcctcctacaggagagaaataacttggcctcctcaattcttgtttgtctttaa

SEQ ID NO: 14046 - DNA, 122 bp, Homo sapiens
  misc_feature (61)..(62): /note="This region represents a CpG dinucleotide"
  misc_feature (61)..(61): /note="Nucleotide may be methylated to form 5-methylcytosine"
ggctgaggtaaacattcttcatgactcagtgggattggagctcagttgcataattccatgcgttatgtaatcacagctacataaccataacatgggaggctcatcatctggctccaagccac

SEQ ID NO: 14047 - DNA, 122 bp, Homo sapiens
  misc_feature (61)..(62): /note="This region represents a CpG dinucleotide"
  misc_feature (61)..(61): /note="Nucleotide may be methylated to form 5-methylcytosine"
ttccctgaggtgggctgtctgcatgcacagtggtctgccagcacctgggacaggaacatgcgcagtgtgtttaactggagttgtgcgcatgctcacttaaggcgttcttcccttaccagctg

SEQ ID NO: 14048 - DNA, 122 bp, Homo sapiens
  misc_feature (61)..(62): /note="This region represents a CpG dinucleotide"
  misc_feature (61)..(61): /note="Nucleotide may be methylated to form 5-methylcytosine"
ggctcctttcccgggtggactgcattcctatcattcctgagagcatgctctgctctgatccgtaacttatctgacctcaggaaggcttgagaacatgtaaagaaagcaaatgagctgggtat

SEQ ID NO: 14049 - DNA, 122 bp, Homo sapiens
  misc_feature (61)..(62): /note="This region represents a CpG dinucleotide"
  misc_feature (61)..(61): /note="Nucleotide may be methylated to form 5-methylcytosine"
aactcacttttgacttacagaaaagttgggaaaataatgtggtttccacatatccctcagcgggctttccctaatgctaacatttacataaccatagtacaagtacgagaacccagaaatta

SEQ ID NO: 14050 - DNA, 122 bp, Homo sapiens
  misc_feature (61)..(62): /note="This region represents a CpG dinucleotide"
  misc_feature (61)..(61): /note="Nucleotide may be methylated to form 5-methylcytosine"
agcacttttttccccatccctataaaaaaaaaaaaaaaaaagagagagagagagagggagcgagagggagatgatctcattcgatcctgtgaaggactgctactcagtaaggaagaagtcct

SEQ ID NO: 14051 - DNA, 122 bp, Homo sapiens
  misc_feature (61)..(62): /note="This region represents a CpG dinucleotide"
  misc_feature (61)..(61): /note="Nucleotide may be methylated to form 5-methylcytosine"
tttgagtctttttccttttcagttttttctagtcactggatgtacccacacttcctgttacgtatgtcagtagaacattagaatgcctcacttcgctcagttcatcactgcaaaggtggcat

SEQ ID NO: 14052 - DNA, 122 bp, Homo sapiens
  misc_feature (61)..(62): /note="This region represents a CpG dinucleotide"
  misc_feature (61)..(61): /note="Nucleotide may be methylated to form 5-methylcytosine"
cataaaaatagaattaggcaatatgttgccttttgtgactggtttttttgctttgcataacgtcttcaagattcatcatgttgtagcttgtgtgaatatttcatgcctgttaatggctgaat

SEQ ID NO: 14053 - DNA, 122 bp, Homo sapiens
  misc_feature (61)..(62): /note="This region represents a CpG dinucleotide"
  misc_feature (61)..(61): /note="Nucleotide may be methylated to form 5-methylcytosine"
tgcctggtgccctcaaggagctaatttagtctcctttgcagcaagactgttttcatgccccggcccagggcttcagagaaatctgaatagggctcagcaagtcagtatgtggctccaggagg

SEQ ID NO: 14054 - DNA, 122 bp, Homo sapiens
  misc_feature (61)..(62): /note="This region represents a CpG dinucleotide"
  misc_feature (61)..(61): /note="Nucleotide may be methylated to form 5-methylcytosine"
acaagtaacaagacctactgacatcatgtataccaatatgacacacacagaaatatacagcgtccctgctgttgttcttgccaagattgagtaatcgcaatgtaatcataagaaaacatcag

SEQ ID NO: 14055 - DNA, 122 bp, Homo sapiens
  misc_feature (61)..(62): /note="This region represents a CpG dinucleotide"
  misc_feature (61)..(61): /note="Nucleotide may be methylated to form 5-methylcytosine"
tctaggtttgtgtaagttcactctgtgacactcacacagtaatgacattgcctaatgacacgtttctcaggatgtatccctgttgttaggcgacgtgtgactgtactgtacactctgatggt

SEQ ID NO: 14056 - DNA, 122 bp, Homo sapiens
  misc_feature (61)..(62): /note="This region represents a CpG dinucleotide"
  misc_feature (61)..(61): /note="Nucleotide may be methylated to form 5-methylcytosine"
cttagtacaaatcctggcaactaaatgaaagaacaaacaacctggggttctgggatggttcgtctttgctgatggcactgtgttccaaaatggccaaggtcaaatataaaaatttcagactg

SEQ ID NO: 14057 - DNA, 122 bp, Homo sapiens
  misc_feature (61)..(62): /note="This region represents a CpG dinucleotide"
  misc_feature (61)..(61): /note="Nucleotide may be methylated to form 5-methylcytosine"
gccaagtataagagccataacaaagtccttcagatttacactgtagatagaaggaggaagcgagaaggcatgttcccagcacatggcaattctaagaatggtgtcatgattacaagtaacct

SEQ ID NO: 14058 - DNA, 122 bp, Homo sapiens
  misc_feature (61)..(62): /note="This region represents a CpG dinucleotide"
  misc_feature (61)..(61): /note="Nucleotide may be methylated to form 5-methylcytosine"
gtcattttgtgtgtgcctattggtgttttgcagagaccccctaaaatgttttaagccactcgctgagggtagccctgcatatagaggtttctgtgtggtatcaaattactgaggactggagt

SEQ ID NO: 14059 - DNA, 122 bp, Homo sapiens
  misc_feature (61)..(62): /note="This region represents a CpG dinucleotide"
  misc_feature (61)..(61): /note="Nucleotide may be methylated to form 5-methylcytosine"
ggaggtaaaagtgtctgcctcagttggttcatcagcgccagtggcagtgctctaaggagacgccaggcctccggtaaccactcagtgtcagaagttcaggcagcaacaggtgcatgaggaag

SEQ ID NO: 14060 - DNA, 122 bp, Homo sapiens
  misc_feature (61)..(62): /note="This region represents a CpG dinucleotide"
  misc_feature (61)..(61): /note="Nucleotide may be methylated to form 5-methylcytosine"
cttgctcagccccacccgtcttttcctccatccctgcaggtgaggcagggcaaggtcacccggcaggggaagttcaagcccaacagcgtcacatataggaccaaatcaggcaacatcctgct

SEQ ID NO: 14061 - DNA, 122 bp, Homo sapiens
  misc_feature (61)..(62): /note="This region represents a CpG dinucleotide"
  misc_feature (61)..(61): /note="Nucleotide may be methylated to form 5-methylcytosine"
gtgagacagtgagcatggggtcggaaatatgtcagctccatagcttactacctttgagaccgtgaataagttaatgagccttgctaagcctcagtttcctcaaatgtaaaatggaatagtac

SEQ ID NO: 14062 - DNA, 122 bp, Homo sapiens
  misc_feature (61)..(62): /note="This region represents a CpG dinucleotide"
  misc_feature (61)..(61): /note="Nucleotide may be methylated to form 5-methylcytosine"
gctagctgcactgccctccaactgaatcaacggtatcagcatggtgaataaacaggtatgcgctttctagagtgacaacagcagggtgtcagttcccaacacacctattccggtaccattat

SEQ ID NO: 14063 - DNA, 122 bp, Homo sapiens
  misc_feature (61)..(62): /note="This region represents a CpG dinucleotide"
  misc_feature (61)..(61): /note="Nucleotide may be methylated to form 5-methylcytosine"
ctcaccccctgccctctcccaagatctcccactcggtgggcagcctgtacgcaacttgcacgagttcaatccacacaagcgcctgctcgggctctgaccctggctctgccgcttgcccgctc

SEQ ID NO: 14064 - DNA, 122 bp, Homo sapiens
  misc_feature (61)..(62): /note="This region represents a CpG dinucleotide"
  misc_feature (61)..(61): /note="Nucleotide may be methylated to form 5-methylcytosine"
gccctccactcactagatgccagcagcactcccttctctagtggcagcaataaaaaatgtcgctttggctgagtgcagtagctcatgcctgtaatcccagcgatttgggaggctggggccag

SEQ ID NO: 14065 - DNA, 122 bp, Homo sapiens
  misc_feature (61)..(62): /note="This region represents a CpG dinucleotide"
  misc_feature (61)..(61): /note="Nucleotide may be methylated to form 5-methylcytosine"
cttaccgtaccgcaccctctgctagggctgcagcctcccgccccagacccctcactgcagcgcccaccctggccctgggggtcccagccacgccttagcccgctgctctcaccgcatcgctg

SEQ ID NO: 14066 - DNA, 122 bp, Homo sapiens
  misc_feature (61)..(62): /note="This region represents a CpG dinucleotide"
  misc_feature (61)..(61): /note="Nucleotide may be methylated to form 5-methylcytosine"
aggaaattttattctttgtagtttctccaaattctttgtaaaaattatgaaagtaatttgcgaaaaataagcgaattgacatggaatataaggtgaataatacatttttaaaatgtagttgt

SEQ ID NO: 14067 - DNA, 122 bp, Homo sapiens
  misc_feature (61)..(62): /note="This region represents a CpG dinucleotide"
  misc_feature (61)..(61): /note="Nucleotide may be methylated to form 5-methylcytosine"
tgctcctgagagaagcctggtccatctagtgagaattgaccttatctcactttctctccccgccagggtctgggatccccaaggcctgggcaggcatagacttgaaggtacaaccccaggaa

SEQ ID NO: 14068 - DNA, 122 bp, Homo sapiens
  misc_feature (61)..(62): /note="This region represents a CpG dinucleotide"
  misc_feature (61)..(61): /note="Nucleotide may be methylated to form 5-methylcytosine"
cgtcacgggccacatgccgaggcgtgggcacagcaacgtggcactcagaggtcatccccacgctcacacacagagctaggcactccctgtgcccaggctgggctccagcctcgcagctgccc

SEQ ID NO: 14069 - DNA, 122 bp, Homo sapiens
  misc_feature (61)..(62): /note="This region represents a CpG dinucleotide"
  misc_feature (61)..(61): /note="Nucleotide may be methylated to form 5-methylcytosine"
tatacaaagctattcattacagaataatttgtaacagcaaaagtctagtaacagtgcaaacgttcaataggggatcagttgaacaaactacagcgcatctacacaacggagcactatgcagc

SEQ ID NO: 14070 - DNA, 122 bp, Homo sapiens
  misc_feature (61)..(62): /note="This region represents a CpG dinucleotide"
  misc_feature (61)..(61): /note="Nucleotide may be methylated to form 5-methylcytosine"
gctactgggtcctggtagagatgcaacatctgaccacgagacatcaagtgactatgcagccggaactgttcataatgagctgaggttttttatcagaactgttaaatcataaggttggatga

SEQ ID NO: 14071 - DNA, 122 bp, Homo sapiens
  misc_feature (61)..(62): /note="This region represents a CpG dinucleotide"
  misc_feature (61)..(61): /note="Nucleotide may be methylated to form 5-methylcytosine"
ttctatttaagagaaaatcctatgtagtcgtaatggaatttattttcctgagtgcctgggcgtgctccaaacagatagctgtgattgtgtcatctcttcttactaagcatctgaccactcac

SEQ ID NO: 14072 - DNA, 122 bp, Homo sapiens
  misc_feature (61)..(62): /note="This region represents a CpG dinucleotide"
  misc_feature (61)..(61): /note="Nucleotide may be methylated to form 5-methylcytosine"
tgttctaagtgctatggttcatcatgttctggaggtggctttgttccaactgtttgttcacgagtgttttgagttaaagggaattacagtctacaaatttatgcacatggcacttcacagaa

SEQ ID NO: 14073 - DNA, 122 bp, Homo sapiens
  misc_feature (61)..(62): /note="This region represents a CpG dinucleotide"
  misc_feature (61)..(61): /note="Nucleotide may be methylated to form 5-methylcytosine"
ctcatccaggaatgtgctgtctgcaccacaatcagcacttccctcaccaccagcaatacacgtcaattatcaagtttcgactatgcatctacactaggagaggtccctgcagataaagagtt

SEQ ID NO: 14074 - DNA, 122 bp, Homo sapiens
  misc_feature (61)..(62): /note="This region represents a CpG dinucleotide"
  misc_feature (61)..(61): /note="Nucleotide may be methylated to form 5-methylcytosine"
ctgaaatagtactgactaatattttcaaaatgtgtgtttcttccagttctagaaacccaacgctggccatagcaatggtttcagtggaagatgctttcagaaatttccacagtactaagtaa

SEQ ID NO: 14075 - DNA, 122 bp, Homo sapiens
  misc_feature (61)..(62): /note="This region represents a CpG dinucleotide"
  misc_feature (61)..(61): /note="Nucleotide may be methylated to form 5-methylcytosine"
agtagcacagtggtatgctgaaagctgaggtgggaacttgtggcttcccttaccttgtaacgagcaggtttgagctggtccttcccaagcacagtaaataaatgtcactttgcatgggagag

SEQ ID NO: 14076 - DNA, 122 bp, Homo sapiens
  misc_feature (61)..(62): /note="This region represents a CpG dinucleotide"
  misc_feature (61)..(61): /note="Nucleotide may be methylated to form 5-methylcytosine"
cattgccaagtgagtcagccctgagtcagcccagctgctcaaaaatcatctagaatgtcacggctgccagggcctgacagaatgccttcagagctgcttaccaggctctgtgtggctcttgg

SEQ ID NO: 14077 - DNA, 122 bp, Homo sapiens
  misc_feature (61)..(62): /note="This region represents a CpG dinucleotide"
  misc_feature (61)..(61): /note="Nucleotide may be methylated to form 5-methylcytosine"
agtctttattccagcatcctctcctcttcagaagaattgtatgtatcgtcataacagcatcgtcctgatccatcaggtaaaagagaggatgctacctagtggagttattcttgcagccccac

SEQ ID NO: 14078 - DNA, 122 bp, Homo sapiens
  misc_feature (61)..(62): /note="This region represents a CpG dinucleotide"
  misc_feature (61)..(61): /note="Nucleotide may be methylated to form 5-methylcytosine"
tgaactgtcacagaatcacagaacagtgatctttcccatcatacattataagttgccttccgtaccacgcctgttgatgaagaagccctagtaattcaagaacttaaattcttttcctaggg

SEQ ID NO: 14079 - DNA, 122 bp, Homo sapiens
  misc_feature (61)..(62): /note="This region represents a CpG dinucleotide"
  misc_feature (61)..(61): /note="Nucleotide may be methylated to form 5-methylcytosine"
aggagactgaagagttcctcaccaagataccagaccatggggggcccagcaggcagctcacgagggtttgcatggtgatagcccctatgactgattcaagcattatgcttgttgtcatccct

SEQ ID NO: 14080 - DNA, 122 bp, Homo sapiens
  misc_feature (61)..(62): /note="This region represents a CpG dinucleotide"
  misc_feature (61)..(61): /note="Nucleotide may be methylated to form 5-methylcytosine"
aaaaaaaaaaaagaagatgaaagaaggaaaaaacagaaatttattgtttacagttgttgccgtgtgcagtcagtgagttgtgaataatctgtgtcctgattaaaaacctgtgagtggggctg

SEQ ID NO: 14081 - DNA, 122 bp, Homo sapiens
  misc_feature (61)..(62): /note="This region represents a CpG dinucleotide"
  misc_feature (61)..(61): /note="Nucleotide may be methylated to form 5-methylcytosine"
aaaaatgaaaagcatttgcaggatctggcccttgcccaacttttcagtcttgtaaagtgccgcccttcctcttgaactctatgctttagacatcttatgtcccttaagtttcttaaactcac

SEQ ID NO: 14082 - DNA, 122 bp, Homo sapiens
  misc_feature (61)..(62): /note="This region represents a CpG dinucleotide"
  misc_feature (61)..(61): /note="Nucleotide may be methylated to form 5-methylcytosine"
gttggctgcaggtctatgtgaatagatctttgttaaactctggagtaaaaatatgctgcccgtaggagccttgttgataataacgcttcaaatgcgttactcaccttgcaatcatcaaatgc

SEQ ID NO: 14083 - DNA, 122 bp, Homo sapiens
  misc_feature (61)..(62): /note="This region represents a CpG dinucleotide"
  misc_feature (61)..(61): /note="Nucleotide may be methylated to form 5-methylcytosine"
ctgttacattcctgctgtaatcctggctagtggaagaagataagatatcagtaagctctgcgggcatcaagtttcggccctgtcaggtgtaatcagaaccctggtcttaaaacgaaggcctc

SEQ ID NO: 14084 - DNA, 122 bp, Homo sapiens
  misc_feature (61)..(62): /note="This region represents a CpG dinucleotide"
  misc_feature (61)..(61): /note="Nucleotide may be methylated to form 5-methylcytosine"
aacaaaatgaccgtgaataatgtattcccaggcactgcttcctgggcagcactgccaaggcgttctgtggcggctgcatctgtcatcggggaacacaaaacacacagggaagtcacccccac

SEQ ID NO: 14085 - DNA, 122 bp, Homo sapiens
  misc_feature (61)..(62): /note="This region represents a CpG dinucleotide"
  misc_feature (61)..(61): /note="Nucleotide may be methylated to form 5-methylcytosine"
tgaactaacaaaacaaagaagaggtttcgagtgcaagatgaatccaggctgtacttacagcgaattggcaaaaaccaagataaaaatgagaagatatccaagatgtttcagaaatttcaggc

SEQ ID NO: 14086 - DNA, 122 bp, Homo sapiens
  misc_feature (61)..(62): /note="This region represents a CpG dinucleotide"
  misc_feature (61)..(61): /note="Nucleotide may be methylated to form 5-methylcytosine"
caggtcccagctgctggagtgatgggattttctgatttccatctcttcctgatagccagtcgagttctcttatatctcttccacgccatgcgcaaatatcatgacaaggcctggctcttgca

SEQ ID NO: 14087 - DNA, 122 bp, Homo sapiens
  misc_feature (61)..(62): /note="This region represents a CpG dinucleotide"
  misc_feature (61)..(61): /note="Nucleotide may be methylated to form 5-methylcytosine"
gccggcgttcagtggggtatgaaggcgtcccctccccttccccaggggtctccagggatccgcaaccctccggcacctggccggggtcgtcctagcccagccgggggaaggaggggctgagt

SEQ ID NO: 14088 - DNA, 122 bp, Homo sapiens
  misc_feature (61)..(62): /note="This region represents a CpG dinucleotide"
  misc_feature (61)..(61): /note="Nucleotide may be methylated to form 5-methylcytosine"
ggttttattacaaccttttttacaacctttctctgtctatatctttctttatacagttgacggactggacaaagcttctatagcaaactcagatggccccacagcaggttcccaaacacctc

SEQ ID NO: 14089 - DNA, 122 bp, Homo sapiens
  misc_feature (61)..(62): /note="This region represents a CpG dinucleotide"
  misc_feature (61)..(61): /note="Nucleotide may be methylated to form 5-methylcytosine"
ccctttcatcacttgggtcacttgaaagccctctacaagagaggtaaacaaaccatggcccgaaggccaaatcttgcccaaggtaagattgttttacattttttaagggttgttaaacaaca

SEQ ID NO: 14090 - DNA, 122 bp, Homo sapiens
  misc_feature (61)..(62): /note="This region represents a CpG dinucleotide"
  misc_feature (61)..(61): /note="Nucleotide may be methylated to form 5-methylcytosine"
cgcagcctggccgaatccagtgattcatttctgtcttaatctctcctggcctttcggcagcgtttaacgtgtgcgacccctcccttctcctgtcttcagccttcctcgggatccgcgaggcg

SEQ ID NO: 14091 - DNA, 122 bp, Homo sapiens
  misc_feature (61)..(62): /note="This region represents a CpG dinucleotide"
  misc_feature (61)..(61): /note="Nucleotide may be methylated to form 5-methylcytosine"
tacattaaaaacacaccagcccagatgcaaaaggctgcagatcatatgattccattcatacgaaatgcccaggacaggcgaatccagagagacagacaggaggtgagcaattgccaggggct

SEQ ID NO: 14092 - DNA, 122 bp, Homo sapiens
  misc_feature (61)..(62): /note="This region represents a CpG dinucleotide"
  misc_feature (61)..(61): /note="Nucleotide may be methylated to form 5-methylcytosine"
agtgtagtggctcaccctataatcccagcactttggaagaaggccaagataggtggattgcgtgaacccagcagttcaagatcagactgggcaacatggtgataccccgtctctaaacaaaa

SEQ ID NO: 14093 - DNA, 122 bp, Homo sapiens
  misc_feature (61)..(62): /note="This region represents a CpG dinucleotide"
  misc_feature (61)..(61): /note="Nucleotide may be methylated to form 5-methylcytosine"
tttgctcctctgatccagccctgccattcagagtcaggaaaatcaagacttgtccagttacgtaagtataccaatctttacttattttatcttttagatcttttctctctggttagatttta

SEQ ID NO: 14094 - DNA, 122 bp, Homo sapiens
  misc_feature (61)..(62): /note="This region represents a CpG dinucleotide"
  misc_feature (61)..(61): /note="Nucleotide may be methylated to form 5-methylcytosine"
gtggtgactcaggttgcctggggacagttacacttctccttcctactggaagttgttacacgcagaacattactcatccctgctcgggagagtgaatagaaagcacttcagagaacattgga

SEQ ID NO: 14095 - DNA, 122 bp, Homo sapiens
  misc_feature (61)..(62): /note="This region represents a CpG dinucleotide"
  misc_feature (61)..(61): /note="Nucleotide may be methylated to form 5-methylcytosine"
aggtgagttttgtaggtctaggaagagtctagcactagaaacctaacctcagggagtaagcgttcttgaagttctgtgtcaggtcacaaattcattcttaggaatgtctagaaaccaaaacc

SEQ ID NO: 14096 - DNA, 122 bp, Homo sapiens
  misc_feature (61)..(62): /note="This region represents a CpG dinucleotide"
  misc_feature (61)..(61): /note="Nucleotide may be methylated to form 5-methylcytosine"
aggaacaaggaaatgatgtcttctggttatgaattaagttgacataacagtgctacacctcgtccaatccagtgttccttgggttggtcagagggaagagtcatggcaatcacaaaattcgt

SEQ ID NO: 14097 - DNA, 122 bp, Homo sapiens
  misc_feature (61)..(62): /note="This region represents a CpG dinucleotide"
  misc_feature (61)..(61): /note="Nucleotide may be methylated to form 5-methylcytosine"
tatgacataaagaagctttagtatcacttcttttttaacaatgcttcccatgtaatttaacgtaccaaattaatttaacaagtttgtttttataagaagaaagacaaggccgggtgcagtgg

SEQ ID NO: 14098 - DNA, 122 bp, Homo sapiens
  misc_feature (61)..(62): /note="This region represents a CpG dinucleotide"
  misc_feature (61)..(61): /note="Nucleotide may be methylated to form 5-methylcytosine"
ctttggtctttgtattcctgtgactagtaatggtgacacaaccctgcattaacaggccagcgtctgctatagatccccagaggacttcaccaatgccctctgatccgggtttcccaacctcg

SEQ ID NO: 14099 - DNA, 122 bp, Homo sapiens
  misc_feature (61)..(62): /note="This region represents a CpG dinucleotide"
  misc_feature (61)..(61): /note="Nucleotide may be methylated to form 5-methylcytosine"
tagctctggcatactttgaaaaggcaattggcgatgttattgctgccaagggtgataggacgtcagatctgatcagcctgtacgaggaagctgctcagatagagcagctgaggaggaaccac

SEQ ID NO: 14100 - DNA, 122 bp, Homo sapiens
  misc_feature (61)..(62): /note="This region represents a CpG dinucleotide"
  misc_feature (61)..(61): /note="Nucleotide may be methylated to form 5-methylcytosine"
gcgtcttcacctcaggttgatctgagttgcttacactagtcaagaaactcaagtccaacacgggtatctccagggtagtagttccctacctgcaattgtcaccagcagcagcaatgaagaga

SEQ ID NO: 14101 - DNA, 122 bp, Homo sapiens
  misc_feature (61)..(62): /note="This region represents a CpG dinucleotide"
  misc_feature (61)..(61): /note="Nucleotide may be methylated to form 5-methylcytosine"
ccactagtacaaaaactggccttgaataagacatcacttcctccaagtctgagtacagcacgcaagggcaactgcagcaaatggaggggtgatttagtaaggagggggtgaaaccgaaaatc

SEQ ID NO: 14102 - DNA, 122 bp, Homo sapiens
  misc_feature (61)..(62): /note="This region represents a CpG dinucleotide"
  misc_feature (61)..(61): /note="Nucleotide may be methylated to form 5-methylcytosine"
tgttcaccaagtgtttatgaatcatccaagaaggtcaggataggtttttgttttgctttacgggagacatcctgaatctgaaaggcagaagacacctatctggcaggtccagggttagcaca

SEQ ID NO: 14103 - DNA, 122 bp, Homo sapiens
  misc_feature (61)..(62): /note="This region represents a CpG dinucleotide"
  misc_feature (61)..(61): /note="Nucleotide may be methylated to form 5-methylcytosine"
caagatggagtgatacttatgaacattgcttctcctgatcatgtaacaacatcctccttccgtctgctcagacctcacaatcttgagctgtccttgactcctccttttttcccatttgtcac

SEQ ID NO: 14104 - DNA, 122 bp, Homo sapiens
  misc_feature (61)..(62): /note="This region represents a CpG dinucleotide"
  misc_feature (61)..(61): /note="Nucleotide may be methylated to form 5-methylcytosine"
tcatgaattgcttcctgtatgttcatgaattacttcctgtgtgctcatgaactgcttcctcgtgtgtctcctccatctagtgtatgaaaccctaaagagaacagagctcatcccgtattgct

SEQ ID NO: 14105 - DNA, 122 bp, Homo sapiens
  misc_feature (61)..(62): /note="This region represents a CpG dinucleotide"
  misc_feature (61)..(61): /note="Nucleotide may be methylated to form 5-methylcytosine"
actgctccaatgcagcatttcagttcacagtttatatacaggtagcaaagattcagtatacgcaaaatcgcatctaagtttgggtgcaagagtacatctgattatagtttacagaagcataa

SEQ ID NO: 14106 - DNA, 122 bp, Homo sapiens
  misc_feature (61)..(62): /note="This region represents a CpG dinucleotide"
  misc_feature (61)..(61): /note="Nucleotide may be methylated to form 5-methylcytosine"
gagtgcaatggcacgatcttggctcactgcaacctctgcctcagtaactggtattataagcgtgcaccaccatgcccagctaatttttgtattttttagcagagacagggtttcaccatgtt

SEQ ID NO: 14107 - DNA, 122 bp, Homo sapiens
  misc_feature (61)..(62): /note="This region represents a CpG dinucleotide"
  misc_feature (61)..(61): /note="Nucleotide may be methylated to form 5-methylcytosine"
taagttaatgacaaagccaggattagaactttggattctttattccgcatccacattcttcgttcattacaccacagaggttcttatacctaatatcctgggcaggcaacactactgatgag

SEQ ID NO: 14108 - DNA, 122 bp, Homo sapiens
  misc_feature (61)..(62): /note="This region represents a CpG dinucleotide"
  misc_feature (61)..(61): /note="Nucleotide may be methylated to form 5-methylcytosine"
ggatcccaaacgataaagcaaaacaccactctctactctggaatttattatgatatgcaacgtagattggcagctcttaaaataacagttaacattccaacttggtgagtttactataaact

SEQ ID NO: 14109 - DNA, 122 bp, Homo sapiens
  misc_feature (61)..(62): /note="This region represents a CpG dinucleotide"
  misc_feature (61)..(61): /note="Nucleotide may be methylated to form 5-methylcytosine"
ccgcgcctccttcaaatgcctccttctggcactctgcatttcagcattctctttgggctgcggaggctccctagaagccacgtcccctgaaaggaatataggaaggacctcttgttcctggc

SEQ ID NO: 14110 - DNA, 122 bp, Homo sapiens
  misc_feature (61)..(62): /note="This region represents a CpG dinucleotide"
  misc_feature (61)..(61): /note="Nucleotide may be methylated to form 5-methylcytosine"
ttgtgtgcatgtgtgttctctacctgtgtgcacatgtctgcatgtgtgtgttcacgtgcacgtgggaggttgtgttcatgaaggcgtgtgtgtggagggagggagggaatactcacagccca

SEQ ID NO: 14111 - DNA, 122 bp, Homo sapiens
  misc_feature (61)..(62): /note="This region represents a CpG dinucleotide"
  misc_feature (61)..(61): /note="Nucleotide may be methylated to form 5-methylcytosine"
aagccagttctttgaaagggatcagagcctccacattaaagaggcatctgtttaatttagcgattcagtgacatcagtgtgttgccaaattgtcttccaatgtggccactcccctctaagga

SEQ ID NO: 14112 - DNA, 122 bp, Homo sapiens
  misc_feature (61)..(62): /note="This region represents a CpG dinucleotide"
  misc_feature (61)..(61): /note="Nucleotide may be methylated to form 5-methylcytosine"
accacagtcttgcccttccagaagtttccaattaaaaagcagaacatagcgcttgacctacgacagctttgctaaataaatggatgaaagaacaagtgattggagtcctaggacttcttagg

SEQ ID NO: 14113 - DNA, 122 bp, Homo sapiens
  misc_feature (61)..(62): /note="This region represents a CpG dinucleotide"
  misc_feature (61)..(61): /note="Nucleotide may be methylated to form 5-methylcytosine"
ggtattgaaaatgggccttgcgccgtcgaaggttcttgtccgaaacgccatagtaggctgcgtgggggctggcagagcgcagctcgaagtcccgggccagtgcctcgtccaccaccttggcc

SEQ ID NO: 14114 - DNA, 122 bp, Homo sapiens
  misc_feature (61)..(62): /note="This region represents a CpG dinucleotide"
  misc_feature (61)..(61): /note="Nucleotide may be methylated to form 5-methylcytosine"
caaacaatgccctattttgaactattgcctgactaaaatctttatcagctcattcaactccgtgagttcttcactgatcattcagctaacagtgatgccccttgctctaaatcccataggaa

SEQ ID NO: 14115 - DNA, 122 bp, Homo sapiens
  misc_feature (61)..(62): /note="This region represents a CpG dinucleotide"
  misc_feature (61)..(61): /note="Nucleotide may be methylated to form 5-methylcytosine"
tgtttgcacttgggcagggctctcgagtccttggaagctgccgtttattttaaaacagcccggactccttgaggaagctgaggagagaggaaatggcagaggcgacctcgcctcacacttcc

SEQ ID NO: 14116 - DNA, 122 bp, Homo sapiens
  misc_feature (61)..(62): /note="This region represents a CpG dinucleotide"
  misc_feature (61)..(61): /note="Nucleotide may be methylated to form 5-methylcytosine"
tctaatgtttgatgcttagctttttctgccctctagctgcagaagatgaacctctttatacgcagccaaggacagtctataacttgcacttcttaagttggtgattaatcaccattgtcttc

SEQ ID NO: 14117 - DNA, 122 bp, Homo sapiens
  misc_feature (61)..(62): /note="This region represents a CpG dinucleotide"
  misc_feature (61)..(61): /note="Nucleotide may be methylated to form 5-methylcytosine"
tgtgttatgtactctgactataggttggttacaaaaattgaaaaccagtaaacaaggatacggaattttaggtaggaggaataagttcaagagatctattgtacaacatactgattataatt

SEQ ID NO: 14118 - DNA, 122 bp, Homo sapiens
  misc_feature (61)..(62): /note="This region represents a CpG dinucleotide"
  misc_feature (61)..(61): /note="Nucleotide may be methylated to form 5-methylcytosine"
gcagtgctctccccagaaagcctcattatgtgagtagtaaatcccttcaaaccctcctgacgtgtgaggtccatctcacctatgaaggacatctacaaaagaaacaaatcagtttcatgggc

SEQ ID NO: 14119 - DNA, 122 bp, Homo sapiens
  misc_feature (61)..(62): /note="This region represents a CpG dinucleotide"
  misc_feature (61)..(61): /note="Nucleotide may be methylated to form 5-methylcytosine"
acaggccgctgcaggttttccatgtggacgtggaggtgaaggacattaacgacaacccgccggtgttcagagaaagggaacaaaaggtacctgtttctgaatctgcgcctctggactctcat

SEQ ID NO: 14120 - DNA, 122 bp, Homo sapiens
  misc_feature (61)..(62): /note="This region represents a CpG dinucleotide"
  misc_feature (61)..(61): /note="Nucleotide may be methylated to form 5-methylcytosine"
tttatcacaaaccctcaaccacagcaacttcaagagcaggagagaagtaattggctttctcgagtccagtacacactgcagggcagaccagtgtacctcacagggagttgctaagcaggaag

SEQ ID NO: 14121 - DNA, 122 bp, Homo sapiens
  misc_feature (61)..(62): /note="This region represents a CpG dinucleotide"
  misc_feature (61)..(61): /note="Nucleotide may be methylated to form 5-methylcytosine"
ctagaggaaatgctccctaataacacaaagcactttcacagatagattttgccacaaaaacgttcaattgttcaacaatgttgattacttacaggcaaaactaaagctgaaatggataagat

SEQ ID NO: 14122 - DNA, 122 bp, Homo sapiens
  misc_feature (61)..(62): /note="This region represents a CpG dinucleotide"
  misc_feature (61)..(61): /note="Nucleotide may be methylated to form 5-methylcytosine"
ataagtttaaaattgcatgctgttttgagtagtgtgatgaaatctcacacagtcctgcttcgtcttacttgggatgcaaatcatccctttgtccagtgtatccacactgtgtatggtacctg

SEQ ID NO: 14123 - DNA, 122 bp, Homo sapiens
  misc_feature (61)..(62): /note="This region represents a CpG dinucleotide"
  misc_feature (61)..(61): /note="Nucleotide may be methylated to form 5-methylcytosine"
tgagaacaaagcacattgcaggctgacatttagaaatctcaaggcataaagatcagtttacgtggaaacaaagcctgccattcatctcctcttatccatgtacacagagcttccaggaaagt

SEQ ID NO: 14124 - DNA, 122 bp, Homo sapiens
  misc_feature (61)..(62): /note="This region represents a CpG dinucleotide"
  misc_feature (61)..(61): /note="Nucleotide may be methylated to form 5-methylcytosine"
tctttctcccctgttgcaaaacctcattgcaggggcccctgtgagtagagactgctttaccgtctggaataagcctcagaagaattttattcttaacatgggaagtggaccagagggcagag

SEQ ID NO: 14125 - DNA, 122 bp, Homo sapiens
  misc_feature (61)..(62): /note="This region represents a CpG dinucleotide"
  misc_feature (61)..(61): /note="Nucleotide may be methylated to form 5-methylcytosine"
gggtgaactgtggctcagctgactgaaattcaggcaggaaccaagacagagacactgagacgggacattcagccaggatttattatgcccttacacacagggtcggctctgagctcagctct

SEQ ID NO: 14126 - DNA, 122 bp, Homo sapiens
  misc_feature (61)..(62): /note="This region represents a CpG dinucleotide"
  misc_feature (61)..(61): /note="Nucleotide may be methylated to form 5-methylcytosine"
atgcacatacagagtcagtatttaagcaactgaaatgtatgctgaacagtagccagttcccgtcccttagcaaagtcatttccctgggattgttcatctcccatggcaacaatacacagtag

SEQ ID NO: 14127 - DNA, 122 bp, Homo sapiens
  misc_feature (61)..(62): /note="This region represents a CpG dinucleotide"
  misc_feature (61)..(61): /note="Nucleotide may be methylated to form 5-methylcytosine"
tatagataaaatcatgttctatatcacccctttggataaaccttttatttatgaatctagcgcatttcccctcgtaggctaaatttccttaagcttttctggacaaattccctgcattcaac

SEQ ID NO: 14128 - DNA, 122 bp, Homo sapiens
  misc_feature (61)..(62): /note="This region represents a CpG dinucleotide"
  misc_feature (61)..(61): /note="Nucleotide may be methylated to form 5-methylcytosine"
aggaaggataaagtgtgcattctattgtaccacagcaataatttttttgaccgtagcatacgctggtaggttgacatttagttaaacgggaaatgcttaaagctcatcacagtccctaaatc

SEQ ID NO: 14129 - DNA, 122 bp, Homo sapiens
  misc_feature (61)..(62): /note="This region represents a CpG dinucleotide"
  misc_feature (61)..(61): /note="Nucleotide may be methylated to form 5-methylcytosine"
tcataaacagaagatgaatccaccaggtactcagcatttgcatcaccttaagtaattttccgtattaagatttgaattgatttgtagttgccacatcaggccttttgaggatggacctgctt

SEQ ID NO: 14130 - DNA, 122 bp, Homo sapiens
  misc_feature (61)..(62): /note="This region represents a CpG dinucleotide"
  misc_feature (61)..(61): /note="Nucleotide may be methylated to form 5-methylcytosine"
gactggttggcacctgtgatatactgatggttaaatattttggatcacacctgtaatgagcgggtgactaatttctggcaatgacactgagtagaagtttggaacattagagccctagtaaa

SEQ ID NO: 14131 - DNA, 122 bp, Homo sapiens
  misc_feature (61)..(62): /note="This region represents a CpG dinucleotide"
  misc_feature (61)..(61): /note="Nucleotide may be methylated to form 5-methylcytosine"
gtaagaacgagagcagctgcagtggtgcgctcttgtcaggactcaccacgccaggcaccacggcaggactcaccacgccaggcagccaggccagaactcaccacaccaggaagccaggccag

SEQ ID NO: 14132 - DNA, 122 bp, Homo sapiens
  misc_feature (61)..(62): /note="This region represents a CpG dinucleotide"
  misc_feature (61)..(61): /note="Nucleotide may be methylated to form 5-methylcytosine"
gccctgctcacaatccctgagtggcttctgttgtggttagagtaaatacatactcctccccgtggctcagagtcattggtgtctgtcccctgcctgccatgtaaacctcctttctcgttgtg

SEQ ID NO: 14133 - DNA, 122 bp, Homo sapiens
  misc_feature (61)..(62): /note="This region represents a CpG dinucleotide"
  misc_feature (61)..(61): /note="Nucleotide may be methylated to form 5-methylcytosine"
cctcaggctactgtaacaaattgctataaagttgccacaagcaacagacacgtgctcttccgtaattctggatgccaggagtctgaaatcagaacacttgccattacatatagggcctacaa

SEQ ID NO: 14134 - DNA, 122 bp, Homo sapiens
  misc_feature (61)..(62): /note="This region represents a CpG dinucleotide"
  misc_feature (61)..(61): /note="Nucleotide may be methylated to form 5-methylcytosine"
cttcctttaaacagaccatataggcatttgcctgtgaacttagtaacctacagcctagtccgttgtctatcctgctagttgccacacacactctttctcaatacctaactcttcatgttctc

SEQ ID NO: 14135 - DNA, 122 bp, Homo sapiens
  misc_feature (61)..(62): /note="This region represents a CpG dinucleotide"
  misc_feature (61)..(61): /note="Nucleotide may be methylated to form 5-methylcytosine"
gtgtaccaggccccatggtcagtaggaaagtatatccctgagggtacaaaaatgaaaaagcgtacatccactcaccaaggacttcccactgtgccagggtctctagccccttatggggtgtg

SEQ ID NO: 14136 - DNA, 122 bp, Homo sapiens
  misc_feature (61)..(62): /note="This region represents a CpG dinucleotide"
  misc_feature (61)..(61): /note="Nucleotide may be methylated to form 5-methylcytosine"
agatccctaatttcataagcagcttcagtgagcacatagaattaacagccatatttcttacgctgttttttccacaatacctaccttgtatccagggattaaattcatgtaattctgaagga

SEQ ID NO: 14137 - DNA, 122 bp, Homo sapiens
  misc_feature (61)..(62): /note="This region represents a CpG dinucleotide"
  misc_feature (61)..(61): /note="Nucleotide may be methylated to form 5-methylcytosine"
ggacagagatgagccccatctctctcatgcccccacacacacaacacacgcacagggctgcgcaggagccagagaggtaaacagagagcagacagcggaaccaggtccctccagctcctcca

SEQ ID NO: 14138 - DNA, 122 bp, Homo sapiens
  misc_feature (61)..(62): /note="This region represents a CpG dinucleotide"
  misc_feature (61)..(61): /note="Nucleotide may be methylated to form 5-methylcytosine"
aacatgtccaaccttcaatttatcatttttattatcatcatcattgagactcctttactacggttgcatgaaattgcaatagtcaaggctggtcatgtgctctgtttgtatttcaggtgatg

SEQ ID NO: 14139 - DNA, 122 bp, Homo sapiens
  misc_feature (61)..(62): /note="This region represents a CpG dinucleotide"
  misc_feature (61)..(61): /note="Nucleotide may be methylated to form 5-methylcytosine"
cgagggtggggcagccattccatctttcaatgttgatggaaggcatccttggacagctcccgcccctttcacgctgccccagccagcctgagcatcagtcatgagcaaatcaccaactccca

SEQ ID NO: 14140 - DNA, 122 bp, Homo sapiens
  misc_feature (61)..(62): /note="This region represents a CpG dinucleotide"
  misc_feature (61)..(61): /note="Nucleotide may be methylated to form 5-methylcytosine"
ctgagctagtgcaaaacaagtgtccatagtaatcctgtggcagcccaatgctgccttcgtcgctacctctccacccctcaaatcaccatccattggcagtagcctctgccacccaggttcaa

SEQ ID NO: 14141 - DNA, 122 bp, Homo sapiens
  misc_feature (61)..(62): /note="This region represents a CpG dinucleotide"
  misc_feature (61)..(61): /note="Nucleotide may be methylated to form 5-methylcytosine"
aataataccgctattagataacaactaccccagcttaaaagcatgctgttccaggtgctgcgtcaaatccacctttacatgtgttatctcattaatcttcacaacagtgccaccagtattgg

SEQ ID NO: 14142 - DNA, 122 bp, Homo sapiens
  misc_feature (61)..(62): /note="This region represents a CpG dinucleotide"
  misc_feature (61)..(61): /note="Nucleotide may be methylated to form 5-methylcytosine"
ccagccccccagctttggttcccgctgggaattcaggccctgtcaggctgtaggtcctctcgggagccctctgcctgccctactgctggcctaggcctcgggctgtctggcggccgcgactc

SEQ ID NO: 14143 - DNA, 122 bp, Homo sapiens
  misc_feature (61)..(62): /note="This region represents a CpG dinucleotide"
  misc_feature (61)..(61): /note="Nucleotide may be methylated to form 5-methylcytosine"
gtcatgatcatgatcatgacgatagttggcatgtattgagtatgcatgcatcatgtgccacgtattgaactcaaaaaactcttaagtgtgatattttcagaaccttctacaatccttcaagc

SEQ ID NO: 14144 - DNA, 122 bp, Homo sapiens
  misc_feature (61)..(62): /note="This region represents a CpG dinucleotide"
  misc_feature (61)..(61): /note="Nucleotide may be methylated to form 5-methylcytosine"
tgtctgcatgcgtgtgcatgcatgtgtctgtgtggtttggacttggcgtgttatcccaggcgggccttgccatccagaaaagaagaaggcagttaggaaatgcacttaactgctgcagggaa

SEQ ID NO: 14145 - DNA, 122 bp, Homo sapiens
  misc_feature (61)..(62): /note="This region represents a CpG dinucleotide"
  misc_feature (61)..(61): /note="Nucleotide may be methylated to form 5-methylcytosine"
agtgcacatagagaacaaacttgttatatattcaaagaaggcagaggaaaaagacatggacgataaaaaggagaaaatgggaaaccagtgtggacgaacaagcaattccacacaggggtatt

SEQ ID NO: 14146 - DNA, 122 bp, Homo sapiens
  misc_feature (61)..(62): /note="This region represents a CpG dinucleotide"
  misc_feature (61)..(61): /note="Nucleotide may be methylated to form 5-methylcytosine"
taagtttctttcatcagcaaccatggcaagatctgtttgccttgcgcacttggtcttttacgcattatggacagctgaagttcatgcaggccttacggtgtgcttcagctgaagcctgacaa

SEQ ID NO: 14147 - DNA, 122 bp, Homo sapiens
  misc_feature (61)..(62): /note="This region represents a CpG dinucleotide"
  misc_feature (61)..(61): /note="Nucleotide may be methylated to form 5-methylcytosine"
attagaggagcaggggagacatttctttctttgaaaatcggtttccccaaatggacggcacgctgacagcagagccctctgtgctctggcactgactatagcagttagagggctgaagcctc

SEQ ID NO: 14148 - DNA, 122 bp, Homo sapiens
  misc_feature (61)..(62): /note="This region represents a CpG dinucleotide"
  misc_feature (61)..(61): /note="Nucleotide may be methylated to form 5-methylcytosine"
ttcctggcctggagtgtgaaccggttgcattgcttttctttctgagtcacatcgtttcaccgcatcacagctgtgtgggtaaccagggccctctggtgcacagtcagggccctctcctgtgt

SEQ ID NO: 14149 - DNA, 122 bp, Homo sapiens
  misc_feature (61)..(62): /note="This region represents a CpG dinucleotide"
  misc_feature (61)..(61): /note="Nucleotide may be methylated to form 5-methylcytosine"
atcccaatcatgctgggcaggaacaaggaaaggaaacaacccagcatatggccctgataacgtggcccacatggcttagggaaaaaggtagagaagggaaaggagcaaagcaaaaggaacag

SEQ ID NO: 14150 - DNA, 122 bp, Homo sapiens
  misc_feature (61)..(62): /note="This region represents a CpG dinucleotide"
  misc_feature (61)..(61): /note="Nucleotide may be methylated to form 5-methylcytosine"
agtaggactagaggtctgcaattgctgggggagggagcagaaactgccacacaaaaaaatcggaagcagagtttggttgccacaggaagaggggagggaactctgacaaaggtccaggcaca

SEQ ID NO: 14151 - DNA, 122 bp, Homo sapiens
  misc_feature (61)..(62): /note="This region represents a CpG dinucleotide"
  misc_feature (61)..(61): /note="Nucleotide may be methylated to form 5-methylcytosine"
ttctctctgtactgctggtcacactcacaggcctgtaaaacaagtgtattagaaattccccgccccacacagagtggctggagcctggggccccagggcatcctgggagcgacttcttgttc

SEQ ID NO: 14152 - DNA, 122 bp, Homo sapiens
  misc_feature (61)..(62): /note="This region represents a CpG dinucleotide"
  misc_feature (61)..(61): /note="Nucleotide may be methylated to form 5-methylcytosine"
tgagctgctgcacccggcccaagcctcttctcttaatccagtcactggtgattaactatccggaagggctcactcaatactccccactctacctcctgcccatttcctgacctttgcccctg

SEQ ID NO: 14153 - DNA, 122 bp, Homo sapiens
  misc_feature (61)..(62): /note="This region represents a CpG dinucleotide"
  misc_feature (61)..(61): /note="Nucleotide may be methylated to form 5-methylcytosine"
cggggggagactcatcaagcactttggccagtgcctggcgtgcatatgctgtgtgcttggcgttagcaggtggttcttactccgggacaggctctgctggtaggtgagctgtttgccaatcc

SEQ ID NO: 14154 - DNA, 122 bp, Homo sapiens
  misc_feature (61)..(62): /note="This region represents a CpG dinucleotide"
  misc_feature (61)..(61): /note="Nucleotide may be methylated to form 5-methylcytosine"
tttgtagtatgtttctcctaaggtggttaaacaaactctcatttgactgtgagaactcatcgaaactggggaaccatgatgataaaattatacagccaggtgggaagcagctcatgagataa

SEQ ID NO: 14155 - DNA, 122 bp, Homo sapiens
  misc_feature (61)..(62): /note="This region represents a CpG dinucleotide"
  misc_feature (61)..(61): /note="Nucleotide may be methylated to form 5-methylcytosine"
ctgctactctggctaaagtcttccacttacttttctcacttacaggtacctgaatatgtgcgtgcaaatgtaaaagtctttagatcaaaataggaacaaggaaagtttatccgtttcagttt

SEQ ID NO: 14156 - DNA, 122 bp, Homo sapiens
  misc_feature (61)..(62): /note="This region represents a CpG dinucleotide"
  misc_feature (61)..(61): /note="Nucleotide may be methylated to form 5-methylcytosine"
tcagggttattgagtaacaggctggctgggtttgcaggccagcgtgttcctggtggcagccgctcactcattaacacttctggaagtgctgcatgtctggttaaactgcaaatgctttgcaa

SEQ ID NO: 14157 - DNA, 122 bp, Homo sapiens
  misc_feature (61)..(62): /note="This region represents a CpG dinucleotide"
  misc_feature (61)..(61): /note="Nucleotide may be methylated to form 5-methylcytosine"
gagattacatgaatgatgtcatttaatcttcaggccaagtttgctctactttacccctcccggccccaacactccacagaaagtagtgagctacatggtagagggcctgcttttatgtggtg

SEQ ID NO: 14158 - DNA, 122 bp, Homo sapiens
  misc_feature (61)..(62): /note="This region represents a CpG dinucleotide"
  misc_feature (61)..(61): /note="Nucleotide may be methylated to form 5-methylcytosine"
tgaagaacagaattggggaacttttttcaaagctttaaaatgaggcccaaatcccagtcccgttttttgtctttgtgccttacttctcgtgtgtgtcttcatgaaccctccaggtgccttct

SEQ ID NO: 14159 - DNA, 122 bp, Homo sapiens
  misc_feature (61)..(62): /note="This region represents a CpG dinucleotide"
  misc_feature (61)..(61): /note="Nucleotide may be methylated to form 5-methylcytosine"
acaagtttgacagcgcccaatagacatacatgctggacaggtggggtgaggactgagctccgccctggcctgcctatgccaagtgttgtcctcacagatccagtgtgcctgcggggctgcca

SEQ ID NO: 14160 - DNA, 122 bp, Homo sapiens
  misc_feature (61)..(62): /note="This region represents a CpG dinucleotide"
  misc_feature (61)..(61): /note="Nucleotide may be methylated to form 5-methylcytosine"
ttacaaagttgagcgtgagcaatggagagaagccagtccagattggaacagtgtgactcacgagatggggttgagcacactgtcatcaccagctgccctctactgctgtactatcttttaca

SEQ ID NO: 14161 - DNA, 122 bp, Homo sapiens
  misc_feature (61)..(62): /note="This region represents a CpG dinucleotide"
  misc_feature (61)..(61): /note="Nucleotide may be methylated to form 5-methylcytosine"
tccttgatagcagccctctagggccctggagtgagggacagctcttctcattcaggctctcggcactgctgagggcaggtgacagcctaaccagctgtcacacatcaggacagccctagaag

SEQ ID NO: 14162 - DNA, 122 bp, Homo sapiens
  misc_feature (61)..(62): /note="This region represents a CpG dinucleotide"
  misc_feature (61)..(61): /note="Nucleotide may be methylated to form 5-methylcytosine"
tcttcataaccaattccaacgtgttctcacttaagtaatgggtataaaaccccacttaagcgtaatattttaaatatttgaagccatcttttctgagagaacccgaagctgttttttctaga

SEQ ID NO: 14163 - DNA, 122 bp, Homo sapiens
  misc_feature (61)..(62): /note="This region represents a CpG dinucleotide"
  misc_feature (61)..(61): /note="Nucleotide may be methylated to form 5-methylcytosine"
tctcaagctgacattgctgcaggcgccttcttggcagcctttcctcagatctgcctcctccggggacttctaaagaggagcctgaggtttctctgttacagccggcttcacttgctgccctc

SEQ ID NO: 14164 - DNA, 122 bp, Homo sapiens
  misc_feature (61)..(62): /note="This region represents a CpG dinucleotide"
  misc_feature (61)..(61): /note="Nucleotide may be methylated to form 5-methylcytosine"
tccctttcaaatggctccccaagaagtacatactcaaggactaagatgaatcaggaagtacgccaggaaaagaaatgagacagagagccagaaaaaacaggcactaaccctagatctttaaa

SEQ ID NO: 14165 - DNA, 122 bp, Homo sapiens
  misc_feature (61)..(62): /note="This region represents a CpG dinucleotide"
  misc_feature (61)..(61): /note="Nucleotide may be methylated to form 5-methylcytosine"
gaatggggctcggggagggtcagacggtctattgggctcccagcctgaggcctccctccccggcccgtaacccctcctgccgctggggccctcctgcctttccctgcacgccactccctggg

SEQ ID NO: 14166 - DNA, 122 bp, Homo sapiens
  misc_feature (61)..(62): /note="This region represents a CpG dinucleotide"
  misc_feature (61)..(61): /note="Nucleotide may be methylated to form 5-methylcytosine"
tcagaaagattttttaaagtgtgaagctaagtatgttggattaagtacctaaccttgatacgaggaagtctggtaaaataatttagcattagataggttcagttgctgaggaatgtttctga

SEQ ID NO: 14167 - DNA, 122 bp, Homo sapiens
  misc_feature (61)..(62): /note="This region represents a CpG dinucleotide"
  misc_feature (61)..(61): /note="Nucleotide may be methylated to form 5-methylcytosine"
tgctcagacagtagggaatctggagggatgaatgagcaaagcctgtgtcatcctagaggtcgtgtggaggtttgcaagagtaaaggatgcttagaactgtgtctcacagaggtaacgtagga

SEQ ID NO: 14168 - DNA, 122 bp, Homo sapiens
  misc_feature (61)..(62): /note="This region represents a CpG dinucleotide"
  misc_feature (61)..(61): /note="Nucleotide may be methylated to form 5-methylcytosine"
tgacagggcggagcagaaagagagggagaaaggagactcacccctggaaagggagtttgccgtcgaaaactgggcttcttctgttggaaatcttagagacactttcagtgcaggtctttggc

SEQ ID NO: 14169 - DNA, 122 bp, Homo sapiens
  misc_feature (61)..(62): /note="This region represents a CpG dinucleotide"
  misc_feature (61)..(61): /note="Nucleotide may be methylated to form 5-methylcytosine"
attaagaaaccaatcactacactataaaccaatcactacactattcttctttcaaagaaacgaaggaagttctaggatcatgagagatggagagtattcaatctcctgaatgtaaatctacc

SEQ ID NO: 14170 - DNA, 122 bp, Homo sapiens
  misc_feature (61)..(62): /note="This region represents a CpG dinucleotide"
  misc_feature (61)..(61): /note="Nucleotide may be methylated to form 5-methylcytosine"
cccctcctcaaggcttatcatccatctttactgccgcacaatgatgcggtggtttgttttcgtattcactgcagcaggtaataaatgttcctactttggcttcagttttaataaaactatca

SEQ ID NO: 14171 - DNA, 122 bp, Homo sapiens
  misc_feature (61)..(62): /note="This region represents a CpG dinucleotide"
  misc_feature (61)..(61): /note="Nucleotide may be methylated to form 5-methylcytosine"
gtgattgaggggcaggtggctggagagatgggcagggcctcctaggcatggggtgactgacgcaccagtggtctgcaaaaacggagcatcacaccagtgcgcatgagctctcctgccccttg

SEQ ID NO: 14172 - DNA, 122 bp, Homo sapiens
  misc_feature (61)..(62): /note="This region represents a CpG dinucleotide"
  misc_feature (61)..(61): /note="Nucleotide may be methylated to form 5-methylcytosine"
aagtatactttgatttgagctttgcctaagtctatggcaaactgaattaagccactactacgttatagaaattacgtcattatttgcaggctaacttttccatttataactaacacatgcca

SEQ ID NO: 14173 - DNA, 122 bp, Homo sapiens
  misc_feature (61)..(62): /note="This region represents a CpG dinucleotide"
  misc_feature (61)..(61): /note="Nucleotide may be methylated to form 5-methylcytosine"
gtgttgcgtgctggtggcagatctggaatactgcggcctcaagaagtccttgcactaagtcgtgatgctggtctgggtgcaggaaagtcttgggataagtcctgtttcaggcatgtgggcgt

SEQ ID NO: 14174 - DNA, 122 bp, Homo sapiens
  misc_feature (61)..(62): /note="This region represents a CpG dinucleotide"
  misc_feature (61)..(61): /note="Nucleotide may be methylated to form 5-methylcytosine"
gttcaaaaggataaaacatgcctggcccgcgtctgcaggttctgataggatggctctggacgttgaggggttaatgcgctctctctctctctctctctctctctctctctctctctctctct

SEQ ID NO: 14175 - DNA, 122 bp, Homo sapiens
  misc_feature (61)..(62): /note="This region represents a CpG dinucleotide"
  misc_feature (61)..(61): /note="Nucleotide may be methylated to form 5-methylcytosine"
gcctgggccttccctagtctgtgcaccactgcgtttgagacgctgggctgtgacccctggcggcagctccactctgctggagctggggcttgttttaaattatgacctaaaactctaaaacc

SEQ ID NO: 14176 - DNA, 122 bp, Homo sapiens
  misc_feature (61)..(62): /note="This region represents a CpG dinucleotide"
  misc_feature (61)..(61): /note="Nucleotide may be methylated to form 5-methylcytosine"
gttttctcactccactgcttgtgcttaactgaagcaaaaggaaatgcattgaaggatattcggtgcttgcagaattaatgggaagccagtgtcaggcctctgagcccaagctaagccatcat

SEQ ID NO: 14177 - DNA, 122 bp, Homo sapiens
  misc_feature (61)..(62): /note="This region represents a CpG dinucleotide"
  misc_feature (61)..(61): /note="Nucleotide may be methylated to form 5-methylcytosine"
ccctctctgacccaggctgagtccatactgcccctgatcccagaaggaatgctgacccctcgtcgtatgaactgtgcatagtctccagagcttcaaaggcaacacaagctcgcaactctaag

SEQ ID NO: 14178 - DNA, 122 bp, Homo sapiens
  misc_feature (61)..(62): /note="This region represents a CpG dinucleotide"
  misc_feature (61)..(61): /note="Nucleotide may be methylated to form 5-methylcytosine"
acagcaaacacgctgctccccagcacctcctgcagtccagccccaccctccttgctgctgcgcttagaggagcagcctgagaccagacctccaggtctctttcatccaacccacctgcctgg

SEQ ID NO: 14179 - DNA, 122 bp, Homo sapiens
  misc_feature (61)..(62): /note="This region represents a CpG dinucleotide"
  misc_feature (61)..(61): /note="Nucleotide may be methylated to form 5-methylcytosine"
tctgaaaagagatagcatcaatacagccctgcaactaaaaataccacaaatcagaaacaacgttcttctcttcttgatccactgaagagaggctgtgttctgtgtgctgtctgtttccttaa

SEQ ID NO: 14180 - DNA, 122 bp, Homo sapiens
  misc_feature (61)..(62): /note="This region represents a CpG dinucleotide"
  misc_feature (61)..(61): /note="Nucleotide may be methylated to form 5-methylcytosine"
ccccatgttggaatcccagctctgccattcacagctgtaaaattcagagcaagtaacttccgtggcctcagtttcctcatcttaaaatgggcattgtgacatttatctcctaggatcacaat

SEQ ID NO: 14181 - DNA, 122 bp, Homo sapiens
  misc_feature (61)..(62): /note="This region represents a CpG dinucleotide"
  misc_feature (61)..(61): /note="Nucleotide may be methylated to form 5-methylcytosine"
ttcaacatttcctcaaatctttcagccactgtggtggttagatctgaagacaagcctgggcgcggtggctcacacctgtaatcccagcactttgagaggccgaggcgggccgatcacttgag

SEQ ID NO: 14182 - DNA, 122 bp, Homo sapiens
  misc_feature (61)..(62): /note="This region represents a CpG dinucleotide"
  misc_feature (61)..(61): /note="Nucleotide may be methylated to form 5-methylcytosine"
gttgaactagcttcatcaacttctcaataaatggacacatttagcttctaaaggtagaaacgagtctaaaagggaagaagatggtaagcaatttagcaacctacagtcttcttcagtttttg

SEQ ID NO: 14183 - DNA, 122 bp, Homo sapiens
  misc_feature (61)..(62): /note="This region represents a CpG dinucleotide"
  misc_feature (61)..(61): /note="Nucleotide may be methylated to form 5-methylcytosine"
gtcaggaggcaaaagagagaaggattgagagactgttattttgaattcaagtagcaaaaacgttagaaaagacaggtcttgaacattgaggaatctgagttattgtcaccataataaatcag

SEQ ID NO: 14184 - DNA, 122 bp, Homo sapiens
  misc_feature (61)..(62): /note="This region represents a CpG dinucleotide"
  misc_feature (61)..(61): /note="Nucleotide may be methylated to form 5-methylcytosine"
gaccaagaatagccgtgcccagctcctggctgcctcctggccatcatctctaaattgccacgagatcttagaggctacaatcttatggtcttggagcctgatagtgttaatagtgatgctca

SEQ ID NO: 14185 - DNA, 122 bp, Homo sapiens
  misc_feature (61)..(62): /note="This region represents a CpG dinucleotide"
  misc_feature (61)..(61): /note="Nucleotide may be methylated to form 5-methylcytosine"
ttgggggtcattatggtttctgtttcaacttggtattcctcttacttccctccactagttcgatatctagtacagaatcttatatgctagcacagaagcctgtttccattaaattttgttga

SEQ ID NO: 14186 - DNA, 122 bp, Homo sapiens
  misc_feature (61)..(62): /note="This region represents a CpG dinucleotide"
  misc_feature (61)..(61): /note="Nucleotide may be methylated to form 5-methylcytosine"
aacctctgtggcttgaaaacacaaagtttaattacttgcccatgcttctcttccactgcacgctgggagtagctcctgtatcctcaggcccaggtgaaataattttcccatcctgagcactg

SEQ ID NO: 14187 - DNA, 122 bp, Homo sapiens
  misc_feature (61)..(62): /note="This region represents a CpG dinucleotide"
  misc_feature (61)..(61): /note="Nucleotide may be methylated to form 5-methylcytosine"
cctggggctctgctgctaagacagaaggagacgagggagaaagagaaagaggtgtcgctgcggggcctgctaggagcagcccgtctctggccaaacagagatctcatcccaattgcccggaa

SEQ ID NO: 14188 - DNA, 122 bp, Homo sapiens
  misc_feature (61)..(62): /note="This region represents a CpG dinucleotide"
  misc_feature (61)..(61): /note="Nucleotide may be methylated to form 5-methylcytosine"
gacttgtgttacccctactggtcttgtcttggtgcctggaattctcctagaatatactcccgttagtggaagcaatgattcagtgataatgaaccctgatggatgtttaacctcttacttag

SEQ ID NO: 14189 - DNA, 122 bp, Homo sapiens
  misc_feature (61)..(62): /note="This region represents a CpG dinucleotide"
  misc_feature (61)..(61): /note="Nucleotide may be methylated to form 5-methylcytosine"
tgaactaagacaacaccctttatgtcagttaaatttacaattaccttacgtacatatatacgtacatataaggtcccaccctgccccatcttggaaagctacttgttaaacatttaccagca

SEQ ID NO: 14190 - DNA, 122 bp, Homo sapiens
  misc_feature (61)..(62): /note="This region represents a CpG dinucleotide"
  misc_feature (61)..(61): /note="Nucleotide may be methylated to form 5-methylcytosine"
cccctgcctcctgcacaactccctcccccaaagctcaaaacagctcctggagcaggcccacgtgctgcccaagttgcccaagttgagtccttgttgccactcaacaggaccactggttacca

SEQ ID NO: 14191 - DNA, 122 bp, Homo sapiens
  misc_feature (61)..(62): /note="This region represents a CpG dinucleotide"
  misc_feature (61)..(61): /note="Nucleotide may be methylated to form 5-methylcytosine"
gcctctctggtgagggcccttcccgctgctatctctttactgcccctagccagctgccctcggctctgaacttcctctgtggctatgcagttgttcagaagtaaaggcctgtgggaagggcc

SEQ ID NO: 14192 - DNA, 122 bp, Homo sapiens
  misc_feature (61)..(62): /note="This region represents a CpG dinucleotide"
  misc_feature (61)..(61): /note="Nucleotide may be methylated to form 5-methylcytosine"
tataattggaacttacctggccctcattccttcattatattatcccaccgatttgatggtcgtgttgaaaacatactctaggaaagtctgataattttattttattgtttctggaaaccggc

SEQ ID NO: 14193 - DNA, 122 bp, Homo sapiens
  misc_feature (61)..(62): /note="This region represents a CpG dinucleotide"
  misc_feature (61)..(61): /note="Nucleotide may be methylated to form 5-methylcytosine"
agccctacttgcatgcatggcttcctcaggtggttcacacactggctgtaacctgatccacgggaagccaagtaaactccccggccggccccccatgggtgctcactgcctccaacatcacc

SEQ ID NO: 14194 - DNA, 122 bp, Homo sapiens
  misc_feature (61)..(62): /note="This region represents a CpG dinucleotide"
  misc_feature (61)..(61): /note="Nucleotide may be methylated to form 5-methylcytosine"
ataatgtatgcaaagtacttagcatgatgcccaacacatagtaaacacccaataaatggccgtgatttttattactctccactgtccaggcagcgactataacatctccttaactctctgtg

SEQ ID NO: 14195 - DNA, 122 bp, Homo sapiens
  misc_feature (61)..(62): /note="This region represents a CpG dinucleotide"
  misc_feature (61)..(61): /note="Nucleotide may be methylated to form 5-methylcytosine"
gaggctagggctaagtgacctgccactcctctctaggcctggagagggacatgtgtactacgtgtactcaggctcagtcctgaaacacgaggactgaagtgttacatggcctgtttctggtt

SEQ ID NO: 14196 - DNA, 122 bp, Homo sapiens
  misc_feature (61)..(62): /note="This region represents a CpG dinucleotide"
  misc_feature (61)..(61): /note="Nucleotide may be methylated to form 5-methylcytosine"
tctaacctaactgacttcaccttgcttttaacctttaagctgtccttgttccttcctggacgtgggctgaactaactttgggaggaagttagtttatagtttatagtttaaaacaaagatga

SEQ ID NO: 14197 - DNA, 122 bp, Homo sapiens
  misc_feature (61)..(62): /note="This region represents a CpG dinucleotide"
  misc_feature (61)..(61): /note="Nucleotide may be methylated to form 5-methylcytosine"
gtgtactaaactaaaactttagcatacatcacatcgaatgtttctttgcttcagacaaagcgaaaagaaaaaaggacattaggaaccctcatttttattccttttcttaggaaagttaaaca

SEQ ID NO: 14198 - DNA, 122 bp, Homo sapiens
  misc_feature (61)..(62): /note="This region represents a CpG dinucleotide"
  misc_feature (61)..(61): /note="Nucleotide may be methylated to form 5-methylcytosine"
acgcctattttttaatgcttagttttggcttgaaattcttcttcacctggagttttcttacgttaatacattaaaataacctgaaggaaactttcgttatgggccaatattagctcttatgg

SEQ ID NO: 14199 - DNA, 122 bp, Homo sapiens
  misc_feature (61)..(62): /note="This region represents a CpG dinucleotide"
  misc_feature (61)..(61): /note="Nucleotide may be methylated to form 5-methylcytosine"
ggctgtttggctgttggcattgggtgtttgccttgtgatatacccagaaaaggattcatacgttacatatgatgaagtctggggatgggactggattctgagagtataaagatggcaatgca

SEQ ID NO: 14200 - DNA, 122 bp, Homo sapiens
  misc_feature (61)..(62): /note="This region represents a CpG dinucleotide"
  misc_feature (61)..(61): /note="Nucleotide may be methylated to form 5-methylcytosine"
tgaacttgtttacacatgtgaatatgtcaaagcttttaccagactgctcagggccctgcacgcttttgttccctcacaatcaaagtgataggtatatatatggtaagaccacatccgttctt

SEQ ID NO: 14201 - DNA, 122 bp, Homo sapiens
  misc_feature (61)..(62): /note="This region represents a CpG dinucleotide"
  misc_feature (61)..(61): /note="Nucleotide may be methylated to form 5-methylcytosine"
gaggctcagagaagttaaataaacgttccattgtgtcacaacagtacattttgcagccaccgtatgaattcaaatctgtctctttgcaaactacagactagcagctatgaagaatttctgat

SEQ ID NO: 14202 - DNA, 122 bp, Homo sapiens
  misc_feature (61)..(62): /note="This region represents a CpG dinucleotide"
  misc_feature (61)..(61): /note="Nucleotide may be methylated to form 5-methylcytosine"
cctgtaggtgaagacacagactccacagggtggggcttctggctggctcctggataaatacgcagcacctggaatgccacctagcacacagcggtgcctcagtaaataatgctggaatgagt

SEQ ID NO: 14203 - DNA, 122 bp, Homo sapiens
  misc_feature (61)..(62): /note="This region represents a CpG dinucleotide"
  misc_feature (61)..(61): /note="Nucleotide may be methylated to form 5-methylcytosine"
caagtcacatggcatgagctgggcattaggcaaggacatggcatcccaggcttcacaggtcggggacattctgtccacaaaggccaaagagggcaactacaaaggaaaagtcttatctaaga

SEQ ID NO: 14204 - DNA, 122 bp, Homo sapiens
  misc_feature (61)..(62): /note="This region represents a CpG dinucleotide"
  misc_feature (61)..(61): /note="Nucleotide may be methylated to form 5-methylcytosine"
cgaggccccttcccgggtgtcagggaatgcaagccttcacagctgacaccacagtgccttcgagatggaatcagcgtcccagtgtgggtgcccaggggattgtgggccgggggatgagggag

SEQ ID NO: 14205 - DNA, 122 bp, Homo sapiens
  misc_feature (61)..(62): /note="This region represents a CpG dinucleotide"
  misc_feature (61)..(61): /note="Nucleotide may be methylated to form 5-methylcytosine"
cttcttttcaagtttgagggggttgtggaccatgtgaggctggacggctcacatgtcagccgccaggctcttagttacagacatggcaaacttccatcatttaagcagtggcacagatgttg

SEQ ID NO: 14206 - DNA, 122 bp, Homo sapiens
  misc_feature (61)..(62): /note="This region represents a CpG dinucleotide"
  misc_feature (61)..(61): /note="Nucleotide may be methylated to form 5-methylcytosine"
acattctcagatgtgttcaattgcaattgtgtgtcactatgacacacaatgaccaaataccgttccagcattacttgttgaaaggttacccttctcccagtgaactaccttgacatctttga

SEQ ID NO: 14207 - DNA, 122 bp, Homo sapiens
  misc_feature (61)..(62): /note="This region represents a CpG dinucleotide"
  misc_feature (61)..(61): /note="Nucleotide may be methylated to form 5-methylcytosine"
accagttaaaggcaaatttcaataatgagagcagttatcacgtatctagtacttaccatgcgccagactatgatctaaatttatgacacatattaaatcatttaagccttacaaccatgtat

SEQ ID NO: 14208 - DNA, 122 bp, Homo sapiens
  misc_feature (61)..(62): /note="This region represents a CpG dinucleotide"
  misc_feature (61)..(61): /note="Nucleotide may be methylated to form 5-methylcytosine"
gcgtgaaccagtgacttttcccctttagattttcccattctcaactaagggtaatcagtacgttttcaaacagtgatgtccaagaactcaaagcattttctagatttgtcaactctcttcaa

SEQ ID NO: 14209 - DNA, 122 bp, Homo sapiens
  misc_feature (61)..(62): /note="This region represents a CpG dinucleotide"
  misc_feature (61)..(61): /note="Nucleotide may be methylated to form 5-methylcytosine"
aggtcagcacaatgatccccagattgtacggaaataataacaatgggaacaacagagcagcgatatttcctgagcactcgcagtgtgccgatcattgattggattatgtcacctggatcatc

SEQ ID NO: 14210 - DNA, 122 bp, Homo sapiens
  misc_feature (61)..(62): /note="This region represents a CpG dinucleotide"
  misc_feature (61)..(61): /note="Nucleotide may be methylated to form 5-methylcytosine"
actttagagaaaaagcaattttgattggatttctgattttaaacctgtccaaagaacatacgctgcttgcttagacaatagaagtggtcgagattgaaaaaggaggaaaaataaaaaacaaa

SEQ ID NO: 14211 - DNA, 122 bp, Homo sapiens
  misc_feature (61)..(62): /note="This region represents a CpG dinucleotide"
  misc_feature (61)..(61): /note="Nucleotide may be methylated to form 5-methylcytosine"
ggtagagaaacagctgatctcgtgttagccactgggtacaactgtgcctgcgtaaccctgcgcttttaaaaaacggaagtcaacgcaaatctcttcctcaggaaattgatatttagactgtg

SEQ ID NO: 14212 - DNA, 122 bp, Homo sapiens
  misc_feature (61)..(62): /note="This region represents a CpG dinucleotide"
  misc_feature (61)..(61): /note="Nucleotide may be methylated to form 5-methylcytosine"
caacccccagccccagccccggccccgtcctcatcaacacatcatccagtcaccatgcgccgtgcctgcgcatccccccgcccgctggcgaccccgcagcgcacctgccttccacccagggg

SEQ ID NO: 14213 - DNA, 122 bp, Homo sapiens
  misc_feature (61)..(62): /note="This region represents a CpG dinucleotide"
  misc_feature (61)..(61): /note="Nucleotide may be methylated to form 5-methylcytosine"
tcctcactaattcctaagagcatgcagagatctgaaaccaaaacgtttgagaaacgatgacgtaactcctagctctggattaagggagaatgtgtgacaaagagcatttggtataggaggag

SEQ ID NO: 14214 - DNA, 122 bp, Homo sapiens
  misc_feature (61)..(62): /note="This region represents a CpG dinucleotide"
  misc_feature (61)..(61): /note="Nucleotide may be methylated to form 5-methylcytosine"
tcctggtagaaatgacacccctgtgaaatctgcttcatagatgacattaggtgaccacaacgattagtgtaccatgaacctcagaaccactggagctgtgggtgccaaaccctgtgggacct

SEQ ID NO: 14215 - DNA, 122 bp, Homo sapiens
  misc_feature (61)..(62): /note="This region represents a CpG dinucleotide"
  misc_feature (61)..(61): /note="Nucleotide may be methylated to form 5-methylcytosine"
atgagattgcccatagtcacctcttcatttaaaaagcattagaaagagactccactactacgtaggggaaatcacagctctttagaggcgaccactgctgcagtctcttactttgcatttta

SEQ ID NO: 14216 - DNA, 122 bp, Homo sapiens
  misc_feature (61)..(62): /note="This region represents a CpG dinucleotide"
  misc_feature (61)..(61): /note="Nucleotide may be methylated to form 5-methylcytosine"
gaggcaggaatcgtactctgcgaatgaacaagaccagatgcccagtggagaccagaatttcgcattcctctgagccttggttgtaatttctctgtctaggttggctgtaatctgagcataaa

SEQ ID NO: 14217 - DNA, 122 bp, Homo sapiens
  misc_feature (61)..(62): /note="This region represents a CpG dinucleotide"
  misc_feature (61)..(61): /note="Nucleotide may be methylated to form 5-methylcytosine"
actctgcctgttccatcatctttgttccatctctgcctgttccatcatctcggcaagatccggtatttccttatgtgtttatggcctacttctcctcactggaatgtaaactcttagaaagc

SEQ ID NO: 14218 - DNA, 122 bp, Homo sapiens
  misc_feature (61)..(62): /note="This region represents a CpG dinucleotide"
  misc_feature (61)..(61): /note="Nucleotide may be methylated to form 5-methylcytosine"
cccgtttcctttgttcctggctgctgtggtgctggtcacgcttgggagcatggagacactcgttccttgtctctccaacccaccggccattggcccagatcacaggcacctctttggcagat

SEQ ID NO: 14219 - DNA, 122 bp, Homo sapiens
  misc_feature (61)..(62): /note="This region represents a CpG dinucleotide"
  misc_feature (61)..(61): /note="Nucleotide may be methylated to form 5-methylcytosine"
gagcaagtgtacatcgttggcctcaggcacatttcatctgattgagtcatctggctcaagcggccactctggtcctttttgtaacccgactattaggggaaagcgtatgtgacagaatgtga

SEQ ID NO: 14220 - DNA, 122 bp, Homo sapiens
  misc_feature (61)..(62): /note="This region represents a CpG dinucleotide"
  misc_feature (61)..(61): /note="Nucleotide may be methylated to form 5-methylcytosine"
aagttgttgattattaaacatcaggaagatattttgactagaggaagtaaatgttttaagcggttcattgaaaggacatttcaatgattaacaggaactgtgctacaccagttaggcttaat

SEQ ID NO: 14221 - DNA, 122 bp, Homo sapiens
  misc_feature (61)..(62): /note="This region represents a CpG dinucleotide"
  misc_feature (61)..(61): /note="Nucleotide may be methylated to form 5-methylcytosine"
catgctcgttaagaatcatcaccactccctaatctcaagtacccagggacacaaacactgcggaaggccgctgcctaggagaaccagagacctttgttcacttgtttatctgctgaccttcc

SEQ ID NO: 14222 - DNA, 122 bp, Homo sapiens
  misc_feature (61)..(62): /note="This region represents a CpG dinucleotide"
  misc_feature (61)..(61): /note="Nucleotide may be methylated to form 5-methylcytosine"
ttattacagtgtcatatccctggggcacagagcagtgctggcacatagccagagctcaatcgatacatacctaatgaatgaaagtacagtggacatcctaattcagccattctttgctaact

SEQ ID NO: 14223 - DNA, 122 bp, Homo sapiens
  misc_feature (61)..(62): /note="This region represents a CpG dinucleotide"
  misc_feature (61)..(61): /note="Nucleotide may be methylated to form 5-methylcytosine"
ttgttcattcaacaaatatttatttagcatcatttataagtctggaccagtgctcagtggcgggttacaagggtgagcaaaagaggctctctgatacctggagagcaaagactcaactgggg

SEQ ID NO: 14224 - DNA, 122 bp, Homo sapiens
  misc_feature (61)..(62): /note="This region represents a CpG dinucleotide"
  misc_feature (61)..(61): /note="Nucleotide may be methylated to form 5-methylcytosine"
aaatgtgtttcttatgtaatgtttgcaggcagggtttcctgttgtacagcctacagcccccgcaagataaagcaccccttggaaaagaacaagatgacaaagatcctagttcttggaggagg

SEQ ID NO: 14225 - DNA, 122 bp, Homo sapiens
  misc_feature (61)..(62): /note="This region represents a CpG dinucleotide"
  misc_feature (61)..(61): /note="Nucleotide may be methylated to form 5-methylcytosine"
cgaaaatcaacccccatgctcacagaaggtcctggagaaacctcagcgctggcggggtaacgtgctgtctgctgaaaccgaggagcgtgatgaacctgttctacatctcagccactgaacca

SEQ ID NO: 14226 - DNA, 122 bp, Homo sapiens
  misc_feature (61)..(62): /note="This region represents a CpG dinucleotide"
  misc_feature (61)..(61): /note="Nucleotide may be methylated to form 5-methylcytosine"
ggtgaagacttaacttacaggtaagggaggcccttgactgacgtggggtgggaactgtttcgagctgtccttatctctgggcctgtttcctgacctgtgagatgggcctgtttcctgacccg

SEQ ID NO: 14227 - DNA, 122 bp, Homo sapiens
  misc_feature (61)..(62): /note="This region represents a CpG dinucleotide"
  misc_feature (61)..(61): /note="Nucleotide may be methylated to form 5-methylcytosine"
ttcaggtagtgaagagtggtatgagtaatactgtgagccaacagttagaaatcctaataccgaactgtggatgtatatctgagggcaatctttactacagctgctgccgtgaaagtcagaat

SEQ ID NO: 14228 - DNA, 122 bp, Homo sapiens
  misc_feature (61)..(62): /note="This region represents a CpG dinucleotide"
  misc_feature (61)..(61): /note="Nucleotide may be methylated to form 5-methylcytosine"
aaatttctgaaatgatagaaatagtttgtatatgttgcctactatggtaaccactggccacgggtagttattgtgcaacctgaagtatgactaatgagactgagaaactaatttttaaattg

SEQ ID NO: 14229 - DNA, 122 bp, Homo sapiens
  misc_feature (61)..(62): /note="This region represents a CpG dinucleotide"
  misc_feature (61)..(61): /note="Nucleotide may be methylated to form 5-methylcytosine"
ttatcaaaaacgagctcatggtcattaatttgtgaagtgcaaaaatactaatttttctcgcgttgtcgttttttctgggcttgccgaggcccctccccctcctgcctcgcttcccatccccc

SEQ ID NO: 14230 - DNA, 122 bp, Homo sapiens
  misc_feature (61)..(62): /note="This region represents a CpG dinucleotide"
  misc_feature (61)..(61): /note="Nucleotide may be methylated to form 5-methylcytosine"
tttagcaacttttgaagtgggattaacaagtttggccaatgaagcttcttccctgcccaccgccagaggtgctggagaaaagtaatcctggagggtcggcgtggaggcagtagagaggttta

SEQ ID NO: 14231 - DNA, 122 bp, Homo sapiens
  misc_feature (61)..(62): /note="This region represents a CpG dinucleotide"
  misc_feature (61)..(61): /note="Nucleotide may be methylated to form 5-methylcytosine"
agaaaataaatgcttttatgatgctccccacgcaggttctgcctgactccgggatgctgccgtcccagctctgggctgagccccttttgtaattacatggggaccctgtccccatgggcgca

SEQ ID NO: 14232 - DNA, 122 bp, Homo sapiens
  misc_feature (61)..(62): /note="This region represents a CpG dinucleotide"
  misc_feature (61)..(61): /note="Nucleotide may be methylated to form 5-methylcytosine"
tttctaggaaatagctcacttgccagttttggtaaccctaacagagctgttttgccaaggcgtctggtgaatatttctgtcttccagtcaggactaatatagtacttttcagaggtgatagc

SEQ ID NO: 14233 - DNA, 122 bp, Homo sapiens
  misc_feature (61)..(62): /note="This region represents a CpG dinucleotide"
  misc_feature (61)..(61): /note="Nucleotide may be methylated to form 5-methylcytosine"
cctcctgcttgcttggaatgtgaattcagactttagtcagcaggctaatgcaagggacaccgctggtgcacaggctgcagattaagggcggggagacatcccattattgggtgcacattctc

SEQ ID NO: 14234 - DNA, 122 bp, Homo sapiens
  misc_feature (61)..(62): /note="This region represents a CpG dinucleotide"
  misc_feature (61)..(61): /note="Nucleotide may be methylated to form 5-methylcytosine"
ggcaggagcatggggtgcttggttgtttccttcctaataaaataaacgcgggtcgccatgcgttgggcctcttgtcgctcatttctgcgctgggctttaggcgcgtgctcgccggagggatg

SEQ ID NO: 14235 - DNA, 122 bp, Homo sapiens
  misc_feature (61)..(62): /note="This region represents a CpG dinucleotide"
  misc_feature (61)..(61): /note="Nucleotide may be methylated to form 5-methylcytosine"
aatcacctatacccactttctatgaatctgcagtttctgcaattcttttatttcttcccacgtatgcttgttctaagaataaccgctgaaatgtaattttacatttgttgtatttaataaac

SEQ ID NO: 14236 - DNA, 122 bp, Homo sapiens
  misc_feature (61)..(62): /note="This region represents a CpG dinucleotide"
  misc_feature (61)..(61): /note="Nucleotide may be methylated to form 5-methylcytosine"
tttgtgtccaggagtaaccatggcacagagcctgtgggcagggagtcctgcttcagagcccgcctgggtttctggggaggtaatccctgcagctggcgggtggcccgcagctggggatgttt

SEQ ID NO: 14237 - DNA, 122 bp, Homo sapiens
  misc_feature (61)..(62): /note="This region represents a CpG dinucleotide"
  misc_feature (61)..(61): /note="Nucleotide may be methylated to form 5-methylcytosine"
ggcacaggctcaggatgtgatgaggatgaagaatgctctcctcccttcctccaccagccccggcctttcctaattgagactcatcgagccgtagccggctcctcagtacagtgacttgcaca

SEQ ID NO: 14238 - DNA, 122 bp, Homo sapiens
  misc_feature (61)..(62): /note="This region represents a CpG dinucleotide"
  misc_feature (61)..(61): /note="Nucleotide may be methylated to form 5-methylcytosine"
tttacctcaaaagtgcatgaaatggaaatggaaatatcttgtgaagatgtagacaaatgacggtcattgcccagagcagtagttactgtcagaaaaagagataaggatttccagtctgacag

SEQ ID NO: 14239 - DNA, 122 bp, Homo sapiens
  misc_feature (61)..(62): /note="This region represents a CpG dinucleotide"
  misc_feature (61)..(61): /note="Nucleotide may be methylated to form 5-methylcytosine"
ttcaagcccacccaccaggtctgaaaaccctactttatctgattgcattattggccaagccgctcatctctcattgagaatcagtgctttacttaagaaaagctgcaaatcaaacaacaggg

SEQ ID NO: 14240 - DNA, 122 bp, Homo sapiens
  misc_feature (61)..(62): /note="This region represents a CpG dinucleotide"
  misc_feature (61)..(61): /note="Nucleotide may be methylated to form 5-methylcytosine"
ctccaaatctcaatgaagccagctcacagtgctgtgtgccccggtcacctagcaagctgccgaaccaaaagaatttgcaccccgctgcgggcccacgtggttggggccctgccctggcaggg

SEQ ID NO: 14241 - DNA, 122 bp, Homo sapiens
  misc_feature (61)..(62): /note="This region represents a CpG dinucleotide"
  misc_feature (61)..(61): /note="Nucleotide may be methylated to form 5-methylcytosine"
gacttctctgggagaggctgctgtaatctaagccgttagggaatcccgcccttcagtttacgttctggagtgaagccacacaggtgcgtcgctgatcatggccaccgaggtaagaggtagga

SEQ ID NO: 14242 - DNA, 122 bp, Homo sapiens
  misc_feature (61)..(62): /note="This region represents a CpG dinucleotide"
  misc_feature (61)..(61): /note="Nucleotide may be methylated to form 5-methylcytosine"
tctgaggtcttcaactggagtttgagttgggagggccatgctgtgtagggtttggagccacgtggggcctgccagccctattaagttgcattcttttgaagtgtgtatctccccttgcacca

SEQ ID NO: 14243 - DNA, 122 bp, Homo sapiens
  misc_feature (61)..(62): /note="This region represents a CpG dinucleotide"
  misc_feature (61)..(61): /note="Nucleotide may be methylated to form 5-methylcytosine"
acacagggtaagaattcacatgcttgctatagttcaattgtgggcagagtatgctttctacgtccttaatcttgatcttggctgggtgacttgttttggccaatgtgatgttgtagtgcata

SEQ ID NO: 14244 - DNA, 122 bp, Homo sapiens
  misc_feature (61)..(62): /note="This region represents a CpG dinucleotide"
  misc_feature (61)..(61): /note="Nucleotide may be methylated to form 5-methylcytosine"
gatggatccttttttaacaaaaaatactttaggttttcaatgatagcaaacgtagtggggcgtgcaaggaagaaccagttgtattggtctctatacttatcaaaggcgtatttgtaagcttt

SEQ ID NO: 14245 - DNA, 122 bp, Homo sapiens
  misc_feature (61)..(62): /note="This region represents a CpG dinucleotide"
  misc_feature (61)..(61): /note="Nucleotide may be methylated to form 5-methylcytosine"
agaagttttcccaaaacaaggctcactgcacaaacggaagcccgaactggagatgaagcacgttctgtgcatataagaaggactttgataagcaggtccctaatatttgcctcaaccctttc

SEQ ID NO: 14246 - DNA, 122 bp, Homo sapiens
  misc_feature (61)..(62): /note="This region represents a CpG dinucleotide"
  misc_feature (61)..(61): /note="Nucleotide may be methylated to form 5-methylcytosine"
aatgaataaacgaacttaaacaagggcatgagacaatcagaaactcctccatgaggcatccgtttcccacttgtaatggtgtttccacgccaagcctcacctcccctagctgactctcattt

SEQ ID NO: 14247 - DNA, 122 bp, Homo sapiens
  misc_feature (61)..(62): /note="This region represents a CpG dinucleotide"
  misc_feature (61)..(61): /note="Nucleotide may be methylated to form 5-methylcytosine"
ggttggaatcctgactcttcctaactatgggaactacgactagttacttctctggggcctcgatgttttgtagagtcagcatgacagtttctctctcatagggttgttgagaggattaaact

SEQ ID NO: 14248 - DNA, 122 bp, Homo sapiens
  misc_feature (61)..(62): /note="This region represents a CpG dinucleotide"
  misc_feature (61)..(61): /note="Nucleotide may be methylated to form 5-methylcytosine"
actgagacagtagtgttgcagtaaagaaagagtatactgcaagggagtcaagcagaatgacgggagatatttctcaaattcacctcaccaggaactcagaggttgggttttttaaggataat

SEQ ID NO: 14249 - DNA, 122 bp, Homo sapiens
  misc_feature (61)..(62): /note="This region represents a CpG dinucleotide"
  misc_feature (61)..(61): /note="Nucleotide may be methylated to form 5-methylcytosine"
aattctttcttctaaaattcttggttaaaatagttaaagcatggaaagcatccttagtgacgactgagtcttacaggtccattccttgctggtgagaaaaagattcacgtctatatttagta

SEQ ID NO: 14250 - DNA, 122 bp, Homo sapiens
  misc_feature (61)..(62): /note="This region represents a CpG dinucleotide"
  misc_feature (61)..(61): /note="Nucleotide may be methylated to form 5-methylcytosine"
gaaaggtgatttaagtgtgaaagcatttttgattatggcaattgcatacattctttcaatcgaattctagctggattaacctgtctttagtatatggctatgaataatttatattattatct

SEQ ID NO: 14251 - DNA, 122 bp, Homo sapiens
  misc_feature (61)..(62): /note="This region represents a CpG dinucleotide"
  misc_feature (61)..(61): /note="Nucleotide may be methylated to form 5-methylcytosine"
cagtctcaagagggctgaagtcttggctgcacctctactttgcacaggttggggtggggccgtagtgttttctgtgggatttggctggagtagacagtgttcctttaaaagttttctgtttt

SEQ ID NO: 14252 - DNA, 122 bp, Homo sapiens
  misc_feature (61)..(62): /note="This region represents a CpG dinucleotide"
  misc_feature (61)..(61): /note="Nucleotide may be methylated to form 5-methylcytosine"
agatatctgaactgaccatattgaggaaatgggaggaggcagagaactggaaactgtagacggtgactaagccctgcttctggtatgggaaattgcttaaagctatattcaaaatggacgct

SEQ ID NO: 14253 - DNA, 122 bp, Homo sapiens
  misc_feature (61)..(62): /note="This region represents a CpG dinucleotide"
  misc_feature (61)..(61): /note="Nucleotide may be methylated to form 5-methylcytosine"
tctggtggagaaaagtgaggctcagggaggtaaaagtgtctgcctcagttggttcatcagcgccagtggcagtgctctaaggagacgccaggcctccggtaaccactcagtgtcagaagttc

SEQ ID NO: 14254 - DNA, 122 bp, Homo sapiens
  misc_feature (61)..(62): /note="This region represents a CpG dinucleotide"
  misc_feature (61)..(61): /note="Nucleotide may be methylated to form 5-methylcytosine"
ctgatttcccttcttgaagtacaggatttggaaatcactgccacagcccagttcagctcacgtggacctgccaagaccagcagagtgcacaggaggtccagcagagtgcacaggaggtgcag

SEQ ID NO: 14255 - DNA, 122 bp, Homo sapiens
  misc_feature (61)..(62): /note="This region represents a CpG dinucleotide"
  misc_feature (61)..(61): /note="Nucleotide may be methylated to form 5-methylcytosine"
ggacaacgtcttaatggttccaccattgtgcaaagaggatgaccactcccagtgcgtgcacgttctctccgctaatgtcactgctcaaaacgttcagaaaattaacacttacgccagggtcg

SEQ ID NO: 14256 - DNA, 122 bp, Homo sapiens
  misc_feature (61)..(62): /note="This region represents a CpG dinucleotide"
  misc_feature (61)..(61): /note="Nucleotide may be methylated to form 5-methylcytosine"
ggcctacatcctttgtctgttaggtgcttccacatccttatgtcttaaatggccaaaatacgtcacccccactgccaaaacacacaggtcactcgaggtcacaatctggaacataggctggc

SEQ ID NO: 14257 - DNA, 122 bp, Homo sapiens
  misc_feature (61)..(62): /note="This region represents a CpG dinucleotide"
  misc_feature (61)..(61): /note="Nucleotide may be methylated to form 5-methylcytosine"
tttctcctctggcctccagaaaccaccaggaagagaagcaattaggatgagtgaacaaaacgctattttcaactgtcattttttattggtgaaaagaactctggcctgggaatcaggttcag

SEQ ID NO: 14258 - DNA, 122 bp, Homo sapiens
  misc_feature (61)..(62): /note="This region represents a CpG dinucleotide"
  misc_feature (61)..(61): /note="Nucleotide may be methylated to form 5-methylcytosine"
ttccccaggcactgcttagctccgtatactggtctcccaggaggcagagccaatctctagcgcctattctgtgaggcagggttgcaccaccagctagtacagccttaaaagtcactccccaa

SEQ ID NO: 14259 - DNA, 122 bp, Homo sapiens
  misc_feature (61)..(62): /note="This region represents a CpG dinucleotide"
  misc_feature (61)..(61): /note="Nucleotide may be methylated to form 5-methylcytosine"
cattgccctgcacctacccaccagatcgccgccctggtgggcgctcctggccctgtcctccgcgcttagtttgtcattgggcgcccagatccggaaccccagcctcgaagcttccggtggcc

SEQ ID NO: 14260 - DNA, 122 bp, Homo sapiens
  misc_feature (61)..(62): /note="This region represents a CpG dinucleotide"
  misc_feature (61)..(61): /note="Nucleotide may be methylated to form 5-methylcytosine"
cagtcttaccaaaagattgctgcaaaattagaggtggttgagacaactttaatattcttacgaggaaaatgtaacttaaaatgtggaaggattcagtattgggctgctttgaagttttgatg

SEQ ID NO: 14261 - DNA, 122 bp, Homo sapiens
  misc_feature (61)..(62): /note="This region represents a CpG dinucleotide"
  misc_feature (61)..(61): /note="Nucleotide may be methylated to form 5-methylcytosine"
cgccctgttatggacatcatgtgcgtgcagaatggatgtctgtcaggttccggggcagcccgcagtctgaggcagccagcctggattggagggagtggcaatactacctgccggttaggggt

SEQ ID NO: 14262 - DNA, 122 bp, Homo sapiens
  misc_feature (61)..(62): /note="This region represents a CpG dinucleotide"
  misc_feature (61)..(61): /note="Nucleotide may be methylated to form 5-methylcytosine"
aatgtgtgtccatgagtgactactgaagccctcaggtgctctggtgacttcatatgcaagcgtggcctggcaggaactgcctgtgctatgactaatcaggagactttccagggaaaaggatg

SEQ ID NO: 14263 - DNA, 122 bp, Homo sapiens
  misc_feature (61)..(62): /note="This region represents a CpG dinucleotide"
  misc_feature (61)..(61): /note="Nucleotide may be methylated to form 5-methylcytosine"
tggatgaaactcagtgaggttcattcagaccgtgaatcactggcagacctgctagtccagcgcagatgacatgacctctggtgttacctaagagggatatgttttgcttaatcatgaactat

SEQ ID NO: 14264 - DNA, 122 bp, Homo sapiens
  misc_feature (61)..(62): /note="This region represents a CpG dinucleotide"
  misc_feature (61)..(61): /note="Nucleotide may be methylated to form 5-methylcytosine"
cctggagtcctcaccacctccctgtgggtgaccactgacaacttcctgccccttcccctgcgttccccaccccagggaagcgtgactcccgtcggcatttaactgctactctgggttttttt

SEQ ID NO: 14265 - DNA, 122 bp, Homo sapiens
  misc_feature (61)..(62): /note="This region represents a CpG dinucleotide"
  misc_feature (61)..(61): /note="Nucleotide may be methylated to form 5-methylcytosine"
ccatgttaccaaatccagtagttagttcttagtctcattctacttcaccagtcagcattacgtggtacagttagtctgttctctgtgaagcattttcttaacttgatcgtatgccatttttt

SEQ ID NO: 14266 - DNA, 122 bp, Homo sapiens
  misc_feature (61)..(62): /note="This region represents a CpG dinucleotide"
  misc_feature (61)..(61): /note="Nucleotide may be methylated to form 5-methylcytosine"
gctggggttctctgggaaagcttcagaggaagcagcatgggaactgagtcttttcactgccgagatcgcgccactgcactctagcctgggtgacagagcaagactccgcctcaaaaaaaaaa

SEQ ID NO: 14267 - DNA, 122 bp, Homo sapiens
  misc_feature (61)..(62): /note="This region represents a CpG dinucleotide"
  misc_feature (61)..(61): /note="Nucleotide may be methylated to form 5-methylcytosine"
acgtttcagagattaatttcaaaatatggtttattccgggaggaagcagcatcctaagcacgtgacatttaaagaccaggctataaggaagtgcctctgcccccaggccaggtggcagctgt

SEQ ID NO: 14268 - DNA, 122 bp, Homo sapiens
  misc_feature (61)..(62): /note="This region represents a CpG dinucleotide"
  misc_feature (61)..(61): /note="Nucleotide may be methylated to form 5-methylcytosine"
cggccgcttatcattcacaacctttcccctgcattatttcatttaatcctgagccaacatcgccaggcaggcaccgtgcttattcccatcccacaggtgagaaaacaggctcagagaagcca

SEQ ID NO: 14269 - DNA, 122 bp, Homo sapiens
  misc_feature (61)..(62): /note="This region represents a CpG dinucleotide"
  misc_feature (61)..(61): /note="Nucleotide may be methylated to form 5-methylcytosine"
tcttgatatcttccagctcacatttctccattgtgcccatgaaaatatcctaatagacttcgtaataagccttgataaaaataaaaggacaccatgtcttatagcatttccttgattcagca

SEQ ID NO: 14270 - DNA, 122 bp, Homo sapiens
  misc_feature (61)..(62): /note="This region represents a CpG dinucleotide"
  misc_feature (61)..(61): /note="Nucleotide may be methylated to form 5-methylcytosine"
gcctcccaaagtgctgggattacaggggtgagccacctctcctggactaagtagcaattccggctcccttttctgtggctccctgccttgtgcgtgtcacagcctgggcgactcctcgccct

SEQ ID NO: 14271 - DNA, 122 bp, Homo sapiens
  misc_feature (61)..(62): /note="This region represents a CpG dinucleotide"
  misc_feature (61)..(61): /note="Nucleotide may be methylated to form 5-methylcytosine"
gaaagagaaacatgaggatgatagcccagctttactcttctacccctccccatctccttacgatccctactagctggacccaattggaagccagagagcaaggaagctcattggtgcaggtc

SEQ ID NO: 14272 - DNA, 122 bp, Homo sapiens
  misc_feature (61)..(62): /note="This region represents a CpG dinucleotide"
  misc_feature (61)..(61): /note="Nucleotide may be methylated to form 5-methylcytosine"
aacctaaatgccacaggtttgcagagaatgaattgtaccactccaaagcccctttcgaaacgaagtgttctgagccaactatttgcaagacaatagagaatgaaggtagattctagaaacca

SEQ ID NO: 14273 - DNA, 122 bp, Homo sapiens
  misc_feature (61)..(62): /note="This region represents a CpG dinucleotide"
  misc_feature (61)..(61): /note="Nucleotide may be methylated to form 5-methylcytosine"
gtcactggtgtgttatttccttttttcctggcatctgctctatgtaacactgtacacacacgtgatacagcagctcattaaactgtttcagttaactctgaaaccaaattagtgcattacat

SEQ ID NO: 14274 - DNA, 122 bp, Homo sapiens
  misc_feature (61)..(62): /note="This region represents a CpG dinucleotide"
  misc_feature (61)..(61): /note="Nucleotide may be methylated to form 5-methylcytosine"
ttcatgcacacttagtctgtttggcaaggcttttgggctctatttccaaagcgggcctttcgtccaaatacctctctccatctccacagctgaaaccctaaaccaagcccgtgctgtctctg

SEQ ID NO: 14275 - DNA, 122 bp, Homo sapiens
  misc_feature (61)..(62): /note="This region represents a CpG dinucleotide"
  misc_feature (61)..(61): /note="Nucleotide may be methylated to form 5-methylcytosine"
ggaccacgggttccagaccagaattgaaaattcctcatatgggcaagtgtgggcagggctcggaaggtgggcaagcagatagggcaggatggggaaatgccaaagaggaaccaaaagcccag

SEQ ID NO: 14276 - DNA, 122 bp, Homo sapiens
  misc_feature (61)..(62): /note="This region represents a CpG dinucleotide"
  misc_feature (61)..(61): /note="Nucleotide may be methylated to form 5-methylcytosine"
aaatgatgcataaactctggggcagtgaatggcttatttataaataagcgtcacttaaaacgacgaaggaagtccagatgacagcataaacagcagaaactcgggaactccttcaccctaaa

SEQ ID NO: 14277 - DNA, 122 bp, Homo sapiens
  misc_feature (61)..(62): /note="This region represents a CpG dinucleotide"
  misc_feature (61)..(61): /note="Nucleotide may be methylated to form 5-methylcytosine"
tgcacagtgattcacttgggacattatctcaggttcctcatgccagtggcaattgtagaacgtgacaaattgtctgacaattgtggtgcttccctataattagagatggtgcttctcctact

SEQ ID NO: 14278 - DNA, 122 bp, Homo sapiens
  misc_feature (61)..(62): /note="This region represents a CpG dinucleotide"
  misc_feature (61)..(61): /note="Nucleotide may be methylated to form 5-methylcytosine"
tcagtcagttactgtttgtgggcagagatctgagaggaacattctcatggacacctgtggcgactttgtaatgtgtcaactcaagctagtctaaagtacatttctcaagactcccttaccca

SEQ ID NO: 14279 - DNA, 122 bp, Homo sapiens
  misc_feature (61)..(62): /note="This region represents a CpG dinucleotide"
  misc_feature (61)..(61): /note="Nucleotide may be methylated to form 5-methylcytosine"
taatggtttttgttcttgattattcatatctcctatttttatataaattcagcccctcaccgtattgccattgtttatatatttctgaattgtctggagattttaaaattttctgttgcgat

SEQ ID NO: 14280 - DNA, 122 bp, Homo sapiens
  misc_feature (61)..(62): /note="This region represents a CpG dinucleotide"
  misc_feature (61)..(61): /note="Nucleotide may be methylated to form 5-methylcytosine"
ggattctagtaaaaaggtgtggacacttacaaaagaaggtcatcggataacagtgagtaccgtgagtgaaccatccagccctttccattaggtgggacaaggttatattttattttcactgg

SEQ ID NO: 14281 - DNA, 122 bp, Homo sapiens
  misc_feature (61)..(62): /note="This region represents a CpG dinucleotide"
  misc_feature (61)..(61): /note="Nucleotide may be methylated to form 5-methylcytosine"
actcactgcactcagagcttagctcatagaaggtactcagataggtatttatcagataaacgggggagtaaatgatttatttccttcacaaacatctgttcctggaaatattaatatcacct

SEQ ID NO: 14282 - DNA, 122 bp, Homo sapiens
  misc_feature (61)..(62): /note="This region represents a CpG dinucleotide"
  misc_feature (61)..(61): /note="Nucleotide may be methylated to form 5-methylcytosine"
aggttgttagattggagcatcagatctggaaaacctagctcagtgctttaaaaacattaacgtgctgatgaatcaatgaatcacctgggagtcaggttaaaatccaggttctgatttagtaa

SEQ ID NO: 14283 - DNA, 122 bp, Homo sapiens
  misc_feature (61)..(62): /note="This region represents a CpG dinucleotide"
  misc_feature (61)..(61): /note="Nucleotide may be methylated to form 5-methylcytosine"
tcaggagacgaaaactctctgatgaggcacgtgtggatgggatggcagggctgagaaggccggctcccccacggggtgtgcacaacctacctccccagctgtttctgctaccggctggggcc

SEQ ID NO: 14284 - DNA, 122 bp, Homo sapiens
  misc_feature (61)..(62): /note="This region represents a CpG dinucleotide"
  misc_feature (61)..(61): /note="Nucleotide may be methylated to form 5-methylcytosine"
tgaactgtccctgcagtggtcatcagctgaggtacccacggaaaaatccctttgtgctcacgatttgactcagactggctgcccgtctgcctgagccagctcagccccatggatgggctctg

SEQ ID NO: 14285 - DNA, 122 bp, Homo sapiens
  misc_feature (61)..(62): /note="This region represents a CpG dinucleotide"
  misc_feature (61)..(61): /note="Nucleotide may be methylated to form 5-methylcytosine"
gatttcaggaactatgtactttctgatggcctgtcttccattgtgggtagaatcagtccacgttccaaagagacacatgggaaataccacatagtcctcattatagacccccaagatccctc

SEQ ID NO: 14286 - DNA, 122 bp, Homo sapiens
  misc_feature (61)..(62): /note="This region represents a CpG dinucleotide"
  misc_feature (61)..(61): /note="Nucleotide may be methylated to form 5-methylcytosine"
gggcattgtaggatgtttaacagcatccctggtctttactttctagatgccagtagcatccgtcccctctagttgtgacaaccaaaaaatgcctacaaacacatcatcagatgtccccgggt

SEQ ID NO: 14287 - DNA, 122 bp, Homo sapiens
  misc_feature (61)..(62): /note="This region represents a CpG dinucleotide"
  misc_feature (61)..(61): /note="Nucleotide may be methylated to form 5-methylcytosine"
tcgcgcggagagtctacatttaattttgtggagacctgtcatgctgtcttccgtagtaaccgcaccgtcttaccctcccgcttcttttcctctctgacgtacgcacttccctccaggcaagg

SEQ ID NO: 14288 - DNA, 122 bp, Homo sapiens
  misc_feature (61)..(62): /note="This region represents a CpG dinucleotide"
  misc_feature (61)..(61): /note="Nucleotide may be methylated to form 5-methylcytosine"
gagtatgggccagggctgctgacttgcatgagttcaaatgaatattactaaaccagaacacgttccatgactacatgacatcattttgtattgtttcctctttcctggctgcttccctttta

SEQ ID NO: 14289 - DNA, 122 bp, Homo sapiens
  misc_feature (61)..(62): /note="This region represents a CpG dinucleotide"
  misc_feature (61)..(61): /note="Nucleotide may be methylated to form 5-methylcytosine"
ggaagggagtccaggtggagctggagcgctcatgctcaaatacttgtggagacagctcgccgtcctcagcaagacgtggcaaacaagatgcagtgaatctttggtaaaactgaatttacaac

SEQ ID NO: 14290 - DNA, 122 bp, Homo sapiens
  misc_feature (61)..(62): /note="This region represents a CpG dinucleotide"
  misc_feature (61)..(61): /note="Nucleotide may be methylated to form 5-methylcytosine"
tccaaagcaaataatcatcaaacctgcgattctgaaattactgtccccctgactcagaggcgcagccaatgagtcatttatttacatgtaactacaagataaggagagaaaaacatcctatc

SEQ ID NO: 14291 - DNA, 122 bp, Homo sapiens
  misc_feature (61)..(62): /note="This region represents a CpG dinucleotide"
  misc_feature (61)..(61): /note="Nucleotide may be methylated to form 5-methylcytosine"
gaggagtctgcccatccccagcagcacgcgagcgccgccagcgctccctgggcacccgctcgcactcaagtgcaggcagcgtggtgacaatgccaactgcgccccctatctctgacaggctc

SEQ ID NO: 14292 - DNA, 122 bp, Homo sapiens
  misc_feature (61)..(62): /note="This region represents a CpG dinucleotide"
  misc_feature (61)..(61): /note="Nucleotide may be methylated to form 5-methylcytosine"
gaaaaagtcctggaaacctgaggtcccctctccctcactactggaaaagaattaagacaacgtgttactccttgggccccaggcagaggccaagctgccctcgaaacatccaatctgctcca

SEQ ID NO: 14293 - DNA, 122 bp, Homo sapiens
  misc_feature (61)..(62): /note="This region represents a CpG dinucleotide"
  misc_feature (61)..(61): /note="Nucleotide may be methylated to form 5-methylcytosine"
aagacagcaggattggatactctacctttgaagcctttgtccataatgtatgtgttctgacgtctatccattccacaagcacctgtgtaaaaataacatgtaaggaaagaaaatatgggggt

SEQ ID NO: 14294 - DNA, 122 bp, Homo sapiens
  misc_feature (61)..(62): /note="This region represents a CpG dinucleotide"
  misc_feature (61)..(61): /note="Nucleotide may be methylated to form 5-methylcytosine"
accaggatatttctgggtgtgaaagggaagactgtatggtaattatatggggtaaactggcgtatgctaggacagtcctaggcatactgggacttgtgtgaccctgcacctagcccatacca

SEQ ID NO: 14295 - DNA, 122 bp, Homo sapiens
  misc_feature (61)..(62): /note="This region represents a CpG dinucleotide"
  misc_feature (61)..(61): /note="Nucleotide may be methylated to form 5-methylcytosine"
tcccctcctcctcccatctgctccccgcccctcccctgggcccactcccgctagcggcggcggctcattgcaggccggcatgtctccccggtgacctcaccccagatctggcctttctctgt

SEQ ID NO: 14296 - DNA, 122 bp, Homo sapiens
  misc_feature (61)..(62): /note="This region represents a CpG dinucleotide"
  misc_feature (61)..(61): /note="Nucleotide may be methylated to form 5-methylcytosine"
tcagcgttctcagatgtaaacaatagtgtaataaccacattttctggtttctgtatttaacgcttggacatcttagggccttgctgacctcagaaggataggccctttcagggcgagccaat

SEQ ID NO: 14297 - DNA, 122 bp, Homo sapiens
  misc_feature (61)..(62): /note="This region represents a CpG dinucleotide"
  misc_feature (61)..(61): /note="Nucleotide may be methylated to form 5-methylcytosine"
gtgtataccgcagccattccattctggctaggcataaacaagcgcagtgtcgctccttagcggaggctgaaattcaagagatttctgtcaactgtgaacgtgaaatatcacctgcactggat

SEQ ID NO: 14298 - DNA, 122 bp, Homo sapiens
  misc_feature (61)..(62): /note="This region represents a CpG dinucleotide"
  misc_feature (61)..(61): /note="Nucleotide may be methylated to form 5-methylcytosine"
tttccactcaaggactaggaactgaatctctgcacccttaaaaccactctcttagccgggcgcggtggctcatacctgtaatcccagcactttgggaggccaaggcaggtggatcacgaggt

SEQ ID NO: 14299 - DNA, 122 bp, Homo sapiens
  misc_feature (61)..(62): /note="This region represents a CpG dinucleotide"
  misc_feature (61)..(61): /note="Nucleotide may be methylated to form 5-methylcytosine"
ttaatcacagcataaaggcatgaagatgccacaggcagactctcagtcttcatcagtgaccgtgcttggaggcagtcatggctcgagcctgtggtggaagtgtgagggacagggtgggtctc

SEQ ID NO: 14300 - DNA, 122 bp, Homo sapiens
  misc_feature (61)..(62): /note="This region represents a CpG dinucleotide"
  misc_feature (61)..(61): /note="Nucleotide may be methylated to form 5-methylcytosine"
gcggcggtgagcgatgccttccctctgccacaaggcgccgcctgcagagcctgccgcgtccgccacgcccagagcgtacccgcagctcagcgccgagttactcctgctggcggtggccaggg

SEQ ID NO: 14301 - DNA, 122 bp, Homo sapiens
  misc_feature (61)..(62): /note="This region represents a CpG dinucleotide"
  misc_feature (61)..(61): /note="Nucleotide may be methylated to form 5-methylcytosine"
atctaattaaacaactaataaaaatagttgtttaatccacgttgacatcttcttacattgcgatagaaattttgatatatttatccatatgatgaattgcttaaagccggtggttctcaacc

SEQ ID NO: 14302 - DNA, 122 bp, Homo sapiens
  misc_feature (61)..(62): /note="This region represents a CpG dinucleotide"
  misc_feature (61)..(61): /note="Nucleotide may be methylated to form 5-methylcytosine"
aattggaatcgtctctttattcatgagtagtctattttaaataaacatgctgagtaaatacgtagagaatataaatccttagataaatgttcatttttgtctccttcctagactatatcctc

SEQ ID NO: 14303 - DNA, 122 bp, Homo sapiens
  misc_feature (61)..(62): /note="This region represents a CpG dinucleotide"
  misc_feature (61)..(61): /note="Nucleotide may be methylated to form 5-methylcytosine"
cccttctcccttcctccttctgtgtttctctctcctagtggcaatagaggttactgcaagcgtgagttcccattgtataagtggccaaagggcaaattgtgttgtctagtgcttgatgtctc

SEQ ID NO: 14304 - DNA, 122 bp, Homo sapiens
  misc_feature (61)..(62): /note="This region represents a CpG dinucleotide"
  misc_feature (61)..(61): /note="Nucleotide may be methylated to form 5-methylcytosine"
cctttaacttaaaccaaaacaaagacggtaacctttaatactagttagtctatttataaccgttccatctacaaacatttttctaatacaaacatgccctgatagcttatcttggtgcacat

SEQ ID NO: 14305 - DNA, 122 bp, Homo sapiens
  misc_feature (61)..(62): /note="This region represents a CpG dinucleotide"
  misc_feature (61)..(61): /note="Nucleotide may be methylated to form 5-methylcytosine"
agagcttgactcacatcacagggagccctggggctcattccatgtccacatgttgccacacggttcccatgtcctaggctgcatatgtgtagctccacaaggaaggcctctgcatgctccat

SEQ ID NO: 14306 - DNA, 122 bp, Homo sapiens
  misc_feature (61)..(62): /note="This region represents a CpG dinucleotide"
  misc_feature (61)..(61): /note="Nucleotide may be methylated to form 5-methylcytosine"
tgcccggccaggaccctgagtggttcacttatacaaggatcttcttcctcttctgtcacccgagacagcaagactaccccctgcctcctcctcagccttctcaacgtgagaacaaggatgaa

SEQ ID NO: 14307 - DNA, 122 bp, Homo sapiens
  misc_feature (61)..(62): /note="This region represents a CpG dinucleotide"
  misc_feature (61)..(61): /note="Nucleotide may be methylated to form 5-methylcytosine"
acatggtgaaatcccatgcccaggctgctcttgaactcctaggctcaagtgatcctcccacgttggcctcccaaagtctaggcaccaagccaaaaattaactaatttaagaaatcaaacagt

SEQ ID NO: 14308 - DNA, 122 bp, Homo sapiens
  misc_feature (61)..(62): /note="This region represents a CpG dinucleotide"
  misc_feature (61)..(61): /note="Nucleotide may be methylated to form 5-methylcytosine"
gtttataaagtaggcacagaaatagattaacaataataacacaacagaataacaatataccgtaataaaagttatatgcatgtggtctctctctctctcaaactatcttgtactgtacttac

SEQ ID NO: 14309 - DNA, 122 bp, Homo sapiens
  misc_feature (61)..(62): /note="This region represents a CpG dinucleotide"
  misc_feature (61)..(61): /note="Nucleotide may be methylated to form 5-methylcytosine"
ctgtctcacaactatttatttcagttctataattctggaatgaaagtgagcagagggagacggggagtcacactctctgtgtccagacacatgggctgagtgaattccacagctaagtatga

SEQ ID NO: 14310 - DNA, 122 bp, Homo sapiens
  misc_feature (61)..(62): /note="This region represents a CpG dinucleotide"
  misc_feature (61)..(61): /note="Nucleotide may be methylated to form 5-methylcytosine"
ggctcctaaccatctctctgacatcatcttgtgtaactctttctctgaatcactgaccttcgctagccacattcattttttctcagtttttttagctcttaaagttctttcccatctcaggg

SEQ ID NO: 14311 - DNA, 122 bp, Homo sapiens
  misc_feature (61)..(62): /note="This region represents a CpG dinucleotide"
  misc_feature (61)..(61): /note="Nucleotide may be methylated to form 5-methylcytosine"
ttggtaatctgaggaggaaatgatttcccttcctggctacctttcgttttaactgtctttcgggtacaaagtccagtcattaattgacgtcaaaccacagaaaggcaattatagctagcatt

SEQ ID NO: 14312 - DNA, 122 bp, Homo sapiens
  misc_feature (61)..(62): /note="This region represents a CpG dinucleotide"
  misc_feature (61)..(61): /note="Nucleotide may be methylated to form 5-methylcytosine"
ggacaagccaacaagtgcctgttccggtttcacagctgctggcaggagacatgaagctcccgggtcagagacaaagaatgccaccactcccagctcagcaagcacaggagtgtcactgcccc

SEQ ID NO: 14313 - DNA, 122 bp, Homo sapiens
  misc_feature (61)..(62): /note="This region represents a CpG dinucleotide"
  misc_feature (61)..(61): /note="Nucleotide may be methylated to form 5-methylcytosine"
ggggggtccagacacaagcaccccttccctgggagactgcttaccaccatcacagtcagacgctcaagcagcacccacacgagaggagagccaccaacgtgaagcctttcagaaaaggccca

SEQ ID NO: 14314 - DNA, 122 bp, Homo sapiens
  misc_feature (61)..(62): /note="This region represents a CpG dinucleotide"
  misc_feature (61)..(61): /note="Nucleotide may be methylated to form 5-methylcytosine"
tcctctacactttatgccaactaattttacataaatgggaaactgtcatttctaccaaagcgagctgcactgtgtttcttggggtgaacctttagggagacagccattgtgagaatgaaagg

SEQ ID NO: 14315 - DNA, 122 bp, Homo sapiens
  misc_feature (61)..(62): /note="This region represents a CpG dinucleotide"
  misc_feature (61)..(61): /note="Nucleotide may be methylated to form 5-methylcytosine"
taaaattctaggatcttaaaacacacacacatatatgaccttcacagacatatgaacgcacgtaacaaattaggtttgtggaaaacactaccagttacacaatactctctctccaagtgaaa

SEQ ID NO: 14316 - DNA, 122 bp, Homo sapiens
  misc_feature (61)..(62): /note="This region represents a CpG dinucleotide"
  misc_feature (61)..(61): /note="Nucleotide may be methylated to form 5-methylcytosine"
tctgagaaccaaaatccgaccctttacatccagatcaggacaaactcacagagtagtttgcgaactactagtttagaactagttcggaatctgcttgttacggtttgtgacaagaggaacgc

SEQ ID NO: 14317 - DNA, 122 bp, Homo sapiens
  misc_feature (61)..(62): /note="This region represents a CpG dinucleotide"
  misc_feature (61)..(61): /note="Nucleotide may be methylated to form 5-methylcytosine"
cttcgatagcatggcccccccagtggttgccgaggctgcagcgctaatgacaggaagccacgagagcaaggcaaccacccagacagagcaggcaccccctgctcagcaagcagggccttcca

SEQ ID NO: 14318 - DNA, 122 bp, Homo sapiens
  misc_feature (61)..(62): /note="This region represents a CpG dinucleotide"
  misc_feature (61)..(61): /note="Nucleotide may be methylated to form 5-methylcytosine"
tacgatcttaatcagatggcaatctttttgtttccttatgtgtcaagcacacttaacctccgcctcttcaattccattgattatcactgcagatacagttttcttctcttcctattgctctt

SEQ ID NO: 14319 - DNA, 122 bp, Homo sapiens
  misc_feature (61)..(62): /note="This region represents a CpG dinucleotide"
  misc_feature (61)..(61): /note="Nucleotide may be methylated to form 5-methylcytosine"
ggaactaaaagccagagactcaacagactattcagttccaacttatgaccctacatatgacgtttaattaacagaggatgcaggaacccttacagtagagagttctgatagacatcatcttc

SEQ ID NO: 14320 - DNA, 122 bp, Homo sapiens
  misc_feature (61)..(62): /note="This region represents a CpG dinucleotide"
  misc_feature (61)..(61): /note="Nucleotide may be methylated to form 5-methylcytosine"
aacagctttaaactaagaactgagaacacctttactaacccaactaattatgattaaatacgtaaatagagaacctatctcccagcaccacctgcaggggatgaggaagtctgcaacaggat

SEQ ID NO: 14321 - DNA, 122 bp, Homo sapiens
  misc_feature (61)..(62): /note="This region represents a CpG dinucleotide"
  misc_feature (61)..(61): /note="Nucleotide may be methylated to form 5-methylcytosine"
ccttcacactggtaaatagtgcccctgagaagcaacacccggatgaatggtgctgtaaaacgtggggtgtggttacaagtcactaagtggttataacttatgaattctgaaaacttgttttt

SEQ ID NO: 14322 - DNA, 122 bp, Homo sapiens
  misc_feature (61)..(62): /note="This region represents a CpG dinucleotide"
  misc_feature (61)..(61): /note="Nucleotide may be methylated to form 5-methylcytosine"
agttaagtaacttgcccaaggccacagggctagttaaggacaggtaagcagaacagctggcgtgtcccagcacctgcgcacttctctctctctctctctctctctgagacagcgtctcactc

SEQ ID NO: 14323 - DNA, 122 bp, Homo sapiens
  misc_feature (61)..(62): /note="This region represents a CpG dinucleotide"
  misc_feature (61)..(61): /note="Nucleotide may be methylated to form 5-methylcytosine"
atatactcttttgatctttcaggacttgtgtctcatactctaatgactcttcaaggatcacgttttgaacacacaaacacaaatctctgaacgtacaggaagaaagaggggaagatatcaca

SEQ ID NO: 14324 - DNA, 122 bp, Homo sapiens
  misc_feature (61)..(62): /note="This region represents a CpG dinucleotide"
  misc_feature (61)..(61): /note="Nucleotide may be methylated to form 5-methylcytosine"
ctaaccttctgagaatacacttgttgctctgtgtttctatcacataccaaggcaccacaccgaaagttaacaagaaggctgggctcttgtggtacataaccaggggcaatcaccctacccct

SEQ ID NO: 14325 - DNA, 122 bp, Homo sapiens
  misc_feature (61)..(62): /note="This region represents a CpG dinucleotide"
  misc_feature (61)..(61): /note="Nucleotide may be methylated to form 5-methylcytosine"
ccccgacgggctgatggatgacggccggggtggctgcgtggtggagaaggaatgcccttgcgtccataacaacgacctgtattcttccggcgccaagatcaaggtggactgcaatacctggt

SEQ ID NO: 14326 - DNA, 122 bp, Homo sapiens
  misc_feature (61)..(62): /note="This region represents a CpG dinucleotide"
  misc_feature (61)..(61): /note="Nucleotide may be methylated to form 5-methylcytosine"
gacagtgaagtgacatactctgaacacagacctaaatttaccctgtaagtggcctcaaaacgagaaaactcagtctgagaactggtgaactgaaaaccaacataggagaagaaggcgctcaa

SEQ ID NO: 14327 - DNA, 122 bp, Homo sapiens
  misc_feature (61)..(62): /note="This region represents a CpG dinucleotide"
  misc_feature (61)..(61): /note="Nucleotide may be methylated to form 5-methylcytosine"
ttaattaccagcacattaaccgtgtccagtactaaggaacccctcaatttactgactgtacgtgtgaaataaaggttgactcatagaagactaatactacaaaacacatgtgtaactcataa

SEQ ID NO: 14328 - DNA, 122 bp, Homo sapiens
  misc_feature (61)..(62): /note="This region represents a CpG dinucleotide"
  misc_feature (61)..(61): /note="Nucleotide may be methylated to form 5-methylcytosine"
ccacaatcacagcagtactcattaccttagtcaacctctcctactgcttccatcaatgcacggtcattaccagccaatgctaaaatggaatccgaggcttagtaaatcacctccaattgaca

SEQ ID NO: 14329 - DNA, 122 bp, Homo sapiens
  misc_feature (61)..(62): /note="This region represents a CpG dinucleotide"
  misc_feature (61)..(61): /note="Nucleotide may be methylated to form 5-methylcytosine"
tgttgtcacttcccagatcactttcactttatgctcttctaaaattaaaacaaagatcatcgaccacaaaacacaattgttcttttgtagctcatgctagaataccctctttgttacatctc

SEQ ID NO: 14330 - DNA, 122 bp, Homo sapiens
  misc_feature (61)..(62): /note="This region represents a CpG dinucleotide"
  misc_feature (61)..(61): /note="Nucleotide may be methylated to form 5-methylcytosine"
aaggctctgtttaggttaacccttcttttcctcttgctgctggctctcacttgggagaaacgtaatggcccaagccttaagagtgtctgagcagatctgaactgcatgctccagtgtgttgc

SEQ ID NO: 14331 - DNA, 122 bp, Homo sapiens
  misc_feature (61)..(62): /note="This region represents a CpG dinucleotide"
  misc_feature (61)..(61): /note="Nucleotide may be methylated to form 5-methylcytosine"
aggttggactctgccacctcctctatctgtgtggtctttggcttactgaacctctctgggcgtcacactcctcccagataaagaatgcagcacgactgacatccagtgacaatccatgcagg

SEQ ID NO: 14332 - DNA, 122 bp, Homo sapiens
  misc_feature (61)..(62): /note="This region represents a CpG dinucleotide"
  misc_feature (61)..(61): /note="Nucleotide may be methylated to form 5-methylcytosine"
ataatactatgactaaatggatgagattgatttattccagtaactaacaatatcaaaaggcgagtaaacttttccatgggggtacaatacataaccaattcataagaatttcttcaatgctt

SEQ ID NO: 14333 - DNA, 122 bp, Homo sapiens
  misc_feature (61)..(62): /note="This region represents a CpG dinucleotide"
  misc_feature (61)..(61): /note="Nucleotide may be methylated to form 5-methylcytosine"
ttaagcttaagcttattagtttccaggtaaattcaccactgctgtcaacacataaggatccgttgatcctataaggcagggacaaattgttcaactgaagagtttgatccacaggaacaaag

SEQ ID NO: 14334 - DNA, 122 bp, Homo sapiens
  misc_feature (61)..(62): /note="This region represents a CpG dinucleotide"
  misc_feature (61)..(61): /note="Nucleotide may be methylated to form 5-methylcytosine"
tcagaatggtggtgcctctgctagtggagctacctctcctcccccacaccacagactccacgaagacccaactgcagcaacggttctttccattcaggcagaaatcagagggtctgagggtg

SEQ ID NO: 14335 - DNA, 122 bp, Homo sapiens
  misc_feature (61)..(62): /note="This region represents a CpG dinucleotide"
  misc_feature (61)..(61): /note="Nucleotide may be methylated to form 5-methylcytosine"
gtgctgggattataggcatgagctaccatgcccgagccatgtaactaatttttaaaaaatcgttttgcttagaatatatttattctgtttttctgaatttaggaaaggcacaaaggcaaatg

SEQ ID NO: 14336 - DNA, 122 bp, Homo sapiens
  misc_feature (61)..(62): /note="This region represents a CpG dinucleotide"
  misc_feature (61)..(61): /note="Nucleotide may be methylated to form 5-methylcytosine"
ggggtcagagctggagtttacctcctgctcaagacactggctgctgggtcagaggagattcggacacatcacctggtttaaccccaggactctatgtgaccttcatcccagccctgactcag

SEQ ID NO: 14337 - DNA, 122 bp, Homo sapiens
  misc_feature (61)..(62): /note="This region represents a CpG dinucleotide"
  misc_feature (61)..(61): /note="Nucleotide may be methylated to form 5-methylcytosine"
gtctgctgcctggtgccatgtcttattgatgtaagggtttcctgagacactcatgagcaccgtccccacccccaggtggatctactgttctcaggattccacattttccaaacataacccca

SEQ ID NO: 14338 - DNA, 122 bp, Homo sapiens
  misc_feature (61)..(62): /note="This region represents a CpG dinucleotide"
  misc_feature (61)..(61): /note="Nucleotide may be methylated to form 5-methylcytosine"
gatgaccacatgcaggcattcagaagcatgtggagaaagatgattcaatgatgcggggaacgtttgcagtgtagaagacagtagatacttggcagctgtaaatacacgaataacattcagag

SEQ ID NO: 14339 - DNA, 122 bp, Homo sapiens
  misc_feature (61)..(62): /note="This region represents a CpG dinucleotide"
  misc_feature (61)..(61): /note="Nucleotide may be methylated to form 5-methylcytosine"
tgtttcccactgaaactcaataaccacaatcatttatgcataaacaaatgctttgcaaaccgtctcagccagatgaggcggcttcctggaagaaacaggcacattcgagaacctttactgtt

SEQ ID NO: 14340 - DNA, 122 bp, Homo sapiens
  misc_feature (61)..(62): /note="This region represents a CpG dinucleotide"
  misc_feature (61)..(61): /note="Nucleotide may be methylated to form 5-methylcytosine"
taattcagtttagcacaccaatatttttaaggtctcttctgaactctggcactagttacccgagttcagaaaaagggaaatgctactactgttgactcatccaatgccactactataatcac

SEQ ID NO: 14341 - DNA, 122 bp, Homo sapiens
  misc_feature (61)..(62): /note="This region represents a CpG dinucleotide"
  misc_feature (61)..(61): /note="Nucleotide may be methylated to form 5-methylcytosine"
tctgagctaaccaagtccatcttgcttctaacctccaagctgtccttattcattcatgggcgtaggctgaactgactttgggaagaatttggtttatagtttatagtttaaaacaaagatga

SEQ ID NO: 14342 - DNA, 122 bp, Homo sapiens
  misc_feature (61)..(62): /note="This region represents a CpG dinucleotide"
  misc_feature (61)..(61): /note="Nucleotide may be methylated to form 5-methylcytosine"
ggcaggagaatggcatgaacccgggaggcggaccttgcccacgccagtgagctgagactgcgaaactgcactacagcccgggagacagagagagcctccgtctcaaaaaaaaaaaaaaaaaa

SEQ ID NO: 14343 - DNA, 122 bp, Homo sapiens
  misc_feature (61)..(62): /note="This region represents a CpG dinucleotide"
  misc_feature (61)..(61): /note="Nucleotide may be methylated to form 5-methylcytosine"
atttgcggctgactaaggctggaaaacgggctgccagaacccaagaggggaggatgaaagcgaaggtgacacaggatgtggcttggcagagaggcgtgcacacagaagtagtgggcagctgg

SEQ ID NO: 14344 - DNA, 122 bp, Homo sapiens
  misc_feature (61)..(62): /note="This region represents a CpG dinucleotide"
  misc_feature (61)..(61): /note="Nucleotide may be methylated to form 5-methylcytosine"
agtcgtctccgtgacctctgtggcctcgttgaaaggctttctctgaattgaatgacaacacggaggctgagggtaagattgcaaatcagagaacgtgggtatgaatgggaagctttgacccc

SEQ ID NO: 14345 - DNA, 122 bp, Homo sapiens
  misc_feature (61)..(62): /note="This region represents a CpG dinucleotide"
  misc_feature (61)..(61): /note="Nucleotide may be methylated to form 5-methylcytosine"
aagtgtcaacagtggcaaatgcaaccaagaagacaaataaggaaaaggctagaaagtttccgttgtatttaacaaccaagatgccattattgacctgggttgagagcaatttgagggagagg

SEQ ID NO: 14346 - DNA, 122 bp, Homo sapiens
  misc_feature (61)..(62): /note="This region represents a CpG dinucleotide"
  misc_feature (61)..(61): /note="Nucleotide may be methylated to form 5-methylcytosine"
tgagtaaaatgtgggaagcaccaggcatgatgccaggcacacaggacattatgctcaaggcgccggagctattaagacataggtctacaaccccttttctgaaattctgaacattctgaaaa

SEQ ID NO: 14347 - DNA, 122 bp, Homo sapiens
  misc_feature (61)..(62): /note="This region represents a CpG dinucleotide"
  misc_feature (61)..(61): /note="Nucleotide may be methylated to form 5-methylcytosine"
ggcgaggctggcaaccgcgacctcctgagcagctggggcgcttgggggatgttggggggccggggcaccctgtggtactgagggccgggaagggcggtgcgggacgtccaggggcccccctc

SEQ ID NO: 14348 - DNA, 122 bp, Homo sapiens
  misc_feature (61)..(62): /note="This region represents a CpG dinucleotide"
  misc_feature (61)..(61): /note="Nucleotide may be methylated to form 5-methylcytosine"
ctgcttggagtctggttgtcgccatggagggacagcttctatccagggccctaactgtagcgtgggttggggggactctttcgagagggtggggcgaggacgctggccccactgctgcggcg

SEQ ID NO: 14349 - DNA, 122 bp, Homo sapiens
  misc_feature (61)..(62): /note="This region represents a CpG dinucleotide"
  misc_feature (61)..(61): /note="Nucleotide may be methylated to form 5-methylcytosine"
ctgtggcctcagaggccgcttgcaagagttcagataaaccgaggcccctttcagcgcgtccgtctgctctgatcggctccactgaataagacgatttgaggatgtgcaggcccggccgcgca

SEQ ID NO: 14350 - DNA, 122 bp, Homo sapiens
  misc_feature (61)..(62): /note="This region represents a CpG dinucleotide"
  misc_feature (61)..(61): /note="Nucleotide may be methylated to form 5-methylcytosine"
ctgcatctccacaatgtttgtgcttctctctcctccctccacgcctgcccccaaccggagcgtaagcaccaagggatgagggaatgtggcttttcctcattgcattctcagtgctcagaaca

SEQ ID NO: 14351 - DNA, 122 bp, Homo sapiens
  misc_feature (61)..(62): /note="This region represents a CpG dinucleotide"
  misc_feature (61)..(61): /note="Nucleotide may be methylated to form 5-methylcytosine"
agtccagccactgagaagtgtataaacatccctgatatctctggacaggtgttagtgtggcggctcagggtagaaagcaagacccaaaacaggagccaagccaagtaagggagaggtgaggg

SEQ ID NO: 14352 - DNA, 122 bp, Homo sapiens
  misc_feature (61)..(62): /note="This region represents a CpG dinucleotide"
  misc_feature (61)..(61): /note="Nucleotide may be methylated to form 5-methylcytosine"
aacttaagctggatccgtaaaggcctgacacgaagtcccggctgtataaaacatgatccacggaggtactaaataaataacctggctgtgggcttccaggccgctctatttatcactgcagt

SEQ ID NO: 14353 - DNA, 122 bp, Homo sapiens
  misc_feature (61)..(62): /note="This region represents a CpG dinucleotide"
  misc_feature (61)..(61): /note="Nucleotide may be methylated to form 5-methylcytosine"
ccccaaaggagagtgagggcagctgggggttcaatcacatagaacataaacctagccatgcgtaagcctcccggaacagaggctctcctgattcacacctcagagctccctgctggctgcag

SEQ ID NO: 14354 - DNA, 122 bp, Homo sapiens
  misc_feature (61)..(62): /note="This region represents a CpG dinucleotide"
  misc_feature (61)..(61): /note="Nucleotide may be methylated to form 5-methylcytosine"
ctcagaaaacttaagttgcctcacagccgcctggtatcaggaaacactgagcccgcccaacgcgggatcctccaggggcaggccgcctgaggcccacccggagcaggcggggcggccgcagg

SEQ ID NO: 14355 - DNA, 122 bp, Homo sapiens
  misc_feature (61)..(62): /note="This region represents a CpG dinucleotide"
  misc_feature (61)..(61): /note="Nucleotide may be methylated to form 5-methylcytosine"
aacactttagtcaggaagtggtttctctcactgaggttatcagcattagaaaggcagtcacggaaacaataaccctgaatggaatgttgttttgaaagggaggctttagacagcaggtcctt

SEQ ID NO: 14356 - DNA, 122 bp, Homo sapiens
  misc_feature (61)..(62): /note="This region represents a CpG dinucleotide"
  misc_feature (61)..(61): /note="Nucleotide may be methylated to form 5-methylcytosine"
taggtattttgtgcgagtcagacagtctgtccttgtgtttggcttggaaaacatgtttgccgtaactagagctagtctctaaaataggtagctgattaaaaggtcacaaatagagctataaa

SEQ ID NO: 14357 - DNA, 122 bp, Homo sapiens
  misc_feature (61)..(62): /note="This region represents a CpG dinucleotide"
  misc_feature (61)..(61): /note="Nucleotide may be methylated to form 5-methylcytosine"
tttagattaaatatttaaaggaaaatgactgccagcccctccctcgtagtatattaaactcgactacattttgttagggttcaacatctctaattgctttaaacgtaaagtgggagggaaaa

SEQ ID NO: 14358 - DNA, 122 bp, Homo sapiens
  misc_feature (61)..(62): /note="This region represents a CpG dinucleotide"
  misc_feature (61)..(61): /note="Nucleotide may be methylated to form 5-methylcytosine"
gcattacgtgtagaggttgacagattcaagacaacactaaacatgttagcagtcaccacacgcaggctgtccagcagaatgacagcgcttcccagatcctagaaagcatccagagtcactgc

SEQ ID NO: 14359 - DNA, 122 bp, Homo sapiens
  misc_feature (61)..(62): /note="This region represents a CpG dinucleotide"
  misc_feature (61)..(61): /note="Nucleotide may be methylated to form 5-methylcytosine"
ccaggaattcacttactagctggacaaccttgcataagtcacttcacttctttgtgcctccgctttccttctataaaacgagcataatgtaatcacctcatatcattgtccagtgaattcag

SEQ ID NO: 14360 - DNA, 122 bp, Homo sapiens
  misc_feature (61)..(62): /note="This region represents a CpG dinucleotide"
  misc_feature (61)..(61): /note="Nucleotide may be methylated to form 5-methylcytosine"
acggcatgccgtaggaaagttttatttccaattgattggttacaaatcagataaatatcgcgtctaatgaaagcagctttgaactgctggaaatgttatctataggagtctggggtttatca

SEQ ID NO: 14361 - DNA, 122 bp, Homo sapiens
  misc_feature (61)..(62): /note="This region represents a CpG dinucleotide"
  misc_feature (61)..(61): /note="Nucleotide may be methylated to form 5-methylcytosine"
gcagaaaccattttatgactagctggactagtgcctgtaccctgtagtaatctggactaccgcttgttgcttaagttcaggtaaacttaatgggtcttctccttttgcttgaaattcaactg

SEQ ID NO: 14362 - DNA, 122 bp, Homo sapiens
  misc_feature (61)..(62): /note="This region represents a CpG dinucleotide"
  misc_feature (61)..(61): /note="Nucleotide may be methylated to form 5-methylcytosine"
taatggaatattatgcaaccctgtggatggatgaatggatagcaaaatatagtatgtacacgcaatggaagattatgcaaccctcagaaggagtgcagttccaacacgtgccacatgtggca

SEQ ID NO: 14363 - DNA, 122 bp, Homo sapiens
  misc_feature (61)..(62): /note="This region represents a CpG dinucleotide"
  misc_feature (61)..(61): /note="Nucleotide may be methylated to form 5-methylcytosine"
ctctttactgactagacatggctggtcttctcttctatttcaaaccctctactctcttggcgaattatcccattttgagtgataaaaccatctacttgaaatgattttttgtagggacatag

SEQ ID NO: 14364 - DNA, 122 bp, Homo sapiens
  misc_feature (61)..(62): /note="This region represents a CpG dinucleotide"
  misc_feature (61)..(61): /note="Nucleotide may be methylated to form 5-methylcytosine"
agaatgagttcagtaagtgtgagccagtattagaaaatgtttcttgaatgaagatgtgaacggaatgagccctgaacttgagtcacagtggtgacacatagtgcatgtggggatgaggcagc

SEQ ID NO: 14365 - DNA, 122 bp, Homo sapiens
  misc_feature (61)..(62): /note="This region represents a CpG dinucleotide"
  misc_feature (61)..(61): /note="Nucleotide may be methylated to form 5-methylcytosine"
acactgatattagggagtgaatcattagccatgaaatcatgtcgactttcccgactgcagcgttcttgacatgacagcaatcgcaacctgcctttcattagagccccaataagttctttact

SEQ ID NO: 14366 - DNA, 122 bp, Homo sapiens
  misc_feature (61)..(62): /note="This region represents a CpG dinucleotide"
  misc_feature (61)..(61): /note="Nucleotide may be methylated to form 5-methylcytosine"
gggaagccctaactctggagggacagagacaggtaaggttagtttacttccttgagctttcgtcttcagtgctgcttacagccttaggatatctggtattcaggaaaggaggatgaggtagc

SEQ ID NO: 14367 - DNA, 122 bp, Homo sapiens
  misc_feature (61)..(62): /note="This region represents a CpG dinucleotide"
  misc_feature (61)..(61): /note="Nucleotide may be methylated to form 5-methylcytosine"
aataacactcaccaaatattccatgtgcttcctcacatttgctagtttttttgttgtaggcgaggccatgtgattagtcctgagagaaagcattgtgagtcatttccaagctgcagtaccta

SEQ ID NO: 14368 - DNA, 122 bp, Homo sapiens
  misc_feature (61)..(62): /note="This region represents a CpG dinucleotide"
  misc_feature (61)..(61): /note="Nucleotide may be methylated to form 5-methylcytosine"
tcgcccagctctaggtgctttcaaagcaaaccagactaaactcttggacaaaggccattgcgcagatcaggaagtctaactgaccattccagaatctctgcttccattccccactttaaatc

SEQ ID NO: 14369 - DNA, 122 bp, Homo sapiens
  misc_feature (61)..(62): /note="This region represents a CpG dinucleotide"
  misc_feature (61)..(61): /note="Nucleotide may be methylated to form 5-methylcytosine"
tacttcagaacacagtgaggacttatgtaaaccatctacacagggcatgacatatactaccgcagaaaaatgattgttgatgtcactttcattaccaccactctaccctcagcacttcaata

SEQ ID NO: 14370 - DNA, 122 bp, Homo sapiens
  misc_feature (61)..(62): /note="This region represents a CpG dinucleotide"
  misc_feature (61)..(61): /note="Nucleotide may be methylated to form 5-methylcytosine"
gaagcagcttctgtacaagtctgatttctcctgcctggcctgggtgatcacagtgggtcccgggatgtttaaactgatggtagagtcaaccatcagcatttatttctgtgtttacagtcttc

SEQ ID NO: 14371 - DNA, 122 bp, Homo sapiens
  misc_feature (61)..(62): /note="This region represents a CpG dinucleotide"
  misc_feature (61)..(61): /note="Nucleotide may be methylated to form 5-methylcytosine"
cccctccaagatttttctaattctctgaaactaagttccgcttcgaccctacccaggccacgtggtactttcttgtcaatggtttcttgctgagaacgggctgaccactgccaggcagacag

SEQ ID NO: 14372 - DNA, 122 bp, Homo sapiens
  misc_feature (61)..(62): /note="This region represents a CpG dinucleotide"
  misc_feature (61)..(61): /note="Nucleotide may be methylated to form 5-methylcytosine"
tagagcctctcgtttcctcatttgtaatatgtgatcagaaatctgtcattctcggcctgccgcggtggctcactgctataatcccagcattttgggaggccaaggcaggcagatcacttgag

SEQ ID NO: 14373 - DNA, 122 bp, Homo sapiens
  misc_feature (61)..(62): /note="This region represents a CpG dinucleotide"
  misc_feature (61)..(61): /note="Nucleotide may be methylated to form 5-methylcytosine"
agattcttggctccacagatcagccgggaaccaacgcagaggttacttggctagagtggacgttaccaaatgtacaacgaaggatgacagaaataattgtacaaggaattgtacattttaat

SEQ ID NO: 14374 - DNA, 122 bp, Homo sapiens
  misc_feature (61)..(62): /note="This region represents a CpG dinucleotide"
  misc_feature (61)..(61): /note="Nucleotide may be methylated to form 5-methylcytosine"
gttgtttataaagagagagacactggaagatttaagtggccagcgagagctgtgtcgtgacgcgctgtccttgccagactgtctgcagcctttagacaaagcaaggctgaggcctgcagcaa

SEQ ID NO: 14375 - DNA, 122 bp, Homo sapiens
  misc_feature (61)..(62): /note="This region represents a CpG dinucleotide"
  misc_feature (61)..(61): /note="Nucleotide may be methylated to form 5-methylcytosine"
agtcactccccattttctttgaactctgtggccctaggcaacctctaatccgctgtgtctcgtctgctcctggctctttttgggtcttatctgtattgctatttgctcatctgtaacttcac

SEQ ID NO: 14376 - DNA, 122 bp, Homo sapiens
  misc_feature (61)..(62): /note="This region represents a CpG dinucleotide"
  misc_feature (61)..(61): /note="Nucleotide may be methylated to form 5-methylcytosine"
aaataaacacagttgttccaagctcatctgggtttttttctctttaaattgttaagattacgagttataaaggaataggaaatgtaaatgaagatacaaggatgctcaatgaaatgcaaagt

SEQ ID NO: 14377 - DNA, 122 bp, Homo sapiens
  misc_feature (61)..(62): /note="This region represents a CpG dinucleotide"
  misc_feature (61)..(61): /note="Nucleotide may be methylated to form 5-methylcytosine"
tgactgtatatcctgttggttctgtttctcttgagaactttcactaacacagttaacaaacgtttcctgtagacatacaagcagccaacaaacatatgaaaaattctcaacatcactaatca

SEQ ID NO: 14378 - DNA, 122 bp, Homo sapiens
  misc_feature (61)..(62): /note="This region represents a CpG dinucleotide"
  misc_feature (61)..(61): /note="Nucleotide may be methylated to form 5-methylcytosine"
aatttgtataactggctggtttatgaccaaaaatgctatttgcctaatgagcatttagaacgtggaaactgattttgaagcttgtaacagaaataggataaaataaaaataaaataaaatga

SEQ ID NO: 14379 - DNA, 122 bp, Homo sapiens
  misc_feature (61)..(62): /note="This region represents a CpG dinucleotide"
  misc_feature (61)..(61): /note="Nucleotide may be methylated to form 5-methylcytosine"
tcacccacaccctctgaagaaattattagaacctgtctcctgcctccttccatgagagtccgtgggtcccctagcggcgtgcagcctgctgggatggaaagggcccgtgctgcaactctgca

SEQ ID NO: 14380 - DNA, 122 bp, Homo sapiens
  misc_feature (61)..(62): /note="This region represents a CpG dinucleotide"
  misc_feature (61)..(61): /note="Nucleotide may be methylated to form 5-methylcytosine"
aggagtgtagctataagcttgtcacaagtttttgcaaagataaactagccttgttgatttcgcagatctcaccaataaaataactttcaaacacaaggaatactatccatgtgaaatcatta

SEQ ID NO: 14381 - DNA, 122 bp, Homo sapiens
  misc_feature (61)..(62): /note="This region represents a CpG dinucleotide"
  misc_feature (61)..(61): /note="Nucleotide may be methylated to form 5-methylcytosine"
ctgttttctctttcattatttatcactctctaaccatctccagctgggtgagtaaacaggcgcattggcccataatgaggaacagactgctgccgtggggctgccggaggggcgcgtgtgtg

SEQ ID NO: 14382 - DNA, 122 bp, Homo sapiens
  misc_feature (61)..(62): /note="This region represents a CpG dinucleotide"
  misc_feature (61)..(61): /note="Nucleotide may be methylated to form 5-methylcytosine"
ttagagtcgtctctcaaaggctctcagcaaatatctagagacgtggttacatccagtttacgaagactgtcggtgacttcggggtcatacagtacatggacaacgaaagaacagcaattgaa

SEQ ID NO: 14383 - DNA, 122 bp, Homo sapiens
  misc_feature (61)..(62): /note="This region represents a CpG dinucleotide"
  misc_feature (61)..(61): /note="Nucleotide may be methylated to form 5-methylcytosine"
tatcaggaaggtagtagagtggagcccagcttccaggctaagcagtggaccaataaatgacggatcagttaattgaacaatttggccagactagacaggtgtttgggaatttgttttggtac

SEQ ID NO: 14384 - DNA, 122 bp, Homo sapiens
  misc_feature (61)..(62): /note="This region represents a CpG dinucleotide"
  misc_feature (61)..(61): /note="Nucleotide may be methylated to form 5-methylcytosine"
gttacaggcataaccaaacagctctttagcttgtccctgaatctcctgccaaaatcatatcgcatctaaatcataccttgcgcttccaaaaggtctacagaagaaagatactctattttatg

SEQ ID NO: 14385 - DNA, 122 bp, Homo sapiens
  misc_feature (61)..(62): /note="This region represents a CpG dinucleotide"
  misc_feature (61)..(61): /note="Nucleotide may be methylated to form 5-methylcytosine"
tgcaacatattatgaatagctttccatgtggctgaatgtcatctcaaagcagctttgaaacggctgcagagtgctccatggtatgcaggtactagaatttatttcagtaattccctatggtt

SEQ ID NO: 14386 - DNA, 122 bp, Homo sapiens
  misc_feature (61)..(62): /note="This region represents a CpG dinucleotide"
  misc_feature (61)..(61): /note="Nucleotide may be methylated to form 5-methylcytosine"
gcgggactggagggcacagttgaggaaggagggtggttaagaaatacagtggggccctctcgctgtcccttgcccagggcacttgcattccagcctcgctgcatttgctctctcgattcccc

SEQ ID NO: 14387 - DNA, 122 bp, Homo sapiens
  misc_feature (61)..(62): /note="This region represents a CpG dinucleotide"
  misc_feature (61)..(61): /note="Nucleotide may be methylated to form 5-methylcytosine"
gcagtaagtaaccctacaaccaagattccagtgccggctgctggccagatcaggggaacacgcgcttcctgcagagtcattcccaagcccatctggctggaaagaaaagccttaaacttgag

SEQ ID NO: 14388 - DNA, 122 bp, Homo sapiens
  misc_feature (61)..(62): /note="This region represents a CpG dinucleotide"
  misc_feature (61)..(61): /note="Nucleotide may be methylated to form 5-methylcytosine"
agggaaggcagtctggatggtcataagtaaaactactgggacatcatgaccctgcattaacgtagaatgagtctggttatcaatgggcagcttaagaaaaacagaatggcaaatctacttgt

SEQ ID NO: 14389 - DNA, 122 bp, Homo sapiens
  misc_feature (61)..(62): /note="This region represents a CpG dinucleotide"
  misc_feature (61)..(61): /note="Nucleotide may be methylated to form 5-methylcytosine"
ctttccttgctgttccaaagctttttaagaaagtttcactcctgctctgaaaccttgtctcggtctctccttctgccttatgcccctcagttgaattctttcttctgaggaggcaaggactg

SEQ ID NO: 14390 - DNA, 122 bp, Homo sapiens
  misc_feature (61)..(62): /note="This region represents a CpG dinucleotide"
  misc_feature (61)..(61): /note="Nucleotide may be methylated to form 5-methylcytosine"
gggtgtgtgaattaacttccctcaccccagagtcctaatccaaaaaataggctcaacagccgcaccctgaagccagcagaggagctcaaaggtcaagagcaggacagaaggcagatacagag

SEQ ID NO: 14391 - DNA, 122 bp, Homo sapiens
  misc_feature (61)..(62): /note="This region represents a CpG dinucleotide"
  misc_feature (61)..(61): /note="Nucleotide may be methylated to form 5-methylcytosine"
tagtagctaagtcaatggagagtgagatgatttttacctacgttagaaggggaacaagaacgtttgagaaaaggaaacaatatgtgtatgttctgtgcaataggctgaatactagaaaagga

SEQ ID NO: 14392 - DNA, 122 bp, Homo sapiens
  misc_feature (61)..(62): /note="This region represents a CpG dinucleotide"
  misc_feature (61)..(61): /note="Nucleotide may be methylated to form 5-methylcytosine"
aaggattagcctagaataaacatcaaggcagagctcctaaatgagtgaaacagcctgacacgccatagagggatgatactgagtgacagattgtggcatactagaaaatgcatggcctatct

SEQ ID NO: 14393 - DNA, 122 bp, Homo sapiens
  misc_feature (61)..(62): /note="This region represents a CpG dinucleotide"
  misc_feature (61)..(61): /note="Nucleotide may be methylated to form 5-methylcytosine"
caaggccccagggagctgatgttgcactggagctctactctcctctcagcgagctggtgacgtgccagtccagcaggcctggcttatccaaccacaagtatgaatcggcagaaggcaatgag

SEQ ID NO: 14394 - DNA, 122 bp, Homo sapiens
  misc_feature (61)..(62): /note="This region represents a CpG dinucleotide"
  misc_feature (61)..(61): /note="Nucleotide may be methylated to form 5-methylcytosine"
tttttgttggagtcagcactgcagtggtgcctgtcacacattttccttctgaaacagtttcgtataaataaggtctttatcacctgcttcacagcatttttgtgaagtactttaaggtaaaa

SEQ ID NO: 14395 - DNA, 122 bp, Homo sapiens
  misc_feature (61)..(62): /note="This region represents a CpG dinucleotide"
  misc_feature (61)..(61): /note="Nucleotide may be methylated to form 5-methylcytosine"
ttagaaaggggaaagatgacacaagcaatagtgaaggctagtggagggaagtggggctttcgtccaaggaagcaaaaaatcataatgtgttattttttagggagtgtctggtgcaggcatgc

SEQ ID NO: 14396 - DNA, 122 bp, Homo sapiens
  misc_feature (61)..(62): /note="This region represents a CpG dinucleotide"
  misc_feature (61)..(61): /note="Nucleotide may be methylated to form 5-methylcytosine"
gcaactcccagctttcctatatgtccaagggcggcgagggctcaaaagtcctggataatccgcagatagaacacacacacccttttccgaattctgctgagcatttgcgttgtgtcaggaag

SEQ ID NO: 14397 - DNA, 122 bp, Homo sapiens
  misc_feature (61)..(62): /note="This region represents a CpG dinucleotide"
  misc_feature (61)..(61): /note="Nucleotide may be methylated to form 5-methylcytosine"
cttccaagcctctgcttttcttccccatccactcatctgacattgctattcatcctatttcgtatttcttttatagcactgactaattcaactataatggtttctctgagtgtttcctaaac

SEQ ID NO: 14398 - DNA, 122 bp, Homo sapiens
  misc_feature (61)..(62): /note="This region represents a CpG dinucleotide"
  misc_feature (61)..(61): /note="Nucleotide may be methylated to form 5-methylcytosine"
gtatgtgttaatagctcattcactttgattgctgcgtagtagtccatggtttgaatgttccgcagttcagccatttatttactgaaagacatttagaggctgggcgtggttgctcatgcctg

SEQ ID NO: 14399 - DNA, 122 bp, Homo sapiens
  misc_feature (61)..(62): /note="This region represents a CpG dinucleotide"
  misc_feature (61)..(61): /note="Nucleotide may be methylated to form 5-methylcytosine"
gctttatggtttgggttcacagagtgtgctgaataactgcatctgtcagcataacagaagcgtgctcttggatttgtacattatgtcacagttcaccaatgtttccccatgtattgtctctt

SEQ ID NO: 14400 - DNA, 122 bp, Homo sapiens
  misc_feature (61)..(62): /note="This region represents a CpG dinucleotide"
  misc_feature (61)..(61): /note="Nucleotide may be methylated to form 5-methylcytosine"
agcaaagactgcagtcaggagggctgagtccaaatcctgggtcaaagccacatgtcaactcgtatgacctgatatagtgagttaacctacctgagcctcagtttcctcatctgtaagggagg

SEQ ID NO: 14401 - DNA, 122 bp, Homo sapiens
  misc_feature (61)..(62): /note="This region represents a CpG dinucleotide"
  misc_feature (61)..(61): /note="Nucleotide may be methylated to form 5-methylcytosine"
aattacatctttaaatgaaaaaaaatgtagctgtgatttatctaggaactgagagtacagcgtctggacagagaaggttgatagtgtagccttctgtgatctatgtttatttttaaattatc

SEQ ID NO: 14402 - DNA, 122 bp, Homo sapiens
  misc_feature (61)..(62): /note="This region represents a CpG dinucleotide"
  misc_feature (61)..(61): /note="Nucleotide may be methylated to form 5-methylcytosine"
gtatgtgagcccctgccctgatggttttacccacagatgtgtgtcaatgtgagtgtgccccgtgcagatgttccaagttcttcccctcacttgagctcaattccatacaggtgttcctccta

SEQ ID NO: 14403 - DNA, 122 bp, Homo sapiens
  misc_feature (61)..(62): /note="This region represents a CpG dinucleotide"
  misc_feature (61)..(61): /note="Nucleotide may be methylated to form 5-methylcytosine"
ataagttataaattgcacactgttctgagtagtgtgatgaaatgtcacaccatcctactccgtcctgcccaggatgtgaatctgaatcattcctttgtccagcatctccatgctgtatatgc

SEQ ID NO: 14404 - DNA, 122 bp, Homo sapiens
  misc_feature (61)..(62): /note="This region represents a CpG dinucleotide"
  misc_feature (61)..(61): /note="Nucleotide may be methylated to form 5-methylcytosine"
ctgcacccggaaggaggaagctgcacagggtgtctgtggctggccccgggatcccccactcggggacttcctcttcctctcagggcaggtgcagctgccacagtgagacgggcaccccgacc

SEQ ID NO: 14405 - DNA, 122 bp, Homo sapiens
  misc_feature (61)..(62): /note="This region represents a CpG dinucleotide"
  misc_feature (61)..(61): /note="Nucleotide may be methylated to form 5-methylcytosine"
aagattctagctagaagacattactttcttctctaagaactaatcatttgaaagcaatgacgagcagcaaggaggcttagtcatacctgagtgactgatccagcgtcattcctgtaaaatca

SEQ ID NO: 14406 - DNA, 122 bp, Homo sapiens
  misc_feature (61)..(62): /note="This region represents a CpG dinucleotide"
  misc_feature (61)..(61): /note="Nucleotide may be methylated to form 5-methylcytosine"
gtcctcatcaagtactggtcctcgtgtatgtgttctgcttccgctttctcaggatgtttacgtttttgcaaatacgtttatggaaaagagttacctcacccacctctccaaacatctatttg

SEQ ID NO: 14407 - DNA, 122 bp, Homo sapiens
  misc_feature (61)..(62): /note="This region represents a CpG dinucleotide"
  misc_feature (61)..(61): /note="Nucleotide may be methylated to form 5-methylcytosine"
tgacttttgttgttattgaaacctggtggttgctttccctggactactgcagatacagttcgctgggtaagacggcgaaaagaatagacttatctatgtttttcctatcaattgtagataag

SEQ ID NO: 14408 - DNA, 122 bp, Homo sapiens
  misc_feature (61)..(62): /note="This region represents a CpG dinucleotide"
  misc_feature (61)..(61): /note="Nucleotide may be methylated to form 5-methylcytosine"
cagtctcaccgtaggcctcgtcatcctcgtcccgctgctttccccccatggctcagtctccggagtgattggagccctggagacctggcgtctcacctgctgcccgccccgccctcccacac

SEQ ID NO: 14409 - DNA, 122 bp, Homo sapiens
  misc_feature (61)..(62): /note="This region represents a CpG dinucleotide"
  misc_feature (61)..(61): /note="Nucleotide may be methylated to form 5-methylcytosine"
caagcgagggagggagggagggagagattatttctatgtttcctggtcaacatagtgagacgctgtctctacagaagatcaaaaaatgtgttggctgagcatgagcctggtggtgtgtgcct

SEQ ID NO: 14410 - DNA, 122 bp, Homo sapiens
  misc_feature (61)..(62): /note="This region represents a CpG dinucleotide"
  misc_feature (61)..(61): /note="Nucleotide may be methylated to form 5-methylcytosine"
catgtggacttaacttgttctgttgcagttttgccagtgcaccttaaagtagcggtttctcgttgtctgaacaagtacccggggttctttgtcctgcatccaaaaaaattaaggagcatgga

SEQ ID NO: 14411 - DNA, 122 bp, Homo sapiens
  misc_feature (61)..(62): /note="This region represents a CpG dinucleotide"
  misc_feature (61)..(61): /note="Nucleotide may be methylated to form 5-methylcytosine"
atatttgggattgtttttatttttttcttattactagtacagattttaccacattgaaaacgattgttttgtcatcctgtgtagagtaccagaagggcatcatggcaaagtcagccacaaca

SEQ ID NO: 14412 - DNA, 122 bp, Homo sapiens
  misc_feature (61)..(62): /note="This region represents a CpG dinucleotide"
  misc_feature (61)..(61): /note="Nucleotide may be methylated to form 5-methylcytosine"
cactcctcacacatggcatataaggcagggctttgcacacagaggctcattcaacactgacgttctgatgctacatgttcacagcttaaagatttcttgggcattctacagaaaaaaatctg

SEQ ID NO: 14413 - DNA, 122 bp, Homo sapiens
  misc_feature (61)..(62): /note="This region represents a CpG dinucleotide"
  misc_feature (61)..(61): /note="Nucleotide may be methylated to form 5-methylcytosine"
accttgtgttccagtcggtgggaaacactggtttttcctcaacgccacgtgggcatgtcacgtccaggcctggcctggggtaggcctcagctccatctcctgcccaacgcctgccaaggttc

SEQ ID NO: 14414 - DNA, 122 bp, Homo sapiens
  misc_feature (61)..(62): /note="This region represents a CpG dinucleotide"
  misc_feature (61)..(61): /note="Nucleotide may be methylated to form 5-methylcytosine"
aaaatgggaccaaacactttgattcacagaggcagtgttatagagggcaagagcctggcacgtctgaatttgtatcttggctcagccacttggaagctgtgcacccctgggaaaattccttc

SEQ ID NO: 14415 - DNA, 122 bp, Homo sapiens
  misc_feature (61)..(62): /note="This region represents a CpG dinucleotide"
  misc_feature (61)..(61): /note="Nucleotide may be methylated to form 5-methylcytosine"
agctaggaccacaggcatgcaccaccatgctgggctaatttttaaacatttttctagagacgagatctcactattttgcccaggctggtcttgaactcccggcctcaaggcatgagtcaccc

SEQ ID NO: 14416 - DNA, 122 bp, Homo sapiens
  misc_feature (61)..(62): /note="This region represents a CpG dinucleotide"
  misc_feature (61)..(61): /note="Nucleotide may be methylated to form 5-methylcytosine"
acctacaacaactaggataaatccggaagattgaaacaaagaggatgcattcacacttatcgggaaaatatttttatgggaacaccaagaacaataccagacttgtcaattgtcagtcagct

SEQ ID NO: 14417 - DNA, 122 bp, Homo sapiens
  misc_feature (61)..(62): /note="This region represents a CpG dinucleotide"
  misc_feature (61)..(61): /note="Nucleotide may be methylated to form 5-methylcytosine"
caaaaaagcaccttgttaagaaccaacaatcaggttaacgatcacaatacctggctttaacgtcatatcactgaaaggcactgaagagggtaggaaagacagtcttgaattgcctgcacaac

SEQ ID NO: 14418 - DNA, 122 bp, Homo sapiens
  misc_feature (61)..(62): /note="This region represents a CpG dinucleotide"
  misc_feature (61)..(61): /note="Nucleotide may be methylated to form 5-methylcytosine"
atcctcagagggcttctgtttttctctgttttggtttccctgaaagcagaacctgagacacgtacttggaatgtagatagtttattttgagataattctgagaatgccaggtaagggaaatg

SEQ ID NO: 14419 - DNA, 122 bp, Homo sapiens
  misc_feature (61)..(62): /note="This region represents a CpG dinucleotide"
  misc_feature (61)..(61): /note="Nucleotide may be methylated to form 5-methylcytosine"
gcttcaaatccagccataagctgataattgcagttcataagtatgataattgggtgctcacgcatgcgtgtgtgagatgtgtcaccctcaaaccttgttatgacgtcagcacattacccgtc

SEQ ID NO: 14420 - DNA, 122 bp, Homo sapiens
  misc_feature (61)..(62): /note="This region represents a CpG dinucleotide"
  misc_feature (61)..(61): /note="Nucleotide may be methylated to form 5-methylcytosine"
gaggcttcatgaaatttcaggtatgttccactgaggtactttaggactaacactgtttggcgacctgaaggtttgctctggggatttttatgccacacatagctgcatgcatgagcaactct

SEQ ID NO: 14421 - DNA, 122 bp, Homo sapiens
  misc_feature (61)..(62): /note="This region represents a CpG dinucleotide"
  misc_feature (61)..(61): /note="Nucleotide may be methylated to form 5-methylcytosine"
ttagggcctgcttcctcataggtgaggctttctcactgtaacctcatatggccgaaggggcgagggagtctctcaggtctcttttataaaagcactgatctcattcctaaggcctctgccct

SEQ ID NO: 14422 - DNA, 122 bp, Homo sapiens
  misc_feature (61)..(62): /note="This region represents a CpG dinucleotide"
  misc_feature (61)..(61): /note="Nucleotide may be methylated to form 5-methylcytosine"
gagacaaatctgcccttttaacagctggttctgattcaggtgatcccaggaacttactgtcgttgagtcactgtggtctcccaacttgttccttctttttgtatcaggaaggtgacttctca

SEQ ID NO: 14423 - DNA, 122 bp, Homo sapiens
  misc_feature (61)..(62): /note="This region represents a CpG dinucleotide"
  misc_feature (61)..(61): /note="Nucleotide may be methylated to form 5-methylcytosine"
aagtgaaagtaacaggtctctcccttgaaagcaaaagttagaaatgattaagcttagtgacgaagacacatcaaaacctgagataagccagaagctaggcctcttgcactcaacagttaccc

SEQ ID NO: 14424 - DNA, 122 bp, Homo sapiens
  misc_feature (61)..(62): /note="This region represents a CpG dinucleotide"
  misc_feature (61)..(61): /note="Nucleotide may be methylated to form 5-methylcytosine"
tttctgttaaaacattcttttaatggaagaagggggggaaaagcagcccagaaaaaattacgcaaatggcaaggtagtgacaaggcatctatcaaagtggctctggaaattccaatttttaa

SEQ ID NO: 14425 - DNA, 122 bp, Homo sapiens
  misc_feature (61)..(62): /note="This region represents a CpG dinucleotide"
  misc_feature (61)..(61): /note="Nucleotide may be methylated to form 5-methylcytosine"
taactgaagtccctagcctattgccattactaaactcccaggaagcaccagtatgttacccgtatgaaagaggccattgtgaaagtgaatgaaatgattcactcctattcccatttcccagc

SEQ ID NO: 14426 - DNA, 122 bp, Homo sapiens
  misc_feature (61)..(62): /note="This region represents a CpG dinucleotide"
  misc_feature (61)..(61): /note="Nucleotide may be methylated to form 5-methylcytosine"
atcaaaggtaaagccacctggctctccagatgtgttacaagatctcaggattaggctgggcgtggtgactcacgcctgtaatcccagcactttgggaggctgagccaggtggatcacctgag

SEQ ID NO: 14427 - DNA, 122 bp, Homo sapiens
  misc_feature (61)..(62): /note="This region represents a CpG dinucleotide"
  misc_feature (61)..(61): /note="Nucleotide may be methylated to form 5-methylcytosine"
tacgaaaagttatgtgcccctgattttactataaaattcatcacattttgaagtgtcctgcggttttacaacattttttaaatattgtattaaaaacagcttcttagctttttaaataaaga

SEQ ID NO: 14428 - DNA, 122 bp, Homo sapiens
  misc_feature (61)..(62): /note="This region represents a CpG dinucleotide"
  misc_feature (61)..(61): /note="Nucleotide may be methylated to form 5-methylcytosine"
gacccgctctttcacacctgcctgcgcccatgccgcggctagggacctctccgtggcggtcggtcctggctgccccagtgtgccatagcagcctgaggacgccccagcccagaagctaagca

SEQ ID NO: 14429 - DNA, 122 bp, Homo sapiens
  misc_feature (61)..(62): /note="This region represents a CpG dinucleotide"
  misc_feature (61)..(61): /note="Nucleotide may be methylated to form 5-methylcytosine"
tttttctctcaagtgtaggaaaacttccataccccattccccagttccctatcaaatggtcgtgtaaaagttattcctaaaagctacagtgagctttcttggtcctaatttatttgtcacta

SEQ ID NO: 14430 - DNA, 122 bp, Homo sapiens
  misc_feature (61)..(62): /note="This region represents a CpG dinucleotide"
  misc_feature (61)..(61): /note="Nucleotide may be methylated to form 5-methylcytosine"
tgaagaaatgaggatgagacagcagagtaatatgtccaagatcacacagcaccctgagcacgtactctgtgtacttaatcaccacatggagtccttcctggggccatcaaatgatcccccca

SEQ ID NO: 14431 - DNA, 122 bp, Homo sapiens
  misc_feature (61)..(62): /note="This region represents a CpG dinucleotide"
  misc_feature (61)..(61): /note="Nucleotide may be methylated to form 5-methylcytosine"
caggccactcaacccactgtgaggtcttactgtggggattaccgagtcaccaccaggctgcgctgaacaggaagtgaacaagtcaattcgagaaagatccaataagggaatattctctgggc

SEQ ID NO: 14432 - DNA, 122 bp, Homo sapiens
  misc_feature (61)..(62): /note="This region represents a CpG dinucleotide"
  misc_feature (61)..(61): /note="Nucleotide may be methylated to form 5-methylcytosine"
cacctttctggttcatgcagctcctatttcttgttcttatctttctttttctctgacctacgttccagatatctttagagttgctgctatggggagctgtatgtgattatctgactggcttc

SEQ ID NO: 14433 - DNA, 122 bp, Homo sapiens
  misc_feature (61)..(62): /note="This region represents a CpG dinucleotide"
  misc_feature (61)..(61): /note="Nucleotide may be methylated to form 5-methylcytosine"
gtgagggtgagtggcagccattgaggatgccatggctgtggtgacaggcagctcacactgcgtgtcctctctgcatagcaactcagcatctctgctgcttcctgactcatctgcccttcggc

SEQ ID NO: 14434 - DNA, 122 bp, Homo sapiens
  misc_feature (61)..(62): /note="This region represents a CpG dinucleotide"
  misc_feature (61)..(61): /note="Nucleotide may be methylated to form 5-methylcytosine"
aacatggtgagactccatctctacccaaaatacaaaaaataagctgggtgtggtggttcgcgcccgtagtcccagctactggggaggctgaggcaggattgcttgagccccagaaccagagg

SEQ ID NO: 14435 - DNA, 122 bp, Homo sapiens
  misc_feature (61)..(62): /note="This region represents a CpG dinucleotide"
  misc_feature (61)..(61): /note="Nucleotide may be methylated to form 5-methylcytosine"
atatgactatgagaacacattgtgattttggagagatcttatcaaagtgaagagtcttgacgcttaagcctcattagcatcatggcaaacagccctctaagacactgtttcagagagagtgc

SEQ ID NO: 14436 - DNA, 122 bp, Homo sapiens
  misc_feature (61)..(62): /note="This region represents a CpG dinucleotide"
  misc_feature (61)..(61): /note="Nucleotide may be methylated to form 5-methylcytosine"
taaccagtgttgcctcattcagctcaaacagatttcatagccaaagcaaaaggactggtacggtagtctgtggaaaccaggaagataaaacaacagccacaaaagagaaaatcaagagtgtt

SEQ ID NO: 14437 - DNA, 122 bp, Homo sapiens
  misc_feature (61)..(62): /note="This region represents a CpG dinucleotide"
  misc_feature (61)..(61): /note="Nucleotide may be methylated to form 5-methylcytosine"
ggggacacagcagtgaggaagacagatgagatctctgccctctcagaacttgtgtcatgtcggccaggcgtgatggctcatgcctgtaatcccaacactttgggaggctgaggagagtagat

SEQ ID NO: 14438 - DNA, 122 bp, Homo sapiens
  misc_feature (61)..(62): /note="This region represents a CpG dinucleotide"
  misc_feature (61)..(61): /note="Nucleotide may be methylated to form 5-methylcytosine"
cgaagggcagggtgtgcacctgcactgtttgccactgaatcttgcacgggacctagtacacgggacatgtctaaatgcttgctgagtcaaggaatgagactggcttaacccaagtctcattt

SEQ ID NO: 14439 - DNA, 122 bp, Homo sapiens
  misc_feature (61)..(62): /note="This region represents a CpG dinucleotide"
  misc_feature (61)..(61): /note="Nucleotide may be methylated to form 5-methylcytosine"
actccgggttgctttgcccatcggcggcagggccggacctcagggctctcctgacactggcgtgttccagtcctggctgcatctgagaatcacctggaaactttaaaaacgcgggtgcacgg

SEQ ID NO: 14440 - DNA, 122 bp, Homo sapiens
  misc_feature (61)..(62): /note="This region represents a CpG dinucleotide"
  misc_feature (61)..(61): /note="Nucleotide may be methylated to form 5-methylcytosine"
tgttagattaatgacattaaacttgatcagtgtcactgatcacttgatcatacttgatgtcgctgagcctcagtttcttcatttatgaaataggaatgatatcacaatactttcttagagga

SEQ ID NO: 14441 - DNA, 122 bp, Homo sapiens
  misc_feature (61)..(62): /note="This region represents a CpG dinucleotide"
  misc_feature (61)..(61): /note="Nucleotide may be methylated to form 5-methylcytosine"
tgaatgaagaggaaatgaagttctggttcgcagagggtctttggttctgaaaagcgttgccgtggttctagccttcctcgcggtggagggtgttttgctttctgcgcggtttctgtgtgggc

SEQ ID NO: 14442 - DNA, 122 bp, Homo sapiens
  misc_feature (61)..(62): /note="This region represents a CpG dinucleotide"
  misc_feature (61)..(61): /note="Nucleotide may be methylated to form 5-methylcytosine"
ttcagatgagagctgatctgctttccaattagcttccatttcaaatttctaaattccttgcgtggaggaagccatcctagattaggccagttgggataatgatatcttccaccccaggtttc

SEQ ID NO: 14443 - DNA, 122 bp, Homo sapiens
  misc_feature (61)..(62): /note="This region represents a CpG dinucleotide"
  misc_feature (61)..(61): /note="Nucleotide may be methylated to form 5-methylcytosine"
ttgaaccacaagcattgcaaattgacattacagcatagatttttcatcttgacagcttatcgtaggagccaaatagccccagattttcattaaagaagaaccaaataaatctggtcgaacat

SEQ ID NO: 14444 - DNA, 122 bp, Homo sapiens
  misc_feature (61)..(62): /note="This region represents a CpG dinucleotide"
  misc_feature (61)..(61): /note="Nucleotide may be methylated to form 5-methylcytosine"
cacctgtaaactggaagactggacccctgaagatccttctggtccaaacaatcagacttacgtatgtcagccacccatactgccacctctgaaatggcggtaatgaaattgctgtccccctc

SEQ ID NO: 14445 - DNA, 122 bp, Homo sapiens
  misc_feature (61)..(62): /note="This region represents a CpG dinucleotide"
  misc_feature (61)..(61): /note="Nucleotide may be methylated to form 5-methylcytosine"
attttgccttgaaacatctccccttatttctaatggatgagattggcactgcttcctcttcgtttattttattttttccacgttgcttatattcacatccttaccaaatgtattatcttaaa

SEQ ID NO: 14446 - DNA, 122 bp, Homo sapiens
  misc_feature (61)..(62): /note="This region represents a CpG dinucleotide"
  misc_feature (61)..(61): /note="Nucleotide may be methylated to form 5-methylcytosine"
gcactttcagggtggtatgaccctagaggccagcagtggcgcctggctgccccaacagcccgcggtgctgcagcggcagacctccacgaagaggtcccgggctcccgcgggggcgcaggcga

SEQ ID NO: 14447 - DNA, 122 bp, Homo sapiens
  misc_feature (61)..(62): /note="This region represents a CpG dinucleotide"
  misc_feature (61)..(61): /note="Nucleotide may be methylated to form 5-methylcytosine"
ttgccatcttaactgcatgagtgtgtaatgctgtaagtgaccctgtggcaaaaagacaagcgcagagtgggaatgactcagcttgggccctgatcatactacatccaggtgtgataatgaat

SEQ ID NO: 14448 - DNA, 122 bp, Homo sapiens
  misc_feature (61)..(62): /note="This region represents a CpG dinucleotide"
  misc_feature (61)..(61): /note="Nucleotide may be methylated to form 5-methylcytosine"
cggtatgattcaggtcaactcagctgacaaagcagacctcattattggatactcatgtttcgttttcttgtattgctctctcctaatgtaagatagtaaaaataatatgttactagtcgtca

SEQ ID NO: 14449 - DNA, 122 bp, Homo sapiens
  misc_feature (61)..(62): /note="This region represents a CpG dinucleotide"
  misc_feature (61)..(61): /note="Nucleotide may be methylated to form 5-methylcytosine"
ttaatccagtttcataacttcagaaaggatttctgagatgacctttcctttaccttatcacgtaaggaaagccaagtagtaatagaatttcattcagcttaacaatcacttataccctgctt

SEQ ID NO: 14450 - DNA, 122 bp, Homo sapiens
  misc_feature (61)..(62): /note="This region represents a CpG dinucleotide"
  misc_feature (61)..(61): /note="Nucleotide may be methylated to form 5-methylcytosine"
gcctcatcctgccacatctgcactctggcaggagccgcctccctgctggcctccctgcttcgagtcatggccacctctagcctcatggtttggaaagcctatacagactaccttgattacat

SEQ ID NO: 14451 - DNA, 122 bp, Homo sapiens
  misc_feature (61)..(62): /note="This region represents a CpG dinucleotide"
  misc_feature (61)..(61): /note="Nucleotide may be methylated to form 5-methylcytosine"
acattggaagccttagataacctctctgagcctctttcttcatctgtagaatgttgtatacgtattagtaccaacttctttggggtgtgagtgtgaacttagataatgcatgcctataatgt

SEQ ID NO: 14452 - DNA, 122 bp, Homo sapiens
  misc_feature (61)..(62): /note="This region represents a CpG dinucleotide"
  misc_feature (61)..(61): /note="Nucleotide may be methylated to form 5-methylcytosine"
gctgaggctccacacacagtgacccaaccgactgctgctaacaaaataaaggtttcatctcggctttctcccccattttggtctgtgtggtgccaaaggaaataaacttttatttttccagt

SEQ ID NO: 14453 - DNA, 122 bp, Homo sapiens
  misc_feature (61)..(62): /note="This region represents a CpG dinucleotide"
  misc_feature (61)..(61): /note="Nucleotide may be methylated to form 5-methylcytosine"
tgaggtcttgggtgtgttgtccattcaccctggttgactcacaaatgttatcatgttctgcgtgttgtaaaaaatgttgggaaacactggtgtggctattgaaaatacaatcagcattatat

SEQ ID NO: 14454 - DNA, 122 bp, Homo sapiens
  misc_feature (61)..(62): /note="This region represents a CpG dinucleotide"
  misc_feature (61)..(61): /note="Nucleotide may be methylated to form 5-methylcytosine"
cctcccctagtctgggattggaagagactttcttaaggaggtggctttgcagctgagacgcgaaggagaagttccagttaaccaggtaaagagacgagagaatgtatcaggcagtgggaact

SEQ ID NO: 14455 - DNA, 122 bp, Homo sapiens
  misc_feature (61)..(62): /note="This region represents a CpG dinucleotide"
  misc_feature (61)..(61): /note="Nucleotide may be methylated to form 5-methylcytosine"
ggagtgggaggatgagtgctattgattctcactcatcagcacccactttgcttttggaggcggctttggaaatgcctttcccaggctcagcccttgcctgcagccatgaccttacctgaaga

SEQ ID NO: 14456 - DNA, 122 bp, Homo sapiens
  misc_feature (61)..(62): /note="This region represents a CpG dinucleotide"
  misc_feature (61)..(61): /note="Nucleotide may be methylated to form 5-methylcytosine"
cagtccaaactgtaatttagaactactgctacatacaacttggatgagtttcacagacaccgtgatgaaagaaaagaaaccagacaggctgggtgcggtggctcacgcctgtaatcccagca

SEQ ID NO: 14457 - DNA, 122 bp, Homo sapiens
  misc_feature (61)..(62): /note="This region represents a CpG dinucleotide"
  misc_feature (61)..(61): /note="Nucleotide may be methylated to form 5-methylcytosine"
actttggcatcacttcagataacctgatgcctgcattggtccatcatgactggaggcattcgtttgtaataataaataaagtctgatggtagtccttgaggatgccagttgctttttaccct

SEQ ID NO: 14458 - DNA, 122 bp, Homo sapiens
  misc_feature (61)..(62): /note="This region represents a CpG dinucleotide"
  misc_feature (61)..(61): /note="Nucleotide may be methylated to form 5-methylcytosine"
ttggcaggaggactacatgtggttgacagattatatctgaaaagggctttggtaattgctcgttctcttcagtgactgtgttgctgacagatgggcacagtgaatattgaaagtgttctgga

SEQ ID NO: 14459 - DNA, 122 bp, Homo sapiens
  misc_feature (61)..(62): /note="This region represents a CpG dinucleotide"
  misc_feature (61)..(61): /note="Nucleotide may be methylated to form 5-methylcytosine"
aaattttgtttacttctttagccaagaactcacttatctgaacaaggcactgaaagaaaacggaactctgtcaggaaggtaaataaattaggaaagcaaaagtgactgcaaattattagcta

SEQ ID NO: 14460 - DNA, 122 bp, Homo sapiens
  misc_feature (61)..(62): /note="This region represents a CpG dinucleotide"
  misc_feature (61)..(61): /note="Nucleotide may be methylated to form 5-methylcytosine"
atttgagagcctggatcttctctaaaattcggatggatcatctttttccatgctaaagggcgtaaaacactacaccatttccattttcatttccctgattgctagtgaaggtgagtaacttc

SEQ ID NO: 14461 - DNA, 122 bp, Homo sapiens
  misc_feature (61)..(62): /note="This region represents a CpG dinucleotide"
  misc_feature (61)..(61): /note="Nucleotide may be methylated to form 5-methylcytosine"
ctcaaggcttgataattgcaacaagaatccagctagataatgtccacagccataggagcccgttcctctagtcaaactcctggtagactaaagcagtggagcaaggggcttatggcttaaag

SEQ ID NO: 14462 - DNA, 122 bp, Homo sapiens
  misc_feature (61)..(62): /note="This region represents a CpG dinucleotide"
  misc_feature (61)..(61): /note="Nucleotide may be methylated to form 5-methylcytosine"
gggaagtgttggagccgggattcaattcaagctgttggcttcagattcccagttcatactcgctccctctatgaaacctccacccatccatttggaaaatgttgctagctagcttcaccttc

SEQ ID NO: 14463 - DNA, 122 bp, Homo sapiens
  misc_feature (61)..(62): /note="This region represents a CpG dinucleotide"
  misc_feature (61)..(61): /note="Nucleotide may be methylated to form 5-methylcytosine"
tgtattggtcaatctccctcctcccccattagaatcatcagggagtggtttgtggggaggcgggaaggggtgttgtcttaaaataaaatgtgctttcaataaaataccttggcatcccattt

SEQ ID NO: 14464 - DNA, 122 bp, Homo sapiens
  misc_feature (61)..(62): /note="This region represents a CpG dinucleotide"
  misc_feature (61)..(61): /note="Nucleotide may be methylated to form 5-methylcytosine"
tgatcacggctcactgcgacctcaaactcctggtctcacacgatcctcctgcctcgcctccgaaaactctagttttacagatatgaaccatagcgctagctcttactgtctttcttcaacac

SEQ ID NO: 14465 - DNA, 122 bp, Homo sapiens
  misc_feature (61)..(62): /note="This region represents a CpG dinucleotide"
  misc_feature (61)..(61): /note="Nucleotide may be methylated to form 5-methylcytosine"
tagttatattttggaacattgtttatagaatgaggaaaattcaacaatgttgtctgcagacgcaaggcacattcactgatgagacacatggctcatgctgaaaacatctggtctgtcaaata

SEQ ID NO: 14466 - DNA, 122 bp, Homo sapiens
  misc_feature (61)..(62): /note="This region represents a CpG dinucleotide"
  misc_feature (61)..(61): /note="Nucleotide may be methylated to form 5-methylcytosine"
gttctctgcttccagctgccctggagctgcggggagtgagccagggtcgcatcttcacagcgtgaatggcaaggacagcctcggtttcccctcttctgcgctatcaccaactaaatatttga

SEQ ID NO: 14467 - DNA, 122 bp, Homo sapiens
  misc_feature (61)..(62): /note="This region represents a CpG dinucleotide"
  misc_feature (61)..(61): /note="Nucleotide may be methylated to form 5-methylcytosine"
cacatccattcaggacaggaagtgcatgatgtgactcacgagcagagggaaagggaattgcgctcagctggtaaaggcaaagaaagaacaaatagaggctatagccaccaagaagaagaaga

SEQ ID NO: 14468 - DNA, 122 bp, Homo sapiens
  misc_feature (61)..(62): /note="This region represents a CpG dinucleotide"
  misc_feature (61)..(61): /note="Nucleotide may be methylated to form 5-methylcytosine"
agattctcatataaggctattaacatgttgtaatctggctacatctcctggcgatcctcccgcagcagtccatcagcaatcttctccactcacattcacagccatatagcagtctactgtgt

SEQ ID NO: 14469 - DNA, 122 bp, Homo sapiens
  misc_feature (61)..(62): /note="This region represents a CpG dinucleotide"
  misc_feature (61)..(61): /note="Nucleotide may be methylated to form 5-methylcytosine"
tgggattgcgggtgtgagccgctgtgcctggctgcacttttccttctaatggaatgtaagcgccacttttgtctgttattttcactgtagtatccctagcctttggaatgttgcctggcaag

SEQ ID NO: 14470 - DNA, 122 bp, Homo sapiens
  misc_feature (61)..(62): /note="This region represents a CpG dinucleotide"
  misc_feature (61)..(61): /note="Nucleotide may be methylated to form 5-methylcytosine"
aatcttggggtgagtttccctgaagacagccccagggtgctgtggctgtaggagctggaccgtctagtgccttggtctgggggtggctgaagctggaggagggaaagaggccagtcctttgc

SEQ ID NO: 14471 - DNA, 122 bp, Homo sapiens
  misc_feature (61)..(62): /note="This region represents a CpG dinucleotide"
  misc_feature (61)..(61): /note="Nucleotide may be methylated to form 5-methylcytosine"
gcatgactcctgtgggagctgtctgcagagggattgctgggtgcagagtcactgcctctccgtctgtcaactgctgctgctccagaataaacaggcagccgggcttctcgcggttgtggaga

SEQ ID NO: 14472 - DNA, 122 bp, Homo sapiens
  misc_feature (61)..(62): /note="This region represents a CpG dinucleotide"
  misc_feature (61)..(61): /note="Nucleotide may be methylated to form 5-methylcytosine"
tctggcaggaaatgagaaggtaaaaggtcagatcagagttatggtcttgtaactgcattgcgaagtgatgggtgtgaagagagggaattaagccttgaatcacagaaaggaaggctcccatc

SEQ ID NO: 14473 - DNA, 122 bp, Homo sapiens
  misc_feature (61)..(62): /note="This region represents a CpG dinucleotide"
  misc_feature (61)..(61): /note="Nucleotide may be methylated to form 5-methylcytosine"
gcgcctccaccccagggcacggctccccgaggggcccattctgtccctgcagagccgaggcggcagcgccttctgatctctgggcactttgaagacttcctgtgccccagacaggccctgga

SEQ ID NO: 14474 - DNA, 122 bp, Homo sapiens
  misc_feature (61)..(62): /note="This region represents a CpG dinucleotide"
  misc_feature (61)..(61): /note="Nucleotide may be methylated to form 5-methylcytosine"
gcagttttagtgaaaaagttaaacaaaattcaaaggtattataatcttaaaaaacaaacacgcaccatttaaaaagtgtttagagaggtgtgtcattttctgattattaatgtcaatgcatc

SEQ ID NO: 14475 - DNA, 122 bp, Homo sapiens
  misc_feature (61)..(62): /note="This region represents a CpG dinucleotide"
  misc_feature (61)..(61): /note="Nucleotide may be methylated to form 5-methylcytosine"
aacgtgaggggaggctattggaaagttttaagcagtgaattaacatgatcagggtaccttcggacaccaatggctaggtggagaacaggctacaacaaagtgttatcagagtccagtcacga

SEQ ID NO: 14476 - DNA, 122 bp, Homo sapiens
  misc_feature (61)..(62): /note="This region represents a CpG dinucleotide"
  misc_feature (61)..(61): /note="Nucleotide may be methylated to form 5-methylcytosine"
ttgagaggaggagagaggtggaaggagctcgggagagcccagagtggtgcctggaccatccggctgtagcaaaggcaagagtcagaaaaaagtctggaaagccactgagaaggccttgagtg

SEQ ID NO: 14477 - DNA, 122 bp, Homo sapiens
  misc_feature (61)..(62): /note="This region represents a CpG dinucleotide"
  misc_feature (61)..(61): /note="Nucleotide may be methylated to form 5-methylcytosine"
cctacagaggcagctgagccacaccacagactcctacaagggcttgggttagggttaccacgtgtctagataagcagaggagatggtgaggcagacacagaaaggtcggttcaaagctgatt

SEQ ID NO: 14478 - DNA, 122 bp, Homo sapiens
  misc_feature (61)..(62): /note="This region represents a CpG dinucleotide"
  misc_feature (61)..(61): /note="Nucleotide may be methylated to form 5-methylcytosine"
ggcggaggttgcagtgagctgagatcgtgccactgcactcctccagcctggaggacagagcgagactccgtcttaagaagaaaaagagaaagagagaaaaaaaggccagcaaaataaacagc

SEQ ID NO: 14479 - DNA, 122 bp, Homo sapiens
  misc_feature (61)..(62): /note="This region represents a CpG dinucleotide"
  misc_feature (61)..(61): /note="Nucleotide may be methylated to form 5-methylcytosine"
acacagtaaggtagccaaggctcaccttatacttcctcatgcagttgatgacagtaattccgtagccattactgagcatgtacatttgtcaggtactggtttgtactttaaaagaattacca

SEQ ID NO: 14480 - DNA, 122 bp, Homo sapiens
  misc_feature (61)..(62): /note="This region represents a CpG dinucleotide"
  misc_feature (61)..(61): /note="Nucleotide may be methylated to form 5-methylcytosine"
gacacagggaaggaagccacaggacaagagcttggcaatgccgtgtcctcagggctccggcgcctacccatggatgtagtgctcgccctcccaaggccggtgtcctggtgacgatgccacta

SEQ ID NO: 14481 - DNA, 122 bp, Homo sapiens
  misc_feature (61)..(62): /note="This region represents a CpG dinucleotide"
  misc_feature (61)..(61): /note="Nucleotide may be methylated to form 5-methylcytosine"
tgatttttctttatccgtgattctactcagcccatattttgtacctttgactggttggtccgttttctagtctgcccctttcagtcccagtggaatattcaagcttatagtaaagaatgaaa

SEQ ID NO: 14482 - DNA, 122 bp, Homo sapiens
  misc_feature (61)..(62): /note="This region represents a CpG dinucleotide"
  misc_feature (61)..(61): /note="Nucleotide may be methylated to form 5-methylcytosine"
agcttctctgctagtggccacaggcagagcctgcctttgatgaggttacagaggcagccacgcctgtgctctttggactctggtgggtggggaggcttcctggtcactaaccgctcaacatc

SEQ ID NO: 14483 - DNA, 122 bp, Homo sapiens
  misc_feature (61)..(62): /note="This region represents a CpG dinucleotide"
  misc_feature (61)..(61): /note="Nucleotide may be methylated to form 5-methylcytosine"
cataagtagtacagcctgctctttatggcgagcagctagggagagggataaggaaagaagcggccagggtacagccaaataagcctgtaatagaggcagattaatcatcaaaacaaggccgg

SEQ ID NO: 14484 - DNA, 122 bp, Homo sapiens
  misc_feature (61)..(62): /note="This region represents a CpG dinucleotide"
  misc_feature (61)..(61): /note="Nucleotide may be methylated to form 5-methylcytosine"
aacagcgccctcacatgctatgtacaattcagcctacggacgtacttggtggcatttcagcgtgatgagccttacaggggttttcagacacagactttactaagaacaacatgtggatggtt

SEQ ID NO: 14485 - DNA, 122 bp, Homo sapiens
  misc_feature (61)..(62): /note="This region represents a CpG dinucleotide"
  misc_feature (61)..(61): /note="Nucleotide may be methylated to form 5-methylcytosine"
ccctgctgtcagggaggcggcctacaaacgcttcggctacaagctggctggcatggaccccgagaagcccggcacgcccatcgtgctgaggagggcccagccacgcgctcgcagcagcaacg

SEQ ID NO: 14486 - DNA, 122 bp, Homo sapiens
  misc_feature (61)..(62): /note="This region represents a CpG dinucleotide"
  misc_feature (61)..(61): /note="Nucleotide may be methylated to form 5-methylcytosine"
gacctgaaaagaaatgggagtttcctgagtctagccaacagtgatcatggcagctcccaacggagagttaaggggcatcccagttctactgccactgctgactagttatcactcaactctcc

SEQ ID NO: 14487 - DNA, 122 bp, Homo sapiens
  misc_feature (61)..(62): /note="This region represents a CpG dinucleotide"
  misc_feature (61)..(61): /note="Nucleotide may be methylated to form 5-methylcytosine"
tcacaccaaatttttctatcaaataaaactagtgacagcttgtggctttttattagagctcgccacgaactagggtaaggtgagtgtcttagcatattttaatgcagttgcttactaaaggt

SEQ ID NO: 14488 - DNA, 122 bp, Homo sapiens
  misc_feature (61)..(62): /note="This region represents a CpG dinucleotide"
  misc_feature (61)..(61): /note="Nucleotide may be methylated to form 5-methylcytosine"
aaaccacagtctcaccacaacggggcattccaggagcttgtctgtgtcagcatagatgttcgcctctgcacaaggtgttgtgaattactgtacttgcccttcttctctatctaggtcatttt

SEQ ID NO: 14489 - DNA, 122 bp, Homo sapiens
  misc_feature (61)..(62): /note="This region represents a CpG dinucleotide"
  misc_feature (61)..(61): /note="Nucleotide may be methylated to form 5-methylcytosine"
tgctggaggaaaggtctcttaatgtccccaactcatagaggaggaaatgtgtgttaaatgcgtaattattgtgagctgttctatacatgctgggggaggggcagacctcacaggctcacccc

SEQ ID NO: 14490 - DNA, 122 bp, Homo sapiens
  misc_feature (61)..(62): /note="This region represents a CpG dinucleotide"
  misc_feature (61)..(61): /note="Nucleotide may be methylated to form 5-methylcytosine"
cagggcactccgtgtgctctagtcctttttagatgagaatgagccatcttcctcctactccggggcctttgcacatgcaaatgcttctgtgtgaatcaaccttcctttagcccaagtaaatt

SEQ ID NO: 14491 - DNA, 122 bp, Homo sapiens
  misc_feature (61)..(62): /note="This region represents a CpG dinucleotide"
  misc_feature (61)..(61): /note="Nucleotide may be methylated to form 5-methylcytosine"
gcctttgagtcatgaatgaagaaaatcactttcacttgtgggagccagtgggctccagttcgtgttgtctctgttgtccgtggagactttgaagatgtttatatgcacctcaactatcaaga

SEQ ID NO: 14492 - DNA, 122 bp, Homo sapiens
  misc_feature (61)..(62): /note="This region represents a CpG dinucleotide"
  misc_feature (61)..(61): /note="Nucleotide may be methylated to form 5-methylcytosine"
tttggaactactgattattttgataaagatttcattgctgcttattcaatagtaattcaacgctggcatcaagccgctgctccgacaggatgtggatcccatcatttaaaatgctaggcatc

SEQ ID NO: 14493 - DNA, 122 bp, Homo sapiens
  misc_feature (61)..(62): /note="This region represents a CpG dinucleotide"
  misc_feature (61)..(61): /note="Nucleotide may be methylated to form 5-methylcytosine"
tattttctcccctctgcaaagcagctgctagctcagactgacaggggcttgtgggattctcgacatttagactcccagaatctcagtgctgagagaatgtcagtgaagcatctggtcctgcc

SEQ ID NO: 14494 - DNA, 122 bp, Homo sapiens
  misc_feature (61)..(62): /note="This region represents a CpG dinucleotide"
  misc_feature (61)..(61): /note="Nucleotide may be methylated to form 5-methylcytosine"
accatcctttcctccctctcatgccagccactaagtcccagcaaaggctgagtctccagacggccactattacgacaaggaagtagggaggggactctgctgtcctctggtgtccacccacc

SEQ ID NO: 14495 - DNA, 122 bp, Homo sapiens
  misc_feature (61)..(62): /note="This region represents a CpG dinucleotide"
  misc_feature (61)..(61): /note="Nucleotide may be methylated to form 5-methylcytosine"
taattcctctgcttaaccactgccccaccctgaaggcttcatttgtacagtgtgctatcacgtcatttggcctattgttgactcaaagcagtatttacatattaactctctgtcttttaaca

SEQ ID NO: 14496 - DNA, 122 bp, Homo sapiens
  misc_feature (61)..(62): /note="This region represents a CpG dinucleotide"
  misc_feature (61)..(61): /note="Nucleotide may be methylated to form 5-methylcytosine"
cactaccacacccagatgagtttcctttctgtgactgtcattagtacacaagtgccccaccgcattagctgcctaaaaaggagccaagttgggggacgattgatgagtttgtgacctcattg

SEQ ID NO: 14497 - DNA, 122 bp, Homo sapiens
  misc_feature (61)..(62): /note="This region represents a CpG dinucleotide"
  misc_feature (61)..(61): /note="Nucleotide may be methylated to form 5-methylcytosine"
tcccccctgccagccagtgcctccactcccaggtccctccactgtcacacagaccctgggcggcctctaagcccagaaattccaaggctaggccagaataattggggtgggtgggggcaggg

SEQ ID NO: 14498 - DNA, 122 bp, Homo sapiens
  misc_feature (61)..(62): /note="This region represents a CpG dinucleotide"
  misc_feature (61)..(61): /note="Nucleotide may be methylated to form 5-methylcytosine"
caatttgtaagtacattttgatcttaactgttttaggagagatcatcagaaaaattggcccgatcaaaaagaatgattaacatatgaccagacatgaatatgtgagctagcattagtcatgg

SEQ ID NO: 14499 - DNA, 122 bp, Homo sapiens
  misc_feature (61)..(62): /note="This region represents a CpG dinucleotide"
  misc_feature (61)..(61): /note="Nucleotide may be methylated to form 5-methylcytosine"
tgatggaagtcagccaagcgaagacgaagggtgggggagcagtcggcaattccagtttgacgctaatgatttgtgtacaattcaaggtcagagaatgatatgtgaggcttgtgcgcccaccc

SEQ ID NO: 14500 - DNA, 122 bp, Homo sapiens
  misc_feature (61)..(62): /note="This region represents a CpG dinucleotide"
  misc_feature (61)..(61): /note="Nucleotide may be methylated to form 5-methylcytosine"
gggcctggagcgctctctgtgcccggaccttgtaattatgtcccacagcccgggaaaccgcgggcctcgcagcatctggctgcggttgcgaacttttgtttcaagatgcgcgactatttata

SEQ ID NO: 14501 - DNA, 122 bp, Homo sapiens
  misc_feature (61)..(62): /note="This region represents a CpG dinucleotide"
  misc_feature (61)..(61): /note="Nucleotide may be methylated to form 5-methylcytosine"
atcattgccactggtggtacaatgctggtgccaagactgtgtgccaggctcgttgcttcgcgtccgttacttcatctcagcagacaactctcaatatccccattctacggatggggaaatga

SEQ ID NO: 14502 - DNA, 122 bp, Homo sapiens
  misc_feature (61)..(62): /note="This region represents a CpG dinucleotide"
  misc_feature (61)..(61): /note="Nucleotide may be methylated to form 5-methylcytosine"
gtgaaaaatggtgtcttgctttagattccagaggaaggctgtggtggtatgcagtaagcacgcagcaggtgtatgtgtgtacacttggttacactgtggcatgccggggaggaggggacggg

SEQ ID NO: 14503 - DNA, 122 bp, Homo sapiens
  misc_feature (61)..(62): /note="This region represents a CpG dinucleotide"
  misc_feature (61)..(61): /note="Nucleotide may be methylated to form 5-methylcytosine"
aaccaagagcacagacagttgggtaattttgcttccaaatactgactcagcctctgtaaccgcttcctgggcccaaagaaaactaacgagtgctcccttctcagggacagtgccccaagtgg

SEQ ID NO: 14504 - DNA, 122 bp, Homo sapiens
  misc_feature (61)..(62): /note="This region represents a CpG dinucleotide"
  misc_feature (61)..(61): /note="Nucleotide may be methylated to form 5-methylcytosine"
gcctggctccctttcccaacaccatcccttaaacactggtgttcttcaggcttctgaactcgacctagtctacctgtagactgtgtctcctcattctatgtcctcacagggaggtgagtctc

SEQ ID NO: 14505 - DNA, 122 bp, Homo sapiens
  misc_feature (61)..(62): /note="This region represents a CpG dinucleotide"
  misc_feature (61)..(61): /note="Nucleotide may be methylated to form 5-methylcytosine"
attaaaagctcttctggccccacgccattagtgccctctgtgcgtacccaggactgagtacgttgaagaagaaagaagagaaaggtatagctaactcatgtaaaatcccttctcctttacac

SEQ ID NO: 14506 - DNA, 122 bp, Homo sapiens
  misc_feature (61)..(62): /note="This region represents a CpG dinucleotide"
  misc_feature (61)..(61): /note="Nucleotide may be methylated to form 5-methylcytosine"
gttcttaggggcataggacatgaggttcgtctctttgttttgggaaactgaatctcctaacgcgatggactcgctctttatctccagcattgcccgctgccttggtgtctgctttgtttatt

SEQ ID NO: 14507 - DNA, 122 bp, Homo sapiens
  misc_feature (61)..(62): /note="This region represents a CpG dinucleotide"
  misc_feature (61)..(61): /note="Nucleotide may be methylated to form 5-methylcytosine"
gcttagaaagcctcagtgacaaggccacacagacaggaaggggtggaattgagattcatacgaagtccatccgacctccaggctgtgttgttgctatggggcttcatggctcatgttggaaa

SEQ ID NO: 14508 - DNA, 122 bp, Homo sapiens
  misc_feature (61)..(62): /note="This region represents a CpG dinucleotide"
  misc_feature (61)..(61): /note="Nucleotide may be methylated to form 5-methylcytosine"
ctgcccattcatttttaagtaaaggctttctcccttatgataatatcacaataattgccacgtaatgtgtgcattctgtcagaaaataatggtgagaaagttaaaacttggcccttcatgca

SEQ ID NO: 14509 - DNA, 122 bp, Homo sapiens
  misc_feature (61)..(62): /note="This region represents a CpG dinucleotide"
  misc_feature (61)..(61): /note="Nucleotide may be methylated to form 5-methylcytosine"
cgtagggttcctaggttctggcttcactgctctggaggagggtgttgacaatgagtggcacgttgcctgtgcctttgagcaagagagcttttcaaaagcagagatacaggagggttcaggat

SEQ ID NO: 14510 - DNA, 122 bp, Homo sapiens
  misc_feature (61)..(62): /note="This region represents a CpG dinucleotide"
  misc_feature (61)..(61): /note="Nucleotide may be methylated to form 5-methylcytosine"
gaatgcagtcatctgtttattcagtaaatttccgtatcttactaatcacaacagcatccacgtacacttaaaatagtgcctatatgtatgtgtgatacttgtttacataacaagcttgctga

SEQ ID NO: 14511 - DNA, 122 bp, Homo sapiens
  misc_feature (61)..(62): /note="This region represents a CpG dinucleotide"
  misc_feature (61)..(61): /note="Nucleotide may be methylated to form 5-methylcytosine"
tgatttcctgtatgtttctaccggagtccaagattccagcagtgctagcctagacagcagcggctgcatcctagaacccagaggtcaggagtgctcccaagtcagtgtgagggcatcttccc

SEQ ID NO: 14512 - DNA, 122 bp, Homo sapiens
  misc_feature (61)..(62): /note="This region represents a CpG dinucleotide"
  misc_feature (61)..(61): /note="Nucleotide may be methylated to form 5-methylcytosine"
ccctgggtgccagtctctccttctgtagctccgcaaagctctgggcttgtgtgagagtgtcggtgtgtgtgcatgtgtgggggtgagtctgcatgtgcacctgtcatgtgtagaagcttgta

SEQ ID NO: 14513 - DNA, 122 bp, Homo sapiens
  misc_feature (61)..(62): /note="This region represents a CpG dinucleotide"
  misc_feature (61)..(61): /note="Nucleotide may be methylated to form 5-methylcytosine"
ttattaattttaccctctagtaaatatgtcagcatgaggaagtgacacaacagctatctccgatattaaggactattctggtgctgctcctttatgaaaataatagtagagaaaaacaaact

SEQ ID NO: 14514 - DNA, 122 bp, Homo sapiens
  misc_feature (61)..(62): /note="This region represents a CpG dinucleotide"
  misc_feature (61)..(61): /note="Nucleotide may be methylated to form 5-methylcytosine"
cagtcatcctagctctggacaactctgagtgactcatgggggccgtggtctgacagactgcgtcttcctcccaccagcccaatgcaaccccacagctgcccagaacaagcctgtttctttct

SEQ ID NO: 14515 - DNA, 122 bp, Homo sapiens
  misc_feature (61)..(62): /note="This region represents a CpG dinucleotide"
  misc_feature (61)..(61): /note="Nucleotide may be methylated to form 5-methylcytosine"
atgtcggcatgggtagtaggctgaatcataatccccaaagactttggatcctaatcccttcgtatcagtgaatgttactttatatggaaaaaaaggtcatagcagatgtgattaaggatctt

SEQ ID NO: 14516 - DNA, 122 bp, Homo sapiens
  misc_feature (61)..(62): /note="This region represents a CpG dinucleotide"
  misc_feature (61)..(61): /note="Nucleotide may be methylated to form 5-methylcytosine"
aggctgtatccccaacacctggcacacagcaggtgctcagttaatgtttgttcacagggacgctgctgcctctagtgggctgggccctggaggcctgatgagctgagggtggattatcagat

SEQ ID NO: 14517 - DNA, 122 bp, Homo sapiens
  misc_feature (61)..(62): /note="This region represents a CpG dinucleotide"
  misc_feature (61)..(61): /note="Nucleotide may be methylated to form 5-methylcytosine"
cctccctgaacttaacactgcacccctgtggcagatcagatcattatctcatttattgcacgccatagctttaggaagtaagttcttatattattcccatgttgtagctaatgaaactgagg

SEQ ID NO: 14518 - DNA, 122 bp, Homo sapiens
  misc_feature (61)..(62): /note="This region represents a CpG dinucleotide"
  misc_feature (61)..(61): /note="Nucleotide may be methylated to form 5-methylcytosine"
cactacctgccagttagtcgcttagtagccatctcagttaccagactgactatggcaggacgacagtgcttgtgtgcagcaacacttagcccttaattaataagtgagtttacttattagtg

SEQ ID NO: 14519 - DNA, 122 bp, Homo sapiens
  misc_feature (61)..(62): /note="This region represents a CpG dinucleotide"
  misc_feature (61)..(61): /note="Nucleotide may be methylated to form 5-methylcytosine"
taaattgaagaagctgttatttccgatgtatagctggatgtgaagtgactgcggcaaaatcggagagagaaggtgagaaccctcgtggcccgtacggggatcgaacccgcgaccttggcgtt

SEQ ID NO: 14520 - DNA, 122 bp, Homo sapiens
  misc_feature (61)..(62): /note="This region represents a CpG dinucleotide"
  misc_feature (61)..(61): /note="Nucleotide may be methylated to form 5-methylcytosine"
ctgagaagttcttagagtttatccctgctactactgctgcacattatcacagtattaatacgactgttggggaataaatgcatttaacagttaatgtgaactccacagaaataaattacatg

SEQ ID NO: 14521 - DNA, 122 bp, Homo sapiens
  misc_feature (61)..(62): /note="This region represents a CpG dinucleotide"
  misc_feature (61)..(61): /note="Nucleotide may be methylated to form 5-methylcytosine"
aggagtgccaatgagattatacactgttaaaactgattccaggctgggtgcggtggctcacgcctgtaatcctagcactttgggaggcctaggcaggccgattgtctaagctcaggagttcg

SEQ ID NO: 14522 - DNA, 122 bp, Homo sapiens
  misc_feature (61)..(62): /note="This region represents a CpG dinucleotide"
  misc_feature (61)..(61): /note="Nucleotide may be methylated to form 5-methylcytosine"
atacaaactgctacaacctgattaagagcctctcatccagagtttttattcctggtccttcgctgactggcactgtttttgttttttttttttaactgggggagatgacctcacacaggata

SEQ ID NO: 14523 - DNA, 122 bp, Homo sapiens
  misc_feature (61)..(62): /note="This region represents a CpG dinucleotide"
  misc_feature (61)..(61): /note="Nucleotide may be methylated to form 5-methylcytosine"
ggtggaaggtgactggatcatgggggtgggccttcatgaacggtttggcaccatcctcttcgcgctgttcttatgatagtgagtgggtgagtgcctgagagatctggtggtttaaaagtggg

SEQ ID NO: 14524 - DNA, 122 bp, Homo sapiens
  misc_feature (61)..(62): /note="This region represents a CpG dinucleotide"
  misc_feature (61)..(61): /note="Nucleotide may be methylated to form 5-methylcytosine"
aaactcccctcctcttgaaccttagaatccttctgcttcactcttggcaaatctttgggtcggatttcagaactgaataaagccaggatttccccccaacctccaagatgtctggactcttt

SEQ ID NO: 14525 - DNA, 122 bp, Homo sapiens
  misc_feature (61)..(62): /note="This region represents a CpG dinucleotide"
  misc_feature (61)..(61): /note="Nucleotide may be methylated to form 5-methylcytosine"
aaacaatagagcatgcatggtgtggctgtttcatgagtgggaaggaaagtgagtgtggggcgagctgtggagctgccctcgctgctgccgatagtcaaattcacagctggctgccctgggca

SEQ ID NO: 14526 - DNA, 122 bp, Homo sapiens
  misc_feature (61)..(62): /note="This region represents a CpG dinucleotide"
  misc_feature (61)..(61): /note="Nucleotide may be methylated to form 5-methylcytosine"
cacacacatacacacacacacaccctgtgccctgggtagaggcagtggcacagctgtgggcgctttgcttttctgctcttcctggttccacatctagaattttgtgacttggtgagggggtg

SEQ ID NO: 14527 - DNA, 122 bp, Homo sapiens
  misc_feature (61)..(62): /note="This region represents a CpG dinucleotide"
  misc_feature (61)..(61): /note="Nucleotide may be methylated to form 5-methylcytosine"
cctgctgtctactccccaccttcggtgagcggccgccatggtggagcagggtccgagccacgtcctgcagggcacgtctggggcatttcctgttttgtggtaggaaatgtccctgacctttc

SEQ ID NO: 14528 - DNA, 122 bp, Homo sapiens
  misc_feature (61)..(62): /note="This region represents a CpG dinucleotide"
  misc_feature (61)..(61): /note="Nucleotide may be methylated to form 5-methylcytosine"
tgtttaaaactacagttgtctactgggctttctccaaataagactggtatctataaaacacggtatctgattttattaacaattagacttgacagcataatctgaacggaacctttagaaaa

SEQ ID NO: 14529 - DNA, 122 bp, Homo sapiens
  misc_feature (61)..(62): /note="This region represents a CpG dinucleotide"
  misc_feature (61)..(61): /note="Nucleotide may be methylated to form 5-methylcytosine"
acgtgtatgtataaatccttcatagtcataggacttatgctcctgaaaaaaccataggcccgtcaccttagcttttggatatgagtcccagtttttctgctttactaatgacatgactctga

SEQ ID NO: 14530 - DNA, 122 bp, Homo sapiens
  misc_feature (61)..(62): /note="This region represents a CpG dinucleotide"
  misc_feature (61)..(61): /note="Nucleotide may be methylated to form 5-methylcytosine"
acttctctctgtctctgttgctcttgttctcattaatgagctaattacagttcccaagagcgccatgtcttcatggttttgcccatggagttcattctgcctcacaccttttcctggttcct

SEQ ID NO: 14531 - DNA, 122 bp, Homo sapiens
  misc_feature (61)..(62): /note="This region represents a CpG dinucleotide"
  misc_feature (61)..(61): /note="Nucleotide may be methylated to form 5-methylcytosine"
aaaacagaccccaaactctgggtgtcagctacctaaatctctgctaatggctgaatcacacgtgtggggcaggctccaggcagctaagctaaggatgaagtcattgtattgagatttgagct

SEQ ID NO: 14532 - DNA, 122 bp, Homo sapiens
  misc_feature (61)..(62): /note="This region represents a CpG dinucleotide"
  misc_feature (61)..(61): /note="Nucleotide may be methylated to form 5-methylcytosine"
agagaaaggtcctacctgctcctcttcacccacagaacacgtttcaaacatttcaaaccacgagtttttatttacaaagatttgacgttactattatatgagcttctgaaattatctgagag

SEQ ID NO: 14533 - DNA, 122 bp, Homo sapiens
  misc_feature (61)..(62): /note="This region represents a CpG dinucleotide"
  misc_feature (61)..(61): /note="Nucleotide may be methylated to form 5-methylcytosine"
aaaggggaggcagggagctgtgtccagttgtggctaacctatggctcagcagaaacatagcggctaaaatctgtgaaaggttctgatttcagatgcataatcaaaccaccccaggtggaact

SEQ ID NO: 14534 - DNA, 122 bp, Homo sapiens
  misc_feature (61)..(62): /note="This region represents a CpG dinucleotide"
  misc_feature (61)..(61): /note="Nucleotide may be methylated to form 5-methylcytosine"
ctccacctcgattccaagccctagtatttcagctctttctggacactgtggttatagctccgcttgctggtttcccacatccctggcaggcaaatggccaaccacagagaagccccaggccc

SEQ ID NO: 14535 - DNA, 122 bp, Homo sapiens
  misc_feature (61)..(62): /note="This region represents a CpG dinucleotide"
  misc_feature (61)..(61): /note="Nucleotide may be methylated to form 5-methylcytosine"
ggggagaagttaccactcttgaagcaaccagctttcacctgaactaatagagtgagaatgcgttacctcagcacaagtcattcatgagggagccgcccccatgactcaaatgtttcccatta

SEQ ID NO: 14536 - DNA, 122 bp, Homo sapiens
  misc_feature (61)..(62): /note="This region represents a CpG dinucleotide"
  misc_feature (61)..(61): /note="Nucleotide may be methylated to form 5-methylcytosine"
cagtcagggagctgctgtgtccctgccttcagcagtcacactgtctcagtcacagtcacacgtactcacactgggcccagcacccccctcgggacacgcaggctcctgcatcacccagcctc

SEQ ID NO: 14537 - DNA, 122 bp, Homo sapiens
  misc_feature (61)..(62): /note="This region represents a CpG dinucleotide"
  misc_feature (61)..(61): /note="Nucleotide may be methylated to form 5-methylcytosine"
gatagagactctttatctacctctttatatgaaatgttaagcaaccacttagagcgtaatcgatcataaccaatcaggtcttgtaactgtttgttagtcttgtgtggaaaatgtaattctgt

SEQ ID NO: 14538 - DNA, 122 bp, Homo sapiens
  misc_feature (61)..(62): /note="This region represents a CpG dinucleotide"
  misc_feature (61)..(61): /note="Nucleotide may be methylated to form 5-methylcytosine"
agacaaatgtgttcataagctctattccagaaagtgatcctttcataaactcagttctcccgagggtggggaagggagtttccataaagtattgtccatatgcttcctaacgtgtgggaaag

SEQ ID NO: 14539 - DNA, 122 bp, Homo sapiens
  misc_feature (61)..(62): /note="This region represents a CpG dinucleotide"
  misc_feature (61)..(61): /note="Nucleotide may be methylated to form 5-methylcytosine"
tctgttaactgtctttgcatatcctttgctcattttctgctgtgtcattggtcttactgacgtataggagttcatccctagggcatatagtcttttgtgacatgagatgtaaatactctttg

SEQ ID NO: 14540 - DNA, 122 bp, Homo sapiens
  misc_feature (61)..(62): /note="This region represents a CpG dinucleotide"
  misc_feature (61)..(61): /note="Nucleotide may be methylated to form 5-methylcytosine"
aattttatagaaagcctacaaaatgagccgagttttcataatgacacaaagaaaaataaacgatgtgtaaagtctatactaaggcttaaataacaaaagaggatgatacagaatgtttcata

SEQ ID NO: 14541 - DNA, 122 bp, Homo sapiens
  misc_feature (61)..(62): /note="This region represents a CpG dinucleotide"
  misc_feature (61)..(61): /note="Nucleotide may be methylated to form 5-methylcytosine"
tggtggtggggttataggtgcagatctggacccagtctgtctggaggcagatctctcctccgtccctcagcttcctcatctgtaaaatggggaaaacaatagaaccaacctcacaggattgc

SEQ ID NO: 14542 - DNA, 122 bp, Homo sapiens
  misc_feature (61)..(62): /note="This region represents a CpG dinucleotide"
  misc_feature (61)..(61): /note="Nucleotide may be methylated to form 5-methylcytosine"
cacagtgctcaggctgtggctacactcaaccttgtttacaggaaaccgtgccataatcgtcgcttgctgtttcctttctcttgtatcacctccttctagtatctgcgttgacacccaagaac

SEQ ID NO: 14543 - DNA, 122 bp, Homo sapiens
  misc_feature (61)..(62): /note="This region represents a CpG dinucleotide"
  misc_feature (61)..(61): /note="Nucleotide may be methylated to form 5-methylcytosine"
ccctaaccacccttaattcaagagcacattttaaaaaatgatctcattattgagtctcttcgaagtacttacttggttgtcacagaaaggttcttttacactggttccataatttatgtaat

SEQ ID NO: 14544 - DNA, 122 bp, Homo sapiens
  misc_feature (61)..(62): /note="This region represents a CpG dinucleotide"
  misc_feature (61)..(61): /note="Nucleotide may be methylated to form 5-methylcytosine"
ttagttgccttgctacttggcgcaaaaccaattcctcttttcaatatcaagtttcataagcgtggaacagtaacaaatcattataaaccctctgggactggtgggtgtgtgatgatgcgggg

SEQ ID NO: 14545 - DNA, 122 bp, Homo sapiens
  misc_feature (61)..(62): /note="This region represents a CpG dinucleotide"
  misc_feature (61)..(61): /note="Nucleotide may be methylated to form 5-methylcytosine"
gtatttgagactttagtcattgcctgttctgagccatcacattacagagacaggcctaggcgccacctagcccttcattagtaagagtgcacttcctagagattctaggttcactgcagtga

SEQ ID NO: 14546 - DNA, 122 bp, Homo sapiens
  misc_feature (61)..(62): /note="This region represents a CpG dinucleotide"
  misc_feature (61)..(61): /note="Nucleotide may be methylated to form 5-methylcytosine"
gactcacagttccacatggccggggaagcctcacagtcatggccggaagtgaatgaggagcgaagtcacatcttacatggtgcagacaagaatgcttgtgtagggcaactcccctttataaa

SEQ ID NO: 14547 - DNA, 122 bp, Homo sapiens
  misc_feature (61)..(62): /note="This region represents a CpG dinucleotide"
  misc_feature (61)..(61): /note="Nucleotide may be methylated to form 5-methylcytosine"
tgactgtcatttactagcagggacacctgggacatatgttctttaactacctgtgcctctcgtatcatcagaaaacaaggaaaacccctatttcatgagattgttaagataattaaatgaat

SEQ ID NO: 14548 - DNA, 122 bp, Homo sapiens
  misc_feature (61)..(62): /note="This region represents a CpG dinucleotide"
  misc_feature (61)..(61): /note="Nucleotide may be methylated to form 5-methylcytosine"
caggttgttgaaactttggctctaactatatgaagtgaattgtttttttactggtgttttcgctgtgtaaatattgtattcagtctgagtttacaagaagcaaataacttagcctattctgg

SEQ ID NO: 14549 - DNA, 122 bp, Homo sapiens
  misc_feature (61)..(62): /note="This region represents a CpG dinucleotide"
  misc_feature (61)..(61): /note="Nucleotide may be methylated to form 5-methylcytosine"
taatttatgcaactaacttatgtggtaggtagaataatgcctctcttccccaaaaatgtccgtatcctaactccaggaacctgtgaaaacaggagaccttgcatggcaagtgactttgtaga

SEQ ID NO: 14550 - DNA, 122 bp, Homo sapiens
  misc_feature (61)..(62): /note="This region represents a CpG dinucleotide"
  misc_feature (61)..(61): /note="Nucleotide may be methylated to form 5-methylcytosine"
tgtaccagtccctgctctaagcctttaagatgaatgaatttattttaatctttacaacagcgctgtaaggtaggtactgttattattatccccgttgtacagatgaggcaactgagtcacac

SEQ ID NO: 14551 - DNA, 122 bp, Homo sapiens
  misc_feature (61)..(62): /note="This region represents a CpG dinucleotide"
  misc_feature (61)..(61): /note="Nucleotide may be methylated to form 5-methylcytosine"
taaaagcaagctgtaccccaactatcttggggtacagcttctgaggctgtgtcatgggtgcgtccttaacgttggcaaaattaactttctaaactgactgagacctctctcagattttgagt

SEQ ID NO: 14552 - DNA, 122 bp, Homo sapiens
  misc_feature (61)..(62): /note="This region represents a CpG dinucleotide"
  misc_feature (61)..(61): /note="Nucleotide may be methylated to form 5-methylcytosine"
aatcaaatacggacttagcacatcgcactcactggcactgtaacttcaccgaagactcagcgttcactaggtggctaagtgctattggcaagagttcacagatgaaacacttcaagagacaa

SEQ ID NO: 14553 - DNA, 122 bp, Homo sapiens
  misc_feature (61)..(62): /note="This region represents a CpG dinucleotide"
  misc_feature (61)..(61): /note="Nucleotide may be methylated to form 5-methylcytosine"
ctgtgggtggcacatgatgactgtccctgctactctgccaatgtgagaaggcactgcagacggtgtccaccacatgggtgccctggatttggtcctcagcaggctgggcttggcctactggc

SEQ ID NO: 14554 - DNA, 122 bp, Homo sapiens
  misc_feature (61)..(62): /note="This region represents a CpG dinucleotide"
  misc_feature (61)..(61): /note="Nucleotide may be methylated to form 5-methylcytosine"
ccacatcttgtgcattctttcctctgttttccttttgactttaaatggaaagagagcaggcgtatgcgccagcagcattctatgcctgtgactcctgagtagccttttccctctcctttttc

SEQ ID NO: 14555 - DNA, 122 bp, Homo sapiens
  misc_feature (61)..(62): /note="This region represents a CpG dinucleotide"
  misc_feature (61)..(61): /note="Nucleotide may be methylated to form 5-methylcytosine"
caaatgagtgaacttgggagatcatctctggtgcaactccctaattctgtagatgaaacacgtgactccccatagctgaagatggagtcagataagagaatcttctatgacatcatactgcc

SEQ ID NO: 14556 - DNA, 122 bp, Homo sapiens
  misc_feature (61)..(62): /note="This region represents a CpG dinucleotide"
  misc_feature (61)..(61): /note="Nucleotide may be methylated to form 5-methylcytosine"
gaagcagaggttgcagtgagccaagctcgcatcattgcactcgagcctgagtaacaagagcgaaagagccaagctcgcatcattgcactcgagcctgggtaacaagagtgaaactccatctc

SEQ ID NO: 14557 - DNA, 122 bp, Homo sapiens
  misc_feature (61)..(62): /note="This region represents a CpG dinucleotide"
  misc_feature (61)..(61): /note="Nucleotide may be methylated to form 5-methylcytosine"
tgcttaatcactcaacaagattttaaaacgtgattgaagaccgcctacctgtgagggcagcgccgaccaggcttttcttgcccgctagtccacgtaatgcggtcgctaagaagcccgcagca

SEQ ID NO: 14558 - DNA, 122 bp, Homo sapiens
  misc_feature (61)..(62): /note="This region represents a CpG dinucleotide"
  misc_feature (61)..(61): /note="Nucleotide may be methylated to form 5-methylcytosine"
gggagtggtggagacgctggacaaagggatgattcacgtcctgggtgggaccgagcgggacggtgggagatttcatcaggctactcagaacagtgtgcaatttaaaacctgttgattgttta

SEQ ID NO: 14559 - DNA, 122 bp, Homo sapiens
  misc_feature (61)..(62): /note="This region represents a CpG dinucleotide"
  misc_feature (61)..(61): /note="Nucleotide may be methylated to form 5-methylcytosine"
ccctccgtgacctggggatgccactgtctgcagtcctctccaccgcacacttgcaggcgccgacgctggaccgatggcacagccagtcccaggtgtaagcgcagctccaaccttgctccttc

SEQ ID NO: 14560 - DNA, 122 bp, Homo sapiens
  misc_feature (61)..(62): /note="This region represents a CpG dinucleotide"
  misc_feature (61)..(61): /note="Nucleotide may be methylated to form 5-methylcytosine"
gacaaaactgaggctcagagaggctgagagagacactgctgaggtcacacagccaggagtcggcaggaagccctgaacccaagcagggctggcctggctactagcctgggctcagtccttta

SEQ ID NO: 14561 - DNA, 122 bp, Homo sapiens
  misc_feature (61)..(62): /note="This region represents a CpG dinucleotide"
  misc_feature (61)..(61): /note="Nucleotide may be methylated to form 5-methylcytosine"
ccctcagctttaaaggtagattcttagacacagtttaccaagacatgaatctggtaaggtcgtaaacaaacaaatcataatgggtgtccagaaggctaaactgttcttgctttgcaaataaa

SEQ ID NO: 14562 - DNA, 122 bp, Homo sapiens
  misc_feature (61)..(62): /note="This region represents a CpG dinucleotide"
  misc_feature (61)..(61): /note="Nucleotide may be methylated to form 5-methylcytosine"
ctcagggccggggtggtgctcagaaacactgtctttatgatatacatgggcttttgagctcgtggcttgtggttgtggactgagaaaattgcttcctgggtttatagagatggtaggggaaa

SEQ ID NO: 14563 - DNA, 122 bp, Homo sapiens
  misc_feature (61)..(62): /note="This region represents a CpG dinucleotide"
  misc_feature (61)..(61): /note="Nucleotide may be methylated to form 5-methylcytosine"
tcattcttacctaagttaatgagtcacaatggaggcgtggagcccctgggaggaggggcacgcaaaacacccatttataaatgacagagctgggataagaacccatttctctcccacagtaa

SEQ ID NO: 14564 - DNA, 122 bp, Homo sapiens
  misc_feature (61)..(62): /note="This region represents a CpG dinucleotide"
  misc_feature (61)..(61): /note="Nucleotide may be methylated to form 5-methylcytosine"
ggtacagtatgaaggaaataacctccagcaggtggtgccaaagtgccaagcggccgggcacggtggctcacacctgtcatcccagcactttgggagactgaggcaggcggatcacgaagtca

SEQ ID NO: 14565 - DNA, 122 bp, Homo sapiens
  misc_feature (61)..(62): /note="This region represents a CpG dinucleotide"
  misc_feature (61)..(61): /note="Nucleotide may be methylated to form 5-methylcytosine"
ctcagcattcttttattcttttagactcttcaggcagctgaattgattgactcagagtttcgagcaggaatgagcaatagacaaaagaacaaagctaaaagaatggccaagttatttgcaaa

SEQ ID NO: 14566 - DNA, 122 bp, Homo sapiens
  misc_feature (61)..(62): /note="This region represents a CpG dinucleotide"
  misc_feature (61)..(61): /note="Nucleotide may be methylated to form 5-methylcytosine"
tctgagaggtccttcgtaccgcaggagaggcagctctcacctgaaggcctccctggacaccggtctcaactttgtgtgttaccagttatggagaattatttttagtgagttacactctgtta

SEQ ID NO: 14567 - DNA, 122 bp, Homo sapiens
  misc_feature (61)..(62): /note="This region represents a CpG dinucleotide"
  misc_feature (61)..(61): /note="Nucleotide may be methylated to form 5-methylcytosine"
aaatattataatgaataattctactataattctactatgatcaggtcatttttgtttcttcggttggaaaggcagggcaggatatgttgtaatgctggtgtttatttcctatgaggctgagt

SEQ ID NO: 14568 - DNA, 122 bp, Homo sapiens
  misc_feature (61)..(62): /note="This region represents a CpG dinucleotide"
  misc_feature (61)..(61): /note="Nucleotide may be methylated to form 5-methylcytosine"
tttcccgtcctcccttcccccacaaccccccccaccccccgcccgacaatgagatccctacgaatgggaactaacagagagagtggtctcaggtcttgctatctgttacttaacaaaaatcg

SEQ ID NO: 14569 - DNA, 122 bp, Homo sapiens
  misc_feature (61)..(62): /note="This region represents a CpG dinucleotide"
  misc_feature (61)..(61): /note="Nucleotide may be methylated to form 5-methylcytosine"
cccagctcaaaactagagtatttctatcctcctgacagaatgactaagttagaactgcctcgtactctatatggctgagatgcagaaaatgccaaaacaattggtcacgactcaattcaggt

SEQ ID NO: 14570 - DNA, 122 bp, Homo sapiens
  misc_feature (61)..(62): /note="This region represents a CpG dinucleotide"
  misc_feature (61)..(61): /note="Nucleotide may be methylated to form 5-methylcytosine"
aagccaggactggacttcggaccaccagttccaaacccacaccccttcccttgcaccacacgcttttgtgtggatgagcctccccaaccctgtcaacaacaaactgtcactttgtcactttt

SEQ ID NO: 14571 - DNA, 122 bp, Homo sapiens
  misc_feature (61)..(62): /note="This region represents a CpG dinucleotide"
  misc_feature (61)..(61): /note="Nucleotide may be methylated to form 5-methylcytosine"
cttccgcaggggcagcggggtctcctggaagccccggagcctcatggaagcccgggagggcggcggagcggggcccgcagcgcggggcccggaggggcagccggcgcccgaagccagggtgc

SEQ ID NO: 14572 - DNA, 122 bp, Homo sapiens
  misc_feature (61)..(62): /note="This region represents a CpG dinucleotide"
  misc_feature (61)..(61): /note="Nucleotide may be methylated to form 5-methylcytosine"
ttgtttttcgtctcgttttttggtcttcagaaccactggtacttttcccattggataaaacgctgagagggtgagggagaggggcttcttccccagctttcctcgcagccaatcgccctgca

SEQ ID NO: 14573 - DNA, 122 bp, Homo sapiens
  misc_feature (61)..(62): /note="This region represents a CpG dinucleotide"
  misc_feature (61)..(61): /note="Nucleotide may be methylated to form 5-methylcytosine"
ttgtgcttcttatgactcagtcggccagcctgttagcattgatttgttcttggtggacaccgttgggcagaaggccctgctaaccacagaagcgagggtgaagtgtgcgctcaccaccatca

SEQ ID NO: 14574 - DNA, 122 bp, Homo sapiens
  misc_feature (61)..(62): /note="This region represents a CpG dinucleotide"
  misc_feature (61)..(61): /note="Nucleotide may be methylated to form 5-methylcytosine"
gaccactgaaaatattaaagcagtggtaagataatacagttgactcttgaacaccatgggcgttagggacattgattgctcatgcagttgaagatctgtgtgtaacttttgactcctccaaa

SEQ ID NO: 14575 - DNA, 122 bp, Homo sapiens
  misc_feature (61)..(62): /note="This region represents a CpG dinucleotide"
  misc_feature (61)..(61): /note="Nucleotide may be methylated to form 5-methylcytosine"
gggaaaggggtgtgatctgtctttcctgtctgcctcctctctgcttttttcatgtatacacgtaagggaaagatgtaatagtctctgttttctatgtacagggatatttagatatgcaaatg

SEQ ID NO: 14576 - DNA, 122 bp, Homo sapiens
  misc_feature (61)..(62): /note="This region represents a CpG dinucleotide"
  misc_feature (61)..(61): /note="Nucleotide may be methylated to form 5-methylcytosine"
gctagttcaggcctttgaattctgggtgtcaggatcacaaccttggctcctttaactgtccgctctaggagggaagcatgccaaatgtcaggtctcactctgactttgttccagtccatagc

SEQ ID NO: 14577 - DNA, 122 bp, Homo sapiens
  misc_feature (61)..(62): /note="This region represents a CpG dinucleotide"
  misc_feature (61)..(61): /note="Nucleotide may be methylated to form 5-methylcytosine"
caggtaactctagagttaataacctcagtgaaacaaggatctcaaacatctgttggcagccgggtgtggctgagaagtgcaaatgtactccctctttgaatttggttttagagagccagcat

SEQ ID NO: 14578 - DNA, 122 bp, Homo sapiens
  misc_feature (61)..(62): /note="This region represents a CpG dinucleotide"
  misc_feature (61)..(61): /note="Nucleotide may be methylated to form 5-methylcytosine"
ggtccccagttctgtttcttatgatggcaccttcccagatgcctagcttcacagaattctcgcagttaggcgctcaccacagagccaatctgatttaaatcatatttcttcataggctggat

SEQ ID NO: 14579 - DNA, 122 bp, Homo sapiens
  misc_feature (61)..(62): /note="This region represents a CpG dinucleotide"
  misc_feature (61)..(61): /note="Nucleotide may be methylated to form 5-methylcytosine"
aggtaaggatcgctgggcgtttgggtttgggggtgccatagacagtgaaagtgacagagccgtatggtgtctccacagagtgagtctgcaggaaaacagggcaccaagagctaggctcagag

SEQ ID NO: 14580 - DNA, 122 bp, Homo sapiens
  misc_feature (61)..(62): /note="This region represents a CpG dinucleotide"
  misc_feature (61)..(61): /note="Nucleotide may be methylated to form 5-methylcytosine"
cttaggatccttaattatgatctataaagatgctatttcccaacagagtctcattcacagcgaccggggttaggatgtggacatgtcttttctgggcgatacatttcaacctactacaggca

SEQ ID NO: 14581 - DNA, 122 bp, Homo sapiens
  misc_feature (61)..(62): /note="This region represents a CpG dinucleotide"
  misc_feature (61)..(61): /note="Nucleotide may be methylated to form 5-methylcytosine"
gaactgttatgaggattgaatgaatgcagactggccatcccctgaggtctgtgtctggcccgcagtaagtgctgttcaataacaaatgtggctatgtcccagagcaagggagaaacctgaga

SEQ ID NO: 14582 - DNA, 122 bp, Homo sapiens
  misc_feature (61)..(62): /note="This region represents a CpG dinucleotide"
  misc_feature (61)..(61): /note="Nucleotide may be methylated to form 5-methylcytosine"
atctttagatcaatttcatcttcatattattaacattgccactaacgtggtatatgtctccgtttatttagtacttgtttaaattctcaataaaattttagagttttccctatagaggtact

SEQ ID NO: 14583 - DNA, 122 bp, Homo sapiens
  misc_feature (61)..(62): /note="This region represents a CpG dinucleotide"
  misc_feature (61)..(61): /note="Nucleotide may be methylated to form 5-methylcytosine"
actgacattgccaaagaagaatcctggacagagttcctttcaggtgaaagagcacagacacgggagtaggcaacagttagagtaaggtcaacattcctcagtgaactaagacacattcattc

SEQ ID NO: 14584 - DNA, 122 bp, Homo sapiens
  misc_feature (61)..(62): /note="This region represents a CpG dinucleotide"
  misc_feature (61)..(61): /note="Nucleotide may be methylated to form 5-methylcytosine"
agcatcctctgtgtctcagaccttgtgttaagtaactcaggcatgctgacatacatcaggcgtgggtttggcctctttataatatacagtcatatgtcacttaacaatgaagatgggttctg

SEQ ID NO: 14585 - DNA, 122 bp, Homo sapiens
  misc_feature (61)..(62): /note="This region represents a CpG dinucleotide"
  misc_feature (61)..(61): /note="Nucleotide may be methylated to form 5-methylcytosine"
tacactttagaatattctgcctttctcctgacagaactggagtgaccagttcaacagcaccgataatgcaaccccggttcactggtgattgtctccacctggaggcccaattgccaacatac

SEQ ID NO: 14586 - DNA, 122 bp, Homo sapiens
  misc_feature (61)..(62): /note="This region represents a CpG dinucleotide"
  misc_feature (61)..(61): /note="Nucleotide may be methylated to form 5-methylcytosine"
tttcattatctgctaaatccttccatcctcacctcagagtcccaggtgataccaccagaccggtccacagaaatgtgtgaggctaatctttttaaaagcatacttttaagaaacagagataa

SEQ ID NO: 14587 - DNA, 122 bp, Homo sapiens
  misc_feature (61)..(62): /note="This region represents a CpG dinucleotide"
  misc_feature (61)..(61): /note="Nucleotide may be methylated to form 5-methylcytosine"
cagccctggagagccagagacagagtctgttgcatccacagcactcagcactgcttgccacgtggtagccattcaataaatagtaaatgctcaaacagtatttgtagatagatggacagatg

SEQ ID NO: 14588 - DNA, 122 bp, Homo sapiens
  misc_feature (61)..(62): /note="This region represents a CpG dinucleotide"
  misc_feature (61)..(61): /note="Nucleotide may be methylated to form 5-methylcytosine"
acttcattttggttgtgtcattaaaactctgggaacccaaggcacagtctcccagggaaccgtgggtccgggggctcctagctcttcctcccatctctctggcgcccctgcgtgcctgtgta

SEQ ID NO: 14589 - DNA, 122 bp, Homo sapiens
  misc_feature (61)..(62): /note="This region represents a CpG dinucleotide"
  misc_feature (61)..(61): /note="Nucleotide may be methylated to form 5-methylcytosine"
tttgtgtcagcagactcaagtgggatgttccttctgcagctcttaccgagcaagaggaagcgggctttgaaacacaatgttcattgaaattggctttcatctgaggaatcccagggtggctc

SEQ ID NO: 14590 - DNA, 122 bp, Homo sapiens
  misc_feature (61)..(62): /note="This region represents a CpG dinucleotide"
  misc_feature (61)..(61): /note="Nucleotide may be methylated to form 5-methylcytosine"
tgattcaatactagtatacaaattccatctttaaattttgtcagttattccagtaataaccgttatatgtttcattttatttcctaatgcaggatcatctaaattcaactattaccatataa

SEQ ID NO: 14591 - DNA, 122 bp, Homo sapiens
  misc_feature (61)..(62): /note="This region represents a CpG dinucleotide"
  misc_feature (61)..(61): /note="Nucleotide may be methylated to form 5-methylcytosine"
cctgtttggctgacagctcccaggcagcctcagtaaactgagagagagagcagagtgattcgtcaagactaccttgtgacaggggcacaccaccacaacccagctaattttttgtattttta

SEQ ID NO: 14592 - DNA, 122 bp, Homo sapiens
  misc_feature (61)..(62): /note="This region represents a CpG dinucleotide"
  misc_feature (61)..(61): /note="Nucleotide may be methylated to form 5-methylcytosine"
ttttatcacaataaatatttatagggtcagcatttggcctgggtattccacagccactcgcgcccctcttgcttcaggcactcccaactcagcccccaggtgccaaaccccccccccgccat

SEQ ID NO: 14593 - DNA, 122 bp, Homo sapiens
  misc_feature (61)..(62): /note="This region represents a CpG dinucleotide"
  misc_feature (61)..(61): /note="Nucleotide may be methylated to form 5-methylcytosine"
tggacataagttatctgtaacttttccctattataaaagatgcagtgagaatcatccttgcgcaatctagtccccgggcaagattcttagggattaaatgactggatcacatgataagaata

SEQ ID NO: 14594 - DNA, 122 bp, Homo sapiens
  misc_feature (61)..(62): /note="This region represents a CpG dinucleotide"
  misc_feature (61)..(61): /note="Nucleotide may be methylated to form 5-methylcytosine"
cgtgatccgccctcctcggcctcccgaagtgctgggattataggcgtgagccaccgcacccggcccgtcgtcttaattgacagctgttgcctaccacaaaccccactgacaacagggcctgg

SEQ ID NO: 14595 - DNA, 122 bp, Homo sapiens
  misc_feature (61)..(62): /note="This region represents a CpG dinucleotide"
  misc_feature (61)..(61): /note="Nucleotide may be methylated to form 5-methylcytosine"
gactgtgtgttttgtatcccaccaaaaatcacatgttgaaatcctaactcccaatgtgatcgttttaggagttgggtctttgggaggtgattaggccataagaatgcagccctcatgaatgg

SEQ ID NO: 14596 - DNA, 122 bp, Homo sapiens
  misc_feature (61)..(62): /note="This region represents a CpG dinucleotide"
  misc_feature (61)..(61): /note="Nucleotide may be methylated to form 5-methylcytosine"
agtcctcattaaaaccaatgtggagtgagcttcttccttcccatgatatatttttgtctacgtgtctgtctgtctgtctgccactctctctctctctctctctttctgtttctctttctctc

SEQ ID NO: 14597 - DNA, 122 bp, Homo sapiens
  misc_feature (61)..(62): /note="This region represents a CpG dinucleotide"
  misc_feature (61)..(61): /note="Nucleotide may be methylated to form 5-methylcytosine"
agggccaattctcaggacagtatagggaaggcatgggtaggagccctgagatgccaaggacgaggtgccgtcagctggagtcactcccacaagcttagccttcagaggtttcctctcagtgt

SEQ ID NO: 14598 - DNA, 122 bp, Homo sapiens
  misc_feature (61)..(62): /note="This region represents a CpG dinucleotide"
  misc_feature (61)..(61): /note="Nucleotide may be methylated to form 5-methylcytosine"
acggcgtgggtgagcttctctggcaacactttgtgtgcggtcacacatcattgctgagtgcgttaaatgctttccatatgactttactggcagaggacacctggaagctcacgcttggtctc

SEQ ID NO: 14599 - DNA, 122 bp, Homo sapiens
  misc_feature (61)..(62): /note="This region represents a CpG dinucleotide"
  misc_feature (61)..(61): /note="Nucleotide may be methylated to form 5-methylcytosine"
taaagctatctccatttagattgatacccattaaatagcatagtgctcccattaaactagcgacaaattcatttaattgtgagatatctagtacttatgctccatcctgtttatagggatta

SEQ ID NO: 14600 - DNA, 122 bp, Homo sapiens
  misc_feature (61)..(62): /note="This region represents a CpG dinucleotide"
  misc_feature (61)..(61): /note="Nucleotide may be methylated to form 5-methylcytosine"
ttggaatgctgagaattgtctagcaagccctgcggggtcatctggttctgcagagctgtgcgctgctggagcaggctggtcagccactctggacattatagaacacagagagtaacacgcat

SEQ ID NO: 14601 - DNA, 122 bp, Homo sapiens
  misc_feature (61)..(62): /note="This region represents a CpG dinucleotide"
  misc_feature (61)..(61): /note="Nucleotide may be methylated to form 5-methylcytosine"
cagctctgaccttgcagactccccaggataatgctcactctcattataggccattgggtacgagggattccagcaattcctgaaaatctatctcgaagtggataatgttcccagacacctaa

SEQ ID NO: 14602 - DNA, 122 bp, Homo sapiens
  misc_feature (61)..(62): /note="This region represents a CpG dinucleotide"
  misc_feature (61)..(61): /note="Nucleotide may be methylated to form 5-methylcytosine"
aagtatgcctctaaggcaagtattttgggtgttgctgctaatagaagtatcaagttactacgtctcaggatgggctgctgatgcaatttgacatcatttcctgatcaccaagaagacatgtg

SEQ ID NO: 14603 - DNA, 122 bp, Homo sapiens
  misc_feature (61)..(62): /note="This region represents a CpG dinucleotide"
  misc_feature (61)..(61): /note="Nucleotide may be methylated to form 5-methylcytosine"
tggctcctctgaaagcaccttatccccgtcaccggctcctctaaaagcagcgtgtccccccgctaccccgtcaccacctgtgtgggagacccagtaatcgtggccacagaggtttcccgtcg

SEQ ID NO: 14604 - DNA, 122 bp, Homo sapiens
  misc_feature (61)..(62): /note="This region represents a CpG dinucleotide"
  misc_feature (61)..(61): /note="Nucleotide may be methylated to form 5-methylcytosine"
ccggtggataagtaaccaaccaagatatcattattactagccttcttaaagtgcccattacgtacccagaacagatgaaaaaggtccttccttcagaaagttaatattggaaggaacaggca

SEQ ID NO: 14605 - DNA, 122 bp, Homo sapiens
  misc_feature (61)..(62): /note="This region represents a CpG dinucleotide"
  misc_feature (61)..(61): /note="Nucleotide may be methylated to form 5-methylcytosine"
tactcccgcaagagtggccttaatcaaaaaatcaaaaactcaaaaaataatagatgttggcgtggatttggtgaagagggaacacctctacactgctgatggatagtacaaccactgtggaa

SEQ ID NO: 14606 - DNA, 122 bp, Homo sapiens
  misc_feature (61)..(62): /note="This region represents a CpG dinucleotide"
  misc_feature (61)..(61): /note="Nucleotide may be methylated to form 5-methylcytosine"
gatgccaagaacctcgtggaagaaaatgtaaacatttctatactagaagtgaagcaagagcggcagctaggttcacttgaatatgtgtgtaatagttgtcatgagaggaggggttgaaactt

SEQ ID NO: 14607 - DNA, 122 bp, Homo sapiens
  misc_feature (61)..(62): /note="This region represents a CpG dinucleotide"
  misc_feature (61)..(61): /note="Nucleotide may be methylated to form 5-methylcytosine"
gggatgactccatttttctgggatgacaggtgggaagagccacccaggacttaacaatgacgcttctgtgtgacagactggacagaaatcaagcattctcctgaggccatgacttttatgtt

SEQ ID NO: 14608 - DNA, 122 bp, Homo sapiens
  misc_feature (61)..(62): /note="This region represents a CpG dinucleotide"
  misc_feature (61)..(61): /note="Nucleotide may be methylated to form 5-methylcytosine"
atttccagcagagggagcagcatgtacaaaccgccagttgttttggatgggtcaagaagccgtgtagctgagtatggagggaagctggggtaggtgagagtgagcacaggaaatcaggaaaa

SEQ ID NO: 14609 - DNA, 122 bp, Homo sapiens
  misc_feature (61)..(62): /note="This region represents a CpG dinucleotide"
  misc_feature (61)..(61): /note="Nucleotide may be methylated to form 5-methylcytosine"
tctccaacttaaactggccatgtgtcacttttgcaaatacaaactggttaggcagcagggcgttgcaaaaggaccaatgcttgtacttcccttgcaggtcagactggtttgtggtataatat

SEQ ID NO: 14610 - DNA, 122 bp, Homo sapiens
  misc_feature (61)..(62): /note="This region represents a CpG dinucleotide"
  misc_feature (61)..(61): /note="Nucleotide may be methylated to form 5-methylcytosine"
catcatctcactatgtaaaaaccaagaccgcaaaagacagaaaacccaagcaacaagggccgaatattctggctcacgtgatcaaaccacagatcatacaggaaatgctgcagcttcccctg

SEQ ID NO: 14611 - DNA, 122 bp, Homo sapiens
  misc_feature (61)..(62): /note="This region represents a CpG dinucleotide"
  misc_feature (61)..(61): /note="Nucleotide may be methylated to form 5-methylcytosine"
gcgtcagaagcaaaggactgtattactcataacagtagtcagagtatcagcattttcttgcgccagctgcttgagtcccaactgtcacagggcattgtgaagtcagatgacacctgaacagg

SEQ ID NO: 14612 - DNA, 122 bp, Homo sapiens
  misc_feature (61)..(62): /note="This region represents a CpG dinucleotide"
  misc_feature (61)..(61): /note="Nucleotide may be methylated to form 5-methylcytosine"
aaaatgtagccaagaataatgtgcaagtgtctagttaggccaatagatatccttaacatacgtgagctgggaacacaaatgagcatgaagggcaaggaagagcaccaccccctgcttctttt

SEQ ID NO: 14613 - DNA, 122 bp, Homo sapiens
  misc_feature (61)..(62): /note="This region represents a CpG dinucleotide"
  misc_feature (61)..(61): /note="Nucleotide may be methylated to form 5-methylcytosine"
tggttatattattattcatgaaccaatgaataataaatgaatgatataaaggaagaaaaacgtgcttggaccaatgatgagtaccatggggtatctgaaacaggatttttgattaaacccat

SEQ ID NO: 14614 - DNA, 122 bp, Homo sapiens
  misc_feature (61)..(62): /note="This region represents a CpG dinucleotide"
  misc_feature (61)..(61): /note="Nucleotide may be methylated to form 5-methylcytosine"
gcactttaccctgccttaccacatgacactctaaggtaggcatcattatgaatcctacaccgcgataaaaaagaggcttagagattttacgcaacttgtccacaggcataaagctaataaac

SEQ ID NO: 14615 - DNA, 122 bp, Homo sapiens
  misc_feature (61)..(62): /note="This region represents a CpG dinucleotide"
  misc_feature (61)..(61): /note="Nucleotide may be methylated to form 5-methylcytosine"
gaatttgtttccacatcattttggcaacccatgaggcagcttacaccaaatttttcttctcgcttacaggccaaagagttttattgtgcatggcctgtcaagcatagagttgcttacatggg

SEQ ID NO: 14616 - DNA, 122 bp, Homo sapiens
  misc_feature (61)..(62): /note="This region represents a CpG dinucleotide"
  misc_feature (61)..(61): /note="Nucleotide may be methylated to form 5-methylcytosine"
gtaggaatcaataaaaattgtattagatgttccccttatctttggggctcttgtcttactcgtacttcctttgtggtaactttaggattctcatgtttctcttccttgacgttgcaaaattt

SEQ ID NO: 14617 - DNA, 122 bp, Homo sapiens
  misc_feature (61)..(62): /note="This region represents a CpG dinucleotide"
  misc_feature (61)..(61): /note="Nucleotide may be methylated to form 5-methylcytosine"
ttcacagagccttctctacaagtggactgctacatcttcagagcgagtcatgtcttgggccgtatgttccattttaatgtctcagtcagaagggagtgagctgcaactccatccatccaggc

SEQ ID NO: 14618 - DNA, 122 bp, Homo sapiens
  misc_feature (61)..(62): /note="This region represents a CpG dinucleotide"
  misc_feature (61)..(61): /note="Nucleotide may be methylated to form 5-methylcytosine"
agagaggggtccaagctccaaagagaagcctccagcaccagcctggggatggagctgcagcgacgaggaccgggaagctggaactacctcaccccgagcccagctcagcccagcccagccca

SEQ ID NO: 14619 - DNA, 122 bp, Homo sapiens
  misc_feature (61)..(62): /note="This region represents a CpG dinucleotide"
  misc_feature (61)..(61): /note="Nucleotide may be methylated to form 5-methylcytosine"
aagttccagaaaccaatctcagtcctgaatttatggatctgtttcttgttaagaagcaggcgtaagagggggtgagaggatgagggagagacaggagtgaggtgagagagagagagaaagag

SEQ ID NO: 14620 - DNA, 122 bp, Homo sapiens
  misc_feature (61)..(62): /note="This region represents a CpG dinucleotide"
  misc_feature (61)..(61): /note="Nucleotide may be methylated to form 5-methylcytosine"
ggagtcgtgatggtagctgcaggcacaggcttttgtttattgtgccagatcctcagagggcgtcatcgggaacaccatgtccttcttgtcatgtatctcgatgatgacatcctgctttctgt

SEQ ID NO: 14621 - DNA, 122 bp, Homo sapiens
  misc_feature (61)..(62): /note="This region represents a CpG dinucleotide"
  misc_feature (61)..(61): /note="Nucleotide may be methylated to form 5-methylcytosine"
actgaagagcaggtgagcaaaatgctgctttctgccttggtggcaggcagagaactgtctcgtactagaattcaaggaggaaagaagaagaaataaaagaagctgctccatttttcatcatc

SEQ ID NO: 14622 - DNA, 122 bp, Homo sapiens
  misc_feature (61)..(62): /note="This region represents a CpG dinucleotide"
  misc_feature (61)..(61): /note="Nucleotide may be methylated to form 5-methylcytosine"
agcctcaaccaggtgctctgtgatgtccctgtcatagctaagaagccaacaccatttaagcgttgggacgaagtgactcatggagacactttgccttttgctgggaattacctgatgacgca

SEQ ID NO: 14623 - DNA, 122 bp, Homo sapiens
  misc_feature (61)..(62): /note="This region represents a CpG dinucleotide"
  misc_feature (61)..(61): /note="Nucleotide may be methylated to form 5-methylcytosine"
caaagccacggggaagcgtcaggattggcctgaaccatgaggagctcctggcgcttctgtcgctgcttcttttcaaacagccgccgctggggagatgggagaggtgggtgtccgggacagga

SEQ ID NO: 14624 - DNA, 122 bp, Homo sapiens
  misc_feature (61)..(62): /note="This region represents a CpG dinucleotide"
  misc_feature (61)..(61): /note="Nucleotide may be methylated to form 5-methylcytosine"
ggagtttgcaggattgggaggtgccctgcgtgagtcaatgagtgaatggttagtgaggaacggaatgtgttagtaatggaatgtgagccctaggacattcgtgtacacaactacaggcttta

SEQ ID NO: 14625 - DNA, 122 bp, Homo sapiens
  misc_feature (61)..(62): /note="This region represents a CpG dinucleotide"
  misc_feature (61)..(61): /note="Nucleotide may be methylated to form 5-methylcytosine"
gtttctacaatgggctcaggattatgcagacaaattacataagaacacctgcttgatatgcggacttacgcctctttccagtggctccagcctccagtggtgggtatcctccttccaaggtc

SEQ ID NO: 14626 - DNA, 122 bp, Homo sapiens
  misc_feature (61)..(62): /note="This region represents a CpG dinucleotide"
  misc_feature (61)..(61): /note="Nucleotide may be methylated to form 5-methylcytosine"
tgccactcatttttgcatttccagagcaaagcatagtatctggcactagctaatgtgtgtcgtagtatatgtgtgtcgagtgagctaaaggtgtacaatgaggacccaagtgagcagggcac

SEQ ID NO: 14627 - DNA, 122 bp, Homo sapiens
  misc_feature (61)..(62): /note="This region represents a CpG dinucleotide"
  misc_feature (61)..(61): /note="Nucleotide may be methylated to form 5-methylcytosine"
ttcttcatgctccaggacacacagccctccagacacacggcaaataacacattcttcctgcgccccagtctcaccagacgcctgaaggttattaacgcacactctccagcaaggctttgttt

SEQ ID NO: 14628 - DNA, 122 bp, Homo sapiens
  misc_feature (61)..(62): /note="This region represents a CpG dinucleotide"
  misc_feature (61)..(61): /note="Nucleotide may be methylated to form 5-methylcytosine"
ttgtattgttgaactgttagcttagacatctgttactgtacctacatggcactagcctcacgcctagacaccgatctgaaagaaatcccctaaatgcatagagaagacttctcagctgagct

SEQ ID NO: 14629 - DNA, 122 bp, Homo sapiens
  misc_feature (61)..(62): /note="This region represents a CpG dinucleotide"
  misc_feature (61)..(61): /note="Nucleotide may be methylated to form 5-methylcytosine"
gaatgtatagagaaggccaaagttactttgttccacactaggtttagtgcctcagatcggcgcaagggtaattggcaagtttggtgcttgccaggtggctgtgggttgctgctctgtattga

SEQ ID NO: 14630 - DNA, 122 bp, Homo sapiens
  misc_feature (61)..(62): /note="This region represents a CpG dinucleotide"
  misc_feature (61)..(61): /note="Nucleotide may be methylated to form 5-methylcytosine"
ccctgcgctcggcggcagaggcgcccggctggtgaccaggggaagcctcctgggctgacccgtgcacagccacagggaccagcccagacgttctctacagcgggggctgcaagagctagggc

SEQ ID NO: 14631 - DNA, 122 bp, Homo sapiens
  misc_feature (61)..(62): /note="This region represents a CpG dinucleotide"
  misc_feature (61)..(61): /note="Nucleotide may be methylated to form 5-methylcytosine"
gtaacagaaaacacagacacttcaaaacggcagttatcagttttcctaagtactagtctgcgagattttccaagtgcaaattgcccctggagcctctgcatgacagattcttatctgaagtg

SEQ ID NO: 14632 - DNA, 122 bp, Homo sapiens
  misc_feature (61)..(62): /note="This region represents a CpG dinucleotide"
  misc_feature (61)..(61): /note="Nucleotide may be methylated to form 5-methylcytosine"
caggcaaggccgtgacccaaatggaggcttttaaacccgagctcagaggtaagaagcccacggccagcacctcccggccctctgcgccctggccgcctcctccgcaccaccctcccggccgg

SEQ ID NO: 14633 - DNA, 122 bp, Homo sapiens
  misc_feature (61)..(62): /note="This region represents a CpG dinucleotide"
  misc_feature (61)..(61): /note="Nucleotide may be methylated to form 5-methylcytosine"
cacatagcacatactattcttcctggtctcttcagttaaatcttgggtttcgttttgtttcgttttttcatgaacaatatacctcagaggctatttcacctcagtgagcaaagaactgcctc

SEQ ID NO: 14634 - DNA, 122 bp, Homo sapiens
  misc_feature (61)..(62): /note="This region represents a CpG dinucleotide"
  misc_feature (61)..(61): /note="Nucleotide may be methylated to form 5-methylcytosine"
caatggtcaatcttggtcctctcatccctcctgcttttgacaagatttgatgtagtgtatcgtttttttcttctttaaacattttttcttggcttggcctctgtgacaccagattccttgtt

SEQ ID NO: 14635 - DNA, 122 bp, Homo sapiens
  misc_feature (61)..(62): /note="This region represents a CpG dinucleotide"
  misc_feature (61)..(61): /note="Nucleotide may be methylated to form 5-methylcytosine"
tttagttcagtttgtgtgttgtgcagccataccattaactgagcaggttcttttcctcaccgtctggtctgaatttccttgtcctgcggaaaggcattgcctgccacgccttgttgagttct

SEQ ID NO: 14636 - DNA, 122 bp, Homo sapiens
  misc_feature (61)..(62): /note="This region represents a CpG dinucleotide"
  misc_feature (61)..(61): /note="Nucleotide may be methylated to form 5-methylcytosine"
caagtgcacggggcacagcggagtctgtcctgtgacgcgcaagtctgagggtctgggcggcgggcggctgggtctgtgcatttctggttgcaccgcggcgcttcccagcaccaacatgtaac

SEQ ID NO: 14637 - DNA, 122 bp, Homo sapiens
  misc_feature (61)..(62): /note="This region represents a CpG dinucleotide"
  misc_feature (61)..(61): /note="Nucleotide may be methylated to form 5-methylcytosine"
gagtagtggagcaaccaatcagttttggtgaaacaaccttggacaagacgaaagagcacacggcctggatggaggagcccaccatggcagcagagcctaaccacctcattgtgcaggaaaag

SEQ ID NO: 14638 - DNA, 122 bp, Homo sapiens
  misc_feature (61)..(62): /note="This region represents a CpG dinucleotide"
  misc_feature (61)..(61): /note="Nucleotide may be methylated to form 5-methylcytosine"
taaaggaggatccacagaacattcatgtaattactacaattaacaaggagatgcaagtcacggccagggactagtaagttctgctataaacacacaatcacagagcaataaaggattttggc

SEQ ID NO: 14639 - DNA, 122 bp, Homo sapiens
  misc_feature (61)..(62): /note="This region represents a CpG dinucleotide"
  misc_feature (61)..(61): /note="Nucleotide may be methylated to form 5-methylcytosine"
tgggaaggggacatgaatccagggggaaatgaactatcttgcatgcatgagaatgaaagacgctcactaacacaggtggagtagaaagcaggcagaaacttggttctggtggcagccctgaa

SEQ ID NO: 14640 - DNA, 122 bp, Homo sapiens
  misc_feature (61)..(62): /note="This region represents a CpG dinucleotide"
  misc_feature (61)..(61): /note="Nucleotide may be methylated to form 5-methylcytosine"
aatgttctcttttagtttcctgcaattaaatgatgttagaaatagtcatcttcacattggcgtacttcctctttcttctgtaggtcttttagaattttgagtccattctcatattttcttgt

SEQ ID NO: 14641 - DNA, 122 bp, Homo sapiens
  misc_feature (61)..(62): /note="This region represents a CpG dinucleotide"
  misc_feature (61)..(61): /note="Nucleotide may be methylated to form 5-methylcytosine"
tgttgaaaagctgctgtgagtggagacatccttcccttgttcctgatcttagcaggaaagcgttgagctgtaggtttctcatagatcttctttatcacgttgaaaaaatttctttctattcc

SEQ ID NO: 14642 - DNA, 122 bp, Homo sapiens
  misc_feature (61)..(62): /note="This region represents a CpG dinucleotide"
  misc_feature (61)..(61): /note="Nucleotide may be methylated to form 5-methylcytosine"
cgtaagcgaacataggcaggaaggacttgagaaaggaactggcttatgattataagaccacgcccgtctattgtgtttctgtccggagctgtggagttagcgtcagaataattcgtagacgg

SEQ ID NO: 14643 - DNA, 122 bp, Homo sapiens
  misc_feature (61)..(62): /note="This region represents a CpG dinucleotide"
  misc_feature (61)..(61): /note="Nucleotide may be methylated to form 5-methylcytosine"
acataaggaaaagtcctaaaactatgggattgttagaatcacaaggcccttttgttctggcgatgtttgaattagcttcttcaggggccattgaactagtcggtaattgtgaaagccacttt

SEQ ID NO: 14644 - DNA, 122 bp, Homo sapiens
  misc_feature (61)..(62): /note="This region represents a CpG dinucleotide"
  misc_feature (61)..(61): /note="Nucleotide may be methylated to form 5-methylcytosine"
gcccaggcggtgcgactcagggatggtgtaggagacacgcccactgttgttggtcaccagcgtatccaggtagagccactcgcctgagggcggctgggtcatgatgtgcacatccacctggg

SEQ ID NO: 14645 - DNA, 122 bp, Homo sapiens
  misc_feature (61)..(62): /note="This region represents a CpG dinucleotide"
  misc_feature (61)..(61): /note="Nucleotide may be methylated to form 5-methylcytosine"
caggctgaaggcaggctctagtacccaagttctgcctgttcagcctgcaatgactttcctcgcagtgtgggtggtacccttggatgaaggtaagggctggggcagaagcaggtctcttgggt

SEQ ID NO: 14646 - DNA, 122 bp, Homo sapiens
  misc_feature (61)..(62): /note="This region represents a CpG dinucleotide"
  misc_feature (61)..(61): /note="Nucleotide may be methylated to form 5-methylcytosine"
gcatcagtttaaacaaacatagacacacacatataacatctcaagatcgcataatacagccgccaagatggggtcacagatgagttcagtaaataaagaatgtcatggactagtatggtcag

SEQ ID NO: 14647 - DNA, 122 bp, Homo sapiens
  misc_feature (61)..(62): /note="This region represents a CpG dinucleotide"
  misc_feature (61)..(61): /note="Nucleotide may be methylated to form 5-methylcytosine"
cattcatttcaaagttctgcaccacatggtgcttccagtcacactaaatagtaaaataatcgtggcttatgagtcttttcagagtcagtgagaaaatggaaggagggaattacacaatactc

SEQ ID NO: 14648 - DNA, 122 bp, Homo sapiens
  misc_feature (61)..(62): /note="This region represents a CpG dinucleotide"
  misc_feature (61)..(61): /note="Nucleotide may be methylated to form 5-methylcytosine"
agagcgagctggcctgctttctcccagtaaccctgaccagcagacagcaagcccgctacacggggagagaaatgatctcattcctcagccgggcacgtgagccgccttctttctctcacaca

SEQ ID NO: 14649 - DNA, 122 bp, Homo sapiens
  misc_feature (61)..(62): /note="This region represents a CpG dinucleotide"
  misc_feature (61)..(61): /note="Nucleotide may be methylated to form 5-methylcytosine"
cttttgaaattgctgaaatcattctcctactgtgttttttatttctggactcttcatatccgagggccaggatgcagctctacaaacggcaatggagctgaggtgaattcatttgctgaaag

SEQ ID NO: 14650 - DNA, 122 bp, Homo sapiens
  misc_feature (61)..(62): /note="This region represents a CpG dinucleotide"
  misc_feature (61)..(61): /note="Nucleotide may be methylated to form 5-methylcytosine"
cattagccactgcaccctgtgaacatcacatttctgattcagttttttttctttctgggacgcttagtgtattgcctagtacccaattgaaaaccaaacatttgtggaatgaataaataatt

SEQ ID NO: 14651 - DNA, 122 bp, Homo sapiens
  misc_feature (61)..(62): /note="This region represents a CpG dinucleotide"
  misc_feature (61)..(61): /note="Nucleotide may be methylated to form 5-methylcytosine"
cgtgccaccatgcgtgtcagtgtgccggatgtagtctctgtgtcacggtggcgctgcgcacgtcaacgggtattggtgtaccggtcaccatctttgtatctgcgctttgtatctggggtgac

SEQ ID NO: 14652 - DNA, 122 bp, Homo sapiens
  misc_feature (61)..(62): /note="This region represents a CpG dinucleotide"
  misc_feature (61)..(61): /note="Nucleotide may be methylated to form 5-methylcytosine"
aaacatactaaaaacaataccagttacgttgcaggagtaaaattagaaatcaatatacttcgtatacaaacaataacctggtagaacatgtcacaatagatctcattacaatagaaaataaa

SEQ ID NO: 14653 - DNA, 122 bp, Homo sapiens
  misc_feature (61)..(62): /note="This region represents a CpG dinucleotide"
  misc_feature (61)..(61): /note="Nucleotide may be methylated to form 5-methylcytosine"
tattattattagctatatgaccttgagcaagtctcttgaactgtctgaacctgttttcctcgtctgtaaaatggggaataccaaggttgctgtgagaattaagtgaacttgtgcatgtaaag

SEQ ID NO: 14654 - DNA, 122 bp, Homo sapiens
  misc_feature (61)..(62): /note="This region represents a CpG dinucleotide"
  misc_feature (61)..(61): /note="Nucleotide may be methylated to form 5-methylcytosine"
gatttcactcatatatttgggtttcatcactcagattcttttccctcagggccagagagtcgtatttgtgtgttctgtgcttgatggctttttcttattctccactcagaaccacctggagg

SEQ ID NO: 14655 - DNA, 122 bp, Homo sapiens
  misc_feature (61)..(62): /note="This region represents a CpG dinucleotide"
  misc_feature (61)..(61): /note="Nucleotide may be methylated to form 5-methylcytosine"
aactacaaagtttagcttgccttcacggtactagtttcctatcatgttactatttaattacgtgattatacttgaaaatttttcttctgaaggttattattagtgcatggacataaacctct

SEQ ID NO: 14656 - DNA, 122 bp, Homo sapiens
  misc_feature (61)..(62): /note="This region represents a CpG dinucleotide"
  misc_feature (61)..(61): /note="Nucleotide may be methylated to form 5-methylcytosine"
cagaaatcaagatacaggacattccaaatccccagaggtttcattgtgtcgcctgtcattcgtatcccttgtccccagtgttaactttcattttggctcttataataattgattaggtttta

SEQ ID NO: 14657 - DNA, 122 bp, Homo sapiens
  misc_feature (61)..(62): /note="This region represents a CpG dinucleotide"
  misc_feature (61)..(61): /note="Nucleotide may be methylated to form 5-methylcytosine"
cccaaaaatgtcaaaaggcaaaatgctgaagatgtcatgttagtgaaagaaacatttgtccgtgtgagccctgtgttctctggcacacatgcacccccatacccagaaaagaggagagaaag

SEQ ID NO: 14658 - DNA, 122 bp, Homo sapiens
  misc_feature (61)..(62): /note="This region represents a CpG dinucleotide"
  misc_feature (61)..(61): /note="Nucleotide may be methylated to form 5-methylcytosine"
ggcggatggatcacttgaggtcaggagttccagacctgcctgaccaacatagtgaaaccccgtctcttctgaaactatgaaaattagcagggcatggtggggcacacctgtaatcccagcta

SEQ ID NO: 14659 - DNA, 122 bp, Homo sapiens
  misc_feature (61)..(62): /note="This region represents a CpG dinucleotide"
  misc_feature (61)..(61): /note="Nucleotide may be methylated to form 5-methylcytosine"
aactaacttttgtgtgtctttgatgatgaaggtgtgaactgtgactaggcaaaccagtgacgaaggcttagggaacagaaaccacatcatacctcattaagtcattgttgtcatagagacaa

SEQ ID NO: 14660 - DNA, 122 bp, Homo sapiens
  misc_feature (61)..(62): /note="This region represents a CpG dinucleotide"
  misc_feature (61)..(61): /note="Nucleotide may be methylated to form 5-methylcytosine"
agggactacctttctgcgtattcctttctgttctttaaaaatgttaaaccatggggtgctcgcttcggcagcacatatactaaaattggaacgatacagagaagattagcatggcccctgcg

SEQ ID NO: 14661 - DNA, 122 bp, Homo sapiens
  misc_feature (61)..(62): /note="This region represents a CpG dinucleotide"
  misc_feature (61)..(61): /note="Nucleotide may be methylated to form 5-methylcytosine"
actacactacaacctgtgacatcagggcatcagcatttgtgactaagtttaccaccttctcgcagacagtttgaactttttccaactgtcctgataacgtgctttacagcaaaagggcccag

SEQ ID NO: 14662 - DNA, 122 bp, Homo sapiens
  misc_feature (61)..(62): /note="This region represents a CpG dinucleotide"
  misc_feature (61)..(61): /note="Nucleotide may be methylated to form 5-methylcytosine"
aggtaaacagggcaggcaaagggagcagttcacagaatgaggcacaaagacaacatgagacggttgctcttgagctccagcagtaagggctgtttctgattaggtgcatacaattgcagagc

SEQ ID NO: 14663 - DNA, 122 bp, Homo sapiens
  misc_feature (61)..(62): /note="This region represents a CpG dinucleotide"
  misc_feature (61)..(61): /note="Nucleotide may be methylated to form 5-methylcytosine"
aaacaaatagccatagtgactcatcccacattaaattcatgatcactgacctgaagtacacgcctaaagcaacctgcaattattctttcttcccccagtctattctctccatttcttttaaa

SEQ ID NO: 14664 - DNA, 122 bp, Homo sapiens
  misc_feature (61)..(62): /note="This region represents a CpG dinucleotide"
  misc_feature (61)..(61): /note="Nucleotide may be methylated to form 5-methylcytosine"
gtgtcttgcccatcatcttatgtatccccaccctgtgggagtctggggttcctggtggtgcgtctctggtcttcactcctgcagctgttttgcttggggtagaagtttcatgtttgcctgaa

SEQ ID NO: 14665 - DNA, 122 bp, Homo sapiens
  misc_feature (61)..(62): /note="This region represents a CpG dinucleotide"
  misc_feature (61)..(61): /note="Nucleotide may be methylated to form 5-methylcytosine"
tttaccatgttgcaactgctgcgactatggctcctgtggcaaaggtcaaactctttgtctcgcctgaccagcacttcagctcctaggatttcttcctgttttactttgggactcactgttcc

SEQ ID NO: 14666 - DNA, 122 bp, Homo sapiens
  misc_feature (61)..(62): /note="This region represents a CpG dinucleotide"
  misc_feature (61)..(61): /note="Nucleotide may be methylated to form 5-methylcytosine"
cttagattaggataattagagggaagtttatacacaaaggatgattcacagagatgtgggcgcaggggaaccactagggatggtgtactaaccttggactactattgatgggcaagatgaag

SEQ ID NO: 14667 - DNA, 122 bp, Homo sapiens
  misc_feature (61)..(62): /note="This region represents a CpG dinucleotide"
  misc_feature (61)..(61): /note="Nucleotide may be methylated to form 5-methylcytosine"
ttctagctctgtgaccctgggcacgtggcttaacccttccgagcctgcctgtttcctcgccgtaaaatagaaactcagctcacagggctgactcagaggctcagtgagcgaatgcctgccta

SEQ ID NO: 14668 - DNA, 122 bp, Homo sapiens
  misc_feature (61)..(62): /note="This region represents a CpG dinucleotide"
  misc_feature (61)..(61): /note="Nucleotide may be methylated to form 5-methylcytosine"
tggaggagctgtcagccctggtgagacacctgcccccagcacatgtctccatggatgatacgggccaacagttgataccaaggccgatgtgctcatcctgtggatcagctgccggggaagga

SEQ ID NO: 14669 - DNA, 122 bp, Homo sapiens
  misc_feature (61)..(62): /note="This region represents a CpG dinucleotide"
  misc_feature (61)..(61): /note="Nucleotide may be methylated to form 5-methylcytosine"
acagtttccactcaaggactaggaactgaatctctgcacccttaaaaccactctcttagccgggcgcggtggctcatacctgtaatcccagcactttgggaggccaaggcaggtggatcacg

SEQ ID NO: 14670 - DNA, 122 bp, Homo sapiens
  misc_feature (61)..(62): /note="This region represents a CpG dinucleotide"
  misc_feature (61)..(61): /note="Nucleotide may be methylated to form 5-methylcytosine"
gtttatcactgtttgttagtaggagctgtcttcagcaactaaggtagcatttcaataaaccgggaagcagtatcaccaacttatttaaagagaatacaacctcaaacttattttgagatgga

SEQ ID NO: 14671 - DNA, 122 bp, Homo sapiens
  misc_feature (61)..(62): /note="This region represents a CpG dinucleotide"
  misc_feature (61)..(61): /note="Nucleotide may be methylated to form 5-methylcytosine"
ctgtctccaagaccagggcagatcaaccaccaagggaaagggagggagaagcagcctcagcggtcagaggggaggggcagggctcaaccactgaggaacattcactgttgcctgccgagtgc

SEQ ID NO: 14672 - DNA, 122 bp, Homo sapiens
  misc_feature (61)..(62): /note="This region represents a CpG dinucleotide"
  misc_feature (61)..(61): /note="Nucleotide may be methylated to form 5-methylcytosine"
attagcaggagaggcacgactcatacccagagagtcaggctctagagccctcatccaagccgctttgtggcactgcctcccagccggggcaggctggccttgcccggcagcctggggcctag

SEQ ID NO: 14673 - DNA, 122 bp, Homo sapiens
  misc_feature (61)..(62): /note="This region represents a CpG dinucleotide"
  misc_feature (61)..(61): /note="Nucleotide may be methylated to form 5-methylcytosine"
aggatttagaggcggcagggctggctggggtttctttcaagcgcttgccagctatggagccgtgggcaagccctgtcattcctgagactgacgctgggctggagttctgactggcaccccca

SEQ ID NO: 14674 - DNA, 122 bp, Homo sapiens
  misc_feature (61)..(62): /note="This region represents a CpG dinucleotide"
  misc_feature (61)..(61): /note="Nucleotide may be methylated to form 5-methylcytosine"
tttgcagtggttatggtgaggcagttctcttttatgttcaataattctcttcagattttacgtatatcttggttaaatttaatgggattcttgagtataactgtaatttgaattcggtatta

SEQ ID NO: 14675 - DNA, 122 bp, Homo sapiens
  misc_feature (61)..(62): /note="This region represents a CpG dinucleotide"
  misc_feature (61)..(61): /note="Nucleotide may be methylated to form 5-methylcytosine"
tgtaggcagcagacggtggacgctgagggtcggggcctgcgccctgtggggcagcctcagcgcagcttctcgggtggggcggggcgctcggggcctaaggcgcagtcgcaggctggggaggg

SEQ ID NO: 14676 - DNA, 122 bp, Homo sapiens
  misc_feature (61)..(62): /note="This region represents a CpG dinucleotide"
  misc_feature (61)..(61): /note="Nucleotide may be methylated to form 5-methylcytosine"
ggggcgaggttctcccaaccaaaggccggcgggcttatgtccggtcggaggtacagtgggcgagcgccccttatcatagagcccaaatgcccatgcgtggcccacttcttccgccggggcca

SEQ ID NO: 14677 - DNA, 122 bp, Homo sapiens
  misc_feature (61)..(62): /note="This region represents a CpG dinucleotide"
  misc_feature (61)..(61): /note="Nucleotide may be methylated to form 5-methylcytosine"
tttgtgaagttactgtgtgaactctgaaattcagtggctgtcaaaagaggtgaatgcttgcgagcaccttgcagacctgcccccgccaccaagctctgtgagtggaagactcaatcagagaa

SEQ ID NO: 14678 - DNA, 122 bp, Homo sapiens
  misc_feature (61)..(62): /note="This region represents a CpG dinucleotide"
  misc_feature (61)..(61): /note="Nucleotide may be methylated to form 5-methylcytosine"
aaatgtggcctttagaaaaggcaaaaaggccacatccagcaccgtcacctgccaggccagcgggacaggtgggcagagccagctccttggcccattctgcgtcatgacataccaggggcagg

SEQ ID NO: 14679 - DNA, 122 bp, Homo sapiens
  misc_feature (61)..(62): /note="This region represents a CpG dinucleotide"
  misc_feature (61)..(61): /note="Nucleotide may be methylated to form 5-methylcytosine"
atgatgtattctagctcctgtattgctaggattgactaaaagggaatgttaagtatttaacgtaggaatttagaagaggaataagtgagtaactttgttgcattacaaataatcaacaatgc

SEQ ID NO: 14680 - DNA, 122 bp, Homo sapiens
  misc_feature (61)..(62): /note="This region represents a CpG dinucleotide"
  misc_feature (61)..(61): /note="Nucleotide may be methylated to form 5-methylcytosine"
aaggtgagagccgccttcaagcacaaaaccaaggtctggtcgctcacgagcagctctgcccgcacctccaacgcgaagcccttccactcggacctcgtgagtgcagcctccataaaccgagg

SEQ ID NO: 14681 - DNA, 122 bp, Homo sapiens
  misc_feature (61)..(62): /note="This region represents a CpG dinucleotide"
  misc_feature (61)..(61): /note="Nucleotide may be methylated to form 5-methylcytosine"
tccaaatgcaggtctctgggttggaagctgtaactatttctgggcttattctctcagaggcgtgccccaaccctagcagcagaaaacactgacagtggaaatataggacatgtctcttctaa

SEQ ID NO: 14682 - DNA, 122 bp, Homo sapiens
  misc_feature (61)..(62): /note="This region represents a CpG dinucleotide"
  misc_feature (61)..(61): /note="Nucleotide may be methylated to form 5-methylcytosine"
cagatgagtaaagctggctgactaaagcacaataggcaatggcaggtattgcagcaaattcgggaacacaaactactaagagtggggtggggatgaggaggcaataaactccttagctacca

SEQ ID NO: 14683 - DNA, 122 bp, Homo sapiens
  misc_feature (61)..(62): /note="This region represents a CpG dinucleotide"
  misc_feature (61)..(61): /note="Nucleotide may be methylated to form 5-methylcytosine"
gcaacatggttgagacgcttctctcctgccgggactggaaaggtgggccctgtggtcagccggtgccgcagccaaccctgcagtccagaaagcagacgctttgctgatgaacagtgagcaga

SEQ ID NO: 14684 - DNA, 122 bp, Homo sapiens
  misc_feature (61)..(62): /note="This region represents a CpG dinucleotide"
  misc_feature (61)..(61): /note="Nucleotide may be methylated to form 5-methylcytosine"
gaaagtgtaaaaatggccttgctgaggaaattaaatttatgttcaagtactatttctttacggcaccggggaacaagcatttcaaacacgtacttgctgcagactctgccctctggaatggc

SEQ ID NO: 14685 - DNA, 122 bp, Homo sapiens
  misc_feature (61)..(62): /note="This region represents a CpG dinucleotide"
  misc_feature (61)..(61): /note="Nucleotide may be methylated to form 5-methylcytosine"
gtcactggggtgttgctttatgatggtgacagaccctctgttggggcctctcacctgggtcgcctgtgtgccggctggtgccgcacgaaggccagcctttccttacagatgctgccttggct

SEQ ID NO: 14686 - DNA, 122 bp, Homo sapiens
  misc_feature (61)..(62): /note="This region represents a CpG dinucleotide"
  misc_feature (61)..(61): /note="Nucleotide may be methylated to form 5-methylcytosine"
ttgtaaagatggaggaaacctctaacactgaccctgtatgggagatgactcaattatccacgccttggtacagttgcaaattatttccctttgtctgaagtgggtggatgccagcgccttca

SEQ ID NO: 14687 - DNA, 122 bp, Homo sapiens
  misc_feature (61)..(62): /note="This region represents a CpG dinucleotide"
  misc_feature (61)..(61): /note="Nucleotide may be methylated to form 5-methylcytosine"
aactgaatagttaaatgtgactaaagagagaacaggagctggtttgtggtataagaagggcggaactagtacaggcaaggcaagaacaaaaaaagacttgaagtgggcaaggtggaggtcag

SEQ ID NO: 14688 - DNA, 122 bp, Homo sapiens
  misc_feature (61)..(62): /note="This region represents a CpG dinucleotide"
  misc_feature (61)..(61): /note="Nucleotide may be methylated to form 5-methylcytosine"
atcccggctctagttagcagctgtgtggctttgggcaagttgcataaccactttgggcctcgtatgtaaagcgaagatgataatagcatctgtcctttcacaaggatgtctattgtgcagta

SEQ ID NO: 14689 - DNA, 122 bp, Homo sapiens
  misc_feature (61)..(62): /note="This region represents a CpG dinucleotide"
  misc_feature (61)..(61): /note="Nucleotide may be methylated to form 5-methylcytosine"
ttgaaacctaatgtctagctgagcatggtgacatacagctgtaatccttgctacttgggacgctgtggcaggagaattgcttgagcctcggagctatagtgattcatgatcatgccactgca

SEQ ID NO: 14690 - DNA, 122 bp, Homo sapiens
  misc_feature (61)..(62): /note="This region represents a CpG dinucleotide"
  misc_feature (61)..(61): /note="Nucleotide may be methylated to form 5-methylcytosine"
aaagaaggtgttgacttgtgaaagaaccagttcctcatctcttatagtgtttaaaaagaacgccataatagaactccataatcctagagactcctttaactggtcacaccagctaacctcca

SEQ ID NO: 14691 - DNA, 122 bp, Homo sapiens
  misc_feature (61)..(62): /note="This region represents a CpG dinucleotide"
  misc_feature (61)..(61): /note="Nucleotide may be methylated to form 5-methylcytosine"
ctctgttagctgacccaataccttaaaaaaacctagttttgaaaaacagatttcaaattacgagaatagcaaaaggaagacagtatgaaaataagcaatatattaagcaggtgggcttacag

SEQ ID NO: 14692 - DNA, 122 bp, Homo sapiens
  misc_feature (61)..(62): /note="This region represents a CpG dinucleotide"
  misc_feature (61)..(61): /note="Nucleotide may be methylated to form 5-methylcytosine"
tggatatttggcaatggtcccataagattataacagaactgaaaaattcctatcacctagcgacattgtagtaaacgtaaagttgtagagcaacaccactcgtgtttgtggctacataggtg

SEQ ID NO: 14693 - DNA, 122 bp, Homo sapiens
  misc_feature (61)..(62): /note="This region represents a CpG dinucleotide"
  misc_feature (61)..(61): /note="Nucleotide may be methylated to form 5-methylcytosine"
cggccacaggcctcagaagcagcaggagtgagctgtgggcacagctgtggggcagccaggcgcgtcaggcctcacatgtctgggagatgtaggctgcctgggctggtggcccctgagccgca

SEQ ID NO: 14694 - DNA, 122 bp, Homo sapiens
  misc_feature (61)..(62): /note="This region represents a CpG dinucleotide"
  misc_feature (61)..(61): /note="Nucleotide may be methylated to form 5-methylcytosine"
caagagaaagaaaaagatttatgaaaaatgaaagctaaattgtcattagcaaatgaaatacgtgtatacatggaaaatcaaagttaatcaactataaagctcttgtttagcaaaccaatagt

SEQ ID NO: 14695 - DNA, 122 bp, Homo sapiens
  misc_feature (61)..(62): /note="This region represents a CpG dinucleotide"
  misc_feature (61)..(61): /note="Nucleotide may be methylated to form 5-methylcytosine"
tctgccctgactggctgtgtgatcttggaaagtaactaaacctctctgagccctacctctcgtctctgaaaaacggggtaatagagcctcccttacaggaaagttgaggggtcctgtggatc

SEQ ID NO: 14696 - DNA, 122 bp, Homo sapiens
  misc_feature (61)..(62): /note="This region represents a CpG dinucleotide"
  misc_feature (61)..(61): /note="Nucleotide may be methylated to form 5-methylcytosine"
tttcagacacagatagttcccttttggtgaaacttgttgcaatgttccacaaagtgttaccgcatctggaaagtccataataattttgatttatctgcactgacagtcagcagtatgttata

SEQ ID NO: 14697 - DNA, 122 bp, Homo sapiens
  misc_feature (61)..(62): /note="This region represents a CpG dinucleotide"
  misc_feature (61)..(61): /note="Nucleotide may be methylated to form 5-methylcytosine"
agagatgagaggcctaattctaatttgagatcagagcctgacagctgggcaggtggcaggcggccgcttcctcccctccgtggagcctgccaggagaggggctgtggtcgtattaagggtgt

SEQ ID NO: 14698 - DNA, 122 bp, Homo sapiens
  misc_feature (61)..(62): /note="This region represents a CpG dinucleotide"
  misc_feature (61)..(61): /note="Nucleotide may be methylated to form 5-methylcytosine"
ttcccaaaggcaagaggaaggacatggttaaaagcaacaggcagttaaaacccagaaaggcgcagatctccaagtggaaggcaaggagataaatagaggtcaagcaagaggaactcctctaa

SEQ ID NO: 14699 - DNA, 122 bp, Homo sapiens
  misc_feature (61)..(62): /note="This region represents a CpG dinucleotide"
  misc_feature (61)..(61): /note="Nucleotide may be methylated to form 5-methylcytosine"
tgtgcctcaggcagggcctgctcaccggtgtgaatagtagaacaagacttcctcgatcagcgtgaagatggccagctccaggaggaaccagtggaaggtgggtagctcacggcggcaggggt

SEQ ID NO: 14700 - DNA, 122 bp, Homo sapiens
  misc_feature (61)..(62): /note="This region represents a CpG dinucleotide"
  misc_feature (61)..(61): /note="Nucleotide may be methylated to form 5-methylcytosine"
caccttgtacaataccacagagaaatgcaaaataaataatttttaatagggcaaagggctcggtactctcaaaagcagaaatagcccagagggagggcttgagcccgtaattctagcacttt

SEQ ID NO: 14701 - DNA, 122 bp, Homo sapiens
  misc_feature (61)..(62): /note="This region represents a CpG dinucleotide"
  misc_feature (61)..(61): /note="Nucleotide may be methylated to form 5-methylcytosine"
aagaaaatagaagaacaggaagaaaagttgccaggttcagacatcccagggaaaaagaagcgtaaacagcattagcaatcagtgactgatgataatgctgcaataatgggaatggttttatt

SEQ ID NO: 14702 - DNA, 122 bp, Homo sapiens
  misc_feature (61)..(62): /note="This region represents a CpG dinucleotide"
  misc_feature (61)..(61): /note="Nucleotide may be methylated to form 5-methylcytosine"
aaagaaagaaatggatctttcagccagagcgaagcttcggataactgcagccccagctgacgtgtgtgaactccaacttcatgagagatcctgagtcagaatgacctggctaagccgcttcc

SEQ ID NO: 14703 - DNA, 122 bp, Homo sapiens
  misc_feature (61)..(62): /note="This region represents a CpG dinucleotide"
  misc_feature (61)..(61): /note="Nucleotide may be methylated to form 5-methylcytosine"
ggaggcatgtccagcttctgatttctttgtaaaaatctctggtacctcaggctcatccagcgtctgcttttcagatgtttttccctccgggacagggaggtctagctcatttggacaaggtg

SEQ ID NO: 14704 - DNA, 122 bp, Homo sapiens
  misc_feature (61)..(62): /note="This region represents a CpG dinucleotide"
  misc_feature (61)..(61): /note="Nucleotide may be methylated to form 5-methylcytosine"
cccagtaagtgactaaatgaataaatggaaaaatgtcgcagttccctctcctcagagcctcgcacaaaaggtagccattacataggccactgtcaaacagtcctctgagagattcccacact

SEQ ID NO: 14705 - DNA, 122 bp, Homo sapiens
  misc_feature (61)..(62): /note="This region represents a CpG dinucleotide"
  misc_feature (61)..(61): /note="Nucleotide may be methylated to form 5-methylcytosine"
cacttaaagcagtctacagatttagtgcaatgcttatcaaaataccaatgacattctttacggaaatagaaaaaaatcctaaaatgtgtatgaaaccagaagagacctagaatagtcaaagg

SEQ ID NO: 14706 - DNA, 122 bp, Homo sapiens
  misc_feature (61)..(62): /note="This region represents a CpG dinucleotide"
  misc_feature (61)..(61): /note="Nucleotide may be methylated to form 5-methylcytosine"
tgggccacaggcctcctttctcacatccaggtgcgaggagggcaggcgttggaggccacacggagcttagtgtagccacactcccagaggaagccagtccccagcatgcactaagtactggg

SEQ ID NO: 14707 - DNA, 122 bp, Homo sapiens
  misc_feature (61)..(62): /note="This region represents a CpG dinucleotide"
  misc_feature (61)..(61): /note="Nucleotide may be methylated to form 5-methylcytosine"
ccatgagctctcacccatgtatcagctgccttgctagatcctgtttctcagcaccagcagcggggagggccatcttcatgagaaagttcacagtcatcattggtcagcagagataggaagga

SEQ ID NO: 14708 - DNA, 122 bp, Homo sapiens
  misc_feature (61)..(62): /note="This region represents a CpG dinucleotide"
  misc_feature (61)..(61): /note="Nucleotide may be methylated to form 5-methylcytosine"
gagagatttgaagtatgaggaagactcaagtgccattgctgcttgaagatggcagcaccacgtgagaaggaatacctcaaggaactgaaagtggcccttgcctaacagtcagcaaggaaaga

SEQ ID NO: 14709 - DNA, 122 bp, Homo sapiens
  misc_feature (61)..(62): /note="This region represents a CpG dinucleotide"
  misc_feature (61)..(61): /note="Nucleotide may be methylated to form 5-methylcytosine"
ttcctgcctgcagacctggcctgctgcttctttctccttcctccctccctgcctgccctgcggtttcaaagtagattagaaataacagtgtcccacatggaagcctctacttcttcctgggt

SEQ ID NO: 14710 - DNA, 122 bp, Homo sapiens
  misc_feature (61)..(62): /note="This region represents a CpG dinucleotide"
  misc_feature (61)..(61): /note="Nucleotide may be methylated to form 5-methylcytosine"
ccaacttttagtgagttcctcctatgtgctaggcactgcacaaggtaccaaagataaagccgtgaataaaacagacaaggttcctgcccttacagtgtttacagtttagaaggggagataga

SEQ ID NO: 14711 - DNA, 122 bp, Homo sapiens
  misc_feature (61)..(62): /note="This region represents a CpG dinucleotide"
  misc_feature (61)..(61): /note="Nucleotide may be methylated to form 5-methylcytosine"
tatttctgggttctacaaagtccagatggtatcttctgtcctacacaagttaggctgtgtcgtaagactcttctaccaggtactttcttgacatctgtgagaggcaagcaggtatttcccca

SEQ ID NO: 14712 - DNA, 122 bp, Homo sapiens
  misc_feature (61)..(62): /note="This region represents a CpG dinucleotide"
  misc_feature (61)..(61): /note="Nucleotide may be methylated to form 5-methylcytosine"
agaccctgggctcaattctcagctgaaacctgaactctgcaggatgggtcagtcatctgccgcaggcatttgccaggcctggctcactgagtcataacgaggttagttatgtgactgtcagc

SEQ ID NO: 14713 - DNA, 122 bp, Homo sapiens
  misc_feature (61)..(62): /note="This region represents a CpG dinucleotide"
  misc_feature (61)..(61): /note="Nucleotide may be methylated to form 5-methylcytosine"
taggtcattttcactgctgtagtcccagttcctacaacagtgcccaggacacaccaggaacgtgacatttattgaatagatgaaagaacagtgtaaaaaccacattgctcttcactctgcct

SEQ ID NO: 14714 - DNA, 122 bp, Homo sapiens
  misc_feature (61)..(62): /note="This region represents a CpG dinucleotide"
  misc_feature (61)..(61): /note="Nucleotide may be methylated to form 5-methylcytosine"
tcaattttaagtgagtttttatggtgctcatgaaactgaggtttgaaaagaactggcaagcgccagatataatgagggcagattctgggcatgcttccccatatagcaataagaatgtccct

SEQ ID NO: 14715 - DNA, 122 bp, Homo sapiens
  misc_feature (61)..(62): /note="This region represents a CpG dinucleotide"
  misc_feature (61)..(61): /note="Nucleotide may be methylated to form 5-methylcytosine"
gtgctaggaaggatcaggcgccatgggaagtgtggtgcggccgtttcccctacttctctccgcctcgtgcttacgactgagctatcaaaacaaagctatgacagttggagcttcactgttct

SEQ ID NO: 14716 - DNA, 122 bp, Homo sapiens
  misc_feature (61)..(62): /note="This region represents a CpG dinucleotide"
  misc_feature (61)..(61): /note="Nucleotide may be methylated to form 5-methylcytosine"
atcttgtaaagtacattttgtacctcaattctagaaatcaccttaaattacaatatcttgcgtcattagcaattaatgatatgatatctgtacagattctacaaatatatatacaagcacac

SEQ ID NO: 14717 - DNA, 122 bp, Homo sapiens
  misc_feature (61)..(62): /note="This region represents a CpG dinucleotide"
  misc_feature (61)..(61): /note="Nucleotide may be methylated to form 5-methylcytosine"
gcaagtgtgtgcactgctatctaaacatgaaccctgcatgccatgtcttagaggaacttgcgatccaccttgttttgaaaagacttccttcataatcatacttgaatgacttcattgatttg

SEQ ID NO: 14718 - DNA, 122 bp, Homo sapiens
  misc_feature (61)..(62): /note="This region represents a CpG dinucleotide"
  misc_feature (61)..(61): /note="Nucleotide may be methylated to form 5-methylcytosine"
ctgcattcacctgaaggcttatctggggcccagggattctcttctaaggtagctcatgtacgtgtcttgcaaattatggctgattgttggcaggaggactcaatttctgttcacatgggaat

SEQ ID NO: 14719 - DNA, 122 bp, Homo sapiens
  misc_feature (61)..(62): /note="This region represents a CpG dinucleotide"
  misc_feature (61)..(61): /note="Nucleotide may be methylated to form 5-methylcytosine"
ggtgttgctggttttgccagcactgatacacactttaagcagcaagggtcaacagtggatcgtgtggaacgagtcctggcctggggggaaggatttgtttttcaaacatcccagttctatgc

SEQ ID NO: 14720 - DNA, 122 bp, Homo sapiens
  misc_feature (61)..(62): /note="This region represents a CpG dinucleotide"
  misc_feature (61)..(61): /note="Nucleotide may be methylated to form 5-methylcytosine"
gattcatgcaagatatgagtcaaaacccttcaatggctacacatcacttggactaaaagccgtttccttttcatggcctatgtactcctgaataatctggtcctcggtggacagagccctct

SEQ ID NO: 14721 - DNA, 122 bp, Homo sapiens
  misc_feature (61)..(62): /note="This region represents a CpG dinucleotide"
  misc_feature (61)..(61): /note="Nucleotide may be methylated to form 5-methylcytosine"
tctgttcaaaaggtccatcacaaaagtttctggttcctggtttgccacaagggaccctggcgtcctgtcctcctgaagcattcatgaatggcagttttccctgtgagccttccagcttggct

SEQ ID NO: 14722 - DNA, 122 bp, Homo sapiens
  misc_feature (61)..(62): /note="This region represents a CpG dinucleotide"
  misc_feature (61)..(61): /note="Nucleotide may be methylated to form 5-methylcytosine"
attggtagatttggggaaatatgggatacatctttcccattcaggactagattcataatgcggttagcagaaaaaaactgcaaattaaatgagatacctttgaattgggagagttaattcga

SEQ ID NO: 14723 - DNA, 122 bp, Homo sapiens
  misc_feature (61)..(62): /note="This region represents a CpG dinucleotide"
  misc_feature (61)..(61): /note="Nucleotide may be methylated to form 5-methylcytosine"
ggattttttgattcagaatttttgagtgtgtggtgggctgttcagagtgtcatcacttaccgtgactgacctgaatttgttcatgactattttcttctgtagcctgagacagctgccttgtg

SEQ ID NO: 14724 - DNA, 122 bp, Homo sapiens
  misc_feature (61)..(62): /note="This region represents a CpG dinucleotide"
  misc_feature (61)..(61): /note="Nucleotide may be methylated to form 5-methylcytosine"
actgctagtacacctgactgtttatgcttgcaaaactatgtatattgttattgcctaattcgttgtgtaaaatggccaatgaagtgttctctcatttttacatttctcaaataaatctccat

SEQ ID NO: 14725 - DNA, 122 bp, Homo sapiens
  misc_feature (61)..(62): /note="This region represents a CpG dinucleotide"
  misc_feature (61)..(61): /note="Nucleotide may be methylated to form 5-methylcytosine"
gagatgcaaggcatcatgccagacactggggatgtagtgttatgctaaacagatatgatacgtgagctattaaattgtgtttagggggaaagagctacaataactaaaccaactacacccat

SEQ ID NO: 14726 - DNA, 122 bp, Homo sapiens
  misc_feature (61)..(62): /note="This region represents a CpG dinucleotide"
  misc_feature (61)..(61): /note="Nucleotide may be methylated to form 5-methylcytosine"
ggggcattcacaagtgcaggatgccttctccgggctcccatgatgatccagacaggtaggcgttttccttccctttttgcagattgtgaaaacagcgttcaaaaaagactcatgggccgggc

SEQ ID NO: 14727 - DNA, 122 bp, Homo sapiens
  misc_feature (61)..(62): /note="This region represents a CpG dinucleotide"
  misc_feature (61)..(61): /note="Nucleotide may be methylated to form 5-methylcytosine"
agagaaatcttttgctaatcattgctctttggagccaacctgttcttcgacactagatggcgtcattcactcacctcagctcatctcttggcaagagaaaaatttgattcccagttgggcat

SEQ ID NO: 14728 - DNA, 122 bp, Homo sapiens
  misc_feature (61)..(62): /note="This region represents a CpG dinucleotide"
  misc_feature (61)..(61): /note="Nucleotide may be methylated to form 5-methylcytosine"
ccaccccccatgcctcaaatccttcccttgccaacctaactcaatgccattgcagaatgacgaatgagctcagaaatagaccccaagttactaaccctgctaagaacagcaaaagcctttgc

SEQ ID NO: 14729 - DNA, 122 bp, Homo sapiens
  misc_feature (61)..(62): /note="This region represents a CpG dinucleotide"
  misc_feature (61)..(61): /note="Nucleotide may be methylated to form 5-methylcytosine"
ccaaattaagcaaggatagaagatgcttcctattaaaattgcaaaagctggctcaacactcgaccataggacttgtacatgattttccttcctctaacacatataatgagtcaatctacaag

SEQ ID NO: 14730 - DNA, 122 bp, Homo sapiens
  misc_feature (61)..(62): /note="This region represents a CpG dinucleotide"
  misc_feature (61)..(61): /note="Nucleotide may be methylated to form 5-methylcytosine"
ctactatcagtcagtttgaccagagaaacataaacactatgagtaacagagtatggtttacgatagagattatgaggatttatcatagggattagagtatagacagttgtgggagctgttgg

SEQ ID NO: 14731 - DNA, 122 bp, Homo sapiens
  misc_feature (61)..(62): /note="This region represents a CpG dinucleotide"
  misc_feature (61)..(61): /note="Nucleotide may be methylated to form 5-methylcytosine"
acaggtgtggcctggcccagcccactgttcaagtgaattgtatttagagagttcattacacgtaaccccttgaatagcctctccagggctctactctccatcatgtgattgagagactgtgg

SEQ ID NO: 14732 - DNA, 122 bp, Homo sapiens
  misc_feature (61)..(62): /note="This region represents a CpG dinucleotide"
  misc_feature (61)..(61): /note="Nucleotide may be methylated to form 5-methylcytosine"
ctcaggcgtctgtcctggcaacagtggcttctcctctgtgatctgcacctcctgcagctccgccatggtggcctggcaggatgaggaaatgagactgggaagttgtctctacatccccacat

SEQ ID NO: 14733 - DNA, 122 bp, Homo sapiens
  misc_feature (61)..(62): /note="This region represents a CpG dinucleotide"
  misc_feature (61)..(61): /note="Nucleotide may be methylated to form 5-methylcytosine"
gaatcaccagacactgggagcaaagagacaagcggaggcagaaccaagccctgacgcaagcgcccagcacacgggaatcagaagtggggaagttccaggatgagctgggaaaaggaagaaag

SEQ ID NO: 14734 - DNA, 122 bp, Homo sapiens
  misc_feature (61)..(62): /note="This region represents a CpG dinucleotide"
  misc_feature (61)..(61): /note="Nucleotide may be methylated to form 5-methylcytosine"
taaagctatctagaagctcctcagcctaatgttatctcattaacatgaaaaagacacttacgtagatttcaagggttttaggagctttgtgctaagaacctaggacaaagaccagttatttt

SEQ ID NO: 14735 - DNA, 122 bp, Homo sapiens
  misc_feature (61)..(62): /note="This region represents a CpG dinucleotide"
  misc_feature (61)..(61): /note="Nucleotide may be methylated to form 5-methylcytosine"
catggagcagaggggacacagggttcagccttttgaactaggaattgagaagcttggatccgatccctatttcaccacttcctgtattagcttgatgaccttggacaagttacttaccctct

SEQ ID NO: 14736 - DNA, 122 bp, Homo sapiens
  misc_feature (61)..(62): /note="This region represents a CpG dinucleotide"
  misc_feature (61)..(61): /note="Nucleotide may be methylated to form 5-methylcytosine"
tactgcaaagagctaaagaacaaagcttgcccagggcagaaggtgacccaaactggttgccggtgctggctctggcagccgcttttattcccttatctgaccccacccacatcctgctgatt

SEQ ID NO: 14737 - DNA, 122 bp, Homo sapiens
  misc_feature (61)..(62): /note="This region represents a CpG dinucleotide"
  misc_feature (61)..(61): /note="Nucleotide may be methylated to form 5-methylcytosine"
gatgtgtaacaagataaaacctgggaagtggtggactctgattgattttctgatttgccccgctgcatggcacagtcaacaattagattggttgtttcaaagccttttatttcaccattacg

SEQ ID NO: 14738 - DNA, 122 bp, Homo sapiens
  misc_feature (61)..(62): /note="This region represents a CpG dinucleotide"
  misc_feature (61)..(61): /note="Nucleotide may be methylated to form 5-methylcytosine"
gctaattcccagccactgccccgcctcaggtcatcctcctggcggtcagagtgacctactcgactggcacttctggtgtgtaggaatctctggtagatcaagttaaaaggcagattttgaat

SEQ ID NO: 14739 - DNA, 122 bp, Homo sapiens
  misc_feature (61)..(62): /note="This region represents a CpG dinucleotide"
  misc_feature (61)..(61): /note="Nucleotide may be methylated to form 5-methylcytosine"
cccacctaccaccggtccctagccaccccttcctggaaaatgtgatggaggagggagagtcggccaactccaacaccacctggccctcagcagcagacctggacgctggcccggaagcagcc

SEQ ID NO: 14740 - DNA, 122 bp, Homo sapiens
  misc_feature (61)..(62): /note="This region represents a CpG dinucleotide"
  misc_feature (61)..(61): /note="Nucleotide may be methylated to form 5-methylcytosine"
tgctcctatgagaatctaatgctgccactgatctgacaggaggcggagctctgatagtaacgcttgctcacccactggcccaccatcctgctggcctcgggctgtattcctaacaggccatg

SEQ ID NO: 14741 - DNA, 122 bp, Homo sapiens
  misc_feature (61)..(62): /note="This region represents a CpG dinucleotide"
  misc_feature (61)..(61): /note="Nucleotide may be methylated to form 5-methylcytosine"
gcctggaggggctgcatccctgcagggctgattgcagagcttagagctactggtactggtcgaggaagagttgcaggaaggagacaggcagttcaggaggtggcactgctgtgtgtgagctg

SEQ ID NO: 14742 - DNA, 122 bp, Homo sapiens
  misc_feature (61)..(62): /note="This region represents a CpG dinucleotide"
  misc_feature (61)..(61): /note="Nucleotide may be methylated to form 5-methylcytosine"
tttctaatatatgcatttaatattataaattcccctttactctctgctttctcttcattccgcaaattttgataagttgtattttcatgttcgtttaattcaacatattttaaatttctctt

SEQ ID NO: 14743 - DNA, 122 bp, Homo sapiens
  misc_feature (61)..(62): /note="This region represents a CpG dinucleotide"
  misc_feature (61)..(61): /note="Nucleotide may be methylated to form 5-methylcytosine"
ctcccgaagttaatgtttagatagctcccccgcccagcaggttggtgtgtagggtggggccggggggcactggagtgagacagaccagacgtggacagagaagcctatcgacagggcctggg

SEQ ID NO: 14744 - DNA, 122 bp, Homo sapiens
  misc_feature (61)..(62): /note="This region represents a CpG dinucleotide"
  misc_feature (61)..(61): /note="Nucleotide may be methylated to form 5-methylcytosine"
aaagacctgtcagtcatttttcaccaatgggacctgaaaattccatgataaacacaaatacgttattactctaaggaacaatttgttgtttaaaactgaaatcttgtctttacagatctctc

SEQ ID NO: 14745 - DNA, 122 bp, Homo sapiens
  misc_feature (61)..(62): /note="This region represents a CpG dinucleotide"
  misc_feature (61)..(61): /note="Nucleotide may be methylated to form 5-methylcytosine"
aataattccatcgtttcattttgtggcatcagagatgagtcattgacccggaagaagtcccgtaatgtttctcaactcagtatctgtgactatatttcctgctcttaaaagtttagcatgcc

SEQ ID NO: 14746 - DNA, 122 bp, Homo sapiens
  misc_feature (61)..(62): /note="This region represents a CpG dinucleotide"
  misc_feature (61)..(61): /note="Nucleotide may be methylated to form 5-methylcytosine"
agtcaaggaaccctgagaggaaaggcattaatggagtttcacaaactttccctaccacagcgctgctgaatttcagcagtgccctagattcaggcatcctgctgttcctggaatccccatcc

SEQ ID NO: 14747 - DNA, 122 bp, Homo sapiens
  misc_feature (61)..(62): /note="This region represents a CpG dinucleotide"
  misc_feature (61)..(61): /note="Nucleotide may be methylated to form 5-methylcytosine"
tgtctctttcagtaaattctttactgaaatataagatccagggctgggcgcagtggctcacgccttgtaatcccacagcactttgagaggccaaggcaggcagatcccttgaggccaggagt

SEQ ID NO: 14748 - DNA, 122 bp, Homo sapiens
  misc_feature (61)..(62): /note="This region represents a CpG dinucleotide"
  misc_feature (61)..(61): /note="Nucleotide may be methylated to form 5-methylcytosine"
acggttccgcagggggccgctgtctgcttggatctttcatcaggtcccaggcagagggtgcgctctctactcagcttcactccttgggacagaagtgtggctgctgatcctggagtagggaa

SEQ ID NO: 14749 - DNA, 122 bp, Homo sapiens
  misc_feature (61)..(62): /note="This region represents a CpG dinucleotide"
  misc_feature (61)..(61): /note="Nucleotide may be methylated to form 5-methylcytosine"
tctggagtcaaacaaactgggttagagtcccagagccagcattcaacagttgtgtgatctcgatcaaatcctgtaacctctctgggcttcagtttcttcatctatcaaaacaaggatgacag

SEQ ID NO: 14750 - DNA, 122 bp, Homo sapiens
  misc_feature (61)..(62): /note="This region represents a CpG dinucleotide"
  misc_feature (61)..(61): /note="Nucleotide may be methylated to form 5-methylcytosine"
catttcatgagtaaataagaatgctatttttgagtagcccaagagttgtgctgttctcaccggggatgcttaactatgaccttggaaaagctcctcctcgccctggcaggggtcaaagtcgc

SEQ ID NO: 14751 - DNA, 122 bp, Homo sapiens
  misc_feature (61)..(62): /note="This region represents a CpG dinucleotide"
  misc_feature (61)..(61): /note="Nucleotide may be methylated to form 5-methylcytosine"
aaggcctttatttttcctcgcgggaaaagggattgcaattactataggttttacaggtatcgcgagatttcgtcaaatctcattacggatcccggctgaaagccattttgtttttcagctca

SEQ ID NO: 14752 - DNA, 122 bp, Homo sapiens
  misc_feature (61)..(62): /note="This region represents a CpG dinucleotide"
  misc_feature (61)..(61): /note="Nucleotide may be methylated to form 5-methylcytosine"
acaatcaaaaaagttatgtcccagcaaaaccacagacatgaatactcacagcaatttattcgtaataaccaaaaacaggaaacaaccaaggtgtcctacaataagtaaaaaattaaactggt

SEQ ID NO: 14753 - DNA, 122 bp, Homo sapiens
  misc_feature (61)..(62): /note="This region represents a CpG dinucleotide"
  misc_feature (61)..(61): /note="Nucleotide may be methylated to form 5-methylcytosine"
tttacacccagtaagttgaacacaaaccggaggacagcatttctcatgtgggaagtacagcgggaatgttacagaaacgtgcctgtgaaagttaactaactgtggaccaagcagcattgggc

SEQ ID NO: 14754 - DNA, 122 bp, Homo sapiens
  misc_feature (61)..(62): /note="This region represents a CpG dinucleotide"
  misc_feature (61)..(61): /note="Nucleotide may be methylated to form 5-methylcytosine"
gcattctctattattcatggcatttgatgaccacacacttgaagtgctccctggccagagcgtaagagtcttgggggtggggtcagtatagaaatgattaatggtttgttaaaatgcaggca

SEQ ID NO: 14755 - DNA, 122 bp, Homo sapiens
  misc_feature (61)..(62): /note="This region represents a CpG dinucleotide"
  misc_feature (61)..(61): /note="Nucleotide may be methylated to form 5-methylcytosine"
aaatggaagaagtttagatcactacaggaatcttttcaaaatcaaaggctttttttaaaacgctgcataaaagactttagaaaaagtagtataaaccaactgccagcgtctgtgagtgaaaa

SEQ ID NO: 14756 - DNA, 122 bp, Homo sapiens
  misc_feature (61)..(62): /note="This region represents a CpG dinucleotide"
  misc_feature (61)..(61): /note="Nucleotide may be methylated to form 5-methylcytosine"
gggttagagtctggtgcctgaagcttttccaggcaagcatgcatgctgccagtgactccacggttcttgggtcccagtggtggtcccactcccatggctcgctagacattaccctggtgggg

SEQ ID NO: 14757 - DNA, 122 bp, Homo sapiens
  misc_feature (61)..(62): /note="This region represents a CpG dinucleotide"
  misc_feature (61)..(61): /note="Nucleotide may be methylated to form 5-methylcytosine"
gagttcatgtgtgtgaactctctcaaaaacggtgctggcacacagtaggtgctcaagcagcgcaagcattttacacagtcactgccgtggctgttcggagtcttatttgcagtctgtatcat

SEQ ID NO: 14758 - DNA, 122 bp, Homo sapiens
  misc_feature (61)..(62): /note="This region represents a CpG dinucleotide"
  misc_feature (61)..(61): /note="Nucleotide may be methylated to form 5-methylcytosine"
ctccctcctccgcatccctccttccccgccctccgcgaggctgcagcccaggctgagcgccgcctcccaggcccagggccgcccctccaagccccaaccccgggtttcatccctggcaaggg

SEQ ID NO: 14759 - DNA, 122 bp, Homo sapiens
  misc_feature (61)..(62): /note="This region represents a CpG dinucleotide"
  misc_feature (61)..(61): /note="Nucleotide may be methylated to form 5-methylcytosine"
acggggattgtctttttcagtttgctttcattattgcttctacggggtccttgatttacacgtttatttcaatattaaatcactgatatttttaagcgaaatgtttagagttagatatggtt

SEQ ID NO: 14760 - DNA, 122 bp, Homo sapiens
  misc_feature (61)..(62): /note="This region represents a CpG dinucleotide"
  misc_feature (61)..(61): /note="Nucleotide may be methylated to form 5-methylcytosine"
ggtatgtttcacttcttgacaatataaatgctgcagcaaagatgagaggtgaagtaaaaccgatacctgtcctgcaggtctaaaatttgaatggaaattcaagcacaagtactggggacaca

SEQ ID NO: 14761 - DNA, 122 bp, Homo sapiens
  misc_feature (61)..(62): /note="This region represents a CpG dinucleotide"
  misc_feature (61)..(61): /note="Nucleotide may be methylated to form 5-methylcytosine"
cttcacacgttggcagtatttcacgttttggtagtttctctggtcattttcccctgtggccgtctttaataatgagtcatactcagtgtaatagaaataatatccataagcaagaaaatcat

SEQ ID NO: 14762 - DNA, 122 bp, Homo sapiens
  misc_feature (61)..(62): /note="This region represents a CpG dinucleotide"
  misc_feature (61)..(61): /note="Nucleotide may be methylated to form 5-methylcytosine"
tctttgggttaaccacaaagcaaactacagacagtttgcacaaattcagagcaatgcatacgtggcaaattaacagccttatcaagcttcaaacatcctggctttttgaggcacagtaatac

SEQ ID NO: 14763 - DNA, 122 bp, Homo sapiens
  misc_feature (61)..(62): /note="This region represents a CpG dinucleotide"
  misc_feature (61)..(61): /note="Nucleotide may be methylated to form 5-methylcytosine"
aatacttgagcaaaatacttgaaggtcatctagcctagccccttgttgtgacagtgtcaccgaaactgtctgccctctattctcctttaagcattgaaagaagcagagattccttaagagta

SEQ ID NO: 14764 - DNA, 122 bp, Homo sapiens
  misc_feature (61)..(62): /note="This region represents a CpG dinucleotide"
  misc_feature (61)..(61): /note="Nucleotide may be methylated to form 5-methylcytosine"
aattaaatctagccactggcttagttctgacttgcagggcccagagtaatatggctgcaccgtctttatcatgtttgtgggatatttgaagacaacctacagttctcttcctctgatgaaac

SEQ ID NO: 14765 - DNA, 122 bp, Homo sapiens
  misc_feature (61)..(62): /note="This region represents a CpG dinucleotide"
  misc_feature (61)..(61): /note="Nucleotide may be methylated to form 5-methylcytosine"
acaacatgagatgatcttgctctgggccatgccgggaggaagggagaaggtggctgtcaacgagccaggaagcggcactcctgacactggatctaccaacacccctatctcagacttccagc

SEQ ID NO: 14766 - DNA, 122 bp, Homo sapiens
  misc_feature (61)..(62): /note="This region represents a CpG dinucleotide"
  misc_feature (61)..(61): /note="Nucleotide may be methylated to form 5-methylcytosine"
gagtgactcagccagctgatgtcagatagcctctgtcatgggccccattagtgccactctcgaagactggtctagctattgctgctgcaaatgcccaacctgccagaaacagaaactgttac

SEQ ID NO: 14767 - DNA, 122 bp, Homo sapiens
  misc_feature (61)..(62): /note="This region represents a CpG dinucleotide"
  misc_feature (61)..(61): /note="Nucleotide may be methylated to form 5-methylcytosine"
agctgccctgcagcctgggagggatctgcacagtcactggggaggtggtgcttccgagcacggaggtgcacctgctgagtagttcctcgggcatcacagccacctccaacacctcatgtccc

SEQ ID NO: 14768 - DNA, 122 bp, Homo sapiens
  misc_feature (61)..(62): /note="This region represents a CpG dinucleotide"
  misc_feature (61)..(61): /note="Nucleotide may be methylated to form 5-methylcytosine"
cactggcttctgggcgtttactagacacacaatgaactgccaaggactatagaggctgaccgcagggaagagtggctacagaattcttaaaacatgatgctgactccagtctttggtgagac

SEQ ID NO: 14769 - DNA, 122 bp, Homo sapiens
  misc_feature (61)..(62): /note="This region represents a CpG dinucleotide"
  misc_feature (61)..(61): /note="Nucleotide may be methylated to form 5-methylcytosine"
gtttctgacttgcataattgggcggtgatgtcattcactgagattagaagcattccagggcgactatgtggtagagaggctacaatgaattcaactttagatgtattggagatgtgtttaga

SEQ ID NO: 14770 - DNA, 122 bp, Homo sapiens
  misc_feature (61)..(62): /note="This region represents a CpG dinucleotide"
  misc_feature (61)..(61): /note="Nucleotide may be methylated to form 5-methylcytosine"
cacttcctgctctgggcttccttctctgcgctgctcacagcggagacgtggtcatgaggccgggtcgccttggagccagggcctctcagtccctgtggtggtctctggtcagatttggccca

SEQ ID NO: 14771 - DNA, 122 bp, Homo sapiens
  misc_feature (61)..(62): /note="This region represents a CpG dinucleotide"
  misc_feature (61)..(61): /note="Nucleotide may be methylated to form 5-methylcytosine"
agcaagctcatgaaaaatacaaaggaacaagttattagattaatgggttgaatgagaatgcgatcagcaaaatctggcatgccggaagttctacaggacaaatgaaccaatgtcttcaacaa

SEQ ID NO: 14772 - DNA, 122 bp, Homo sapiens
  misc_feature (61)..(62): /note="This region represents a CpG dinucleotide"
  misc_feature (61)..(61): /note="Nucleotide may be methylated to form 5-methylcytosine"
ctttacatatcataaggcaagaactaactatcaaaaagaatgatttaaacaactatgatacgtcagttgtgaatagcaggaagaattcaaaaggaagttgttatctgaaatgggtattttaa

SEQ ID NO: 14773 - DNA, 122 bp, Homo sapiens
  misc_feature (61)..(62): /note="This region represents a CpG dinucleotide"
  misc_feature (61)..(61): /note="Nucleotide may be methylated to form 5-methylcytosine"
cccacatctctcccaaatatgactgcataagggctcatgctatgggccagattgacgcttcgtaattggtattagtcatatgtttatgttgtattttttaaaaagtcttaactcctttaaat

SEQ ID NO: 14774 - DNA, 122 bp, Homo sapiens
  misc_feature (61)..(62): /note="This region represents a CpG dinucleotide"
  misc_feature (61)..(61): /note="Nucleotide may be methylated to form 5-methylcytosine"
tgattctgtacttttgagtgcctctgcatggaagtgaaagaacttactcagcagaggcagcgtagcatagagagaagcttgtcagacatcttctgtcacaaacttgctatgtaagcttgggt

SEQ ID NO: 14775 - DNA, 122 bp, Homo sapiens
  misc_feature (61)..(62): /note="This region represents a CpG dinucleotide"
  misc_feature (61)..(61): /note="Nucleotide may be methylated to form 5-methylcytosine"
ccatagtttctaccctgcaccagaagtcttgcctttgcactactgagagtcattaataagcgtttcagtgtgtgtaggagcccacctaccttctctctttgtcctcccaactctggccatgt

SEQ ID NO: 14776 - DNA, 122 bp, Homo sapiens
  misc_feature (61)..(62): /note="This region represents a CpG dinucleotide"
  misc_feature (61)..(61): /note="Nucleotide may be methylated to form 5-methylcytosine"
tcctgaccacctgtgcaaaacgaactgcaggattcagcttgtaagccaagccacagagtacgtaagagtgttaaaagaaagagagaaagaagaccaaaaacagtagatgagcagagtgaggc

SEQ ID NO: 14777 - DNA, 122 bp, Homo sapiens
  misc_feature (61)..(62): /note="This region represents a CpG dinucleotide"
  misc_feature (61)..(61): /note="Nucleotide may be methylated to form 5-methylcytosine"
gaaacaggagtcttaccagggtcatgctgagtgtacggcccatgacagcatggaacaggtcgtgtgcagctgggccagacacaacaaaaaattcacagatgaaaaggtattcgcggcaggaa

SEQ ID NO: 14778 - DNA, 122 bp, Homo sapiens
  misc_feature (61)..(62): /note="This region represents a CpG dinucleotide"
  misc_feature (61)..(61): /note="Nucleotide may be methylated to form 5-methylcytosine"
tctttctttttttttttttgagacagagtctccctctggcgccaggcaggcgtgcagtggcgcgatctcggctcactgcaacctccgcctcccgggttcaagccattctcctgcctcagcct

SEQ ID NO: 14779 - DNA, 122 bp, Homo sapiens
  misc_feature (61)..(62): /note="This region represents a CpG dinucleotide"
  misc_feature (61)..(61): /note="Nucleotide may be methylated to form 5-methylcytosine"
agaccagcctggccaacatggtgaaaccctgtctctgctaaaaatacaaaatcacctgggcgtagttgtgcattcctgtaatcccagccacgccagaagctgaggcagaatcgttcgaatcc

SEQ ID NO: 14780 - DNA, 122 bp, Homo sapiens
  misc_feature (61)..(62): /note="This region represents a CpG dinucleotide"
  misc_feature (61)..(61): /note="Nucleotide may be methylated to form 5-methylcytosine"
aatagtgctgcctcctgcttaaagccaatgatgtcaacactgagtcaatagcaccaaggccgctgcaactgccactccctaaagcttaaggtattcaccaaaggtaccaccatcccccattg

SEQ ID NO: 14781 - DNA, 122 bp, Homo sapiens
  misc_feature (61)..(62): /note="This region represents a CpG dinucleotide"
  misc_feature (61)..(61): /note="Nucleotide may be methylated to form 5-methylcytosine"
agtcacggtccaggggacctctgcagggcgggggcctgggggctgggggggcgatggcctcgggcctgggtgaaaagggcaatgccaggcctgcccgggcagccaggagggccccaagcccc

SEQ ID NO: 14782 - DNA, 122 bp, Homo sapiens
  misc_feature (61)..(62): /note="This region represents a CpG dinucleotide"
  misc_feature (61)..(61): /note="Nucleotide may be methylated to form 5-methylcytosine"
tttctccattccagtacagctatatacaaaatagagacacccatacacatttcctgttgccgtttgccttttagaagggttcatacattttatgctgacctttcattagaagggatcatacg

SEQ ID NO: 14783 - DNA, 122 bp, Homo sapiens
  misc_feature (61)..(62): /note="This region represents a CpG dinucleotide"
  misc_feature (61)..(61): /note="Nucleotide may be methylated to form 5-methylcytosine"
tatgatgtatatccttatgccaagaacaccaggaagtcaccaacactgatcctaacccagcgtaattgctactagaaggtgaccttggccagctgcgtacatttccaggtctcaaccacgtt

SEQ ID NO: 14784 - DNA, 122 bp, Homo sapiens
  misc_feature (61)..(62): /note="This region represents a CpG dinucleotide"
  misc_feature (61)..(61): /note="Nucleotide may be methylated to form 5-methylcytosine"
aaaagtgcttttctgggtttccacgactgcctcccttcctccccaaaacgattctccatccgaggaatatttgaaacagctgctgcccgtcctaatgtgccagggctgagattgctgctgga

SEQ ID NO: 14785 - DNA, 122 bp, Homo sapiens
  misc_feature (61)..(62): /note="This region represents a CpG dinucleotide"
  misc_feature (61)..(61): /note="Nucleotide may be methylated to form 5-methylcytosine"
ccaccggtgctcttggtacgaagatccatgctaaattccccatcctgcagcagtgagtcccggatcaccgaacatttctggcccccaagtgtcagcccattcacgtaaaaacttgaccggtc

SEQ ID NO: 14786 - DNA, 122 bp, Homo sapiens
  misc_feature (61)..(62): /note="This region represents a CpG dinucleotide"
  misc_feature (61)..(61): /note="Nucleotide may be methylated to form 5-methylcytosine"
ttcaacttgttccaaagacaacagagcctctcacaagcaggcaagccctgccacttgttacgtagttgaggctgaggagcctgcaggtcccagccaactttatcacctccctcttctgaggg

SEQ ID NO: 14787 - DNA, 122 bp, Homo sapiens
  misc_feature (61)..(62): /note="This region represents a CpG dinucleotide"
  misc_feature (61)..(61): /note="Nucleotide may be methylated to form 5-methylcytosine"
agttcccttacctacgaaattacaattaaaacatcacttatcaaacaagtttactttcagcgttaaagaggtgacagacagacagatatatgcacatagaagaatgtcctatacttctgctg

SEQ ID NO: 14788 - DNA, 122 bp, Homo sapiens
  misc_feature (61)..(62): /note="This region represents a CpG dinucleotide"
  misc_feature (61)..(61): /note="Nucleotide may be methylated to form 5-methylcytosine"
gtcttaactgctcatttcttaaaatcttaagaaaaccccacaatttggacattttgcagacggaagtgagaaaaattcaatcattataatcatccctggtccccagccaaaaggaaagcttt

SEQ ID NO: 14789 - DNA, 122 bp, Homo sapiens
  misc_feature (61)..(62): /note="This region represents a CpG dinucleotide"
  misc_feature (61)..(61): /note="Nucleotide may be methylated to form 5-methylcytosine"
ttacctgactatactcttgcctaagaaatcccagaggctaatcttgcaacaacctaggcacggaaaccctgttgtggaatccgcctactttgggaaagttgtgaacaatgagtccaccacca

SEQ ID NO: 14790 - DNA, 122 bp, Homo sapiens
  misc_feature (61)..(62): /note="This region represents a CpG dinucleotide"
  misc_feature (61)..(61): /note="Nucleotide may be methylated to form 5-methylcytosine"
tttgcaacttctcaaagttaaacacaatcataaaacccagtaatgacactcttaggtattcgctacaaagaaatgaaaacaaacgtccatcatacaaagacattttcatgcagctttattca

SEQ ID NO: 14791 - DNA, 122 bp, Homo sapiens
  misc_feature (61)..(62): /note="This region represents a CpG dinucleotide"
  misc_feature (61)..(61): /note="Nucleotide may be methylated to form 5-methylcytosine"
cagggagccaagaggtgctagcaccctcctcagcccttcactttgatgaccgtccttcctcgtgatcatcaaagaggttagggttctctgccagcgtggctctcactttcttcttctccttg

SEQ ID NO: 14792 - DNA, 122 bp, Homo sapiens
  misc_feature (61)..(62): /note="This region represents a CpG dinucleotide"
  misc_feature (61)..(61): /note="Nucleotide may be methylated to form 5-methylcytosine"
acaactgcccataaccctacaaatccttgcaaaacaacagttactcacattctttcttcacggcctacggcatgactggcagttctgcactgttgcccaatcccggatcactaggaaccaga

SEQ ID NO: 14793 - DNA, 122 bp, Homo sapiens
  misc_feature (61)..(62): /note="This region represents a CpG dinucleotide"
  misc_feature (61)..(61): /note="Nucleotide may be methylated to form 5-methylcytosine"
atttgaatcccaactccactactttgtgaagtaaggcgagttacccaatcaccttgcacacgtaatcacctcctcaaaatggttttgcaagaacaagtaagtgaaagcacctgatgcagaac

SEQ ID NO: 14794 - DNA, 122 bp, Homo sapiens
  misc_feature (61)..(62): /note="This region represents a CpG dinucleotide"
  misc_feature (61)..(61): /note="Nucleotide may be methylated to form 5-methylcytosine"
atttatatagttataattcattataatgaatattattcttattcattcattgttcatctacgcagagtgctttgaacttgcctggcatgtacggtaagctattattcattcaacagtataaa

SEQ ID NO: 14795 - DNA, 122 bp, Homo sapiens
  misc_feature (61)..(62): /note="This region represents a CpG dinucleotide"
  misc_feature (61)..(61): /note="Nucleotide may be methylated to form 5-methylcytosine"
aggttaagcaacttgcccagcatcacacagctagtaaatggtgagcctaagatgccttcacgggtctgggagtccaccgtctatgctcttaaccatcaagctgacctgttttacctgctgtg

SEQ ID NO: 14796 - DNA, 122 bp, Homo sapiens
  misc_feature (61)..(62): /note="This region represents a CpG dinucleotide"
  misc_feature (61)..(61): /note="Nucleotide may be methylated to form 5-methylcytosine"
aataaatgagtacaaaccacaagctcagtttctcctgaaactctcacagcctgcttctgacgtcagatgtgtgtgggttgcacactgcgttaatccattctcacactgctataaagaaatac

SEQ ID NO: 14797 - DNA, 122 bp, Homo sapiens
  misc_feature (61)..(62): /note="This region represents a CpG dinucleotide"
  misc_feature (61)..(61): /note="Nucleotide may be methylated to form 5-methylcytosine"
tcactaactctggaggtgcagcccagcaatctggtttaacaaacctccaggtgattctgacgtacactaaagtttgagaaccactgctggggaatcatttgtagtttactccaggtttaggc

SEQ ID NO: 14798 - DNA, 122 bp, Homo sapiens
  misc_feature (61)..(62): /note="This region represents a CpG dinucleotide"
  misc_feature (61)..(61): /note="Nucleotide may be methylated to form 5-methylcytosine"
aaaaaaggaatgaaagccagcagagagcagaccacaagagcaactagttatgcaagatgccgctatccttgtcaattccttcttcctgcctcagcacagcagaatagcaggtgcaatggttc

SEQ ID NO: 14799 - DNA, 122 bp, Homo sapiens
  misc_feature (61)..(62): /note="This region represents a CpG dinucleotide"
  misc_feature (61)..(61): /note="Nucleotide may be methylated to form 5-methylcytosine"
tcttcctacttctgggcattaaatcctgctgtcccacaggacctggataggctgtcctcacgagaagtgggtaaagattcactacaaaaacaacatgactcatgaatggctctggatcccag

SEQ ID NO: 14800 - DNA, 122 bp, Homo sapiens
  misc_feature (61)..(62): /note="This region represents a CpG dinucleotide"
  misc_feature (61)..(61): /note="Nucleotide may be methylated to form 5-methylcytosine"
gtttcccctttgccctgcagcctattcttttgtgaaactccatgtaactatcagactcagcgccccagccaagagcaaagttctccatttgctaataaggaaaggaatttagacatgcataa

SEQ ID NO: 14801 - DNA, 122 bp, Homo sapiens
  misc_feature (61)..(62): /note="This region represents a CpG dinucleotide"
  misc_feature (61)..(61): /note="Nucleotide may be methylated to form 5-methylcytosine"
actttaatattccatgtctgagcaccctgggggagatgcagggagtgcatttctgaggaacgacctgctgagaacatctttggttcgtcatgtcttggcagcctcagactagcaccctccct

SEQ ID NO: 14802 - DNA, 122 bp, Homo sapiens
  misc_feature (61)..(62): /note="This region represents a CpG dinucleotide"
  misc_feature (61)..(61): /note="Nucleotide may be methylated to form 5-methylcytosine"
ctgtcactgactccatttgtcacccctcattgcacttgcgtcacaggtgcagtagagcgacgaggagtcatattagttgcccaaggcaacaggctagtgagctatgtggcctctgtgggtgg

SEQ ID NO: 14803 - DNA, 122 bp, Homo sapiens
  misc_feature (61)..(62): /note="This region represents a CpG dinucleotide"
  misc_feature (61)..(61): /note="Nucleotide may be methylated to form 5-methylcytosine"
tcctgtgagtctcctttccactggggacccagcagggcctagaatggatgatgctcatcacggttcactgaagcaggtggctgctcaccagcaactgatggaactgccaggccctgggaaac

SEQ ID NO: 14804 - DNA, 122 bp, Homo sapiens
  misc_feature (61)..(62): /note="This region represents a CpG dinucleotide"
  misc_feature (61)..(61): /note="Nucleotide may be methylated to form 5-methylcytosine"
ataacagactaggaggagtcaccatctggccatcttgcctcatctgtgttttctcctttgcgttgctcaaccactaagccaatgtcacatactttagattttttttgttcaagttgcatctc

SEQ ID NO: 14805 - DNA, 122 bp, Homo sapiens
  misc_feature (61)..(62): /note="This region represents a CpG dinucleotide"
  misc_feature (61)..(61): /note="Nucleotide may be methylated to form 5-methylcytosine"
tttatggcgaaagccaggtgaagccaggaacagactctgtgcctctgaggcagccggacgcggctgttgacgcagaaggttgattttgtctggatctctcttgaccagacaaggtagggtta

SEQ ID NO: 14806 - DNA, 122 bp, Homo sapiens
  misc_feature (61)..(62): /note="This region represents a CpG dinucleotide"
  misc_feature (61)..(61): /note="Nucleotide may be methylated to form 5-methylcytosine"
gagtgctgggattacagacgtgagtcaccgtgcccagctaggttttacttttatatgttgcgtaagtgaataaagtctcagcatttggaatgcttttcccttcaaattgctatgtggaactg

SEQ ID NO: 14807 - DNA, 122 bp, Homo sapiens
  misc_feature (61)..(62): /note="This region represents a CpG dinucleotide"
  misc_feature (61)..(61): /note="Nucleotide may be methylated to form 5-methylcytosine"
ccggcagccccgcagttcccgctgtcagccgcagtcccgggccggggtgagtccccgggacgccgcagttgcgcacacgcccaccgtctcaggcacagggtcactgggacgatcccgggggc

SEQ ID NO: 14808 - DNA, 122 bp, Homo sapiens
  misc_feature (61)..(62): /note="This region represents a CpG dinucleotide"
  misc_feature (61)..(61): /note="Nucleotide may be methylated to form 5-methylcytosine"
tattaagaggcatcccaagaatgatgacatcacatgtccttctaaggaatcgaacactagcgattgtgaactccagcaagaagatgttttgtctttgagatgagtaatgaggagaaaatggc

SEQ ID NO: 14809 - DNA, 122 bp, Homo sapiens
  misc_feature (61)..(62): /note="This region represents a CpG dinucleotide"
  misc_feature (61)..(61): /note="Nucleotide may be methylated to form 5-methylcytosine"
aagacattcttggaagccttaccggtaggttcagtggtgtgctggtcaatgcttaacaaccggctccaccctccaacctcccctccctgccaccccaaaaaagaaaaagagagagaggcccc

SEQ ID NO: 14810 - DNA, 122 bp, Homo sapiens
  misc_feature (61)..(62): /note="This region represents a CpG dinucleotide"
  misc_feature (61)..(61): /note="Nucleotide may be methylated to form 5-methylcytosine"
cgcctccctggttcaagtgatccctcctgcctcagcctcctgagtagctgggattacaggcgtccaccatcactccaggttatttttgtgtttttaggagagatggggtttcaccatgttgg

SEQ ID NO: 14811 - DNA, 122 bp, Homo sapiens
  misc_feature (61)..(62): /note="This region represents a CpG dinucleotide"
  misc_feature (61)..(61): /note="Nucleotide may be methylated to form 5-methylcytosine"
atgaagagcttttgataagctgtaagaacctcacaacatacagacacttcctaacaacagcgtgctttcctctggaaaaggaaccagagacacaaagcagttgatgctgttcatgttctggg

SEQ ID NO: 14812 - DNA, 122 bp, Homo sapiens
  misc_feature (61)..(62): /note="This region represents a CpG dinucleotide"
  misc_feature (61)..(61): /note="Nucleotide may be methylated to form 5-methylcytosine"
tcaataaaatgagcagtcaccggcccgagtgccgccagcagcagccgggactgagggcagcgcttcgcttcctcggaggagcccactgtgccatcaacaaaccctgaagcccccaccggctg

SEQ ID NO: 14813 - DNA, 122 bp, Homo sapiens
  misc_feature (61)..(62): /note="This region represents a CpG dinucleotide"
  misc_feature (61)..(61): /note="Nucleotide may be methylated to form 5-methylcytosine"
aagttgagaattgttagagaggttggttagagcaatgtaggtgtgaggccgttgcagctgcgtagagagaatagagcctttagagttggccaagggagttctaatataatcacttactggct

SEQ ID NO: 14814 - DNA, 122 bp, Homo sapiens
  misc_feature (61)..(62): /note="This region represents a CpG dinucleotide"
  misc_feature (61)..(61): /note="Nucleotide may be methylated to form 5-methylcytosine"
ggaccactctcacttaactctctctagctgccttaacattctgtttgttcttgtcattctcgcaaagttctaaaacaggctatttgaaattaagcacttccccccagcaactccgtgaatta

SEQ ID NO: 14815 - DNA, 122 bp, Homo sapiens
  misc_feature (61)..(62): /note="This region represents a CpG dinucleotide"
  misc_feature (61)..(61): /note="Nucleotide may be methylated to form 5-methylcytosine"
ccatcttcatatcttcaggacccacccctctactcctcaccctcagcacaacgatgtgatcgaaaggcaaatatttatttttcaggaagagaaacaggagacctcgaggcttctggacttag

SEQ ID NO: 14816 - DNA, 122 bp, Homo sapiens
  misc_feature (61)..(62): /note="This region represents a CpG dinucleotide"
  misc_feature (61)..(61): /note="Nucleotide may be methylated to form 5-methylcytosine"
gaaattctcatcatcaaataaaagaaacgtcagttcctcagagatcagttgatcttcacacgtaaagtttaaagtaaaaggaggaggaggagaagaaaatgaggaagaggaacaaaagaaat

SEQ ID NO: 14817 - DNA, 122 bp, Homo sapiens
  misc_feature (61)..(62): /note="This region represents a CpG dinucleotide"
  misc_feature (61)..(61): /note="Nucleotide may be methylated to form 5-methylcytosine"
aagaattgtttttttatgattcacaagatgaatcttttagtaaacttaaatgccttccaacgtatccaattaatcgattcaacctttcccaagtaccggtttttctaaagggatcgtcattt

SEQ ID NO: 14818 - DNA, 122 bp, Homo sapiens
  misc_feature (61)..(62): /note="This region represents a CpG dinucleotide"
  misc_feature (61)..(61): /note="Nucleotide may be methylated to form 5-methylcytosine"
gtgtttagtttgggcagttttcaagtctgcgtggccttttgttgttattgttggccctcacgtctccaccattcatgcacacaggctcccaggcagccaggcatgtgtggaatgtttatcaa

SEQ ID NO: 14819 - DNA, 122 bp, Homo sapiens
  misc_feature (61)..(62): /note="This region represents a CpG dinucleotide"
  misc_feature (61)..(61): /note="Nucleotide may be methylated to form 5-methylcytosine"
aaaagctcactctcccttcatcccttccactccccccgcaacccccaccaagcatccattcgtactttctggtggattcttccagtctgcaaatatagcaattacaaatgtatactcttatt

SEQ ID NO: 14820 - DNA, 122 bp, Homo sapiens
  misc_feature (61)..(62): /note="This region represents a CpG dinucleotide"
  misc_feature (61)..(61): /note="Nucleotide may be methylated to form 5-methylcytosine"
gtttcactgcgtcttcaccacaaggacagccactggctccgtctttagatgggaaaactgcggcccggcgacttttgctagttggaaaggtgggtcagtggtggaattaagtcacacttagg

SEQ ID NO: 14821 - DNA, 122 bp, Homo sapiens
  misc_feature (61)..(62): /note="This region represents a CpG dinucleotide"
  misc_feature (61)..(61): /note="Nucleotide may be methylated to form 5-methylcytosine"
aggtactcatttatcttcagatgcaaaactggttctattgtccttaaacttctttccctccgcctcataaacctctactaaaaatacagactcacagagaaaagcaaagaactagtgctttt

SEQ ID NO: 14822 - DNA, 122 bp, Homo sapiens
  misc_feature (61)..(62): /note="This region represents a CpG dinucleotide"
  misc_feature (61)..(61): /note="Nucleotide may be methylated to form 5-methylcytosine"
taaaaacacctgtgatgccaatgtggacattgccgctgccatgtctttacacgcatgtgtcgtatagctctgtcatcgagttgaggaagtccatggtttgcaaataagggtgggggaatcaa

SEQ ID NO: 14823 - DNA, 122 bp, Homo sapiens
  misc_feature (61)..(62): /note="This region represents a CpG dinucleotide"
  misc_feature (61)..(61): /note="Nucleotide may be methylated to form 5-methylcytosine"
gcggctgttcctggcgagtcacgctgactcagcacattgcctctgcctccccgccgcgcccgcactccctggcccgccagccaacagcgccccacgagagccgcagcccccagcctggccaa

SEQ ID NO: 14824 - DNA, 122 bp, Homo sapiens
  misc_feature (61)..(62): /note="This region represents a CpG dinucleotide"
  misc_feature (61)..(61): /note="Nucleotide may be methylated to form 5-methylcytosine"
ttatctttctgaatcttcaaggtcctaaagcattgcttagtaattttgtttctaaactcacgttacagcactgggcatgatctgtccaaggcagagactataagctactcttatagtactct

SEQ ID NO: 14825 - DNA, 122 bp, Homo sapiens
  misc_feature (61)..(62): /note="This region represents a CpG dinucleotide"
  misc_feature (61)..(61): /note="Nucleotide may be methylated to form 5-methylcytosine"
tgacagcagcaggtgagcccagtgactatggattgctgtgagctgttgctacggttgtctcgcctgggatgagcagccgaggtgggagggactgagtaggcccagagaatgcagtgactggc

SEQ ID NO: 14826 - DNA, 122 bp, Homo sapiens
  misc_feature (61)..(62): /note="This region represents a CpG dinucleotide"
  misc_feature (61)..(61): /note="Nucleotide may be methylated to form 5-methylcytosine"
gggtctctctctctctctctctctctctcacacacacacacacacacacacacacacacacgctcctaagtcaactccagctctgagcaactacgccgcacgcctctcccactgggagtccc

SEQ ID NO: 14827 - DNA, 122 bp, Homo sapiens
  misc_feature (61)..(62): /note="This region represents a CpG dinucleotide"
  misc_feature (61)..(61): /note="Nucleotide may be methylated to form 5-methylcytosine"
tgcgagagaggaagtctttcccacagtgcagctgagtggtggagccaggtcttgcttgtgcgtgtgcatcctgtctccctcctctgtgttattctgcttagtcacacacctagtgtcagcct

SEQ ID NO: 14828 - DNA, 122 bp, Homo sapiens
  misc_feature (61)..(62): /note="This region represents a CpG dinucleotide"
  misc_feature (61)..(61): /note="Nucleotide may be methylated to form 5-methylcytosine"
gtaatgagtcacaaagagtaaatgagtctggtcctagagagaacacgtgagaaatggctccgctgccctggagacttcagcttcatgcatccctgcccaggcagggctgggtgaggggaagg

SEQ ID NO: 14829 - DNA, 122 bp, Homo sapiens
  misc_feature (61)..(62): /note="This region represents a CpG dinucleotide"
  misc_feature (61)..(61): /note="Nucleotide may be methylated to form 5-methylcytosine"
atgcccaagcggtaaactgcctgtttcctggtccagtcacctttgcggggttgttctgtgcgtgcctgaaatctctccccagacacttggctccgtgactgcctctcacttcctaatcaaac

SEQ ID NO: 14830 - DNA, 122 bp, Homo sapiens
  misc_feature (61)..(62): /note="This region represents a CpG dinucleotide"
  misc_feature (61)..(61): /note="Nucleotide may be methylated to form 5-methylcytosine"
aggaggaaagccctgagaaaatctgtttatgaaaataaatgtaacctactataacaagttcgtataaataaaaatggaataaaatgatgtatttcctgatgtgaatgacaatagaaaaagca

SEQ ID NO: 14831 - DNA, 122 bp, Homo sapiens
  misc_feature (61)..(62): /note="This region represents a CpG dinucleotide"
  misc_feature (61)..(61): /note="Nucleotide may be methylated to form 5-methylcytosine"
tcaagattccaactctggctgtctgacttcaaagctatcttcttctgtatctgtatctcacgttgatttgtgttaatttaaattagggaatgacttaacaatatgtaaagatagtaccttga

SEQ ID NO: 14832 - DNA, 122 bp, Homo sapiens
  misc_feature (61)..(62): /note="This region represents a CpG dinucleotide"
  misc_feature (61)..(61): /note="Nucleotide may be methylated to form 5-methylcytosine"
gaaaatgtttatatagtttggaggcaacccatttgtttatgttttatactctagcaaaaccgtgatctgtctttgtaaattcagaagctaatactaaaataggttcacttacggagacagga

SEQ ID NO: 14833 - DNA, 122 bp, Homo sapiens
  misc_feature (61)..(62): /note="This region represents a CpG dinucleotide"
  misc_feature (61)..(61): /note="Nucleotide may be methylated to form 5-methylcytosine"
tgctgcaaagaagaacagagaaagtcatcaagccagccctgggtggtttggcactaggcccggggtcaccaaaagatcagaatttagagattacactggagatttcagtcaaaaggctgaga

SEQ ID NO: 14834 - DNA, 122 bp, Homo sapiens
  misc_feature (61)..(62): /note="This region represents a CpG dinucleotide"
  misc_feature (61)..(61): /note="Nucleotide may be methylated to form 5-methylcytosine"
ggtgaggtgtgtcaggcaagagcgggggcagagctccggtgacgcggtgctcacgtgacccgcccggcgcctacgtgggcaccagcccccgcgcccgcccgccagcccgcccagcggtcggg

SEQ ID NO: 14835 - DNA, 122 bp, Homo sapiens
  misc_feature (61)..(62): /note="This region represents a CpG dinucleotide"
  misc_feature (61)..(61): /note="Nucleotide may be methylated to form 5-methylcytosine"
gtaataggctggcattagtataatgaaactcttaaaatctgaatgacaaaagtttataaacgggcactaaggaaagcctctatatcattaacagaccatgctttctaacactaacataacat

SEQ ID NO: 14836 - DNA, 122 bp, Homo sapiens
  misc_feature (61)..(62): /note="This region represents a CpG dinucleotide"
  misc_feature (61)..(61): /note="Nucleotide may be methylated to form 5-methylcytosine"
ctcccctttggcattttgaaggaattcatccccagtttttgctggtagccgggagggaaccgtgctctccccctgaggaaggccctttggagtaactgcagcaatgagtgcccgggctgtgc

SEQ ID NO: 14837 - DNA, 122 bp, Homo sapiens
  misc_feature (61)..(62): /note="This region represents a CpG dinucleotide"
  misc_feature (61)..(61): /note="Nucleotide may be methylated to form 5-methylcytosine"
gggaaccattggcatactgagggtattcattacagtcttgtggctgaggtcaccacgcagcgaggagggaagggacaaggaagcagcagaggtgtgtgtgagaaggagctgaggaggggcag

SEQ ID NO: 14838 - DNA, 122 bp, Homo sapiens
  misc_feature (61)..(62): /note="This region represents a CpG dinucleotide"
  misc_feature (61)..(61): /note="Nucleotide may be methylated to form 5-methylcytosine"
atcacaatagtcctgtgagctcataggatcataattattgccatttggagatgaagaaaccgagacagagagaaatacagtcactttgccaaggaagtgcctttgatattgagtatgggaat

SEQ ID NO: 14839 - DNA, 122 bp, Homo sapiens
  misc_feature (61)..(62): /note="This region represents a CpG dinucleotide"
  misc_feature (61)..(61): /note="Nucleotide may be methylated to form 5-methylcytosine"
ttttcatagtgactgattaagatcccggtgccgggctggcagcgggaggcgtgactgcagcgcgccacatctacagcatgaaaagagatcaacttccccagctctaatcacccaggaaagct

SEQ ID NO: 14840 - DNA, 122 bp, Homo sapiens
  misc_feature (61)..(62): /note="This region represents a CpG dinucleotide"
  misc_feature (61)..(61): /note="Nucleotide may be methylated to form 5-methylcytosine"
ctgcctagagtctctcactttaaaccaagccccaggctctgttgctcatgctgaggtgggcggactgcttgagcccaggagttcaagaccaacctgcgcaacagggcaaaaccccatctcta

SEQ ID NO: 14841 - DNA, 122 bp, Homo sapiens
  misc_feature (61)..(62): /note="This region represents a CpG dinucleotide"
  misc_feature (61)..(61): /note="Nucleotide may be methylated to form 5-methylcytosine"
acatactaaacaatttactatgtttattttctaggtttgtcctctcacttttagaagatacgttccatagggcagggatttgttttgttcactgatgtatcatctcaagcacctagaatagt

SEQ ID NO: 14842 - DNA, 122 bp, Homo sapiens
  misc_feature (61)..(62): /note="This region represents a CpG dinucleotide"
  misc_feature (61)..(61): /note="Nucleotide may be methylated to form 5-methylcytosine"
aatactgctctaaggcttttcctgtattactcatcagttagttagcagaggatgtccccacgcccgagcacacactgtgcatccatcaggctagctccatgaggaaggtaagaggatgtcag

SEQ ID NO: 14843 - DNA, 122 bp, Homo sapiens
  misc_feature (61)..(62): /note="This region represents a CpG dinucleotide"
  misc_feature (61)..(61): /note="Nucleotide may be methylated to form 5-methylcytosine"
ctataccatctaggtttgtgaaagtaaactctatgtttttacaatgacgtaatcacctaacgacgcatttctcagaggatctccccatagttaagccaggcgtgactgtatatgtatattta

SEQ ID NO: 14844 - DNA, 122 bp, Homo sapiens
  misc_feature (61)..(62): /note="This region represents a CpG dinucleotide"
  misc_feature (61)..(61): /note="Nucleotide may be methylated to form 5-methylcytosine"
tatagagtacaaatggaagtaaaagagtaattgcaatttgaccccaaaaaagctacgtggcgctcccatctggctgttcctgtactgaagttctcagtaagtttctactttaaaacagattg

SEQ ID NO: 14845 - DNA, 122 bp, Homo sapiens
  misc_feature (61)..(62): /note="This region represents a CpG dinucleotide"
  misc_feature (61)..(61): /note="Nucleotide may be methylated to form 5-methylcytosine"
ttagacagatgacattgagatgcaaggaaagcatctcctgatgaaaccatcccaatatcacgcataaatgaaggcagtgatacaatgtcccttatacaatttataatctcttaaaggaagca

SEQ ID NO: 14846 - DNA, 122 bp, Homo sapiens
  misc_feature (61)..(62): /note="This region represents a CpG dinucleotide"
  misc_feature (61)..(61): /note="Nucleotide may be methylated to form 5-methylcytosine"
tttttccatgggcctcattgcacacttctctagtgcttcccatgaacacacttaattggccgtgtgtcagctcaattgctgagctgatctaagtcatgatgaatctttcctgctctttgccc

SEQ ID NO: 14847 - DNA, 122 bp, Homo sapiens
  misc_feature (61)..(62): /note="This region represents a CpG dinucleotide"
  misc_feature (61)..(61): /note="Nucleotide may be methylated to form 5-methylcytosine"
gacacagaactcgctgtctcccaagttaaactgctcaagcattgtgtaacttcagcaattcggaaggcttttcccctccttacattcagctgagatatactttcttctcaagctaaattccc

SEQ ID NO: 14848 - DNA, 122 bp, Homo sapiens
  misc_feature (61)..(62): /note="This region represents a CpG dinucleotide"
  misc_feature (61)..(61): /note="Nucleotide may be methylated to form 5-methylcytosine"
caagtcacttgcagaactactgattgactcaaagtacaaataactccaaaatgtcacacacgtcagttataagctactcatttccctcaagcaaatccaagagtacacaaactattatttgt

SEQ ID NO: 14849 - DNA, 122 bp, Homo sapiens
  misc_feature (61)..(62): /note="This region represents a CpG dinucleotide"
  misc_feature (61)..(61): /note="Nucleotide may be methylated to form 5-methylcytosine"
ccactctggagaggcagctgtggcccttggaccagcccaagtgtgcttatttaagatgatcgctgttcattttcacatggctgacaaaatatttccagagtcaggaaagacatgtgcattcc

SEQ ID NO: 14850 - DNA, 122 bp, Homo sapiens
  misc_feature (61)..(62): /note="This region represents a CpG dinucleotide"
  misc_feature (61)..(61): /note="Nucleotide may be methylated to form 5-methylcytosine"
acataacccatgaccagaacattaaaaggctgtaaacaaacaattgcttcaatataaaaacgcatacctcgtgaatttggaaacatgtcaggttgatagaaaagtgaactcgggtagaacct

SEQ ID NO: 14851 - DNA, 122 bp, Homo sapiens
  misc_feature (61)..(62): /note="This region represents a CpG dinucleotide"
  misc_feature (61)..(61): /note="Nucleotide may be methylated to form 5-methylcytosine"
ttatacttaagtaaacaaacacacaacttacctagaggcccagaacaaataacaaacaatcggggaagagggcatgacctctcaggtagattacctcctcattgtcatttctattagggtag

SEQ ID NO: 14852 - DNA, 122 bp, Homo sapiens
  misc_feature (61)..(62): /note="This region represents a CpG dinucleotide"
  misc_feature (61)..(61): /note="Nucleotide may be methylated to form 5-methylcytosine"
ctttccccaaccttctttcccttcttttactagaggtgcaggaccatgcctttcatgaatcgttattctctatgtcagctcttctctcccttggagacttgaaaaacatcatcatatgatac

SEQ ID NO: 14853 - DNA, 122 bp, Homo sapiens
  misc_feature (61)..(62): /note="This region represents a CpG dinucleotide"
  misc_feature (61)..(61): /note="Nucleotide may be methylated to form 5-methylcytosine"
tacaggtgtgagccaccacgcctggtgaattaatacttttctttgttctaaacctgggctcgttagaggaaagaacaggtcctaactctacttttttcatttaaattaacaatagtgaagat

SEQ ID NO: 14854 - DNA, 122 bp, Homo sapiens
  misc_feature (61)..(62): /note="This region represents a CpG dinucleotide"
  misc_feature (61)..(61): /note="Nucleotide may be methylated to form 5-methylcytosine"
ctttggagaagtgtaagccaattgatttttcaaattccccacacacaaccccctccccagcgcttctcaaatatcagccagagacaagacagaaatggtacgtcgggtttttttttttcttc

SEQ ID NO: 14855 - DNA, 122 bp, Homo sapiens
  misc_feature (61)..(62): /note="This region represents a CpG dinucleotide"
  misc_feature (61)..(61): /note="Nucleotide may be methylated to form 5-methylcytosine"
gctttgcttaccacttgttcttccctttactgctgctgttgagtgatagcatgtatgacacgtactatttatgttcttagagataagaacgtaaaatgctgatgtgttctgtcttattctaa

SEQ ID NO: 14856 - DNA, 122 bp, Homo sapiens
  misc_feature (61)..(62): /note="This region represents a CpG dinucleotide"
  misc_feature (61)..(61): /note="Nucleotide may be methylated to form 5-methylcytosine"
tatttatgggaagtctgccccgggatcggagcagatgtcatccagggctctcagatgctgcgaagcggggatggtgtccccatggccggccccctgcactcccacccctgcccatcctctca

SEQ ID NO: 14857 - DNA, 122 bp, Homo sapiens
  misc_feature (61)..(62): /note="This region represents a CpG dinucleotide"
  misc_feature (61)..(61): /note="Nucleotide may be methylated to form 5-methylcytosine"
acaacataaatgtcgttcaacagctaagtacacaaacaaattgcagtatatccatacaatcgaataccatttggcaataaaaagaaacaagctacggatatacctaacaacatggctgaatc

SEQ ID NO: 14858 - DNA, 122 bp, Homo sapiens
  misc_feature (61)..(62): /note="This region represents a CpG dinucleotide"
  misc_feature (61)..(61): /note="Nucleotide may be methylated to form 5-methylcytosine"
ttagtcataataagaaaacaactatcggtacttgcaacatgatgactctccaaaccattacgttgagtgaaagaaactagacacaaaaaggacattgcagatgaagcacaagaaaggccaca

SEQ ID NO: 14859 - DNA, 122 bp, Homo sapiens
  misc_feature (61)..(62): /note="This region represents a CpG dinucleotide"
  misc_feature (61)..(61): /note="Nucleotide may be methylated to form 5-methylcytosine"
aatataactatttaagtggtttttctatagcttcttcctgtcagtgcacacaggcatacacgtctactggtaatcacgagaactaacatttattagttatcgaatgaatgcctggcaccatc

SEQ ID NO: 14860 - DNA, 122 bp, Homo sapiens
  misc_feature (61)..(62): /note="This region represents a CpG dinucleotide"
  misc_feature (61)..(61): /note="Nucleotide may be methylated to form 5-methylcytosine"
atcatcattaatattttcataacacccttgacagtttgcaaaggactttctttaaacttacgaggtaaatgtttactctttccctttaaagatgaggaaactgaggctcagagaggttatgt

SEQ ID NO: 14861 - DNA, 122 bp, Homo sapiens
  misc_feature (61)..(62): /note="This region represents a CpG dinucleotide"
  misc_feature (61)..(61): /note="Nucleotide may be methylated to form 5-methylcytosine"
ccgagatgaggaggatcttctaggaggggccccggggccacagaacgagaggggagtgtgcgctgagcccaccttgcaaagacgctctggtccccgaggggcggcaccttcggcctccagcc

SEQ ID NO: 14862 - DNA, 122 bp, Homo sapiens
  misc_feature (61)..(62): /note="This region represents a CpG dinucleotide"
  misc_feature (61)..(61): /note="Nucleotide may be methylated to form 5-methylcytosine"
tacatcatcacatgtacttaccaagatatttgtgaatgcagagtcgagtcatttttttaacgatcagtgtgtgcaatggtaaaagcgaaaggttacttcaggactcttcatttgttcatcca

SEQ ID NO: 14863 - DNA, 122 bp, Homo sapiens
  misc_feature (61)..(62): /note="This region represents a CpG dinucleotide"
  misc_feature (61)..(61): /note="Nucleotide may be methylated to form 5-methylcytosine"
tatccaccaggccagtaaagccttcacaggatggtagccatctgctgcactgctgggagccgcctcctcccttcctgatccccaacattgataagcacagaaaaatctcagcaaacgcattt

SEQ ID NO: 14864 - DNA, 122 bp, Homo sapiens
  misc_feature (61)..(62): /note="This region represents a CpG dinucleotide"
  misc_feature (61)..(61): /note="Nucleotide may be methylated to form 5-methylcytosine"
cagtgatttgcaaggagcagtgtatcaagatactttgcattggccaggcatggtggctcacgcctgtaatcccagcactttgggaggccaaagcaggcagaccacctgaggccaggggttca

SEQ ID NO: 14865 - DNA, 122 bp, Homo sapiens
  misc_feature (61)..(62): /note="This region represents a CpG dinucleotide"
  misc_feature (61)..(61): /note="Nucleotide may be methylated to form 5-methylcytosine"
cctaggaagtggcaatatagcactgaataattagaactgttatcaaattggttacaaatgcggtaacacaatatactgaccaacaggtttaaaacaggtttaaaagaatcttgcaagtcatt

SEQ ID NO: 14866 - DNA, 122 bp, Homo sapiens
  misc_feature (61)..(62): /note="This region represents a CpG dinucleotide"
  misc_feature (61)..(61): /note="Nucleotide may be methylated to form 5-methylcytosine"
ggtggtctgagagtgatcagagggagcagcaaagacacttcaagatcccagaaactggcccggtgcggtagctcacgcctgtaatcccagcactttgggaggccgaggcgggcgggtcacct

SEQ ID NO: 14867 - DNA, 122 bp, Homo sapiens
  misc_feature (61)..(62): /note="This region represents a CpG dinucleotide"
  misc_feature (61)..(61): /note="Nucleotide may be methylated to form 5-methylcytosine"
ggaggtgtggagggagaggcgcgggcaggaagggtggcgcttgggggccagcgccagttccgggtgggcgtgggctctgtggccactcacttggagtggctggcgggcgccaccagcccggg

SEQ ID NO: 14868 - DNA, 122 bp, Homo sapiens
  misc_feature (61)..(62): /note="This region represents a CpG dinucleotide"
  misc_feature (61)..(61): /note="Nucleotide may be methylated to form 5-methylcytosine"
aacacttttgggccccgagaggctctcagtcggctgaaggaactttgtcatcagtggctgcggccagaaataaacaccaaggaacagatcctggagcttctggtgctagagcagtttctttc

SEQ ID NO: 14869 - DNA, 122 bp, Homo sapiens
  misc_feature (61)..(62): /note="This region represents a CpG dinucleotide"
  misc_feature (61)..(61): /note="Nucleotide may be methylated to form 5-methylcytosine"
gcaaattaaaaaataacaaaaaaagcaacttcttgattctctaaactttatctgagaaaacgaagtgagaaggaaaggctgttgcctagcagatggtttaacacccaagctattcaacatgt

SEQ ID NO: 14870 - DNA, 122 bp, Homo sapiens
  misc_feature (61)..(62): /note="This region represents a CpG dinucleotide"
  misc_feature (61)..(61): /note="Nucleotide may be methylated to form 5-methylcytosine"
taattactgggcaggaagtgtcctctaagcctctaagcagggcagatgggcaggaggatgcggagatgaacatgactcaggccttgctctcaaggccctaacagcctggcagggagcgagat

SEQ ID NO: 14871 - DNA, 122 bp, Homo sapiens
  misc_feature (61)..(62): /note="This region represents a CpG dinucleotide"
  misc_feature (61)..(61): /note="Nucleotide may be methylated to form 5-methylcytosine"
actcaccactgacttaagcaatgcagagcacataagcactaagagactccttcggcagggcgtggtggctcctgcctgtaatcccagcactttgggagggtgaggtgggtggataacaaggt

SEQ ID NO: 14872 - DNA, 122 bp, Homo sapiens
  misc_feature (61)..(62): /note="This region represents a CpG dinucleotide"
  misc_feature (61)..(61): /note="Nucleotide may be methylated to form 5-methylcytosine"
gcaggttgccggggttcatgtcattcacaatgtgctggcggtaggtgtggaccacttccacgttactctgcatttcttcctgcatttagagaggtgagaagatggtcctcatcgcactgtgg

SEQ ID NO: 14873 - DNA, 122 bp, Homo sapiens
  misc_feature (61)..(62): /note="This region represents a CpG dinucleotide"
  misc_feature (61)..(61): /note="Nucleotide may be methylated to form 5-methylcytosine"
aaaaaagaatctaaggatgtgctcacctgcaggagtgtgcaagcacctccttacatgctacgccctggctgcctcactggccttgactcaggtggctaagcacagtagtggctctagcacct

SEQ ID NO: 14874 - DNA, 122 bp, Homo sapiens
  misc_feature (61)..(62): /note="This region represents a CpG dinucleotide"
  misc_feature (61)..(61): /note="Nucleotide may be methylated to form 5-methylcytosine"
atttatttctaccccggctcgttagagacaggatcagagctataggcaggctgtgggtcccgtgcatgcagggccttcctcgtccctgcatgacccagcgtcggggcctggcaccctcagtg

SEQ ID NO: 14875 - DNA, 122 bp, Homo sapiens
  misc_feature (61)..(62): /note="This region represents a CpG dinucleotide"
  misc_feature (61)..(61): /note="Nucleotide may be methylated to form 5-methylcytosine"
cttagcacccagtccacaaacctcctctgcctctgaggaggtgagaggcccttaaagctacgggcattcacaaagaaacaggaggaaatgaggaattcactggaaatttttgccgtctatgc

SEQ ID NO: 14876 - DNA, 122 bp, Homo sapiens
  misc_feature (61)..(62): /note="This region represents a CpG dinucleotide"
  misc_feature (61)..(61): /note="Nucleotide may be methylated to form 5-methylcytosine"
gaaatgccaggagctggatgtggtggcgtgtgggaggccaaggggagtgccattaaggagcggaaggagggagtgaataattcatcacagacatgcaccacggagtgggcacaggcagacaa

SEQ ID NO: 14877 - DNA, 122 bp, Homo sapiens
  misc_feature (61)..(62): /note="This region represents a CpG dinucleotide"
  misc_feature (61)..(61): /note="Nucleotide may be methylated to form 5-methylcytosine"
cactggaggaagaaagaggaggggggcccctattaaccctgggcctcctggcttctctgtcgccaccgcagagggagtgtggtgattgagaaacaagacagcttcaacaagaccggcagtgg

SEQ ID NO: 14878 - DNA, 122 bp, Homo sapiens
  misc_feature (61)..(62): /note="This region represents a CpG dinucleotide"
  misc_feature (61)..(61): /note="Nucleotide may be methylated to form 5-methylcytosine"
tacaattcatggcctctctctgtctctttttcctcctttagggattcctgacaaggagaacgtgagtagctactctctctgcctatcttctaaaaattgttataaggtaaaaaataatcatg

SEQ ID NO: 14879 - DNA, 122 bp, Homo sapiens
  misc_feature (61)..(62): /note="This region represents a CpG dinucleotide"
  misc_feature (61)..(61): /note="Nucleotide may be methylated to form 5-methylcytosine"
atacattaataacacaaaaatcaaatccagagtattatgatattatactatcttttcctacgttactgtgctacttaaagctatcaaacaacaaaagcgtctaggaattaagttaaattttc

SEQ ID NO: 14880 - DNA, 122 bp, Homo sapiens
  misc_feature (61)..(62): /note="This region represents a CpG dinucleotide"
  misc_feature (61)..(61): /note="Nucleotide may be methylated to form 5-methylcytosine"
aattgccttcacatttcaggcatgaactacagcatcagctcttcctaggtctccagcctgcgggccactctgcagattttgaacttgccagcctccatcatcgcatgagcaaattccttaaa

SEQ ID NO: 14881 - DNA, 122 bp, Homo sapiens
  misc_feature (61)..(62): /note="This region represents a CpG dinucleotide"
  misc_feature (61)..(61): /note="Nucleotide may be methylated to form 5-methylcytosine"
cctgggtaacacgatgaaatcccatctctactaaacatacaaaaaattagccagttgtggcggcgtgcacctgtagtcccagctacttgggaggctgaggcaggagaattgcttgaacccag

SEQ ID NO: 14882 - DNA, 122 bp, Homo sapiens
  misc_feature (61)..(62): /note="This region represents a CpG dinucleotide"
  misc_feature (61)..(61): /note="Nucleotide may be methylated to form 5-methylcytosine"
tgttttcattttgttgcactttgttttaaaattaatatcttgaaaggtagtgcattcacacgattcaaaagccagaaagcatgaaaagacacacactgggaatgttttcctcccatctttgt

SEQ ID NO: 14883 - DNA, 122 bp, Homo sapiens
  misc_feature (61)..(62): /note="This region represents a CpG dinucleotide"
  misc_feature (61)..(61): /note="Nucleotide may be methylated to form 5-methylcytosine"
tcaagccctgagtcattctgcagacaagcagtgagcacctcctgctccaggcaccttgtgcgggtgagactttcagatgtgatcaatggctgcagaaatctctgagtcaggaagggaaaact

SEQ ID NO: 14884 - DNA, 122 bp, Homo sapiens
  misc_feature (61)..(62): /note="This region represents a CpG dinucleotide"
  misc_feature (61)..(61): /note="Nucleotide may be methylated to form 5-methylcytosine"
ttagagtcttagaattctcacatctctgagatactgttctaattggaattctcacatctccgagatacttttctagttgaggaaactggaagtgcaaagtggtcatgtgacatgttcaaagt

SEQ ID NO: 14885 - DNA, 122 bp, Homo sapiens
  misc_feature (61)..(62): /note="This region represents a CpG dinucleotide"
  misc_feature (61)..(61): /note="Nucleotide may be methylated to form 5-methylcytosine"
gaacccgactcctttcacctgaccagcctgtgtgtaaatagtcccttcgttaaactagtccgttgacctttatgagtgagccatctgtttcctggcaggacctggctaatgccagtaggttg

SEQ ID NO: 14886 - DNA, 122 bp, Homo sapiens
  misc_feature (61)..(62): /note="This region represents a CpG dinucleotide"
  misc_feature (61)..(61): /note="Nucleotide may be methylated to form 5-methylcytosine"
aaatgttcaagagcaaacactgaatgtttcccctttggacagtaatagtcacgtaaaccacgcagctgtagaatactatgtttttagacattcctggtagcagtgggggagggaagaaaaca

SEQ ID NO: 14887 - DNA, 122 bp, Homo sapiens
  misc_feature (61)..(62): /note="This region represents a CpG dinucleotide"
  misc_feature (61)..(61): /note="Nucleotide may be methylated to form 5-methylcytosine"
acacataaaacgccacagcaggacatttgccaaaggagctaccacatggaggtttgtaggcgtttcaaacaagaaagcacttaggttaagacacgagcaggaaggagctgggatgcaggcca

SEQ ID NO: 14888 - DNA, 122 bp, Homo sapiens
  misc_feature (61)..(62): /note="This region represents a CpG dinucleotide"
  misc_feature (61)..(61): /note="Nucleotide may be methylated to form 5-methylcytosine"
tttcggatttcctaggaggtttctggtttgtcagcattctgttttgtttgcttctcttaccggccgcaaatctgtacagttctgcagcaacctcaattcttgcctcctcagaagaaagaatt

SEQ ID NO: 14889 - DNA, 122 bp, Homo sapiens
  misc_feature (61)..(62): /note="This region represents a CpG dinucleotide"
  misc_feature (61)..(61): /note="Nucleotide may be methylated to form 5-methylcytosine"
tagtccattattagggaatggtaggccttgtcgccagggagagaattctaaacaaagccgcggtccttgtccttcagtagcagagttttccggggggctggactttgtacactgctggaact

SEQ ID NO: 14890 - DNA, 122 bp, Homo sapiens
  misc_feature (61)..(62): /note="This region represents a CpG dinucleotide"
  misc_feature (61)..(61): /note="Nucleotide may be methylated to form 5-methylcytosine"
agaggtgcattttaggatatcataaatacacttcatttaggatgctttattttctttttccggttgtgattaatgtttcttggtggaaaagcccacttgaagaaagctggtttcttggggta

SEQ ID NO: 14891 - DNA, 122 bp, Homo sapiens
  misc_feature (61)..(62): /note="This region represents a CpG dinucleotide"
  misc_feature (61)..(61): /note="Nucleotide may be methylated to form 5-methylcytosine"
ctcaaaccagacaatgaacaatccatttcaacagggacttttgccactatttctgggaaacgtggactgtgacatgacttttggaagaagatatattgtttttaagcatggaggtgcaatgc

SEQ ID NO: 14892 - DNA, 122 bp, Homo sapiens
  misc_feature (61)..(62): /note="This region represents a CpG dinucleotide"
  misc_feature (61)..(61): /note="Nucleotide may be methylated to form 5-methylcytosine"
cttgggcttgggcatttgggaaaagaatgatgtctggaagggcttaagggacacagtggacgaggggagagtcctcatctgctggcattttgtggggtgttagtgccaaacttgaatagggg

SEQ ID NO: 14893 - DNA, 122 bp, Homo sapiens
  misc_feature (61)..(62): /note="This region represents a CpG dinucleotide"
  misc_feature (61)..(61): /note="Nucleotide may be methylated to form 5-methylcytosine"
gctgcccaggaggcacactgatctcacacttaatttctccagttttattatttgctctggcggcattttctcttgttagagaaatctgggagcttgaggccaggccctcataattactacaa

SEQ ID NO: 14894 - DNA, 122 bp, Homo sapiens
  misc_feature (61)..(62): /note="This region represents a CpG dinucleotide"
  misc_feature (61)..(61): /note="Nucleotide may be methylated to form 5-methylcytosine"
acactgggttctcttccttcccagtgaaataattctcttttattctctatatccagttaacgtttattgattccctgttgtgagtagatatgtctattgcatctgctattgcctgtgaccac

SEQ ID NO: 14895 - DNA, 122 bp, Homo sapiens
  misc_feature (61)..(62): /note="This region represents a CpG dinucleotide"
  misc_feature (61)..(61): /note="Nucleotide may be methylated to form 5-methylcytosine"
tgtcaaatattactatcaggattacggttaaataggttttttattttggggctatggccgcgtctgggactggccagacaactgctgctgcttcagatttaaaatgtaattcatcgcattct

SEQ ID NO: 14896 - DNA, 122 bp, Homo sapiens
  misc_feature (61)..(62): /note="This region represents a CpG dinucleotide"
  misc_feature (61)..(61): /note="Nucleotide may be methylated to form 5-methylcytosine"
gcagtgtgcttttccataggtctatgtgaaacaggtttttcatctagaactaccttcttccgcttggagcttagttttcccctgaattctctaggctaaactcatttgtgttcagttttgct

SEQ ID NO: 14897 - DNA, 122 bp, Homo sapiens
  misc_feature (61)..(62): /note="This region represents a CpG dinucleotide"
  misc_feature (61)..(61): /note="Nucleotide may be methylated to form 5-methylcytosine"
aaagagaataagccagtgccatattgccacagggcaaaagtaacagagggagtttcatgtcgtcggaaggaagaacttcctaataaatggattcttccccagcttttggggttacttggaga

SEQ ID NO: 14898 - DNA, 122 bp, Homo sapiens
  misc_feature (61)..(62): /note="This region represents a CpG dinucleotide"
  misc_feature (61)..(61): /note="Nucleotide may be methylated to form 5-methylcytosine"
ggaaactgttgaggatcatgatgccttttgccctccctgagtggctcaaagaaaatgtgacggagatatttcccccagaataaattcatttaaattgtgtattttacatggaaatggtaatt

SEQ ID NO: 14899 - DNA, 122 bp, Homo sapiens
  misc_feature (61)..(62): /note="This region represents a CpG dinucleotide"
  misc_feature (61)..(61): /note="Nucleotide may be methylated to form 5-methylcytosine"
ataaaaatacctcaaagtctgtggtgacagaggctgtttgcgaaactccatgcacactgtcgtagcctggtggtgcttcagttaaggaaaagtccttctcatgtaagtccatacactttccg

SEQ ID NO: 14900 - DNA, 122 bp, Homo sapiens
  misc_feature (61)..(62): /note="This region represents a CpG dinucleotide"
  misc_feature (61)..(61): /note="Nucleotide may be methylated to form 5-methylcytosine"
tgataataataataataataatagcattatgtttcccaggtatgcacaaatcaaccagaacgtgactaatctacatgcaggcctttatcaaatccatatttatgttacctgcatgtgtttac

SEQ ID NO: 14901 - DNA, 122 bp, Homo sapiens
  misc_feature (61)..(62): /note="This region represents a CpG dinucleotide"
  misc_feature (61)..(61): /note="Nucleotide may be methylated to form 5-methylcytosine"
ccattcagcaaatattttttacatgcccgtgtgtgccaggaactatactgtttgctgggacgacagtgatgaacaaaaccaatttggttcctctccatgtggagttgaaagtccagcaagaa

SEQ ID NO: 14902 - DNA, 122 bp, Homo sapiens
  misc_feature (61)..(62): /note="This region represents a CpG dinucleotide"
  misc_feature (61)..(61): /note="Nucleotide may be methylated to form 5-methylcytosine"
ctttttaagaggagggggaaacatgaaattttcctcacctagtctccacacacactatgacgtccattctgagtagttgtacaaagtactggcatattatagaggaacagaaaatagacaca

SEQ ID NO: 14903 - DNA, 122 bp, Homo sapiens
  misc_feature (61)..(62): /note="This region represents a CpG dinucleotide"
  misc_feature (61)..(61): /note="Nucleotide may be methylated to form 5-methylcytosine"
acagccaaccaataatttttaatagcttgtcctctattgatttcagcccacacattaaagcgcctaataaaaattatagaaaggtaggtgacgggacataaggacaagagaaagttaatagt

SEQ ID NO: 14904 - DNA, 122 bp, Homo sapiens
  misc_feature (61)..(62): /note="This region represents a CpG dinucleotide"
  misc_feature (61)..(61): /note="Nucleotide may be methylated to form 5-methylcytosine"
tactctgaactttctgtcctcatgctgtttactgcatctggaatgtctttgtcctacagacgtttccaatgcaggcttttgaaatccaacccaacaataaaactagctcaaggcactttttc

SEQ ID NO: 14905 - DNA, 122 bp, Homo sapiens
  misc_feature (61)..(62): /note="This region represents a CpG dinucleotide"
  misc_feature (61)..(61): /note="Nucleotide may be methylated to form 5-methylcytosine"
gttttcaggacttggactctgctttagacttgtgctcagactgtctccacaaaagtggtccgtttcctcatccaatgagctctgcctgtttgtctgtgtgacactccagtggaaggaagcca

SEQ ID NO: 14906 - DNA, 122 bp, Homo sapiens
  misc_feature (61)..(62): /note="This region represents a CpG dinucleotide"
  misc_feature (61)..(61): /note="Nucleotide may be methylated to form 5-methylcytosine"
tttagaaaagttcgagaaacagtgcattgcatgaggctgactagaagcaagttgagaaggcgggctgtggttgttgaggtgttaagggtaaacataaacttagaagaaccaggtgcttttat

SEQ ID NO: 14907 - DNA, 122 bp, Homo sapiens
  misc_feature (61)..(62): /note="This region represents a CpG dinucleotide"
  misc_feature (61)..(61): /note="Nucleotide may be methylated to form 5-methylcytosine"
ctgtgccaacaatgatgccaagtacttaacctgaaggagctctttgagttctcataacatcgttacttgttgattattattaataacctccattttaccaaaaacgtctctgaggctcagag

SEQ ID NO: 14908 - DNA, 122 bp, Homo sapiens
  misc_feature (61)..(62): /note="This region represents a CpG dinucleotide"
  misc_feature (61)..(61): /note="Nucleotide may be methylated to form 5-methylcytosine"
gcatcatcagtgggaaagtaagctctctgaggaccaggtctgactgagagatccccacagcgtaatagataatacattttgtgtctcagcgttgcctatgaaacgccatttattcacttggc

SEQ ID NO: 14909 - DNA, 122 bp, Homo sapiens
  misc_feature (61)..(62): /note="This region represents a CpG dinucleotide"
  misc_feature (61)..(61): /note="Nucleotide may be methylated to form 5-methylcytosine"
catggccttgccagatttccagcttccagcctgcaggatgctgagacagtaaatcctcaccgttttaagccaccaagtttgtggtgatctgttacagcagcttcagtaaacacatacaacct

SEQ ID NO: 14910 - DNA, 122 bp, Homo sapiens
  misc_feature (61)..(62): /note="This region represents a CpG dinucleotide"
  misc_feature (61)..(61): /note="Nucleotide may be methylated to form 5-methylcytosine"
caaagacccactcttcttagtcctaggagtgactcatggcaaatgctaaatgtgtctgcacgtgtgtgtttgtgcaagtgcatttgtgcacacgctaagcatttgaaacaagtcttacagat

SEQ ID NO: 14911 - DNA, 122 bp, Homo sapiens
  misc_feature (61)..(62): /note="This region represents a CpG dinucleotide"
  misc_feature (61)..(61): /note="Nucleotide may be methylated to form 5-methylcytosine"
tctgcttttgtgcagttacggataatgaggattctaaacactgaggtggctttgtgatctcgacatctgtccctgagggactggcctgagactgctgactcatttcacacagctgtcacatg

SEQ ID NO: 14912 - DNA, 122 bp, Homo sapiens
  misc_feature (61)..(62): /note="This region represents a CpG dinucleotide"
  misc_feature (61)..(61): /note="Nucleotide may be methylated to form 5-methylcytosine"
gtgggctgggcagaagtgagactgtggcaaggggccccgaggcacaggccttccagctctcgcttcctcttcccttctgcgcatgtgagtagagtttcccttgaagcctcctgcgaggagga

SEQ ID NO: 14913 - DNA, 122 bp, Homo sapiens
  misc_feature (61)..(62): /note="This region represents a CpG dinucleotide"
  misc_feature (61)..(61): /note="Nucleotide may be methylated to form 5-methylcytosine"
gccttgggggcggggcaagagctgctggcgggaacgcggcacggttttgggggcggggcacgcggccgtcgggcgggttaagagcggctagcggtagtgccgctcgggcctgggggcgggca

SEQ ID NO: 14914 - DNA, 122 bp, Homo sapiens
  misc_feature (61)..(62): /note="This region represents a CpG dinucleotide"
  misc_feature (61)..(61): /note="Nucleotide may be methylated to form 5-methylcytosine"
cctgcactctctgagaccgcccttggttctcagaaagtgcggggccgggggccccatcaccgggaggggtgctgccctgaaatgctctttgcagaaagtttcagccgtaacaaatgagcacg

SEQ ID NO: 14915 - DNA, 122 bp, Homo sapiens
  misc_feature (61)..(62): /note="This region represents a CpG dinucleotide"
  misc_feature (61)..(61): /note="Nucleotide may be methylated to form 5-methylcytosine"
ctcagtgcatcaggaatgggtgtatgggtgtgtgtgggtgggtgtgagtgtgggtgtgtacgtaccaataaacaacctggttttaagacaatgtacaaatggcctccagtcttttttttttt

SEQ ID NO: 14916 - DNA, 122 bp, Homo sapiens
  misc_feature (61)..(62): /note="This region represents a CpG dinucleotide"
  misc_feature (61)..(61): /note="Nucleotide may be methylated to form 5-methylcytosine"
atttttttaatacacattgtgaaacaatcaccacagtcaagccaataaacatatctagcacgtcatactttttttggtggtaagagcacttaatgtttatttataagatctttgattctaga

SEQ ID NO: 14917 - DNA, 122 bp, Homo sapiens
  misc_feature (61)..(62): /note="This region represents a CpG dinucleotide"
  misc_feature (61)..(61): /note="Nucleotide may be methylated to form 5-methylcytosine"
aaggatctgtgagaaaaaagaaatcctttctcccctacagggaagatgctgagtgtatcacggaggcagatccccagttgacaaaagtaattctccagagaaagggggagctaaaaattgtc

SEQ ID NO: 14918 - DNA, 122 bp, Homo sapiens
  misc_feature (61)..(62): /note="This region represents a CpG dinucleotide"
  misc_feature (61)..(61): /note="Nucleotide may be methylated to form 5-methylcytosine"
ttatggtgcatctgctagaacagggggcccacggtaccgtccatggcccgttaggatcggcgccacacagcagtaggtgcgcggcgagagttatcgcctgagctccgcctcctgctagatcc

SEQ ID NO: 14919 - DNA, 122 bp, Homo sapiens
  misc_feature (61)..(62): /note="This region represents a CpG dinucleotide"
  misc_feature (61)..(61): /note="Nucleotide may be methylated to form 5-methylcytosine"
ttcaaaataaaacaatggaaggttgggagtaggaggggttatgaatcaaatagaagtacacgagttgattgctgcagctggtgatgggtatacatagagttcattgtactattctttctaca

SEQ ID NO: 14920 - DNA, 122 bp, Homo sapiens
  misc_feature (61)..(62): /note="This region represents a CpG dinucleotide"
  misc_feature (61)..(61): /note="Nucleotide may be methylated to form 5-methylcytosine"
ttcttggatctcattgaacttctttgcagtccacgccttgaattccttatctgtcaattacgagtttccattttggttaaggaccgttgatggagagctagcgtaatgtgaatgtagattca

SEQ ID NO: 14921 - DNA, 122 bp, Homo sapiens
  misc_feature (61)..(62): /note="This region represents a CpG dinucleotide"
  misc_feature (61)..(61): /note="Nucleotide may be methylated to form 5-methylcytosine"
cagcatggtgcctggtacataacagtagattagatggaagaatgagaaaaactgttatgacgtcagagttattggctcgagttgctacttaagggaccatgtaaaaactcaaaggacttttt

SEQ ID NO: 14922 - DNA, 122 bp, Homo sapiens
  misc_feature (61)..(62): /note="This region represents a CpG dinucleotide"
  misc_feature (61)..(61): /note="Nucleotide may be methylated to form 5-methylcytosine"
ctatagatgtgcataaattgagagcaaaaccccaaatgttttagaaactttaatggctaccgtatttcaagcaatcagtaaagtaaactttaaaaaatactggtgcagtttattgcttcata

SEQ ID NO: 14923 - DNA, 122 bp, Homo sapiens
  misc_feature (61)..(62): /note="This region represents a CpG dinucleotide"
  misc_feature (61)..(61): /note="Nucleotide may be methylated to form 5-methylcytosine"
ttctttctgtagaaatgactctgcaggtgtcaagaagaaagggctctgagtcaggacaaacgagaacttggcactgatgctattttgccaggattcatgctctcatgctctctgaccatccc

SEQ ID NO: 14924 - DNA, 122 bp, Homo sapiens
  misc_feature (61)..(62): /note="This region represents a CpG dinucleotide"
  misc_feature (61)..(61): /note="Nucleotide may be methylated to form 5-methylcytosine"
tgacaggagctgccaggtacctagcagaggccaggagacacagcagggaggagatcccctcgctaaattcccaactggccaagatgcctgcattccacagccttcagcagagggccctagat

SEQ ID NO: 14925 - DNA, 122 bp, Homo sapiens
  misc_feature (61)..(62): /note="This region represents a CpG dinucleotide"
  misc_feature (61)..(61): /note="Nucleotide may be methylated to form 5-methylcytosine"
gctgaggaaccactcctggcgttgcggaaggtggggtgtggggccggaagaccctccccccgcgtcttcagaggagcgctgtttctggaggagttaggggaaggaggctgcctggtaagcca

SEQ ID NO: 14926 - DNA, 122 bp, Homo sapiens
  misc_feature (61)..(62): /note="This region represents a CpG dinucleotide"
  misc_feature (61)..(61): /note="Nucleotide may be methylated to form 5-methylcytosine"
caactgctgcctcctcctttccctctgctgcaggctggaactaagggcggcgggtggcggcgggaggaggaaggaggagaagcaaagttggccagggtcctgctggctgggggccaggactg

SEQ ID NO: 14927 - DNA, 122 bp, Homo sapiens
  misc_feature (61)..(62): /note="This region represents a CpG dinucleotide"
  misc_feature (61)..(61): /note="Nucleotide may be methylated to form 5-methylcytosine"
ttgccagagtctcgaggggtggcctccttccacgggtgagtaaccacaagtccatgtgaccgaacaaacagcatattcttttgttcaaaagagaaaaacaacattgaaggaaatcagctgaa

SEQ ID NO: 14928 - DNA, 122 bp, Homo sapiens
  misc_feature (61)..(62): /note="This region represents a CpG dinucleotide"
  misc_feature (61)..(61): /note="Nucleotide may be methylated to form 5-methylcytosine"
cctttatagaaggctgacaactaactgttcagttgaacatgcttattttaatatcctgagcgtactaggttaggtttggtggtaatttatggtcttatatagcctttaaaaattgttttaag

SEQ ID NO: 14929 - DNA, 122 bp, Homo sapiens
  misc_feature (61)..(62): /note="This region represents a CpG dinucleotide"
  misc_feature (61)..(61): /note="Nucleotide may be methylated to form 5-methylcytosine"
taaagggcttagatttcagaacttctgtgaatggattcctataggagtcactcttgttgccgggacacacagaagctgagcagacactggaatgtgaatgcattgggaggtgagcccttaag

SEQ ID NO: 14930 - DNA, 122 bp, Homo sapiens
  misc_feature (61)..(62): /note="This region represents a CpG dinucleotide"
  misc_feature (61)..(61): /note="Nucleotide may be methylated to form 5-methylcytosine"
aaagtcatttaacaccaggacccttgttttcttatctgtaacatggagatgctggtaactcgtgcctcataaaatcacttgatgtgggtgagagagaaagctaagtgttgatgacagtgtgg

SEQ ID NO: 14931 - DNA, 122 bp, Homo sapiens
  misc_feature (61)..(62): /note="This region represents a CpG dinucleotide"
  misc_feature (61)..(61): /note="Nucleotide may be methylated to form 5-methylcytosine"
acctgggaattagcctgaggtttagtccttaccctatcacttactagctatgtgactttgcgtaaattgtttactctgtttcctcatctgaggagatgatattaatacctcataggttcaaa

SEQ ID NO: 14932 - DNA, 122 bp, Homo sapiens
  misc_feature (61)..(62): /note="This region represents a CpG dinucleotide"
  misc_feature (61)..(61): /note="Nucleotide may be methylated to form 5-methylcytosine"
cctggatgggaaggattgtgccaggcatgggttcccgcagtgtgttcccctggctggcagcgtcgcggcacctgggagtcattaggcagcaagggagggaattgcgattctgggcggggctc

SEQ ID NO: 14933 - DNA, 122 bp, Homo sapiens
  misc_feature (61)..(62): /note="This region represents a CpG dinucleotide"
  misc_feature (61)..(61): /note="Nucleotide may be methylated to form 5-methylcytosine"
ttataggcaatgggatgtccttaccgagcttatgggcaggccgtgatgggacttgacttgcgttttagaaacaactaagataaaagtatagatgacagctgttgggaaaagactctgcagac

SEQ ID NO: 14934 - DNA, 122 bp, Homo sapiens
  misc_feature (61)..(62): /note="This region represents a CpG dinucleotide"
  misc_feature (61)..(61): /note="Nucleotide may be methylated to form 5-methylcytosine"
gccagttcttgtgcaaatagaacattttcaagatagttctgccacttgtacagcactctacgtgctgtagagttcagccctgagagagagggacaggatcctgtgtgtcccgtccgccttgc

SEQ ID NO: 14935 - DNA, 122 bp, Homo sapiens
  misc_feature (61)..(62): /note="This region represents a CpG dinucleotide"
  misc_feature (61)..(61): /note="Nucleotide may be methylated to form 5-methylcytosine"
cctagtggtaagacactcctacaactcaccttcttccgctggaggtagtcaacccctgtacgcggtttccttctcctgctctcctgcttatagaacaattgttcctccagaacaattcctct

SEQ ID NO: 14936 - DNA, 122 bp, Homo sapiens
  misc_feature (61)..(62): /note="This region represents a CpG dinucleotide"
  misc_feature (61)..(61): /note="Nucleotide may be methylated to form 5-methylcytosine"
ggggctccagggcgggtgcggggggacgatgggtggacgcggccagcagcccctcacctgcgcaggtacaccttccagggctctgccaacttctcctgaaccagcgccttcacggccttgcc

SEQ ID NO: 14937 - DNA, 122 bp, Homo sapiens
  misc_feature (61)..(62): /note="This region represents a CpG dinucleotide"
  misc_feature (61)..(61): /note="Nucleotide may be methylated to form 5-methylcytosine"
tctccctcccctggagtattctgtaatcttttcatcacctggttaaaatgttgcttaaatcgtgatcattatgaatagagaagagtctttatactttgaaggttttgaatgtaacatgccta

SEQ ID NO: 14938 - DNA, 122 bp, Homo sapiens
  misc_feature (61)..(62): /note="This region represents a CpG dinucleotide"
  misc_feature (61)..(61): /note="Nucleotide may be methylated to form 5-methylcytosine"
ctctgcagggaaacagttggctgcctgagggctcattcatggctgtttcccctggaagggcggcgcaggagcccggttctgcagccctgccgacgccgtgtcacagacacagctcttcatgg

SEQ ID NO: 14939 - DNA, 122 bp, Homo sapiens
  misc_feature (61)..(62): /note="This region represents a CpG dinucleotide"
  misc_feature (61)..(61): /note="Nucleotide may be methylated to form 5-methylcytosine"
gatgtctaaaacagcgcggaggtcaggagaccttgtcgctgccttcacagagttgggcaacgctcccggtcctggtcagccgcgggacgcaggcgcaaatgcaggcttgggatgggggaggt

SEQ ID NO: 14940 - DNA, 122 bp, Homo sapiens
  misc_feature (61)..(62): /note="This region represents a CpG dinucleotide"
  misc_feature (61)..(61): /note="Nucleotide may be methylated to form 5-methylcytosine"
ccccgcccgtcaagcctttggcatcattatcctcatcactaaatcctacagagtacagggcggaaaacggtgcacaccattcacagaactggagaactccaaggggcgaaagttaaagggaa

SEQ ID NO: 14941 - DNA, 122 bp, Homo sapiens
  misc_feature (61)..(62): /note="This region represents a CpG dinucleotide"
  misc_feature (61)..(61): /note="Nucleotide may be methylated to form 5-methylcytosine"
aagcttagccagaagggtttatcccaaacaaagcaatgcacattggcattggaatgaaagcggacaggcaaatgggggaagcaagtcaaaaactttgcagttaccagagcggcattgcagag

SEQ ID NO: 14942 - DNA, 122 bp, Homo sapiens
  misc_feature (61)..(62): /note="This region represents a CpG dinucleotide"
  misc_feature (61)..(61): /note="Nucleotide may be methylated to form 5-methylcytosine"
cttcttaattcagtttgactgagattaaaactattattaatctccatttcccaacacacacgcgcaggtaagaagggaaatgtagctaaacaatttaaagtaaccagattatctgccctctg

SEQ ID NO: 14943 - DNA, 122 bp, Homo sapiens
  misc_feature (61)..(62): /note="This region represents a CpG dinucleotide"
  misc_feature (61)..(61): /note="Nucleotide may be methylated to form 5-methylcytosine"
gtgccagggcttaggaggtacacatataaggagttaagaaaaacagagctccgttccaaccgaaaaagaaatgcaaaatccaagacagtagacaatgttgttgtttatttaaaatgtttact

SEQ ID NO: 14944 - DNA, 122 bp, Homo sapiens
  misc_feature (61)..(62): /note="This region represents a CpG dinucleotide"
  misc_feature (61)..(61): /note="Nucleotide may be methylated to form 5-methylcytosine"
agcgcgcatcctgggcatggtgtgggccggctttgccatgatcatcgtggcctcctacaccgccaacctggcggccttcctggtgctggaccggccggaggagcgcatcacgggcatcaacg

SEQ ID NO: 14945 - DNA, 122 bp, Homo sapiens
  misc_feature (61)..(62): /note="This region represents a CpG dinucleotide"
  misc_feature (61)..(61): /note="Nucleotide may be methylated to form 5-methylcytosine"
ggggtttgacgaaggttgttgagatctggtggtccccggggtgaagcaaggagcctataacgcatacggagggctacgtggggacagcctgcgtgaactcatcagtggacgcatcgaagggg

SEQ ID NO: 14946 - DNA, 122 bp, Homo sapiens
  misc_feature (61)..(62): /note="This region represents a CpG dinucleotide"
  misc_feature (61)..(61): /note="Nucleotide may be methylated to form 5-methylcytosine"
ggttctctcccctgtgcttcaccccacctccccgtccctagccatttctagtctccaatccgggtcttacatttaccctggctccagagcacagaccttcctgcagttgggccggcgcgttg

SEQ ID NO: 14947 - DNA, 122 bp, Homo sapiens
  misc_feature (61)..(62): /note="This region represents a CpG dinucleotide"
  misc_feature (61)..(61): /note="Nucleotide may be methylated to form 5-methylcytosine"
cgcatctgcgtactgccctggcgactgacgtgagcatgaagggagctttagtcagccgctcggcccgcgggaaggaagaggcgagcaggagtgactcacaccaggctcgggctccaggcttc

SEQ ID NO: 14948 - DNA, 122 bp, Homo sapiens
  misc_feature (61)..(62): /note="This region represents a CpG dinucleotide"
  misc_feature (61)..(61): /note="Nucleotide may be methylated to form 5-methylcytosine"
aggtctagtgatctctgacctagctggctgaaaagcatgagacaggaaaatagccactatcgctttcaaacacatgacctttgcttcatttggtcagaagaggcacaagacaagcagccact

SEQ ID NO: 14949 - DNA, 122 bp, Homo sapiens
  misc_feature (61)..(62): /note="This region represents a CpG dinucleotide"
  misc_feature (61)..(61): /note="Nucleotide may be methylated to form 5-methylcytosine"
catcactgctaatgctcagggataaaccttaagagataaccatgactcctttctttctttcgcactccatacttcaagtatgtcagcaaatcctctcagctctatcttcaaaatatattcaa

SEQ ID NO: 14950 - DNA, 122 bp, Homo sapiens
  misc_feature (61)..(62): /note="This region represents a CpG dinucleotide"
  misc_feature (61)..(61): /note="Nucleotide may be methylated to form 5-methylcytosine"
tctttggactgaatactatacttcaactttatgtccattgtcttatttgattttcccagccgttgatgagtaatataccattatccttgcttagcaaatgatgaaagcagggttcagagagg

SEQ ID NO: 14951 - DNA, 122 bp, Homo sapiens
  misc_feature (61)..(62): /note="This region represents a CpG dinucleotide"
  misc_feature (61)..(61): /note="Nucleotide may be methylated to form 5-methylcytosine"
aggcttgttaaactacagtttagacaaataagaaacatccaccaggtggctatttggggtcgggtcatgaggtgcatatggcctctgtttattacgtctgaaagcactcaaaccacattctt

SEQ ID NO: 14952 - DNA, 122 bp, Homo sapiens
  misc_feature (61)..(62): /note="This region represents a CpG dinucleotide"
  misc_feature (61)..(61): /note="Nucleotide may be methylated to form 5-methylcytosine"
ctttatcaaaaatggcaagaggccacatactacaataacggaacaaatacttccttttaccgtacagtaaattccttcctctgattggctaaagcttcagtgcatggttcacaagaacaaaa

SEQ ID NO: 14953 - DNA, 122 bp, Homo sapiens
  misc_feature (61)..(62): /note="This region represents a CpG dinucleotide"
  misc_feature (61)..(61): /note="Nucleotide may be methylated to form 5-methylcytosine"
taagtccgtgggctttgcttcctcttggccctgggtttgtgtcccagccatgttaggtagcgtattttgaatgtgggcaagacagaaggatggcaaggaagggttggataaaagagggtgtg

SEQ ID NO: 14954 - DNA, 122 bp, Homo sapiens
  misc_feature (61)..(62): /note="This region represents a CpG dinucleotide"
  misc_feature (61)..(61): /note="Nucleotide may be methylated to form 5-methylcytosine"
aaacacctccccaaagaaaaccgtgactgtctttctcagccctgggtacccatgctgccccgcaggcctcccttcaatctgtgcttgcacaattctagatgggcgttctccagcggggtctg

SEQ ID NO: 14955 - DNA, 122 bp, Homo sapiens
  misc_feature (61)..(62): /note="This region represents a CpG dinucleotide"
  misc_feature (61)..(61): /note="Nucleotide may be methylated to form 5-methylcytosine"
tattgagccgtggcttgtcatcttgttgaagtggcttccagcctggagagtcatcatctccgtcatcaccctcatgtttggcactatttattgagtgcttaccatatgccaagcactgtgtc

SEQ ID NO: 14956 - DNA, 122 bp, Homo sapiens
  misc_feature (61)..(62): /note="This region represents a CpG dinucleotide"
  misc_feature (61)..(61): /note="Nucleotide may be methylated to form 5-methylcytosine"
tcaagctagatatccttgtatttttccattgctttagccaatgaattgtcatttgcttttcgctatgttttgttttctgctgaggccaatttgggctgggcttctgacacatgcattccaga

SEQ ID NO: 14957 - DNA, 122 bp, Homo sapiens
  misc_feature (61)..(62): /note="This region represents a CpG dinucleotide"
  misc_feature (61)..(61): /note="Nucleotide may be methylated to form 5-methylcytosine"
acagatactctctagtcttcctgggagtcctgaaaagtgtcccggaagagagctccctgccgcatcaggacccgccatgggctacccttcttcttgtgaggacacttggcttatttattctc

SEQ ID NO: 14958 - DNA, 122 bp, Homo sapiens
  misc_feature (61)..(62): /note="This region represents a CpG dinucleotide"
  misc_feature (61)..(61): /note="Nucleotide may be methylated to form 5-methylcytosine"
ccaattcagggcttactctcctggagtatatccaacaaactaacttttcttttttcttgacgtgggactggagtatggttagatctaaaatttgggggcaggtaaaaacattcacaggcctc

SEQ ID NO: 14959 - DNA, 122 bp, Homo sapiens
  misc_feature (61)..(62): /note="This region represents a CpG dinucleotide"
  misc_feature (61)..(61): /note="Nucleotide may be methylated to form 5-methylcytosine"
tagcactaggaagggccttgagcacacatgtgtgggcactcagctcacatgtgcaagctccgcagtgccctcaagccacccctggtcaccacccgaggcctatgggtgtgcacaccagtaat

SEQ ID NO: 14960 - DNA, 122 bp, Homo sapiens
  misc_feature (61)..(62): /note="This region represents a CpG dinucleotide"
  misc_feature (61)..(61): /note="Nucleotide may be methylated to form 5-methylcytosine"
aacctggaagcaactgagctcacaatgagtcattcattgccatttattgtacccctactgcgtattaagcacttttctgggtgctgaattattagtagctaaggtaaaacaccaaacaaaaa

SEQ ID NO: 14961 - DNA, 122 bp, Homo sapiens
  misc_feature (61)..(62): /note="This region represents a CpG dinucleotide"
  misc_feature (61)..(61): /note="Nucleotide may be methylated to form 5-methylcytosine"
acaaggagaggtggcgaattgtacatgagggatttggcagagatactgcagctcctggcacgacaagaattaggatttgtaaaaagttagtgattctctctccctgccggtttacatcacaa

SEQ ID NO: 14962 - DNA, 122 bp, Homo sapiens
  misc_feature (61)..(62): /note="This region represents a CpG dinucleotide"
  misc_feature (61)..(61): /note="Nucleotide may be methylated to form 5-methylcytosine"
tgtcttcaagttgaaacaggtttcttgtctctaattaagaataagctttgaaactaaggtcggcagggaagtggattttctggtaaagcatgaaaacgaaacatctcccctaccagacaagg

SEQ ID NO: 14963 - DNA, 122 bp, Homo sapiens
  misc_feature (61)..(62): /note="This region represents a CpG dinucleotide"
  misc_feature (61)..(61): /note="Nucleotide may be methylated to form 5-methylcytosine"
tttgatgggggaagcctgtggtgaacccactgaggttgctggtgattaagtttatgtggacggtgaatctcaacagaatgaaaataaactgtgggtgtctattttgaagcagatgaaccagg

SEQ ID NO: 14964 - DNA, 122 bp, Homo sapiens
  misc_feature (61)..(62): /note="This region represents a CpG dinucleotide"
  misc_feature (61)..(61): /note="Nucleotide may be methylated to form 5-methylcytosine"
caaaacattgaacacccctgtcttacttccaggctctgtggtccagaatagagacatttccgagtttcatctaaaccactaaaactctaaaaataaagttttaaaagtagataaaggtagaa

SEQ ID NO: 14965 - DNA, 122 bp, Homo sapiens
  misc_feature (61)..(62): /note="This region represents a CpG dinucleotide"
  misc_feature (61)..(61): /note="Nucleotide may be methylated to form 5-methylcytosine"
cagatggctaccgcccaaggtgatgtatgactaccactacttgagagacacgatgctgaacgcttccaaattccagaccaagggaactatgaaaaataagtgttgtttcaagccactaaatt

SEQ ID NO: 14966 - DNA, 122 bp, Homo sapiens
  misc_feature (61)..(62): /note="This region represents a CpG dinucleotide"
  misc_feature (61)..(61): /note="Nucleotide may be methylated to form 5-methylcytosine"
gcaaagctgcaaaggaagttcccaaagagaaagaggaaggagacagcttgtactttcccacggctgaaacccagaactagacagacttacacagagttacacaaatggacctactccccagc

SEQ ID NO: 14967 - DNA, 122 bp, Homo sapiens
  misc_feature (61)..(62): /note="This region represents a CpG dinucleotide"
  misc_feature (61)..(61): /note="Nucleotide may be methylated to form 5-methylcytosine"
tttaaaataattataacacgtttcttataacgagaaccgaagcccgtggagacttggcggcgccgggagccctgctgctacacacgcctgggagagcccagcgagagcccagaaagcgggtt

SEQ ID NO: 14968 - DNA, 122 bp, Homo sapiens
  misc_feature (61)..(62): /note="This region represents a CpG dinucleotide"
  misc_feature (61)..(61): /note="Nucleotide may be methylated to form 5-methylcytosine"
tgaggctgtcgcggacgctggctgccaaggtggagctggtggacattcaacgcgagggggcgctgcgcttcatggtggccgacgacgcggccgcgggctccgggggctcggctcagtggcag

SEQ ID NO: 14969 - DNA, 122 bp, Homo sapiens
  misc_feature (61)..(62): /note="This region represents a CpG dinucleotide"
  misc_feature (61)..(61): /note="Nucleotide may be methylated to form 5-methylcytosine"
aaagcacatagtagaccctcaatacatggttgaaatcattgttaggaaaaagagaaggaacgttcctcactactggctggaaacagggtaaatcccatgtaggaaatggccacagcctatga

SEQ ID NO: 14970 - DNA, 122 bp, Homo sapiens
  misc_feature (61)..(62): /note="This region represents a CpG dinucleotide"
  misc_feature (61)..(61): /note="Nucleotide may be methylated to form 5-methylcytosine"
agcatgagctgagccgggggcagagcaggagcaccgctgtttgccctgggtccatggcaacgccagagcccagctcaacacagcagggcttttgttttcatttttcaactttttttgaggcc

SEQ ID NO: 14971 - DNA, 122 bp, Homo sapiens
  misc_feature (61)..(62): /note="This region represents a CpG dinucleotide"
  misc_feature (61)..(61): /note="Nucleotide may be methylated to form 5-methylcytosine"
agtccccaccccacacctactgaatctgaatctgcatgttgacaagatccaggtaattcacgagtgcattaaagtttgagaagcaccagtctaaaacatcgttgtagaaggtaaagaaattt

SEQ ID NO: 14972 - DNA, 122 bp, Homo sapiens
  misc_feature (61)..(62): /note="This region represents a CpG dinucleotide"
  misc_feature (61)..(61): /note="Nucleotide may be methylated to form 5-methylcytosine"
ctatagggaactttgacccctaagttcaaccacagtagtttattttacaaatggcgaaggcgaagggcagcctgagcacttgccccaaatcacaatgagaagggctagagacccagtttgtt

SEQ ID NO: 14973 - DNA, 122 bp, Homo sapiens
  misc_feature (61)..(62): /note="This region represents a CpG dinucleotide"
  misc_feature (61)..(61): /note="Nucleotide may be methylated to form 5-methylcytosine"
gtttattgaatgcctgctgagtgtcaatctctgaattgtacagtgagagggcagggtctgcggagatctgaaagatgaagaagagaattgagcctcctatccatgggactcagatgacaact

SEQ ID NO: 14974 - DNA, 122 bp, Homo sapiens
  misc_feature (61)..(62): /note="This region represents a CpG dinucleotide"
  misc_feature (61)..(61): /note="Nucleotide may be methylated to form 5-methylcytosine"
aaagaacaaagaccttcttttatcctatctcaatacctgtactgtgtgtgtgtgtgcgtgcgtgtatgtgcgcacatgggcgcaaatgcctaccattagtctcttacagtcaccagcccctc

SEQ ID NO: 14975 - DNA, 122 bp, Homo sapiens
  misc_feature (61)..(62): /note="This region represents a CpG dinucleotide"
  misc_feature (61)..(61): /note="Nucleotide may be methylated to form 5-methylcytosine"
atgttattttacttggatttgaactttatatgaatacaatccatcccgtctgtggtcttccgtaatctacttttcttcctagtaaatgtatgagattcagccatgttgacaaatatgccata

SEQ ID NO: 14976 - DNA, 122 bp, Homo sapiens
  misc_feature (61)..(62): /note="This region represents a CpG dinucleotide"
  misc_feature (61)..(61): /note="Nucleotide may be methylated to form 5-methylcytosine"
gtcactggtgaatcactgggagtaaaactaacacctatggagtaattgttcgttgctaggcgcctgtatgctcagatgtcatcacttttggtctgtgctccagccctgtgggatggttgtta

SEQ ID NO: 14977 - DNA, 122 bp, Homo sapiens
  misc_feature (61)..(62): /note="This region represents a CpG dinucleotide"
  misc_feature (61)..(61): /note="Nucleotide may be methylated to form 5-methylcytosine"
ctggtgaatggatacacaaaatgtggcctagtatatccacacaatggaatgttatctgaccgtaagaaggaatgctacttgttacaaggatgagccttgaaatatgctaagtaaaagaagct

SEQ ID NO: 14978 - DNA, 122 bp, Homo sapiens
  misc_feature (61)..(62): /note="This region represents a CpG dinucleotide"
  misc_feature (61)..(61): /note="Nucleotide may be methylated to form 5-methylcytosine"
ataaataacaaaaagctgtggaaccattcacttatctgtgcatttcctttaggtaaattacgtctcaataaagtgctggggagaaagcaatgaagcactgacatacgctacaccaaggatga

SEQ ID NO: 14979 - DNA, 122 bp, Homo sapiens
  misc_feature (61)..(62): /note="This region represents a CpG dinucleotide"
  misc_feature (61)..(61): /note="Nucleotide may be methylated to form 5-methylcytosine"
tgaccttgtgatctgcctgcctcggcctcccaaagtgctgggattacaggtgtgggccaccgcacctggccagaaatgagcaaatttcttagtgtcagtatcaggccacttaattaaatcac

SEQ ID NO: 14980 - DNA, 122 bp, Homo sapiens
  misc_feature (61)..(62): /note="This region represents a CpG dinucleotide"
  misc_feature (61)..(61): /note="Nucleotide may be methylated to form 5-methylcytosine"
gcattagcgctgagcagaaaagatacggacgcacagcagctcatggtagcagtccacgcacgtcgtcctgcttgatgacaccgctaagaattaatccatttgggaggagagcaaccaaatcc

SEQ ID NO: 14981 - DNA, 122 bp, Homo sapiens
  misc_feature (61)..(62): /note="This region represents a CpG dinucleotide"
  misc_feature (61)..(61): /note="Nucleotide may be methylated to form 5-methylcytosine"
atatcttgtatacatcactgtctttggtcataccaccctttctttaagggaaaataaaaccggttgaacagttccctaatacatacaacaatgattcagaaatgtttgtgtacataaacatc

SEQ ID NO: 14982 - DNA, 122 bp, Homo sapiens
  misc_feature (61)..(62): /note="This region represents a CpG dinucleotide"
  misc_feature (61)..(61): /note="Nucleotide may be methylated to form 5-methylcytosine"
caggaggtggggctgaatccactcagcttctcatgggatggctgtagctaatggattcgacgtggtaatagaaggctggacaaattttaaaaaatcaataaattatgggctgggcgtggtgg

SEQ ID NO: 14983 - DNA, 122 bp, Homo sapiens
  misc_feature (61)..(62): /note="This region represents a CpG dinucleotide"
  misc_feature (61)..(61): /note="Nucleotide may be methylated to form 5-methylcytosine"
tggttttcgtctacaacaaaagcacacatacacacacacacataggtatacacacacgcgcgcgtctgtcaccaggctctgtgacattctgtacagcttgataaggtccccaataagacata

SEQ ID NO: 14984 - DNA, 122 bp, Homo sapiens
  misc_feature (61)..(62): /note="This region represents a CpG dinucleotide"
  misc_feature (61)..(61): /note="Nucleotide may be methylated to form 5-methylcytosine"
gttgggaccaggtgtgccatctgtacagagcagatttttttatcatctcttaacccactccgtgaccacacaggccaactcttagtctgtgtttctttgtcctgcttatctggtagggaaag

SEQ ID NO: 14985 - DNA, 122 bp, Homo sapiens
  misc_feature (61)..(62): /note="This region represents a CpG dinucleotide"
  misc_feature (61)..(61): /note="Nucleotide may be methylated to form 5-methylcytosine"
gggctctggccgtctacgctttgttcattcctttcttcgggccgtgtggcttccttccagcgtaccctgctgtgaacttattaaaggctgtcacagtcaggctcggggctgagtctgtccca

SEQ ID NO: 14986 - DNA, 122 bp, Homo sapiens
  misc_feature (61)..(62): /note="This region represents a CpG dinucleotide"
  misc_feature (61)..(61): /note="Nucleotide may be methylated to form 5-methylcytosine"
actttgcagtgcctgatcagggcagaaaaaggaggcatgcacctgggggaggatcacatacgagtgaaacctgtccccgctgaagcactaggtttggagaaatctactgggcatttacacac

SEQ ID NO: 14987 - DNA, 122 bp, Homo sapiens
  misc_feature (61)..(62): /note="This region represents a CpG dinucleotide"
  misc_feature (61)..(61): /note="Nucleotide may be methylated to form 5-methylcytosine"
tgatcctacagacagaaatgtttccttggcagccttgagattcttgccctctctctgttacgtcagtggtggggaacctggggcagattcgcctccgtggcttctcctgcatgactgcgttg

SEQ ID NO: 14988 - DNA, 122 bp, Homo sapiens
  misc_feature (61)..(62): /note="This region represents a CpG dinucleotide"
  misc_feature (61)..(61): /note="Nucleotide may be methylated to form 5-methylcytosine"
tgtgaagtgagcgctggagctgatgctcgctctgcttcagggcggttttcctggtgtgttcgcagtgtgacaggaaaatcaccttgcctggaaatggtccatatcagttagtagattgttgt

SEQ ID NO: 14989 - DNA, 122 bp, Homo sapiens
  misc_feature (61)..(62): /note="This region represents a CpG dinucleotide"
  misc_feature (61)..(61): /note="Nucleotide may be methylated to form 5-methylcytosine"
ggcagagtctccattcacacagacctcccacgcctcgcctcagcagcttgccgttgtcggcgtgctgtggtgttagtgatgcctgcagatttcatcttcagaagagtgaacagaaacggcat

SEQ ID NO: 14990 - DNA, 122 bp, Homo sapiens
  misc_feature (61)..(62): /note="This region represents a CpG dinucleotide"
  misc_feature (61)..(61): /note="Nucleotide may be methylated to form 5-methylcytosine"
tagccgaatcacacttaacacacattgaatgtgcacacacctacttaagtgcgtattctgcgttatgcccatgggatgcaggaagaaggcacacactacttcctcacctccccttcaaaaca

SEQ ID NO: 14991 - DNA, 122 bp, Homo sapiens
  misc_feature (61)..(62): /note="This region represents a CpG dinucleotide"
  misc_feature (61)..(61): /note="Nucleotide may be methylated to form 5-methylcytosine"
tccggagaggccggcactgccccgacgggggcgggacctcagagcagcccactcagttctcggagtcagtttctcaccaaaacaaggctgggctaaaacacgctgagaggtcattgggaagg

SEQ ID NO: 14992 - DNA, 122 bp, Homo sapiens
  misc_feature (61)..(62): /note="This region represents a CpG dinucleotide"
  misc_feature (61)..(61): /note="Nucleotide may be methylated to form 5-methylcytosine"
gaagcagaattctggtgtcatagactaggttccggatcccgctctgtcactaattagttgcgtgatcttggacaggtaagttacttaaggtcttcaagttcagcttccttggttataaaaca

SEQ ID NO: 14993 - DNA, 122 bp, Homo sapiens
  misc_feature (61)..(62): /note="This region represents a CpG dinucleotide"
  misc_feature (61)..(61): /note="Nucleotide may be methylated to form 5-methylcytosine"
cgcaaccgttttccattaatgttaccatcttgtgactcgggtgacctgtgcgacttgggtcgtgaattctcaggtcggccttcccaatgcttgagaaggttgggggtggttaataagccccg

SEQ ID NO: 14994 - DNA, 122 bp, Homo sapiens
  misc_feature (61)..(62): /note="This region represents a CpG dinucleotide"
  misc_feature (61)..(61): /note="Nucleotide may be methylated to form 5-methylcytosine"
agccaatccctgccctgcatgcctcccctgggagaacaagtgtactcttctggtttgtaacgtagccacgcagccctttgccccacagcctggacaacattctttgatgataggagccaagc

SEQ ID NO: 14995 - DNA, 122 bp, Homo sapiens
  misc_feature (61)..(62): /note="This region represents a CpG dinucleotide"
  misc_feature (61)..(61): /note="Nucleotide may be methylated to form 5-methylcytosine"
aacttccaggtccttgcatattgacaaactcttcttgtatccatcacttgggtttcctatcgagttgtcttcttgggccaattatgtacatttcccatgtgtttttcttggcatacagagaa

SEQ ID NO: 14996 - DNA, 122 bp, Homo sapiens
  misc_feature (61)..(62): /note="This region represents a CpG dinucleotide"
  misc_feature (61)..(61): /note="Nucleotide may be methylated to form 5-methylcytosine"
gaggaccacaatttttccatctgtcagatgggcttgggagcctttgtcctggctggctgccggctggcctgggctgggactggcctgggaggtgaggggactgtggcgggaaggaggaagca

SEQ ID NO: 14997 - DNA, 122 bp, Homo sapiens
  misc_feature (61)..(62): /note="This region represents a CpG dinucleotide"
  misc_feature (61)..(61): /note="Nucleotide may be methylated to form 5-methylcytosine"
ggtgatccacccatcttggcctccaaaagtgctaggattacaggcgtgagccactgtgcccggcctcaaggaagactttcttaacaattcatcatatagtagaaaatgaaaacattccctag

SEQ ID NO: 14998 - DNA, 122 bp, Homo sapiens
  misc_feature (61)..(62): /note="This region represents a CpG dinucleotide"
  misc_feature (61)..(61): /note="Nucleotide may be methylated to form 5-methylcytosine"
cgttgcagctgtgtgagccacccacgcacactgcagacaagcttcctgacccagtgtccacggcagctgtaccactgtacacccccagagcaagctgggccaccagcagcatgccaagccat

SEQ ID NO: 14999 - DNA, 122 bp, Homo sapiens
  misc_feature (61)..(62): /note="This region represents a CpG dinucleotide"
  misc_feature (61)..(61): /note="Nucleotide may be methylated to form 5-methylcytosine"
aaaaaataataacaataataataatgactactttgtagggagctttttgagaaatgaatgcgggaacacataaaagtagttagtatagtgccaggcacactataagctctcaataaatgtga

SEQ ID NO: 15000 - DNA, 122 bp, Homo sapiens
  misc_feature (61)..(62): /note="This region represents a CpG dinucleotide"
  misc_feature (61)..(61): /note="Nucleotide may be methylated to form 5-methylcytosine"
aatgtcctggccttcacatccacttacctctcactctgactcacccagagcagctttcagcgctgcatgctctgttcatggcaagtgccctatacagatatatcattttttatcttttatgt

SEQ ID NO: 15001 - DNA, 122 bp, Homo sapiens
  misc_feature (61)..(62): /note="This region represents a CpG dinucleotide"
  misc_feature (61)..(61): /note="Nucleotide may be methylated to form 5-methylcytosine"
gcagtctcctggaggtttctctaagcctgaatgaatgaatgaatgaatgaataattgaaacgatagaatcaaaaatgtactttaggatatgtagttgaaaaccaccaacaatactgaagaag

SEQ ID NO: 15002 - DNA, 122 bp, Homo sapiens
  misc_feature (61)..(62): /note="This region represents a CpG dinucleotide"
  misc_feature (61)..(61): /note="Nucleotide may be methylated to form 5-methylcytosine"
gacagtggagagtcagcagcccaagctcagcactttgggcatgagtcagtcccccacaggcgtgtagacttcatagccctctgaccctcacctggtgctgtagaattccaggatgcagtctg

SEQ ID NO: 15003 - DNA, 122 bp, Homo sapiens
  misc_feature (61)..(62): /note="This region represents a CpG dinucleotide"
  misc_feature (61)..(61): /note="Nucleotide may be methylated to form 5-methylcytosine"
tcaggcctccctatttgatgagacacaacaatatggaaattaggccaattaatgtccctacgatggcctctaggtgttcaaatgacaggaagagtagcacatctttcactttaaatcaaaag

SEQ ID NO: 15004 - DNA, 122 bp, Homo sapiens
  misc_feature (61)..(62): /note="This region represents a CpG dinucleotide"
  misc_feature (61)..(61): /note="Nucleotide may be methylated to form 5-methylcytosine"
aacttaaaacccagaaaccatcccgaggtgagaagggttccagccaaaagtttccaactgcgctcggtgacaaataagatggacaggttatggccaccataattcatttggcaattcctcag

SEQ ID NO: 15005 - DNA, 122 bp, Homo sapiens
  misc_feature (61)..(62): /note="This region represents a CpG dinucleotide"
  misc_feature (61)..(61): /note="Nucleotide may be methylated to form 5-methylcytosine"
tcacatcatgtatcaaccagaagttcctcatatgcttgttgagaaatttttcttcctcagcgctccaggtttggctcagattttattaataaagaatctgcagtatctctgcatcctcagtg

SEQ ID NO: 15006 - DNA, 122 bp, Homo sapiens
  misc_feature (61)..(62): /note="This region represents a CpG dinucleotide"
  misc_feature (61)..(61): /note="Nucleotide may be methylated to form 5-methylcytosine"
aactcactttattcatccctgtgtattgtttttatctttttttctgtgcttacacatacacggatttttttcttttgtcatttgagaacagagattttttaaatgtatttcatacattcagg

SEQ ID NO: 15007 - DNA, 122 bp, Homo sapiens
  misc_feature (61)..(62): /note="This region represents a CpG dinucleotide"
  misc_feature (61)..(61): /note="Nucleotide may be methylated to form 5-methylcytosine"
agtactggctttgtgttgtaaagttggttttcatacagcttccagaaagctctctgtcgacgttggtggagctaaacgtcttcaagctttatctcatcttgtttctgtgcttctcttgtgcc

SEQ ID NO: 15008 - DNA, 122 bp, Homo sapiens
  misc_feature (61)..(62): /note="This region represents a CpG dinucleotide"
  misc_feature (61)..(61): /note="Nucleotide may be methylated to form 5-methylcytosine"
aaactcattcatctcctgactttattcttgtattcagttccttcactgatttctttctgccgcaattctttcactgatttccaaatatgggataattttaaagaagcaattggtcatgacaa

SEQ ID NO: 15009 - DNA, 122 bp, Homo sapiens
  misc_feature (61)..(62): /note="This region represents a CpG dinucleotide"
  misc_feature (61)..(61): /note="Nucleotide may be methylated to form 5-methylcytosine"
atggtcctgaggcagtttctggaaaacccattattgaagccataggctgtggtctaagtacgcatagccagtgggataatgttatattgcagagttatttgagtagttcaatttaaggaagg

SEQ ID NO: 15010 - DNA, 122 bp, Homo sapiens
  misc_feature (61)..(62): /note="This region represents a CpG dinucleotide"
  misc_feature (61)..(61): /note="Nucleotide may be methylated to form 5-methylcytosine"
aggtccaggatctgaccccactggctttcaccttgaatgagacagtcaaatattgagcctcggtttcttcattcataaaatggcaataatagtcgactgtctcgacattcttactttccact

SEQ ID NO: 15011 - DNA, 122 bp, Homo sapiens
  misc_feature (61)..(62): /note="This region represents a CpG dinucleotide"
  misc_feature (61)..(61): /note="Nucleotide may be methylated to form 5-methylcytosine"
tctgttctatttgcagaacctcactctcgcggaaggagcccagacatctggtgctgaacgcggggtttttcaatggcaggaaggtggaatcccttcgggcttttgatgtaggcagagtgcat

SEQ ID NO: 15012 - DNA, 122 bp, Homo sapiens
  misc_feature (61)..(62): /note="This region represents a CpG dinucleotide"
  misc_feature (61)..(61): /note="Nucleotide may be methylated to form 5-methylcytosine"
ctaatgcttaaagccacgcattacacgaaggtttaccaggcagagcaaataaatggtcatcggagacatgctttcaaacagagatctctgttcttggcatgaaggttaaggttagtgaaaaa

SEQ ID NO: 15013 - DNA, 122 bp, Homo sapiens
  misc_feature (61)..(62): /note="This region represents a CpG dinucleotide"
  misc_feature (61)..(61): /note="Nucleotide may be methylated to form 5-methylcytosine"
tttaaaatttatcaaaaaataaaaagctaaatgattcaggaattttaaatatttaagtttcgccaagcaaataatgtaatattgctgagtactgttcaaccaccttgccaattagaactgta

SEQ ID NO: 15014 - DNA, 122 bp, Homo sapiens
  misc_feature (61)..(62): /note="This region represents a CpG dinucleotide"
  misc_feature (61)..(61): /note="Nucleotide may be methylated to form 5-methylcytosine"
tttagcaatgtcagccttgtggctttaaggttattgtatggttgccataaattgtccctgcgtctctgaacttgacttagtctaaaagtttagagacctgatcttgtcatcttctttctgta

SEQ ID NO: 15015 - DNA, 122 bp, Homo sapiens
  misc_feature (61)..(62): /note="This region represents a CpG dinucleotide"
  misc_feature (61)..(61): /note="Nucleotide may be methylated to form 5-methylcytosine"
ggatcagactgaaaggacaggcatgctgatctccagcaggcaggggccaggagaaagtctcgtttgccaacacttgttactgaagcgcagaaaaagcagcaagtgacagtcacaaagtcttc

SEQ ID NO: 15016 - DNA, 122 bp, Homo sapiens
  misc_feature (61)..(62): /note="This region represents a CpG dinucleotide"
  misc_feature (61)..(61): /note="Nucleotide may be methylated to form 5-methylcytosine"
ctccctcttcctcctttccttctcttcacacttgggagtgtctgcctccttccgctagaacgaagcacccacaaggccagctcttgacccaaggcaggtgctcaaccagtgtggacagaaca

SEQ ID NO: 15017 - DNA, 122 bp, Homo sapiens
  misc_feature (61)..(62): /note="This region represents a CpG dinucleotide"
  misc_feature (61)..(61): /note="Nucleotide may be methylated to form 5-methylcytosine"
cactctgaattgcacccagccacgtgtacagtgcacatgaagtataagtggcttttaaagcgtagtacctctgctaacaaaggctctttgaactgaggttaggataggatgtgtgggtttgt

SEQ ID NO: 15018 - DNA, 122 bp, Homo sapiens
  misc_feature (61)..(62): /note="This region represents a CpG dinucleotide"
  misc_feature (61)..(61): /note="Nucleotide may be methylated to form 5-methylcytosine"
gtatacatctatcttattagtactgtccttctagaaaaccctaactaggatgggtgagtgcggggcgggcgtggggaaggaccgggctcccctcgcatatggttggagagaggtgaaacgcg

SEQ ID NO: 15019 - DNA, 122 bp, Homo sapiens
  misc_feature (61)..(62): /note="This region represents a CpG dinucleotide"
  misc_feature (61)..(61): /note="Nucleotide may be methylated to form 5-methylcytosine"
acagtgatgttcttggcaatagggacagacatgagataggacagctttaactaagatcatcgtcacaatgctatctgcatttgcagatttagagtggctttataacaaggatcaaaaaaact

SEQ ID NO: 15020 - DNA, 122 bp, Homo sapiens
  misc_feature (61)..(62): /note="This region represents a CpG dinucleotide"
  misc_feature (61)..(61): /note="Nucleotide may be methylated to form 5-methylcytosine"
cattgagaaatgcttccatttgagccagtctggctgcttgctactcaggattctcggttgcgtgagaagcaggaaagcagcagattttacccttgttgggaaagaggccctttacgtctttc

SEQ ID NO: 15021 - DNA, 122 bp, Homo sapiens
  misc_feature (61)..(62): /note="This region represents a CpG dinucleotide"
  misc_feature (61)..(61): /note="Nucleotide may be methylated to form 5-methylcytosine"
taacaatgattgaagtccaaaggtaattgtttaaaaaattgtcataagaattaggcagaacgggtagcctcatatacccaaggtggagtaaaagagagtagaaattatgaattatttttctt

SEQ ID NO: 15022 - DNA, 122 bp, Homo sapiens
  misc_feature (61)..(62): /note="This region represents a CpG dinucleotide"
  misc_feature (61)..(61): /note="Nucleotide may be methylated to form 5-methylcytosine"
agtcttcggcgtgggaccaggtctcgggtggacgcccacagccactcccagtcctgagcacgtgcccaggtctgctaagagttacaggtgcatctcagacatcagtccagggcctcgggcca

SEQ ID NO: 15023 - DNA, 122 bp, Homo sapiens
  misc_feature (61)..(62): /note="This region represents a CpG dinucleotide"
  misc_feature (61)..(61): /note="Nucleotide may be methylated to form 5-methylcytosine"
ggggtaacgaaaaatactataaatttggttgtaactttttttctgtctcttgcattcaggcggtcaccagaggaaattagtcagtgcctttaggctacacttagcttaacacatttcattaa

SEQ ID NO: 15024 - DNA, 122 bp, Homo sapiens
  misc_feature (61)..(62): /note="This region represents a CpG dinucleotide"
  misc_feature (61)..(61): /note="Nucleotide may be methylated to form 5-methylcytosine"
gttaattgacaaactacacaacccagcataatcctacctgatacccccaaagcagaatcacgtttgctactgtaaacagataaaggtttaggagatgggcaggtatgtccaatgtctcactt

SEQ ID NO: 15025 - DNA, 122 bp, Homo sapiens
  misc_feature (61)..(62): /note="This region represents a CpG dinucleotide"
  misc_feature (61)..(61): /note="Nucleotide may be methylated to form 5-methylcytosine"
gactcatatggggagagaaaactgtccaaatgtccagggccttacacaactctacattttcgatcttggcaaatcctaatgattcacacttggcttaaaaatataagcacatagaagatttc

SEQ ID NO: 15026 - DNA, 122 bp, Homo sapiens
  misc_feature (61)..(62): /note="This region represents a CpG dinucleotide"
  misc_feature (61)..(61): /note="Nucleotide may be methylated to form 5-methylcytosine"
ggagtgaagccccaggggacactgaggcacaccctgcacagagaactacagttgtagagacgttctttgtgttcatttttctttgatgcaatagatgatgaactccttgagagcagggatct

SEQ ID NO: 15027 - DNA, 122 bp, Homo sapiens
  misc_feature (61)..(62): /note="This region represents a CpG dinucleotide"
  misc_feature (61)..(61): /note="Nucleotide may be methylated to form 5-methylcytosine"
ataattttgccatgttgaataagtgttagaatagagaggtacaaaaagcaagggaagccccgagaaaagcttgatgaagtctgagttttgagctggtctaaaaaaatgagtaggagcaaatg

SEQ ID NO: 15028 - DNA, 122 bp, Homo sapiens
  misc_feature (61)..(62): /note="This region represents a CpG dinucleotide"
  misc_feature (61)..(61): /note="Nucleotide may be methylated to form 5-methylcytosine"
aaagcaagtgaacagaagaaattcaacatcttctatcaataaaatacacttatctactgacgtttaaatcaggattttatcatccaaaccccacttaagaaggtatagcacagatggcagga

SEQ ID NO: 15029 - DNA, 122 bp, Homo sapiens
  misc_feature (61)..(62): /note="This region represents a CpG dinucleotide"
  misc_feature (61)..(61): /note="Nucleotide may be methylated to form 5-methylcytosine"
ttttgtgtatattttttgatatggagtttcactctgtcacccatggatggaatgcagtgccgcaatcatagctcacagcagcttcaaactcctgggctcaagtgatcctcccatttcattct

SEQ ID NO: 15030 - DNA, 122 bp, Homo sapiens
  misc_feature (61)..(62): /note="This region represents a CpG dinucleotide"
  misc_feature (61)..(61): /note="Nucleotide may be methylated to form 5-methylcytosine"
ttgttttttttcttttgttacggacacccatcatgtatggctcctcatctgagccatcaccgctcccgaaacacatggggcggcagctgctgtgcctccttctcaattcttccaccccccca

SEQ ID NO: 15031 - DNA, 122 bp, Homo sapiens
  misc_feature (61)..(62): /note="This region represents a CpG dinucleotide"
  misc_feature (61)..(61): /note="Nucleotide may be methylated to form 5-methylcytosine"
cacataagctatataaatctctggagtatatacaggagatgtttcttaatttacattcttcgttacatgttggatgaggtaatctggcaaaattgcatttagagaccacatctgttatcctc

SEQ ID NO: 15032 - DNA, 122 bp, Homo sapiens
  misc_feature (61)..(62): /note="This region represents a CpG dinucleotide"
  misc_feature (61)..(61): /note="Nucleotide may be methylated to form 5-methylcytosine"
aggcaaaattcctgccttgtaaatacaatataagtaaatgtagctatcataaggataccacggcctattattggcaatgacaaatgagcaggaaaccaaagcccagttggagattaatgact

SEQ ID NO: 15033 - DNA, 122 bp, Homo sapiens
  misc_feature (61)..(62): /note="This region represents a CpG dinucleotide"
  misc_feature (61)..(61): /note="Nucleotide may be methylated to form 5-methylcytosine"
agggcagaggccaccgctaattagacatgacatcagcatttatactctgctgaccaattacgtcggaagaagtaaataaagctaatgaaactttcctttcatccaagctaggagctgcagac

SEQ ID NO: 15034 - DNA, 122 bp, Homo sapiens
  misc_feature (61)..(62): /note="This region represents a CpG dinucleotide"
  misc_feature (61)..(61): /note="Nucleotide may be methylated to form 5-methylcytosine"
gtttctagagtactactatgcttccatgctaattcaacccacgtatgttgacgacacatgcggatcctaaaatgccatgattcatctgaggctgccacagttgtgcagcttagggatgtacc

SEQ ID NO: 15035 - DNA, 122 bp, Homo sapiens
  misc_feature (61)..(62): /note="This region represents a CpG dinucleotide"
  misc_feature (61)..(61): /note="Nucleotide may be methylated to form 5-methylcytosine"
aaatttaaagtacacggattctcaacatatagttatcaaaaaaaagtgacggtgaaactacgggtccagtgccatgacatttataggcactcaaagccttgcctctacctctgcaaccccga

SEQ ID NO: 15036 - DNA, 122 bp, Homo sapiens
  misc_feature (61)..(62): /note="This region represents a CpG dinucleotide"
  misc_feature (61)..(61): /note="Nucleotide may be methylated to form 5-methylcytosine"
taaagccatcaggcccaaggtttggtggtgattgcttcatatttactgttagtccagcaacggggatggtacttttacagtctttggacagactagtgagtgtgacatttaaagtgttgatt

SEQ ID NO: 15037 - DNA, 122 bp, Homo sapiens
  misc_feature (61)..(62): /note="This region represents a CpG dinucleotide"
  misc_feature (61)..(61): /note="Nucleotide may be methylated to form 5-methylcytosine"
gaaacataactacccagatgaaacaatggaagagccataagtgcaatagaaatttagagacgaaggcatcagacttcctaaaaagtgacatttgagtcagtccttgaagattatttagttca

SEQ ID NO: 15038 - DNA, 122 bp, Homo sapiens
  misc_feature (61)..(62): /note="This region represents a CpG dinucleotide"
  misc_feature (61)..(61): /note="Nucleotide may be methylated to form 5-methylcytosine"
taatgggtaggtgcaggtagtagataagagtgtagccacataaaccacatgcttagtgaacggttttgttttgtgtgtatgtgagggattagcatctctgagtatattttgttttccctttt

SEQ ID NO: 15039 - DNA, 122 bp, Homo sapiens
  misc_feature (61)..(62): /note="This region represents a CpG dinucleotide"
  misc_feature (61)..(61): /note="Nucleotide may be methylated to form 5-methylcytosine"
tgcaaggagaaggaaccatgcatggtaagggtgacacagcaggatccttgggtgtgtccacgttctagaacctcaactgttgccacatctgtctgtccagacatcctggcagcagtaatgcc

SEQ ID NO: 15040 - DNA, 122 bp, Homo sapiens
  misc_feature (61)..(62): /note="This region represents a CpG dinucleotide"
  misc_feature (61)..(61): /note="Nucleotide may be methylated to form 5-methylcytosine"
ctcaaatgatctgcctgccttggcctcccaaagtgctgggattacaggcgtgagccaccacgcccggtgctgatggcatttggaaccaccctgtagttacatacacaagtgtttctgatccc

SEQ ID NO: 15041 - DNA, 122 bp, Homo sapiens
  misc_feature (61)..(62): /note="This region represents a CpG dinucleotide"
  misc_feature (61)..(61): /note="Nucleotide may be methylated to form 5-methylcytosine"
gaacaatttgggcatccataccgtttgatggagcaactttatccctaatttatagcgcaacgtgtgcaaaacaagcacatggatagaatagtcaatgtggcagcatctgtaagtcgaagatt

SEQ ID NO: 15042 - DNA, 122 bp, Homo sapiens
  misc_feature (61)..(62): /note="This region represents a CpG dinucleotide"
  misc_feature (61)..(61): /note="Nucleotide may be methylated to form 5-methylcytosine"
tcatactagaaacctctaagagaaacactaaggttggaaagatcatgggttttagtcagacggatctgcatttgaccctgatttgaccttttactggctatatgatcttggacagattattt

SEQ ID NO: 15043 - DNA, 122 bp, Homo sapiens
  misc_feature (61)..(62): /note="This region represents a CpG dinucleotide"
  misc_feature (61)..(61): /note="Nucleotide may be methylated to form 5-methylcytosine"
tatgattattgggccaaagtgtccaggttctcttgacagatccctctatgtctagcaacacgtggctatgagactaaagttttggaacacagaatctattggtgtggaaccaattcacttca

SEQ ID NO: 15044 - DNA, 122 bp, Homo sapiens
  misc_feature (61)..(62): /note="This region represents a CpG dinucleotide"
  misc_feature (61)..(61): /note="Nucleotide may be methylated to form 5-methylcytosine"
cagcaagattattttgtcagcaacatttggatcccattggtgatgagagacatgtgggcccggcaaggagacaattgtggtagtcaagacaggatgtgaataagacataaagaagcgtttca

SEQ ID NO: 15045 - DNA, 122 bp, Homo sapiens
  misc_feature (61)..(62): /note="This region represents a CpG dinucleotide"
  misc_feature (61)..(61): /note="Nucleotide may be methylated to form 5-methylcytosine"
ataccttgaagtatgtgtttagtagcctcaattctccattaattaaaagtgtgggctgggcgtgggggctcatgcctgtaatcccagcactttgggaggccgaggtgggcagatcacctgag

SEQ ID NO: 15046 - DNA, 122 bp, Homo sapiens
  misc_feature (61)..(62): /note="This region represents a CpG dinucleotide"
  misc_feature (61)..(61): /note="Nucleotide may be methylated to form 5-methylcytosine"
tgccaaaagcatataattcaacttctgaaaaatacgaatggtcttcatcactgcagacaccgccccagcattttgaatcatcaaggtagctacttgtattctgtttgcagtatgtagtttgc

SEQ ID NO: 15047 - DNA, 122 bp, Homo sapiens
  misc_feature (61)..(62): /note="This region represents a CpG dinucleotide"
  misc_feature (61)..(61): /note="Nucleotide may be methylated to form 5-methylcytosine"
agtgtcaactaaagcttcacaccaggaaacaggagccaactctgactccttcctggtgaacggtggcattaaataaccacagcacaaagagagatacgaagtgctcagcccttctttcgctg

SEQ ID NO: 15048 - DNA, 122 bp, Homo sapiens
  misc_feature (61)..(62): /note="This region represents a CpG dinucleotide"
  misc_feature (61)..(61): /note="Nucleotide may be methylated to form 5-methylcytosine"
gcagagtcagtcacagagaagagaatgcaggacagtaagcccagcgctcaaagccactgtcgccttgaggccactggtggatccaaatgaatgtgctcataaatgcactgcctgtctgatgg

SEQ ID NO: 15049 - DNA, 122 bp, Homo sapiens
  misc_feature (61)..(62): /note="This region represents a CpG dinucleotide"
  misc_feature (61)..(61): /note="Nucleotide may be methylated to form 5-methylcytosine"
aggtagggacaggggcttgtgcccaatgtggggccactctgcagagaaccacatgagctgcgcccatccaggatgctgccaggagcctgcatccagacaccctcagcggttgtgaaccagcc

SEQ ID NO: 15050 - DNA, 122 bp, Homo sapiens
  misc_feature (61)..(62): /note="This region represents a CpG dinucleotide"
  misc_feature (61)..(61): /note="Nucleotide may be methylated to form 5-methylcytosine"
ccgagcagcgggatctggggtcggcagttgctccatctccagctctttcaaggaattgagcgtggagtctggcaatttcaacagagtatatcttcttctatacctgaatgaaggattattct

SEQ ID NO: 15051 - DNA, 122 bp, Homo sapiens
  misc_feature (61)..(62): /note="This region represents a CpG dinucleotide"
  misc_feature (61)..(61): /note="Nucleotide may be methylated to form 5-methylcytosine"
ggacttcaggctaatggttttattagatttcctcccatgaccccataacacaggcacccacgtcaggcctagctccagctctgataactgcccctgcgaggcccgccccgcctgccccaact

SEQ ID NO: 15052 - DNA, 122 bp, Homo sapiens
  misc_feature (61)..(62): /note="This region represents a CpG dinucleotide"
  misc_feature (61)..(61): /note="Nucleotide may be methylated to form 5-methylcytosine"
tctgcattttacagatgagaagacagaggcaccaagcagtataactagcccaaggtcacacggctgatatgcaatggagccaggattagatttgggccatttgacctttactgcctggtaaa

SEQ ID NO: 15053 - DNA, 122 bp, Homo sapiens
  misc_feature (61)..(62): /note="This region represents a CpG dinucleotide"
  misc_feature (61)..(61): /note="Nucleotide may be methylated to form 5-methylcytosine"
caccatttgcaggtggaagattccagcattctctgcggtgtcctctgctcacttcttcctcgtattgtcccttctcctctcccactctgtttgtcctcaggaaggtatgggggcggaagggg

SEQ ID NO: 15054 - DNA, 122 bp, Homo sapiens
  misc_feature (61)..(62): /note="This region represents a CpG dinucleotide"
  misc_feature (61)..(61): /note="Nucleotide may be methylated to form 5-methylcytosine"
gactgagtttgcagtccctgatgttatgggctgaacgtttttgtccccccaaaattcatacgctgaagccctgactcacgatgtgctagtatttggaggcagggcctttggaggtgatgagg

SEQ ID NO: 15055 - DNA, 122 bp, Homo sapiens
  misc_feature (61)..(62): /note="This region represents a CpG dinucleotide"
  misc_feature (61)..(61): /note="Nucleotide may be methylated to form 5-methylcytosine"
tctgattcttgagacagagactcatgggtactatcgtctttgtcaagctcatcaaggatacggtcctaaaatcaaaagacggaaaacaggggtcataattatatgattaggaaaaaaaagaa

SEQ ID NO: 15056 - DNA, 122 bp, Homo sapiens
  misc_feature (61)..(62): /note="This region represents a CpG dinucleotide"
  misc_feature (61)..(61): /note="Nucleotide may be methylated to form 5-methylcytosine"
ttgactaatgaggctatgccctgccctctaggaaatactctactgttaggcaacacagaacgtacttgagctattggggaaattgtgcattatattttgctttgccatgtcaacatcaaaga

SEQ ID NO: 15057 - DNA, 122 bp, Homo sapiens
  misc_feature (61)..(62): /note="This region represents a CpG dinucleotide"
  misc_feature (61)..(61): /note="Nucleotide may be methylated to form 5-methylcytosine"
ggccagtgttctgtttacaaaactccagagtgtgacataccacatcagcattcatatctgcgctaagcctggagggaaacggtgcaaaacaaaggctattcagatctcttaggcattaggaa

SEQ ID NO: 15058 - DNA, 122 bp, Homo sapiens
  misc_feature (61)..(62): /note="This region represents a CpG dinucleotide"
  misc_feature (61)..(61): /note="Nucleotide may be methylated to form 5-methylcytosine"
tacaagggattagtgcctttataaaagaggccccagagagctcgctcactccttccaccacgtgagcacacagcaagaaggcaacatctgtgaaccaggaagcagaccctcaccagccacca

SEQ ID NO: 15059 - DNA, 122 bp, Homo sapiens
  misc_feature (61)..(62): /note="This region represents a CpG dinucleotide"
  misc_feature (61)..(61): /note="Nucleotide may be methylated to form 5-methylcytosine"
ctttgacagggcagtcatatatctgcccacatactgcagcaaacacatctgggacatgaccgtcagctcaaacaagaatatcagtgaaatattcctatccaaaatgccctgcaacaaattac

SEQ ID NO: 15060 - DNA, 122 bp, Homo sapiens
  misc_feature (61)..(62): /note="This region represents a CpG dinucleotide"
  misc_feature (61)..(61): /note="Nucleotide may be methylated to form 5-methylcytosine"
agaacccaaccagaaaaccacaggagtaaatgatgttgcaaagcccaggtcctgtcttcacggaaatcttaagtattgtggttaatgccaggcagagtctatgtaacgattttaaatggcct

SEQ ID NO: 15061 - DNA, 122 bp, Homo sapiens
  misc_feature (61)..(62): /note="This region represents a CpG dinucleotide"
  misc_feature (61)..(61): /note="Nucleotide may be methylated to form 5-methylcytosine"
cagtggaatgtcctcgggcattctgtagccttcaattttaaagagtgggataagggactgcgtcaccagataatgtgagtaaagtgcttttagatcaccagatgaaaagcattttataaaat

SEQ ID NO: 15062 - DNA, 122 bp, Homo sapiens
  misc_feature (61)..(62): /note="This region represents a CpG dinucleotide"
  misc_feature (61)..(61): /note="Nucleotide may be methylated to form 5-methylcytosine"
ctagatttcttggttaaagcaggtcttcgcattccaatgtccagggcaggtctttgatgacgtgataagcccagcctccaaagcagcagcagaagcaaagcctgactttatgtttagctttt

SEQ ID NO: 15063 - DNA, 122 bp, Homo sapiens
  misc_feature (61)..(62): /note="This region represents a CpG dinucleotide"
  misc_feature (61)..(61): /note="Nucleotide may be methylated to form 5-methylcytosine"
ctccccaatctttagatcgtcctcaatctccatagatttctgcctcttctcccatctatgcgcctcctctgctctccctgttaaattctctcttctctgttataaccccctggacccaatct

SEQ ID NO: 15064 - DNA, 122 bp, Homo sapiens
  misc_feature (61)..(62): /note="This region represents a CpG dinucleotide"
  misc_feature (61)..(61): /note="Nucleotide may be methylated to form 5-methylcytosine"
cttgctcgttccatgcagtggaggaggaagaggctgggcccctgctgtgtgggggcagcccgggaaggacatggtcaccagccttgggtcatcagtaattagtgagcgtcacgggtaaagag

SEQ ID NO: 15065 - DNA, 122 bp, Homo sapiens
  misc_feature (61)..(62): /note="This region represents a CpG dinucleotide"
  misc_feature (61)..(61): /note="Nucleotide may be methylated to form 5-methylcytosine"
ccctatccaattgtcacaaaggctagcccatggccagtcctgtgaggggctggtgctgggcgtggaagctcttcttgaccttcttacttgtggcatgactcgaaaagttgcgaacctttctg

SEQ ID NO: 15066 - DNA, 122 bp, Homo sapiens
  misc_feature (61)..(62): /note="This region represents a CpG dinucleotide"
  misc_feature (61)..(61): /note="Nucleotide may be methylated to form 5-methylcytosine"
aaatatccagggttcctagatgtgagggcagcccctttgttggctgatgacaacaaattacgtggcttacccctgacctatgtcatcacctgtcaatatgatctcttaagagatgatggact

SEQ ID NO: 15067 - DNA, 122 bp, Homo sapiens
  misc_feature (61)..(62): /note="This region represents a CpG dinucleotide"
  misc_feature (61)..(61): /note="Nucleotide may be methylated to form 5-methylcytosine"
caaaccatccacgagaaggacacaggtgggaagaaggaggcagtgagtcacgatttactacgaggcaggccagacacagtagctcaaacctataatcccagcatgttgggaggccgaggcgg

SEQ ID NO: 15068 - DNA, 122 bp, Homo sapiens
  misc_feature (61)..(62): /note="This region represents a CpG dinucleotide"
  misc_feature (61)..(61): /note="Nucleotide may be methylated to form 5-methylcytosine"
attacactttgaagcttatgcctctgactgccacatgaagcagaactgtgagtccatgagcgtggtactgggaagtaggcttgtaaaagctgggtggggccagctgaggaggctctgaaatg

SEQ ID NO: 15069 - DNA, 122 bp, Homo sapiens
  misc_feature (61)..(62): /note="This region represents a CpG dinucleotide"
  misc_feature (61)..(61): /note="Nucleotide may be methylated to form 5-methylcytosine"
agtgttggcatcacagcagattctttcattccctgattacatagcattattatagctctacgtgcatactctatgtgaacatggacagaattaaagttgctgtgggaacatcattaactctg

SEQ ID NO: 15070 - DNA, 122 bp, Homo sapiens
  misc_feature (61)..(62): /note="This region represents a CpG dinucleotide"
  misc_feature (61)..(61): /note="Nucleotide may be methylated to form 5-methylcytosine"
tcaccgggcagctggcaggcctctaccctgcatggggccccgtttcaggctaagtggggccggcctcccagctttatgtcctccttcagaggggaaggaggcagtgatgtcacagaggtctc

SEQ ID NO: 15071 - DNA, 122 bp, Homo sapiens
  misc_feature (61)..(62): /note="This region represents a CpG dinucleotide"
  misc_feature (61)..(61): /note="Nucleotide may be methylated to form 5-methylcytosine"
tcatcccagccccttctaaacctcagttgctccagggtacaaaacaggcatcaacccaatcgcaccgggctggcgctggtggaaggtttaaagagaaggtgaccattccagcggctcgtgag

SEQ ID NO: 15072 - DNA, 122 bp, Homo sapiens
  misc_feature (61)..(62): /note="This region represents a CpG dinucleotide"
  misc_feature (61)..(61): /note="Nucleotide may be methylated to form 5-methylcytosine"
gagagaaggagaaaaagaggcgtgactccttcatggatacacggttcctttagggtgatgcgattgtttggaaatagtggtaatggttgcacaacattgtgaaagcactcactgcctctgac

SEQ ID NO: 15073 - DNA, 122 bp, Homo sapiens
  misc_feature (61)..(62): /note="This region represents a CpG dinucleotide"
  misc_feature (61)..(61): /note="Nucleotide may be methylated to form 5-methylcytosine"
cgcttcagggctttgctcagctgcagctggtgacctccagagagggagtctctgatgtcccgctggggtggatgtcctgagaccgggaagggggaagagacccactgaaatcctatctccca

SEQ ID NO: 15074 - DNA, 122 bp, Homo sapiens
  misc_feature (61)..(62): /note="This region represents a CpG dinucleotide"
  misc_feature (61)..(61): /note="Nucleotide may be methylated to form 5-methylcytosine"
atattcctcaagaatataaaatgcctcatcaacatgagacaacagcaggaagcacccattcgtagtaatcctctgtatggaggaggctgttacataaccacaaaggcacaaagctgcagttt

SEQ ID NO: 15075 - DNA, 122 bp, Homo sapiens
  misc_feature (61)..(62): /note="This region represents a CpG dinucleotide"
  misc_feature (61)..(61): /note="Nucleotide may be methylated to form 5-methylcytosine"
ttaaaatgttttgcatagataaaacaataaaaaaaaacgtttttgttgagaaaatatttgcgagataaaatgttaatatcatgaatataagaacagtgcttgaaaagtgagggataaaacca

SEQ ID NO: 15076 - DNA, 122 bp, Homo sapiens
  misc_feature (61)..(62): /note="This region represents a CpG dinucleotide"
  misc_feature (61)..(61): /note="Nucleotide may be methylated to form 5-methylcytosine"
tgtttgttttgttaacaaagcaaatacccttgtggtttgattcttccattcctttgttgacgcatatcaaaatcagatggaaatgttctcataaaaacttcaaggacaaatgaaaaacgaga

SEQ ID NO: 15077 - DNA, 122 bp, Homo sapiens
  misc_feature (61)..(62): /note="This region represents a CpG dinucleotide"
  misc_feature (61)..(61): /note="Nucleotide may be methylated to form 5-methylcytosine"
tcgcattgcctgcatgcctgggatgcacggatctgtggtgggatttgccctgtctgtgtgcgaggttgtggagtggtcatgggtctgcgtttggtggtgtgcaactggtgtacaggaccaga

SEQ ID NO: 15078 - DNA, 122 bp, Homo sapiens
  misc_feature (61)..(62): /note="This region represents a CpG dinucleotide"
  misc_feature (61)..(61): /note="Nucleotide may be methylated to form 5-methylcytosine"
ctggtcttgaatgcccgccttggcctcccaaattgctgggattacagtcatgagccaccgcgcccggccagtggtaattttagtgtaaattaaatgagtttcaaaatacagagcctcgcctt

SEQ ID NO: 15079 - DNA, 122 bp, Homo sapiens
  misc_feature (61)..(62): /note="This region represents a CpG dinucleotide"
  misc_feature (61)..(61): /note="Nucleotide may be methylated to form 5-methylcytosine"
catgtggtcctaagaccaacctttgatttcccaccggtgcataattgctctctactggggcgcgggaggaggggggtgtcggcaatgtcaattaccctctagtggtgtttactcaagacttt

SEQ ID NO: 15080 - DNA, 122 bp, Homo sapiens
  misc_feature (61)..(62): /note="This region represents a CpG dinucleotide"
  misc_feature (61)..(61): /note="Nucleotide may be methylated to form 5-methylcytosine"
caaatggaaacctcattttgccaatataaacaagacctcctcttatcctatactttatagcggtattattgtgaaaatcacaagtcccaatagattgtcacaacaggaacaagcattatctg

SEQ ID NO: 15081 - DNA, 122 bp, Homo sapiens
  misc_feature (61)..(62): /note="This region represents a CpG dinucleotide"
  misc_feature (61)..(61): /note="Nucleotide may be methylated to form 5-methylcytosine"
taaatctccattttagtaaaatccgaattctctgcccttcaaaaagaaaaatgttatacacggagcagaaatcattatattactggctagagccttaatagtctggtttcagaaaaacagac

SEQ ID NO: 15082 - DNA, 122 bp, Homo sapiens
  misc_feature (61)..(62): /note="This region represents a CpG dinucleotide"
  misc_feature (61)..(61): /note="Nucleotide may be methylated to form 5-methylcytosine"
cataatgtagttatacagctggcattgagaagctttagtccatcaatgacagcattaaaacgacttttgttaaacccattgtcccacattatatgatgcagctgttgaagagttacagttgc

SEQ ID NO: 15083 - DNA, 122 bp, Homo sapiens
  misc_feature (61)..(62): /note="This region represents a CpG dinucleotide"
  misc_feature (61)..(61): /note="Nucleotide may be methylated to form 5-methylcytosine"
gggctcaacctggagcaggaagctgaggcctgagctctgggaaagagaggtggtgactcacggagagatattagagtccaaataggagcacatgccctgtacaccaggcatttgggtctcat

SEQ ID NO: 15084 - DNA, 122 bp, Homo sapiens
  misc_feature (61)..(62): /note="This region represents a CpG dinucleotide"
  misc_feature (61)..(61): /note="Nucleotide may be methylated to form 5-methylcytosine"
agcgacgcaaaggactcagcgctccacgacatgcctagcttcttcgggtcgtcatggagacgcccttgcacaccaacagtccttcactccttctccgggtcacgcccccgtgcttttccacg

SEQ ID NO: 15085 - DNA, 122 bp, Homo sapiens
  misc_feature (61)..(62): /note="This region represents a CpG dinucleotide"
  misc_feature (61)..(61): /note="Nucleotide may be methylated to form 5-methylcytosine"
tacatacaagtatctctatagttacatatgtgtagtatagacacatgtgtccaccccttccgttattctctttttttgagccagagtctctatcacccaggctggtgtgcagtggtagaagc

SEQ ID NO: 15086 - DNA, 122 bp, Homo sapiens
  misc_feature (61)..(62): /note="This region represents a CpG dinucleotide"
  misc_feature (61)..(61): /note="Nucleotide may be methylated to form 5-methylcytosine"
cacagggtcaggtacagggactggaaataaagataaacaagttatgggtaagtagaccaacgcagtaagagtagattaaatcaccccgaggaaaaatccgatagagcaaactcagtactgtg

SEQ ID NO: 15087 - DNA, 122 bp, Homo sapiens
  misc_feature (61)..(62): /note="This region represents a CpG dinucleotide"
  misc_feature (61)..(61): /note="Nucleotide may be methylated to form 5-methylcytosine"
ctagtgcaaggatcagatagcacctgcttggaagttcactgattaatgatttaacaagggcggtcacatgggacaactgctgcttttctctgccctcatttttcttactaacaggtctgaaa

SEQ ID NO: 15088 - DNA, 122 bp, Homo sapiens
  misc_feature (61)..(62): /note="This region represents a CpG dinucleotide"
  misc_feature (61)..(61): /note="Nucleotide may be methylated to form 5-methylcytosine"
ctgtccctggtggccttgcctgcctgccagcccataacgtcatccctgcaggaggagaggcgccaccttactaaggaggtggggatctcagacccgtgggtgggtcctgagccattccactt

SEQ ID NO: 15089 - DNA, 122 bp, Homo sapiens
  misc_feature (61)..(62): /note="This region represents a CpG dinucleotide"
  misc_feature (61)..(61): /note="Nucleotide may be methylated to form 5-methylcytosine"
agctggtgcaagcaaggccctgaagcttaagatttgttagcttcagggttgatctgcctacgcaggagaggtctgagtatgtgcaaaatcccaagtggtggttcaaggaagtacaaacaggt

SEQ ID NO: 15090 - DNA, 122 bp, Homo sapiens
  misc_feature (61)..(62): /note="This region represents a CpG dinucleotide"
  misc_feature (61)..(61): /note="Nucleotide may be methylated to form 5-methylcytosine"
aaagaaatcagacctaacggattccatcttgcttctaacttttgtttttgagactagtctcgctctgtcgcccagggtggagtgcagtggcgtgatctctgctcactgcaagctccgcctcc

SEQ ID NO: 15091 - DNA, 122 bp, Homo sapiens
  misc_feature (61)..(62): /note="This region represents a CpG dinucleotide"
  misc_feature (61)..(61): /note="Nucleotide may be methylated to form 5-methylcytosine"
cagatggtggtgtttgagtcatgtggcagaaatgctccaagatttctgcctcctggtgttcgcatctttgggtaattccttcccattgagtgtggccagaagctcctgtgacttgcttctaa

SEQ ID NO: 15092 - DNA, 122 bp, Homo sapiens
  misc_feature (61)..(62): /note="This region represents a CpG dinucleotide"
  misc_feature (61)..(61): /note="Nucleotide may be methylated to form 5-methylcytosine"
caaccagagccccagcagccagatgcattgggagggcaaccagctcccttgtctcccaaacgtaatcattccaatccaagctggggctgcctggaagtcaacactcaaggcacatttaataa

SEQ ID NO: 15093 - DNA, 122 bp, Homo sapiens
  misc_feature (61)..(62): /note="This region represents a CpG dinucleotide"
  misc_feature (61)..(61): /note="Nucleotide may be methylated to form 5-methylcytosine"
tggctttgatcctcatgtttgcttttcccttggtgcaatattgctgctgcatcttgactgcgttccagtcaggaggaagaaatgcagaacaccaaaactttcatttatatctcactggccaa

SEQ ID NO: 15094 - DNA, 122 bp, Homo sapiens
  misc_feature (61)..(62): /note="This region represents a CpG dinucleotide"
  misc_feature (61)..(61): /note="Nucleotide may be methylated to form 5-methylcytosine"
ctgcttgaggcaatgagatccgagagggggcagcaatcatgggtggagagaactacacagcgtaatcaagaatcaaatggggaggcaggattccaagactagagaccagaaaagtgcctgtc

SEQ ID NO: 15095 - DNA, 122 bp, Homo sapiens
  misc_feature (61)..(62): /note="This region represents a CpG dinucleotide"
  misc_feature (61)..(61): /note="Nucleotide may be methylated to form 5-methylcytosine"
attacagatcagtataaccacgtggttaaagcaaacaatctcggctattaatctggattccgtcactttccaattatgttaccttgagcaagttatttaacctctgtgagcctcaatttcca

SEQ ID NO: 15096 - DNA, 122 bp, Homo sapiens
  misc_feature (61)..(62): /note="This region represents a CpG dinucleotide"
  misc_feature (61)..(61): /note="Nucleotide may be methylated to form 5-methylcytosine"
ctcaacttccttttgcctttcaaatctctcatgagtgcatcagatttaatgaggcctactcgcatcatccagaactctaacttgagggagtctgagtttgtagctggagagcatttttaaca

SEQ ID NO: 15097 - DNA, 122 bp, Homo sapiens
  misc_feature (61)..(62): /note="This region represents a CpG dinucleotide"
  misc_feature (61)..(61): /note="Nucleotide may be methylated to form 5-methylcytosine"
ctcaagtgatctgcttgtcttgccctcccaaagtgttgggattacagtgttgggagccaccgcgccacgccccgattcctctctgacctgtgtcagcactggggctaacagaagctgagaca

SEQ ID NO: 15098 - DNA, 122 bp, Homo sapiens
  misc_feature (61)..(62): /note="This region represents a CpG dinucleotide"
  misc_feature (61)..(61): /note="Nucleotide may be methylated to form 5-methylcytosine"
gaaattatcattatggtgagtaatgaccacaaaagtgttaatgccctcagcaacgtacctcgcttacttcctcagtgactcattggaaatctaggtagccatattttcaattgctgtttctt

SEQ ID NO: 15099 - DNA, 122 bp, Homo sapiens
  misc_feature (61)..(62): /note="This region represents a CpG dinucleotide"
  misc_feature (61)..(61): /note="Nucleotide may be methylated to form 5-methylcytosine"
gtctttgtattctttggctttatagagacaatgaagccacaggagtttttccaagctgttcggaacatgtcccatttgctatccttccttctttgctgttcttatattcctcccccagcctc

SEQ ID NO: 15100 - DNA, 122 bp, Homo sapiens
  misc_feature (61)..(62): /note="This region represents a CpG dinucleotide"
  misc_feature (61)..(61): /note="Nucleotide may be methylated to form 5-methylcytosine"
cacccttttcttccttccacagacccacagcctagagccttctttcctccccactgtccccgccacacttcccctgcctggcagcccaggcccagacaccctgcgattcagtggtttcacat

SEQ ID NO: 15101 - DNA, 122 bp, Homo sapiens
  misc_feature (61)..(62): /note="This region represents a CpG dinucleotide"
  misc_feature (61)..(61): /note="Nucleotide may be methylated to form 5-methylcytosine"
ccctcataagctgagtcagcagatctaaattgatagccagacagcagaggctgaggacagcgcctccctcaaagccaaacaacaggggttcctggactgggccattctttagaggccccact

SEQ ID NO: 15102 - DNA, 122 bp, Homo sapiens
  misc_feature (61)..(62): /note="This region represents a CpG dinucleotide"
  misc_feature (61)..(61): /note="Nucleotide may be methylated to form 5-methylcytosine"
cacggaggggaggggccagcctcagagatcaagtgggcagagtcttcccaagggcgtggacgcacacagccatgcgcacagcagggaggcagacagggagcaaagaggccagagcaggcagc

SEQ ID NO: 15103 - DNA, 122 bp, Homo sapiens
  misc_feature (61)..(62): /note="This region represents a CpG dinucleotide"
  misc_feature (61)..(61): /note="Nucleotide may be methylated to form 5-methylcytosine"
cagacatggtggcacacgcctacagttctagctactcagaagtctgaggcaagaagatcacgtgagcccaggaattggtaattatgataagctatgatcacaccactgcactccagcctggg

SEQ ID NO: 15104 - DNA, 122 bp, Homo sapiens
  misc_feature (61)..(62): /note="This region represents a CpG dinucleotide"
  misc_feature (61)..(61): /note="Nucleotide may be methylated to form 5-methylcytosine"
gtcttggattgggcagtcaaatccttggccttgagctacagagtttgatccctgggtagtcgtcagggaggctgcctcttgggagaaacccaggtaggctgtccaaaaaccagaaaggtctt

SEQ ID NO: 15105 - DNA, 122 bp, Homo sapiens
  misc_feature (61)..(62): /note="This region represents a CpG dinucleotide"
  misc_feature (61)..(61): /note="Nucleotide may be methylated to form 5-methylcytosine"
aaccatcaccatgtttagaatatcatgtttcagaacattttcatcatcctaataatgtcccggtccctggaacctatgaatatgttaagttatatcgcaaagaggaattaagggtgttaatc

SEQ ID NO: 15106 - DNA, 122 bp, Homo sapiens
  misc_feature (61)..(62): /note="This region represents a CpG dinucleotide"
  misc_feature (61)..(61): /note="Nucleotide may be methylated to form 5-methylcytosine"
aagagggcactgtctatgaaccaggaagtggccctcaccagacacggcatctgccagcaccgtcctgtgaaatgaatagtggtttataagccacttggactgtggtggtttgccattgcagt

SEQ ID NO: 15107 - DNA, 122 bp, Homo sapiens
  misc_feature (61)..(62): /note="This region represents a CpG dinucleotide"
  misc_feature (61)..(61): /note="Nucleotide may be methylated to form 5-methylcytosine"
ttctagcagcatctatagaaaacagacaactatccagacctgagagttgagtgggaaacacgccctgagcaatgcagaagatgttgtcaggcagcccagatctacaacactccctccacccg

SEQ ID NO: 15108 - DNA, 122 bp, Homo sapiens
  misc_feature (61)..(62): /note="This region represents a CpG dinucleotide"
  misc_feature (61)..(61): /note="Nucleotide may be methylated to form 5-methylcytosine"
atttttctctgggatgtgtcagctccatgaagaaattgctgccctacagacactgatccacgactgtcagttcagatatttcattctggctgagaggcagtgaaagaaatgaccaccgagga

SEQ ID NO: 15109 - DNA, 122 bp, Homo sapiens
  misc_feature (61)..(62): /note="This region represents a CpG dinucleotide"
  misc_feature (61)..(61): /note="Nucleotide may be methylated to form 5-methylcytosine"
gggccttctggggccttctggggcatgggagctggggccgcctgagacaaacatccgtgacgctgggctgaccccacagaacggtgcgggcctcgctcttggagtcagccctgctgccagcc

SEQ ID NO: 15110 - DNA, 122 bp, Homo sapiens
  misc_feature (61)..(62): /note="This region represents a CpG dinucleotide"
  misc_feature (61)..(61): /note="Nucleotide may be methylated to form 5-methylcytosine"
aggaccttataatccaataggagagattaaactcacagcaacaaagagtccagataagtgcggttgttgccacagtgagtcagcatcagctctagccttaattctcagatcagagcatgggg

SEQ ID NO: 15111 - DNA, 122 bp, Homo sapiens
  misc_feature (61)..(62): /note="This region represents a CpG dinucleotide"
  misc_feature (61)..(61): /note="Nucleotide may be methylated to form 5-methylcytosine"
gcagtaaattgtatttgtcccctagattcgtgcctgcatttgcaatcctttttgctaatacgcataaattttatagcctgtctttgcgtgaaaaggcttcacaagttaaggattattagatg

SEQ ID NO: 15112 - DNA, 122 bp, Homo sapiens
  misc_feature (61)..(62): /note="This region represents a CpG dinucleotide"
  misc_feature (61)..(61): /note="Nucleotide may be methylated to form 5-methylcytosine"
ctccttcctcgtcttgtttgttccagaagcacacatgcaggcttgtacatgagtaaataacgtcctgctcagggttggtgtacaaatgattccatcacccaagttgtgagcacagtacctga

SEQ ID NO: 15113 - DNA, 122 bp, Homo sapiens
  misc_feature (61)..(62): /note="This region represents a CpG dinucleotide"
  misc_feature (61)..(61): /note="Nucleotide may be methylated to form 5-methylcytosine"
ctccacatccagcgttgtgccttttctctataaggaacagcatctctgccttcctgttcacggtgaccttcgcttggtgtcctcctggcctcagcaacctgacaattctgtcgtgtcccggt

SEQ ID NO: 15114 - DNA, 122 bp, Homo sapiens
  misc_feature (61)..(62): /note="This region represents a CpG dinucleotide"
  misc_feature (61)..(61): /note="Nucleotide may be methylated to form 5-methylcytosine"
tcttggagatgtgttctctggaggctccgggtgacgatgcttcctgccccttctggttcccggcggctggacgccccagggtgggtggatcactctgtctccgtgttcacgcagccttgttc

SEQ ID NO: 15115 - DNA, 122 bp, Homo sapiens
  misc_feature (61)..(62): /note="This region represents a CpG dinucleotide"
  misc_feature (61)..(61): /note="Nucleotide may be methylated to form 5-methylcytosine"
acgtaacttaaaaagttgctggctccttcagatgtaagccaaaaatacagttctagtctgcgtcagcccacaaaggatgaacaaaggttggcaagtgctgctcttaaaatgcacacatcttt

SEQ ID NO: 15116 - DNA, 122 bp, Homo sapiens
  misc_feature (61)..(62): /note="This region represents a CpG dinucleotide"
  misc_feature (61)..(61): /note="Nucleotide may be methylated to form 5-methylcytosine"
atcagtagctgagggttggttggagccggctggaaagcagaggctttcagatggctgactcgttacaaagctgcaaacttcaaagcccagtttagaaggtcctgttctcgtatggcagagta

SEQ ID NO: 15117 - DNA, 122 bp, Homo sapiens
  misc_feature (61)..(62): /note="This region represents a CpG dinucleotide"
  misc_feature (61)..(61): /note="Nucleotide may be methylated to form 5-methylcytosine"
caaaacagaggcaatgggaagcaaatttctctcttttttgtgcaacatcctatgaacccacggttctcacaggcccaggatattgctgcagttggcagcctggtgtattttgaacagcacag

SEQ ID NO: 15118 - DNA, 122 bp, Homo sapiens
  misc_feature (61)..(62): /note="This region represents a CpG dinucleotide"
  misc_feature (61)..(61): /note="Nucleotide may be methylated to form 5-methylcytosine"
gaggcgtggacttggggaagcctagcagcgcctgaataaaagggcgccggcgcgctgtgccgcgctgagccgcgctgaaaagccgagctgcctcgctcccggcccgggaaagggcatggccc

SEQ ID NO: 15119 - DNA, 122 bp, Homo sapiens
  misc_feature (61)..(62): /note="This region represents a CpG dinucleotide"
  misc_feature (61)..(61): /note="Nucleotide may be methylated to form 5-methylcytosine"
ccagcactatagctgtcattgggggaacttgttagaaatgcaaattttgggtcctctcctcggacctactgcatcagagactgtggggtggggcccagcaatctgttttaacagggtttcca

SEQ ID NO: 15120 - DNA, 122 bp, Homo sapiens
  misc_feature (61)..(62): /note="This region represents a CpG dinucleotide"
  misc_feature (61)..(61): /note="Nucleotide may be methylated to form 5-methylcytosine"
aggtcctgtcatggtcacctgtggcttgggccaattctcacttcccctgaagggcagctgcgtgtagggagcgggggctgcccaaagtttcactctgactggaggtaaacttaacatcattt

SEQ ID NO: 15121 - DNA, 122 bp, Homo sapiens
  misc_feature (61)..(62): /note="This region represents a CpG dinucleotide"
  misc_feature (61)..(61): /note="Nucleotide may be methylated to form 5-methylcytosine"
cattccctaggccctttctgctgctgccgcaataatttctggtaattcttgtacatcagtcgttttgaaggggacccacctttagggaactgatgtccctggccctctcagcaatcactgac

SEQ ID NO: 15122 - DNA, 122 bp, Homo sapiens
  misc_feature (61)..(62): /note="This region represents a CpG dinucleotide"
  misc_feature (61)..(61): /note="Nucleotide may be methylated to form 5-methylcytosine"
aaagaaaaaaaaaagaaaaactacacacacacagaaaaaaccagaaaaactacatcaacccgaaaagtggagcaatccactgctgaccgccctgggtagtcttgtaaacaaggtcaattgtt

SEQ ID NO: 15123 - DNA, 122 bp, Homo sapiens
  misc_feature (61)..(62): /note="This region represents a CpG dinucleotide"
  misc_feature (61)..(61): /note="Nucleotide may be methylated to form 5-methylcytosine"
tcctgcttggtgagctctctgcagtcatctggcaaggttggccacacaccagaaaggcaacggcaactattcttggcatcaggacccatcacaaaacacagagccctgagtgttcttcattt

SEQ ID NO: 15124 - DNA, 122 bp, Homo sapiens
  misc_feature (61)..(62): /note="This region represents a CpG dinucleotide"
  misc_feature (61)..(61): /note="Nucleotide may be methylated to form 5-methylcytosine"
tctgggtgtttccaggacaagaggctgcagccactggctgagtccaggcagaagtggttccgcagggctggaggctggcaccaagccttgtccagcgagggggtgtggagtaatcttactgc

SEQ ID NO: 15125 - DNA, 122 bp, Homo sapiens
  misc_feature (61)..(62): /note="This region represents a CpG dinucleotide"
  misc_feature (61)..(61): /note="Nucleotide may be methylated to form 5-methylcytosine"
ggcacattttgaaattcctatgactaaactccctaaaaataggagcaatcaggccgggtgcggtgactcatacctgtaaccccagcactctgggaggccgagatgggtggaccacctgaggt

SEQ ID NO: 15126 - DNA, 122 bp, Homo sapiens
  misc_feature (61)..(62): /note="This region represents a CpG dinucleotide"
  misc_feature (61)..(61): /note="Nucleotide may be methylated to form 5-methylcytosine"
agctgcatctccttcctaatcctctgggtgccttggaatagaagctcagaaggaagaaaacgacattttcaactttcaggaactagctctgtcgccctctgcacagctcgggagacagcact

SEQ ID NO: 15127 - DNA, 122 bp, Homo sapiens
  misc_feature (61)..(62): /note="This region represents a CpG dinucleotide"
  misc_feature (61)..(61): /note="Nucleotide may be methylated to form 5-methylcytosine"
ttctaattgaagagctctgccaaatttgcttctccttgctactttagctattttctgttccgcgggactctgtcaaatgtaaacaaagggtaggtgaaggagcatgattaatcgcaaagctt

SEQ ID NO: 15128 - DNA, 122 bp, Homo sapiens
  misc_feature (61)..(62): /note="This region represents a CpG dinucleotide"
  misc_feature (61)..(61): /note="Nucleotide may be methylated to form 5-methylcytosine"
agacagtatcagatccagcctttctgccccacccctttttggaggtaccgctcttttctacgctataaatgactgaccagttgggactgaacttggctgggacaatctctgttttcactccc

SEQ ID NO: 15129 - DNA, 122 bp, Homo sapiens
  misc_feature (61)..(62): /note="This region represents a CpG dinucleotide"
  misc_feature (61)..(61): /note="Nucleotide may be methylated to form 5-methylcytosine"
atatagtgattggccagaaaacagtaaggtaaaaagccattgtcctaagtgtttgaaaggcgaggacagagtatttagtttgagtgcattgtctccagccagagtagtgagtaaatacaaga

SEQ ID NO: 15130 - DNA, 122 bp, Homo sapiens
  misc_feature (61)..(62): /note="This region represents a CpG dinucleotide"
  misc_feature (61)..(61): /note="Nucleotide may be methylated to form 5-methylcytosine"
ccaggtgggctttgtagaacttaagaggctctctggggctcggcctcttggaaacagcagcgataagccctgcacagatggagcagcctccagacagcagccgcctgggaggatgaaaattg

SEQ ID NO: 15131 - DNA, 122 bp, Homo sapiens
  misc_feature (61)..(62): /note="This region represents a CpG dinucleotide"
  misc_feature (61)..(61): /note="Nucleotide may be methylated to form 5-methylcytosine"
gggaaaaacatctcacgtgtttcaagtggtgctttgactccaacccacataggtcaaaaacgttaattagattaaattaaggtaactcatttccttggtacatcatgaaagacaggctaatg

SEQ ID NO: 15132 - DNA, 122 bp, Homo sapiens
  misc_feature (61)..(62): /note="This region represents a CpG dinucleotide"
  misc_feature (61)..(61): /note="Nucleotide may be methylated to form 5-methylcytosine"
ctcccgcagccggcctcctcactgctcttgcctccgggcatgggaacgatgccgtctgctcgtctgcctgagacgctttctactccactccgagagtaggaggtcagccggggccaaatgac

SEQ ID NO: 15133 - DNA, 122 bp, Homo sapiens
  misc_feature (61)..(62): /note="This region represents a CpG dinucleotide"
  misc_feature (61)..(61): /note="Nucleotide may be methylated to form 5-methylcytosine"
tgcaatagactgggagagggctgggcgggtgagcacacaggcgtgacctctagtgagcttcgacaccccagcctctgcgtcactctgagaattacagctttgtagcttcgtatcccttttca

SEQ ID NO: 15134 - DNA, 122 bp, Homo sapiens
  misc_feature (61)..(62): /note="This region represents a CpG dinucleotide"
  misc_feature (61)..(61): /note="Nucleotide may be methylated to form 5-methylcytosine"
aaatgctttacacatattaacttaatcctcccagcaattcttgaggatatttactattaccgtcattcccatttcacaggtgaagaaggggactaagttaataagttgcccctgtcatgtaa

SEQ ID NO: 15135 - DNA, 122 bp, Homo sapiens
  misc_feature (61)..(62): /note="This region represents a CpG dinucleotide"
  misc_feature (61)..(61): /note="Nucleotide may be methylated to form 5-methylcytosine"
actcagacctacttagtctgggtggggctttgacacaagtgtaagcttctggtgagcgagcgtcaggtgcagccaacgctagaaatttctggcttttgagctctaagaccttgaacaagcct

SEQ ID NO: 15136 - DNA, 122 bp, Homo sapiens
  misc_feature (61)..(62): /note="This region represents a CpG dinucleotide"
  misc_feature (61)..(61): /note="Nucleotide may be methylated to form 5-methylcytosine"
tctagtccatcactcaagcaattcagagtatgtaccttcaaaatgataaataagcctctacgtccacctatcctacaaaataagcccttgtaaaagaaatatcaagcaactaaaagagaagg

SEQ ID NO: 15137 - DNA, 122 bp, Homo sapiens
  misc_feature (61)..(62): /note="This region represents a CpG dinucleotide"
  misc_feature (61)..(61): /note="Nucleotide may be methylated to form 5-methylcytosine"
caccagaactaaagctacatcagtctgtgaaaacagaggatcccctcaaccacactgctgcgataagtcaccatccccagccaagtaagtgacagagcatgactcaggctactctctcgata

SEQ ID NO: 15138 - DNA, 122 bp, Homo sapiens
  misc_feature (61)..(62): /note="This region represents a CpG dinucleotide"
  misc_feature (61)..(61): /note="Nucleotide may be methylated to form 5-methylcytosine"
ttgataataagtctctacttggttaatgttcactgatcagtgagcagtctggccataggccgtactatatccagataatatcgagatgagatggatttttaaaatctaaagtaaaaaagtaa

SEQ ID NO: 15139 - DNA, 122 bp, Homo sapiens
  misc_feature (61)..(62): /note="This region represents a CpG dinucleotide"
  misc_feature (61)..(61): /note="Nucleotide may be methylated to form 5-methylcytosine"
caagtgataccatgttcccataattttccaacatcacatccttatagagatgcctttgagcgtaggtcagacactgccactccctgttagtgaagttcacagctacatcctcaaatgtcact

SEQ ID NO: 15140 - DNA, 122 bp, Homo sapiens
  misc_feature (61)..(62): /note="This region represents a CpG dinucleotide"
  misc_feature (61)..(61): /note="Nucleotide may be methylated to form 5-methylcytosine"
cattaggcgggtcattttaatccttgaaaactgagtttacttcctacctaagcttccatccgcttaataccaaggtgatcaagtctgtgtgctaaatacaggaaaagccttaataggagacc

SEQ ID NO: 15141 - DNA, 122 bp, Homo sapiens
  misc_feature (61)..(62): /note="This region represents a CpG dinucleotide"
  misc_feature (61)..(61): /note="Nucleotide may be methylated to form 5-methylcytosine"
aagggccaggacagcaccttctttctcttcttaacttctacagccaagaaaacaaggcaacgagaaaaattagactacagtgttaagaagcaaagatccaggtaagaaaatgggtatcgttg

SEQ ID NO: 15142 - DNA, 122 bp, Homo sapiens
  misc_feature (61)..(62): /note="This region represents a CpG dinucleotide"
  misc_feature (61)..(61): /note="Nucleotide may be methylated to form 5-methylcytosine"
ggcgctcagaccacaattgtgggagccgccatcttgagaccgtcccgcttccccgcccagcgccttagtgcagccgccgctcccgaaacagcctcgacacacctaacgaatggaggcgggcc

SEQ ID NO: 15143 - DNA, 122 bp, Homo sapiens
  misc_feature (61)..(62): /note="This region represents a CpG dinucleotide"
  misc_feature (61)..(61): /note="Nucleotide may be methylated to form 5-methylcytosine"
aatttgatggggagttaggaaatccccatattgccaaggtggcagaggtggggaactgaacgtagaaacaacacctaaactgcattagtgggaataggagagattagagaagaaccttgttt

SEQ ID NO: 15144 - DNA, 122 bp, Homo sapiens
  misc_feature (61)..(62): /note="This region represents a CpG dinucleotide"
  misc_feature (61)..(61): /note="Nucleotide may be methylated to form 5-methylcytosine"
cttctttcaggaaggcttctcagggccccaagctggatcagggcccctcctggcattctccgagcttgcctccaccacagcatttatcagaataaggagtcaaaggcatcagctctgcctga

SEQ ID NO: 15145 - DNA, 122 bp, Homo sapiens
  misc_feature (61)..(62): /note="This region represents a CpG dinucleotide"
  misc_feature (61)..(61): /note="Nucleotide may be methylated to form 5-methylcytosine"
gtcagccactgaccaagacgagggcatcaactcagaaattacttattccttctacagaaccgggcaaatctttagtctgaattcaaagagcggagaaattaccactcaaaagaaactggatt

SEQ ID NO: 15146 - DNA, 122 bp, Homo sapiens
  misc_feature (61)..(62): /note="This region represents a CpG dinucleotide"
  misc_feature (61)..(61): /note="Nucleotide may be methylated to form 5-methylcytosine"
ccgagtcttggtggttcacggcagcagggttctgtctggttcatgctccgtttgtggctgcgtggctggtgccctccactacatccgctcactccagggcctaggctgtgggagcagctatt

SEQ ID NO: 15147 - DNA, 122 bp, Homo sapiens
  misc_feature (61)..(62): /note="This region represents a CpG dinucleotide"
  misc_feature (61)..(61): /note="Nucleotide may be methylated to form 5-methylcytosine"
tgatgaggggcattaatagctcctaatgacaccatctgagcctggcctccttccttctctcgctgctcactccttcctctttccctccatcccttgaagacacatgatcccacagacagaca

SEQ ID NO: 15148 - DNA, 122 bp, Homo sapiens
  misc_feature (61)..(62): /note="This region represents a CpG dinucleotide"
  misc_feature (61)..(61): /note="Nucleotide may be methylated to form 5-methylcytosine"
tcgattttccaaaccaaagtggatgttgtgcaatgacaagggtttcctgggaaagttctgcggacaccccctccactgttctccagcttttctctagagttctgagtgtattttcctgttgt

SEQ ID NO: 15149 - DNA, 122 bp, Homo sapiens
  misc_feature (61)..(62): /note="This region represents a CpG dinucleotide"
  misc_feature (61)..(61): /note="Nucleotide may be methylated to form 5-methylcytosine"
taggggtatctatccagattattcaaatgagggactggttcaccaggtgcatactccctgcgaaatgctgctcatgatgctccaccaagaggccccatagggaagtgattaaaaatgtggat

SEQ ID NO: 15150 - DNA, 122 bp, Homo sapiens
  misc_feature (61)..(62): /note="This region represents a CpG dinucleotide"
  misc_feature (61)..(61): /note="Nucleotide may be methylated to form 5-methylcytosine"
catccaatacattgctaaggactgacaagcagggttgctcatcaggacactgaagcaacgcgtcatgaccagtgtgagtgatggggtctctgcagctgagccacatgactcaggtcattgag

SEQ ID NO: 15151 - DNA, 122 bp, Homo sapiens
  misc_feature (61)..(62): /note="This region represents a CpG dinucleotide"
  misc_feature (61)..(61): /note="Nucleotide may be methylated to form 5-methylcytosine"
agtgtcttctgtgtctgaattaccacagtcatgtagtggctcagtgagaactccttgtcccggtcattacaaaaataaaacagaaatctctctgttgctaggttaggaattagatcacaatt

SEQ ID NO: 15152 - DNA, 122 bp, Homo sapiens
  misc_feature (61)..(62): /note="This region represents a CpG dinucleotide"
  misc_feature (61)..(61): /note="Nucleotide may be methylated to form 5-methylcytosine"
aagagaccagagacagccactcctgacacatgggcagagttcacagtttaacacattgcacgaggaagtcagctgactgggttgctttttcaaacaggacttaaagccagcccagaaactct

SEQ ID NO: 15153 - DNA, 122 bp, Homo sapiens
  misc_feature (61)..(62): /note="This region represents a CpG dinucleotide"
  misc_feature (61)..(61): /note="Nucleotide may be methylated to form 5-methylcytosine"
ctgttgcccaggctggagtacagtccccatctcggattctgggatcactgcaatctccgccgcccgggttcaagcgattctccatgttggctggtctcgaactcctgacctcaggttatccg

SEQ ID NO: 15154 - DNA, 122 bp, Homo sapiens
  misc_feature (61)..(62): /note="This region represents a CpG dinucleotide"
  misc_feature (61)..(61): /note="Nucleotide may be methylated to form 5-methylcytosine"
ttccagggagtcctcagaacgtatgtttaaaaagccagttgtacattaaactccgatagacgtgcacagagaaatttgggcaaagtcctacttatgtaataatgctggtagcagtgactcag

SEQ ID NO: 15155 - DNA, 122 bp, Homo sapiens
  misc_feature (61)..(62): /note="This region represents a CpG dinucleotide"
  misc_feature (61)..(61): /note="Nucleotide may be methylated to form 5-methylcytosine"
gtcagtcaggaggaggaacttgtagaaaagccaagttctgatggtgatggctcagggcgacgtcagaaaagcccaaaagcaaatcagcagaggccgggcttggagcacatctcatgctctta

SEQ ID NO: 15156 - DNA, 122 bp, Homo sapiens
  misc_feature (61)..(62): /note="This region represents a CpG dinucleotide"
  misc_feature (61)..(61): /note="Nucleotide may be methylated to form 5-methylcytosine"
atgaaaattaatgccaattgattatcagaaatctcctttttttggaatttaagggaaagacgtatgaaataatgttaaatggaaagagtggaccacactattggatatcttctatgtataac

SEQ ID NO: 15157 - DNA, 122 bp, Homo sapiens
  misc_feature (61)..(62): /note="This region represents a CpG dinucleotide"
  misc_feature (61)..(61): /note="Nucleotide may be methylated to form 5-methylcytosine"
ttcagggttccggcctgacacagggttccagagatgcagctgaaacatgtgctgagtcagcgtcagcatccatgtgcataacgacatttccccatctgctctgtggttgctgttgccatatg

SEQ ID NO: 15158 - DNA, 122 bp, Homo sapiens
  misc_feature (61)..(62): /note="This region represents a CpG dinucleotide"
  misc_feature (61)..(61): /note="Nucleotide may be methylated to form 5-methylcytosine"
ttcttctttttttgaaagtatgagatacattccagatgcattccagataattattacttacgtgattggcatttttaaagtagcacataactctgggatatactttaaagtagcagtgaaag

SEQ ID NO: 15159 - DNA, 122 bp, Homo sapiens
  misc_feature (61)..(62): /note="This region represents a CpG dinucleotide"
  misc_feature (61)..(61): /note="Nucleotide may be methylated to form 5-methylcytosine"
acagctagttgtgagttcctttaaaagtcagtacaggggcaggcgacctttggggagtggcgtctgtgagtcagtcatttggaagttggaacatattccccatggaaacaatatcccacata

SEQ ID NO: 15160 - DNA, 122 bp, Homo sapiens
  misc_feature (61)..(62): /note="This region represents a CpG dinucleotide"
  misc_feature (61)..(61): /note="Nucleotide may be methylated to form 5-methylcytosine"
caggtttcagaaatgtttgctgcatgcgctcattgtctgaatcattgtttcaggttgctccggttgctaagaagactatgaacaagtcagagaacctgctgtttgctggttcatcattagca

SEQ ID NO: 15161 - DNA, 122 bp, Homo sapiens
  misc_feature (61)..(62): /note="This region represents a CpG dinucleotide"
  misc_feature (61)..(61): /note="Nucleotide may be methylated to form 5-methylcytosine"
gctctcactcacaggtagatgttttttattgccccattcacaattcagccacctgctgtccgcatgcatgtgcttgccatgtttagatattgggtgtttttccagtttacttaataagttag

SEQ ID NO: 15162 - DNA, 122 bp, Homo sapiens
  misc_feature (61)..(62): /note="This region represents a CpG dinucleotide"
  misc_feature (61)..(61): /note="Nucleotide may be methylated to form 5-methylcytosine"
gccactgtactgagacacatttcttgagcacctgccacactatggcagaagcctaacacacgaggtggtaatttgccatggaagaacttagcaaagaaaatttgaccattatattttcagga

SEQ ID NO: 15163 - DNA, 122 bp, Homo sapiens
  misc_feature (61)..(62): /note="This region represents a CpG dinucleotide"
  misc_feature (61)..(61): /note="Nucleotide may be methylated to form 5-methylcytosine"
ctctggaggagtagtgtcagctatgttttgtgggagacagaatcctggctgctctctggccggttcaaagggtgtttgtctgcatgttcttcatttctatactctgctaacacagagggctc

SEQ ID NO: 15164 - DNA, 122 bp, Homo sapiens
  misc_feature (61)..(62): /note="This region represents a CpG dinucleotide"
  misc_feature (61)..(61): /note="Nucleotide may be methylated to form 5-methylcytosine"
tgtttgatttgaactgatgtcacttccaaggaactaggttggagtgtggacatcacagcacgttatagaatctttaagctggtgctcgaaataaactcaatgtgctggaaaggcagaactcc

SEQ ID NO: 15165 - DNA, 122 bp, Homo sapiens
  misc_feature (61)..(62): /note="This region represents a CpG dinucleotide"
  misc_feature (61)..(61): /note="Nucleotide may be methylated to form 5-methylcytosine"
attgctgttctggccttcagctgatcacagctagaaactgtcggtaacattagcactaagcgctaataaccattaaaacagatgaccatttaccaagcccctactctaagccaggcgtggtt

SEQ ID NO: 15166 - DNA, 122 bp, Homo sapiens
  misc_feature (61)..(62): /note="This region represents a CpG dinucleotide"
  misc_feature (61)..(61): /note="Nucleotide may be methylated to form 5-methylcytosine"
tttaattagaagtgcatgctgcttcagggagactccccactcctgactcaggaatgactgcgagtggaacccccgcctcagggaaaattactacatgggaaaatatgcttgggcctacatga

SEQ ID NO: 15167 - DNA, 122 bp, Homo sapiens
  misc_feature (61)..(62): /note="This region represents a CpG dinucleotide"
  misc_feature (61)..(61): /note="Nucleotide may be methylated to form 5-methylcytosine"
acacatgtgtggcagtgtagattagctgttaagaactggctacctcaatcaaatttggcacgcaaacgttttttgtttagtccacagagtattgacctggagagtactttttaatcaacttt

SEQ ID NO: 15168 - DNA, 122 bp, Homo sapiens
  misc_feature (61)..(62): /note="This region represents a CpG dinucleotide"
  misc_feature (61)..(61): /note="Nucleotide may be methylated to form 5-methylcytosine"
caaccccatgaccatatatgaaatcccaattacctgtacttatccatcgctagttcacttcgctgcagtccttcgtaaaccaaagagcaggtagaacgagttcaccctgaacacagcatccc

SEQ ID NO: 15169 - DNA, 122 bp, Homo sapiens
  misc_feature (61)..(62): /note="This region represents a CpG dinucleotide"
  misc_feature (61)..(61): /note="Nucleotide may be methylated to form 5-methylcytosine"
ttccacccaagcctatgtcacttttcaaccgaccaatgcagtgaacagaactctgagtcacgcaggaaatacagtaattttctgaggaacaataagcatccattctgcagttgccagtggtg

SEQ ID NO: 15170 - DNA, 122 bp, Homo sapiens
  misc_feature (61)..(62): /note="This region represents a CpG dinucleotide"
  misc_feature (61)..(61): /note="Nucleotide may be methylated to form 5-methylcytosine"
ctagaggaaagtcaggaacctaagttctgcaaccccaactctgccactcaccagctgtttcgtgactttgaataaatcctttctttctggccctaagtgtttccatctttaaaaggagaaga

SEQ ID NO: 15171 - DNA, 122 bp, Homo sapiens
  misc_feature (61)..(62): /note="This region represents a CpG dinucleotide"
  misc_feature (61)..(61): /note="Nucleotide may be methylated to form 5-methylcytosine"
taatgctgcaatgtaataacaaaataaacaattcagctgaccttggtgatgtctctataacgttcctattttttatcatgcaaaaatattttccaaacaagaaataacaagttacatttccg

SEQ ID NO: 15172 - DNA, 122 bp, Homo sapiens
  misc_feature (61)..(62): /note="This region represents a CpG dinucleotide"
  misc_feature (61)..(61): /note="Nucleotide may be methylated to form 5-methylcytosine"
ggactatagttgcaaagtgagtcaacatcctgcagcatcccacagtgtatcaggctgagacgttatattttctttcttgtatgtggtactgtctatagtgtcttccttctttctaaatatgc

SEQ ID NO: 15173 - DNA, 122 bp, Homo sapiens
  misc_feature (61)..(62): /note="This region represents a CpG dinucleotide"
  misc_feature (61)..(61): /note="Nucleotide may be methylated to form 5-methylcytosine"
ccggacactaagagtcaccctattatatatcagctaatattatgcggcactcactaccaacgagaatctgctaaggacttggcaggcatcatctcgttgattattcacagcagcctgtatta

SEQ ID NO: 15174 - DNA, 122 bp, Homo sapiens
  misc_feature (61)..(62): /note="This region represents a CpG dinucleotide"
  misc_feature (61)..(61): /note="Nucleotide may be methylated to form 5-methylcytosine"
tggttggggaaaatttcctatgcaaatattgattctgggacagttccctccagcgaaacacgtacacaggaatgacagcttctgggaccgagggaggctaggagcttcactctctgccaaca

SEQ ID NO: 15175 - DNA, 122 bp, Homo sapiens
  misc_feature (61)..(62): /note="This region represents a CpG dinucleotide"
  misc_feature (61)..(61): /note="Nucleotide may be methylated to form 5-methylcytosine"
tgactgggcctcccccgtgcatcctctcttacccgtctctgccactgctcccatagggggcgctgagccctgataacaggtatggtagcaactacgatgagacttagctctccccaaagaaa

SEQ ID NO: 15176 - DNA, 122 bp, Homo sapiens
  misc_feature (61)..(62): /note="This region represents a CpG dinucleotide"
  misc_feature (61)..(61): /note="Nucleotide may be methylated to form 5-methylcytosine"
aaacacttaataaatgttatcttagaagccagactgccaggttcccataaccatttcagccgttcaccggctggctgttgtcatcttggtcaaattatccctctgcgcctcagtttcctcat

SEQ ID NO: 15177 - DNA, 122 bp, Homo sapiens
  misc_feature (61)..(62): /note="This region represents a CpG dinucleotide"
  misc_feature (61)..(61): /note="Nucleotide may be methylated to form 5-methylcytosine"
cattttggccaatgcaaatcatctactctcctctgacaagcctactcatcataacccgcacgtcttgaatcttcctagaagatgaaatcagaccagtcttgcgggctctacatggttacaac

SEQ ID NO: 15178 - DNA, 122 bp, Homo sapiens
  misc_feature (61)..(62): /note="This region represents a CpG dinucleotide"
  misc_feature (61)..(61): /note="Nucleotide may be methylated to form 5-methylcytosine"
atgttcacttccagtgtttgcaatttttccttgtgtaacctctccatcatttgtctttagcgacttcagttgcttgggaagttttataacccgatatgtagatcgtatagtaaatgtctaaa

SEQ ID NO: 15179 - DNA, 122 bp, Homo sapiens
  misc_feature (61)..(62): /note="This region represents a CpG dinucleotide"
  misc_feature (61)..(61): /note="Nucleotide may be methylated to form 5-methylcytosine"
aatgactaagtataaaacctcctccagggttttgctgtctgcttttaagaacatgcaacccgaaagcagacaactatgtaagttagaacaggggatttatgagaggtgattaggcagtgcct

SEQ ID NO: 15180 - DNA, 122 bp, Homo sapiens
  misc_feature (61)..(62): /note="This region represents a CpG dinucleotide"
  misc_feature (61)..(61): /note="Nucleotide may be methylated to form 5-methylcytosine"
gaagctaccaggaccctggcaagaaattgtgtcctgtgtctcgtggcccagcctggcactcgccctcctcgccccgctcagctttagggggcaggaagcagtgcagctccttaacccacttc

SEQ ID NO: 15181 - DNA, 122 bp, Homo sapiens
  misc_feature (61)..(62): /note="This region represents a CpG dinucleotide"
  misc_feature (61)..(61): /note="Nucleotide may be methylated to form 5-methylcytosine"
aggtttattatctcacttaataaaagtcaacagacctttgttttaaactgctaagctcggcgtaatttgttatacagcaatagataactaatacaaggaagagctgttcagtaaatggtcca

SEQ ID NO: 15182 - DNA, 122 bp, Homo sapiens
  misc_feature (61)..(62): /note="This region represents a CpG dinucleotide"
  misc_feature (61)..(61): /note="Nucleotide may be methylated to form 5-methylcytosine"
atgtggacccagacagagacacataaggaagaagccgggatgacagcggcggggagcgggcgacacagcaatgccgaggatttctagccaccgccagaagtgaggaagattgaggaagaacg

SEQ ID NO: 15183 - DNA, 122 bp, Homo sapiens
  misc_feature (61)..(62): /note="This region represents a CpG dinucleotide"
  misc_feature (61)..(61): /note="Nucleotide may be methylated to form 5-methylcytosine"
aatcaattatttacttgattgctgcaagctttagactgaacgttccttgagaaataggatcgttcattaaattattcagcaaacatctattgcacttggcaggagctgatgtggaggcaggg

SEQ ID NO: 15184 - DNA, 122 bp, Homo sapiens
  misc_feature (61)..(62): /note="This region represents a CpG dinucleotide"
  misc_feature (61)..(61): /note="Nucleotide may be methylated to form 5-methylcytosine"
ggcagaactgtagagcagaggctagcaggtctgtctgtccaggacaaaggtggtcctgctcgtggggcagggcccgaaccgaaggaagccctgaggtgggacgtgggaggtgggacgtggga

SEQ ID NO: 15185 - DNA, 122 bp, Homo sapiens
  misc_feature (61)..(62): /note="This region represents a CpG dinucleotide"
  misc_feature (61)..(61): /note="Nucleotide may be methylated to form 5-methylcytosine"
gttagataaggtatgggttagccagacgttggaattttattcagccactaaaaatgatgtcgtagatgattgtttattgacatgataggaggatatcctgtatggaaaacacatataatatt

SEQ ID NO: 15186 - DNA, 122 bp, Homo sapiens
  misc_feature (61)..(62): /note="This region represents a CpG dinucleotide"
  misc_feature (61)..(61): /note="Nucleotide may be methylated to form 5-methylcytosine"
ccattttatccaatgaagagtgtggaagaggagtgatatggtttggttctgtgtccccaccgaaatctaatctcaaattgtactccccacatgttgagggagagacacggtgggagtgattg

SEQ ID NO: 15187 - DNA, 122 bp, Homo sapiens
  misc_feature (61)..(62): /note="This region represents a CpG dinucleotide"
  misc_feature (61)..(61): /note="Nucleotide may be methylated to form 5-methylcytosine"
aggcctgagtctgaatgaccccctacaagtcttgccataaagccactggtgctgggagggcgtctgctgttcttagtggggaacacgtcatgtccccagcccctgtccctctgtgtcagctc

SEQ ID NO: 15188 - DNA, 122 bp, Homo sapiens
  misc_feature (61)..(62): /note="This region represents a CpG dinucleotide"
  misc_feature (61)..(61): /note="Nucleotide may be methylated to form 5-methylcytosine"
aggggaagctaaaagcctcagagaataactcatgcgtagaaataggactaaatcctaaggcgattccaacatttgcctggctggatttcagagctgctatggggacatagtagtgtgtccag

SEQ ID NO: 15189 - DNA, 122 bp, Homo sapiens
  misc_feature (61)..(62): /note="This region represents a CpG dinucleotide"
  misc_feature (61)..(61): /note="Nucleotide may be methylated to form 5-methylcytosine"
agcctgaccttgggagtcagacctgggtgtgagtcctggctctgctcttcttagctgtgtcgtcctgggcatgttatggagctttcctgagctgctgtataaccacagaactaacatgacac

SEQ ID NO: 15190 - DNA, 122 bp, Homo sapiens
  misc_feature (61)..(62): /note="This region represents a CpG dinucleotide"
  misc_feature (61)..(61): /note="Nucleotide may be methylated to form 5-methylcytosine"
cagccaccagtgcctttggcaaggaattgcctgcaggtggcggatcaggtgacgcatcatcgcggcactcttgtgggctcctgagacagccatgtaaagagagcctaaggataacatgccag

SEQ ID NO: 15191 - DNA, 122 bp, Homo sapiens
  misc_feature (61)..(62): /note="This region represents a CpG dinucleotide"
  misc_feature (61)..(61): /note="Nucleotide may be methylated to form 5-methylcytosine"
cagatgttctcagtcagttcaaggttccagaattgaagacactccaatgcccagaaaccacgcatcactcgtttgaaatcacagaccagctcgggctaaagcactcatcagcacaatctcca

SEQ ID NO: 15192 - DNA, 122 bp, Homo sapiens
  misc_feature (61)..(62): /note="This region represents a CpG dinucleotide"
  misc_feature (61)..(61): /note="Nucleotide may be methylated to form 5-methylcytosine"
cttagttccattttacagataacgaaactaatagcttcaattgcaccaagttacagtgctcgtaactggtgggaccaggattttaactcaggcactctgacagcaaagcccacattctaacc

SEQ ID NO: 15193 - DNA, 122 bp, Homo sapiens
  misc_feature (61)..(62): /note="This region represents a CpG dinucleotide"
  misc_feature (61)..(61): /note="Nucleotide may be methylated to form 5-methylcytosine"
atgaaaaacttcaaacacatggcaaagttgagataattttacagtgaacatctgaatacccgtgactgagattctactatttttactatacctgatttatcacatatccatctattcaatcc

SEQ ID NO: 15194 - DNA, 122 bp, Homo sapiens
  misc_feature (61)..(62): /note="This region represents a CpG dinucleotide"
  misc_feature (61)..(61): /note="Nucleotide may be methylated to form 5-methylcytosine"
caaaggggcctggaggctgcaggaagtaggtcagcagcctatggtggtgttactgggcttcggctcctgacagaagctcctcagcccctggctggagtgaggaggggtcatgccccccgcca

SEQ ID NO: 15195 - DNA, 122 bp, Homo sapiens
  misc_feature (61)..(62): /note="This region represents a CpG dinucleotide"
  misc_feature (61)..(61): /note="Nucleotide may be methylated to form 5-methylcytosine"
tgcaaatggaattttttaatgaaatgcaacagagcttaagtttcctctcatttaaattctcgtatgtttgtgtattttctttatttagtattatccaatgcgtaactcagtaatggatatat

SEQ ID NO: 15196 - DNA, 122 bp, Homo sapiens
  misc_feature (61)..(62): /note="This region represents a CpG dinucleotide"
  misc_feature (61)..(61): /note="Nucleotide may be methylated to form 5-methylcytosine"
gatgtggacactgtgctgaaagcccaaggaagctttaatcaattctcaagttgctaggatcgtccactcaagtttattttgccagctctgcctggtatgaaactgtcaatagatataacaca

SEQ ID NO: 15197 - DNA, 122 bp, Homo sapiens
  misc_feature (61)..(62): /note="This region represents a CpG dinucleotide"
  misc_feature (61)..(61): /note="Nucleotide may be methylated to form 5-methylcytosine"
cctgggtcctccgcagaatgccgagtccctttctgccctgtccaatcatgctctgatacccgaccagacatgcgtgtgcaaccctcactatcaggagaacgtgtctgtgaagctgaggaacg

SEQ ID NO: 15198 - DNA, 122 bp, Homo sapiens
  misc_feature (61)..(62): /note="This region represents a CpG dinucleotide"
  misc_feature (61)..(61): /note="Nucleotide may be methylated to form 5-methylcytosine"
catcggtggtttcatccaaccataaagtgaaatatctgctagcgtgcacttgatagtaatcgctcttccacactccactccactgatattatgccacagccaaccatgttatttgacaaagg

SEQ ID NO: 15199 - DNA, 122 bp, Homo sapiens
  misc_feature (61)..(62): /note="This region represents a CpG dinucleotide"
  misc_feature (61)..(61): /note="Nucleotide may be methylated to form 5-methylcytosine"
aatcactttagctagtcacatctgttggcccctggctatagagaagtcactgtgaggaaccgtgtggttgctggaggcttgttttacatacccgtttctatgggttctcacacaacagtgac

SEQ ID NO: 15200 - DNA, 122 bp, Homo sapiens
  misc_feature (61)..(62): /note="This region represents a CpG dinucleotide"
  misc_feature (61)..(61): /note="Nucleotide may be methylated to form 5-methylcytosine"
gggcagaccagccccactgtgctgatgttggtaactgctcagatgagatgccttgacaagcgtgggaaagacagtagattccattcatctcctgggtatcctcattgacacagtgcctgatt

SEQ ID NO: 15201 - DNA, 122 bp, Homo sapiens
  misc_feature (61)..(62): /note="This region represents a CpG dinucleotide"
  misc_feature (61)..(61): /note="Nucleotide may be methylated to form 5-methylcytosine"
aacatggatgaaccttgaggacattatgctgagtcaaacaagccatttctaggccaggcacgctggctcacacctgtaatcccagcactttgggaggccgaggcgggcagatcacttgaggt

SEQ ID NO: 15202 - DNA, 122 bp, Homo sapiens
  misc_feature (61)..(62): /note="This region represents a CpG dinucleotide"
  misc_feature (61)..(61): /note="Nucleotide may be methylated to form 5-methylcytosine"
atcatgcaacacgctctccagcagaattagatgacttccttctttgtgtggctttatccacgtggagagttagactaatcctccgtttaagcaatattgttagctgatacagtctaagccac

SEQ ID NO: 15203 - DNA, 122 bp, Homo sapiens
  misc_feature (61)..(62): /note="This region represents a CpG dinucleotide"
  misc_feature (61)..(61): /note="Nucleotide may be methylated to form 5-methylcytosine"
ccagcatggaagtcccttgtggcagcagggtctgaggctctttttccttctcacatctctcgtttccttctctggcctcttctgggtttggttctcagagctggtgagagtatggaggaagc

SEQ ID NO: 15204 - DNA, 122 bp, Homo sapiens
  misc_feature (61)..(62): /note="This region represents a CpG dinucleotide"
  misc_feature (61)..(61): /note="Nucleotide may be methylated to form 5-methylcytosine"
ccgtttttattgtatatatgtttatatattaggttgggccatgtgaaattgctgatgtgacgggttttgacgagagaaatggcaactgtgtggttcaacctaatatttagatagtattgtct

SEQ ID NO: 15205 - DNA, 122 bp, Homo sapiens
  misc_feature (61)..(62): /note="This region represents a CpG dinucleotide"
  misc_feature (61)..(61): /note="Nucleotide may be methylated to form 5-methylcytosine"
cctggcagagcggggtcttcaaaggccccaggaaggaagaggtgggacacagcaggaacgcgtgaaagacaagaagggtctgttggagcaaggaatggaaaccaggctccaccttcaccacc

SEQ ID NO: 15206 - DNA, 122 bp, Homo sapiens
  misc_feature (61)..(62): /note="This region represents a CpG dinucleotide"
  misc_feature (61)..(61): /note="Nucleotide may be methylated to form 5-methylcytosine"
tgatgaaggtaatcctcagatcattctttgatctctgttatgaactaaagttccatgactcggtgattctgcatgtcagcagagtagtaaaacactatttcaagctttaggtgctcatttgg

SEQ ID NO: 15207 - DNA, 122 bp, Homo sapiens
  misc_feature (61)..(62): /note="This region represents a CpG dinucleotide"
  misc_feature (61)..(61): /note="Nucleotide may be methylated to form 5-methylcytosine"
tgagggtagggcagggcagggcaggcctaggcctctgcatcctactcccggcctgccagccgggacaaaccaggcaaagaggcccctctaggcacccgaggcagcccccatgggagggggtg

SEQ ID NO: 15208 - DNA, 122 bp, Homo sapiens
  misc_feature (61)..(62): /note="This region represents a CpG dinucleotide"
  misc_feature (61)..(61): /note="Nucleotide may be methylated to form 5-methylcytosine"
gcctctctggctctggagctaatttggatgctgagtagccccgcaggtatttatatgtagcgtttggtatttttactgggtcctattcttctcccttggatcacctaaaatggttaagaatt

SEQ ID NO: 15209 - DNA, 122 bp, Homo sapiens
  misc_feature (61)..(62): /note="This region represents a CpG dinucleotide"
  misc_feature (61)..(61): /note="Nucleotide may be methylated to form 5-methylcytosine"
acatgccggctctggacgcaggagcacggggcagtctgggcagtggagactcagcctgggcgccaggacactgcagcccccacctcagatgtcccctggggccaaggagggagtgtgaggga

SEQ ID NO: 15210 - DNA, 122 bp, Homo sapiens
  misc_feature (61)..(62): /note="This region represents a CpG dinucleotide"
  misc_feature (61)..(61): /note="Nucleotide may be methylated to form 5-methylcytosine"
accctgtttttcccagggccgcaactacgaacctcagaaagaatgcttggagcagctatacgaggactctgaaaagtaaacaggagcaggcacattaagaaggaagactagaacatgaaaga

SEQ ID NO: 15211 - DNA, 122 bp, Homo sapiens
  misc_feature (61)..(62): /note="This region represents a CpG dinucleotide"
  misc_feature (61)..(61): /note="Nucleotide may be methylated to form 5-methylcytosine"
agggtacccgcacttactgatttccatcctggtggcattttgctaatgccccattgtcagcgttggcactcccacccaggcttccaggctcatctgctctcccatatttggggtgaaaggaa

SEQ ID NO: 15212 - DNA, 122 bp, Homo sapiens
  misc_feature (61)..(62): /note="This region represents a CpG dinucleotide"
  misc_feature (61)..(61): /note="Nucleotide may be methylated to form 5-methylcytosine"
caaacagattatagtaaatggttacataatgcatggggttgtgcacctgcgctccaaacccgctgtgtcataccataccggatgtttaccttggcctactcctgactgaagcacagccactt

SEQ ID NO: 15213 - DNA, 122 bp, Homo sapiens
  misc_feature (61)..(62): /note="This region represents a CpG dinucleotide"
  misc_feature (61)..(61): /note="Nucleotide may be methylated to form 5-methylcytosine"
gttcttccagccacttaagcttgaaacatgggaggcatcttgtattgctcgctcttttcccgtgtgtctcaaaattcaaccgcatttcctgtaaccatgatttccttccagcattctcagtg

SEQ ID NO: 15214 - DNA, 122 bp, Homo sapiens
  misc_feature (61)..(62): /note="This region represents a CpG dinucleotide"
  misc_feature (61)..(61): /note="Nucleotide may be methylated to form 5-methylcytosine"
tcctcctgtagcatttatactctagctagtgggaagggaaagttcaggtgagcatatatccgtttcatctacaagcagtggcacaaatgaattccgcctagatcccactaatgaaaaatgtg

SEQ ID NO: 15215 - DNA, 122 bp, Homo sapiens
  misc_feature (61)..(62): /note="This region represents a CpG dinucleotide"
  misc_feature (61)..(61): /note="Nucleotide may be methylated to form 5-methylcytosine"
gagtgtgagctgcatgatgctgccttgcagcagccctttgctgacctaactgggctctggcgagcacccagtgaagtggatgacaaaaaggcatgacaaagatcaagcaactcaagaaaggt

SEQ ID NO: 15216 - DNA, 122 bp, Homo sapiens
  misc_feature (61)..(62): /note="This region represents a CpG dinucleotide"
  misc_feature (61)..(61): /note="Nucleotide may be methylated to form 5-methylcytosine"
gaacgtatccaagcaccaaggcttccgcctgccggaaagaacaatgagcttaattgtgttcgcttaccaaactcgcccccgctcacggcgattttagaggaattctgaaatggtcgcttcat

SEQ ID NO: 15217 - DNA, 122 bp, Homo sapiens
  misc_feature (61)..(62): /note="This region represents a CpG dinucleotide"
  misc_feature (61)..(61): /note="Nucleotide may be methylated to form 5-methylcytosine"
ggtaaagtcaagtaagaaggaaggttggggcagtcggggtgaaaacaggtgtgttctctccggggccccgggactgtaatcctatcggatgactatcaacattccaggcacagtttgcatat

SEQ ID NO: 15218 - DNA, 122 bp, Homo sapiens
  misc_feature (61)..(62): /note="This region represents a CpG dinucleotide"
  misc_feature (61)..(61): /note="Nucleotide may be methylated to form 5-methylcytosine"
tcttgaaagtccatgacttttacataccctgttgtatgacttcaaataaacctttcttaacgtgcatagagacagagttgcatccacaaaattgcgcaggtccctaacctaaaattagacct

SEQ ID NO: 15219 - DNA, 122 bp, Homo sapiens
  misc_feature (61)..(62): /note="This region represents a CpG dinucleotide"
  misc_feature (61)..(61): /note="Nucleotide may be methylated to form 5-methylcytosine"
gcccagcccaggccttgtaattgtagcagaggatttggcttccctcagcctatggatctgcgccctgaaggatgaacaggaattagtgaagcaattctctattgagaaggagcaattctcta

SEQ ID NO: 15220 - DNA, 122 bp, Homo sapiens
  misc_feature (61)..(62): /note="This region represents a CpG dinucleotide"
  misc_feature (61)..(61): /note="Nucleotide may be methylated to form 5-methylcytosine"
gttgcttaaaaaacaacaacaacaaaaaacacaacggtgatataactagaactttaacagcgataggagtaagcaagtaccctaggaccaatggcatacttctgccacatccctgtttatat

SEQ ID NO: 15221 - DNA, 122 bp, Homo sapiens
  misc_feature (61)..(62): /note="This region represents a CpG dinucleotide"
  misc_feature (61)..(61): /note="Nucleotide may be methylated to form 5-methylcytosine"
gggtggtggcctgccacgcgctcttcttgttcttcttggacttggtgctcagaggcttctcgcggttgcagaagtccgtgtgtgcagacaggagctcctgctgcttggccgtgtcgggcagc

SEQ ID NO: 15222 - DNA, 122 bp, Homo sapiens
  misc_feature (61)..(62): /note="This region represents a CpG dinucleotide"
  misc_feature (61)..(61): /note="Nucleotide may be methylated to form 5-methylcytosine"
gtgcattactgacaggctcacttagtcctcaccctgtccagcctccctgaccccatgtcccgagggtgacctccctgactggtcagtgtggctttccctagcctggcctgtgaccagcagca

SEQ ID NO: 15223 - DNA, 122 bp, Homo sapiens
  misc_feature (61)..(62): /note="This region represents a CpG dinucleotide"
  misc_feature (61)..(61): /note="Nucleotide may be methylated to form 5-methylcytosine"
tgctggacaggatctggatggcaacaggcagctgatactctacagagagggccaatgtggcgtgaggaggaagaggaacactgtgttgggaagacaagcaatctggccagctggagcaggac

SEQ ID NO: 15224 - DNA, 122 bp, Homo sapiens
  misc_feature (61)..(62): /note="This region represents a CpG dinucleotide"
  misc_feature (61)..(61): /note="Nucleotide may be methylated to form 5-methylcytosine"
agatgttgtagactgttgctcggtcagtgcaaatgagagctgctagcctcgctgtaacctcgctggctgggtactctcagagattgttaagagttttaaaatttttctaatcactaagcatg

SEQ ID NO: 15225 - DNA, 122 bp, Homo sapiens
  misc_feature (61)..(62): /note="This region represents a CpG dinucleotide"
  misc_feature (61)..(61): /note="Nucleotide may be methylated to form 5-methylcytosine"
ttctccagcctgagcatagaaggcaggatcgagccaggttatggggtgaaaagccaagcccgggctctcagacagaagctgctttgccgtttggcctcatccaactcaggcaacgactccca

SEQ ID NO: 15226 - DNA, 122 bp, Homo sapiens
  misc_feature (61)..(62): /note="This region represents a CpG dinucleotide"
  misc_feature (61)..(61): /note="Nucleotide may be methylated to form 5-methylcytosine"
tagtgtaagaaaacacatcagacggtccaggcactcagacatagtgttggagcttgggcccgttgcttgtgctgcagaggaaggccattggtttgagtaaacttgtggtcaggtaacacttc

SEQ ID NO: 15227 - DNA, 122 bp, Homo sapiens
  misc_feature (61)..(62): /note="This region represents a CpG dinucleotide"
  misc_feature (61)..(61): /note="Nucleotide may be methylated to form 5-methylcytosine"
aatcactaagctgtgtaaagatgatctaccttcaccaatgttggcaggcatcatccaatccgtgcaggtcttacccaaacagagcaaaaagtcaggtagggtaaatttattctcttctaaag

SEQ ID NO: 15228 - DNA, 122 bp, Homo sapiens
  misc_feature (61)..(62): /note="This region represents a CpG dinucleotide"
  misc_feature (61)..(61): /note="Nucleotide may be methylated to form 5-methylcytosine"
gcagccaatggctgtgatcaaaaattcaacacaaaatcaaacttgaagaaacattttgaacgcaaacatgaaaatcaacaaaaacaatatatagtaagtatgattttatatgcttaaatttt

SEQ ID NO: 15229 - DNA, 122 bp, Homo sapiens
  misc_feature (61)..(62): /note="This region represents a CpG dinucleotide"
  misc_feature (61)..(61): /note="Nucleotide may be methylated to form 5-methylcytosine"
tgttgctgctgctgttgtctttcctgttctattacaagtcagattcctttgtgtctcacccgtggtgtctgcggtgaggaccaaaagactctcccacatggttgccatatttctcagcattc

SEQ ID NO: 15230 - DNA, 122 bp, Homo sapiens
  misc_feature (61)..(62): /note="This region represents a CpG dinucleotide"
  misc_feature (61)..(61): /note="Nucleotide may be methylated to form 5-methylcytosine"
agtaaattaccagctgggatcctgttgataacaagcttgcaggaaactcactgaagtcaacgtgtaaacacagagatgtgggcagagatatgccggtagtaccgtcgggaccaggcccagga

SEQ ID NO: 15231 - DNA, 122 bp, Homo sapiens
  misc_feature (61)..(62): /note="This region represents a CpG dinucleotide"
  misc_feature (61)..(61): /note="Nucleotide may be methylated to form 5-methylcytosine"
aacttgaagatgtaaatgccctgacgaatataaagaggtatttggaaggcacaagggaggcgctgccaccaaaaatcgaatttgtaattacactccagattgaagagcccaaggtaggtacc

SEQ ID NO: 15232 - DNA, 122 bp, Homo sapiens
  misc_feature (61)..(62): /note="This region represents a CpG dinucleotide"
  misc_feature (61)..(61): /note="Nucleotide may be methylated to form 5-methylcytosine"
tggacatgcagtaaacactctaccaatgatagtctttctcttgtttttgctgttacatgacgtagcatgtacttgatgtggtgtacaggggtatttccccaatccccttcatgatggagagg

SEQ ID NO: 15233 - DNA, 122 bp, Homo sapiens
  misc_feature (61)..(62): /note="This region represents a CpG dinucleotide"
  misc_feature (61)..(61): /note="Nucleotide may be methylated to form 5-methylcytosine"
aaatctgaagaaagatgggcgagaaaggggtctgttttccattttaacttagtgagtaaacgattagaggcctgggagataaaagctgggatttaaagtaaccctcacaagcctctacgtat

SEQ ID NO: 15234 - DNA, 122 bp, Homo sapiens
  misc_feature (61)..(62): /note="This region represents a CpG dinucleotide"
  misc_feature (61)..(61): /note="Nucleotide may be methylated to form 5-methylcytosine"
agattgagaaggaaaataaaaggaagaagaaaacatgacatagaggacataatgtttcctcgtgctgtggtatagaatgcagaaattttatcagctaaagctgaaggggaattttagtgcct

SEQ ID NO: 15235 - DNA, 122 bp, Homo sapiens
  misc_feature (61)..(62): /note="This region represents a CpG dinucleotide"
  misc_feature (61)..(61): /note="Nucleotide may be methylated to form 5-methylcytosine"
agtgactaatattctactgtttgattcaatcagttttgaaatgtcactacttgtatccctcgtcacattgcccaaacaataagactgacctttctgtgactggttagctcagctaagaacac

SEQ ID NO: 15236 - DNA, 122 bp, Homo sapiens
  misc_feature (61)..(62): /note="This region represents a CpG dinucleotide"
  misc_feature (61)..(61): /note="Nucleotide may be methylated to form 5-methylcytosine"
cagggggatgagggctgtgcaggggagtggcatcttcccctcctccattctggatctctccgtgaaatccccctaacccccagcactcccagtggataaggtgggatgtggagtaggggccc

SEQ ID NO: 15237 - DNA, 122 bp, Homo sapiens
  misc_feature (61)..(62): /note="This region represents a CpG dinucleotide"
  misc_feature (61)..(61): /note="Nucleotide may be methylated to form 5-methylcytosine"
cttgaatcataaaccaatctatttcctggtgctaaacctagcagacaaatcattctgtcccgtttttcaatgggaaaaagaaaggcttcaagaaatatgtacttgtcagtggactaggctgt

SEQ ID NO: 15238 - DNA, 122 bp, Homo sapiens
  misc_feature (61)..(62): /note="This region represents a CpG dinucleotide"
  misc_feature (61)..(61): /note="Nucleotide may be methylated to form 5-methylcytosine"
tgctgtgagacagtgccatgtgggaaggggtattggtgaaagaatcctgctttataagggcggttatggaagacctctctgaggaggtgcaatttgagatgagattggcttgaggaggactg

SEQ ID NO: 15239 - DNA, 122 bp, Homo sapiens
  misc_feature (61)..(62): /note="This region represents a CpG dinucleotide"
  misc_feature (61)..(61): /note="Nucleotide may be methylated to form 5-methylcytosine"
ggctcgagctgcccatggccccgtggcgtgggccctgctgccagggtgccgtgctctgcccgcccgccagcccagcagcggccgcactcggaacctcagctcctccagccggcccctccttc

SEQ ID NO: 15240 - DNA, 122 bp, Homo sapiens
  misc_feature (61)..(62): /note="This region represents a CpG dinucleotide"
  misc_feature (61)..(61): /note="Nucleotide may be methylated to form 5-methylcytosine"
ggggcaggcgagacgtgaggcgagacgtgaggcgagccgtgaggcaagccggctcataaacgctcctaacggggaaaacagacgaacgaggagttggtgataatatcagccagtaacacctg

SEQ ID NO: 15241 - DNA, 122 bp, Homo sapiens
  misc_feature (61)..(62): /note="This region represents a CpG dinucleotide"
  misc_feature (61)..(61): /note="Nucleotide may be methylated to form 5-methylcytosine"
ccccaccacccaggtctatgatggtgatcacctgtacacgactctgcactccagtgactacgtcactcagtggtaacagagagcaaagctctaccatctggtcatcctctcagcttgcccag

SEQ ID NO: 15242 - DNA, 122 bp, Homo sapiens
  misc_feature (61)..(62): /note="This region represents a CpG dinucleotide"
  misc_feature (61)..(61): /note="Nucleotide may be methylated to form 5-methylcytosine"
cgggccagagtggctcagcgagtttaggacacaggcgcatattccacttgttatgtaacccgtttatgtaagttcatacttggatctgagccactattgtctgtagaaggtataactgccct

SEQ ID NO: 15243 - DNA, 122 bp, Homo sapiens
  misc_feature (61)..(62): /note="This region represents a CpG dinucleotide"
  misc_feature (61)..(61): /note="Nucleotide may be methylated to form 5-methylcytosine"
acttcttataagcctttttcctactccctcagattatgtaatttatttgtaagcctgaatcgcagcccaaacagggcagcaatgttgaagtgaccataaagtggtcacttccaccgtgaagc

SEQ ID NO: 15244 - DNA, 122 bp, Homo sapiens
  misc_feature (61)..(62): /note="This region represents a CpG dinucleotide"
  misc_feature (61)..(61): /note="Nucleotide may be methylated to form 5-methylcytosine"
gtgggcattttaggctgtgtgcaagcagaggaggctactacagatccgctgctttatcagcgattactgtcagtacaatacaggcccaggagctgaccagcacacacatgcagcagcccacc

SEQ ID NO: 15245 - DNA, 122 bp, Homo sapiens
  misc_feature (61)..(62): /note="This region represents a CpG dinucleotide"
  misc_feature (61)..(61): /note="Nucleotide may be methylated to form 5-methylcytosine"
tttttctttttgtttattaggaaatagttttctgagacaaacttgtatgaacctagttcacggagcaagcttaatccccaacttgcttgcttttgaaatgttggccatgttagctggagaag

SEQ ID NO: 15246 - DNA, 122 bp, Homo sapiens
  misc_feature (61)..(62): /note="This region represents a CpG dinucleotide"
  misc_feature (61)..(61): /note="Nucleotide may be methylated to form 5-methylcytosine"
gggtcctttgacagcttaatactgcagagtttctggtgacttcatagttagggcagccaacgtgagaccatctgtttagtagtgggcagaaaagctcagtaccagcaggtagctgctgctga

SEQ ID NO: 15247 - DNA, 122 bp, Homo sapiens
  misc_feature (61)..(62): /note="This region represents a CpG dinucleotide"
  misc_feature (61)..(61): /note="Nucleotide may be methylated to form 5-methylcytosine"
agttagtaccgggaattccagtttatcctttacgcagtttcccttaatgttgacatcttacgtaacaatgacacaatgatcacaataaagaaattaacattagagcaacagtattaactaac

SEQ ID NO: 15248 - DNA, 122 bp, Homo sapiens
  misc_feature (61)..(62): /note="This region represents a CpG dinucleotide"
  misc_feature (61)..(61): /note="Nucleotide may be methylated to form 5-methylcytosine"
ttctctctcctgctggtcataaacaaagaagaatacagcccaaattgctgctggcagccacgcaacaacgataaggaaagtcagccatggaaggcagagtctggaaaacagaaaaacaaagg

SEQ ID NO: 15249 - DNA, 122 bp, Homo sapiens
  misc_feature (61)..(62): /note="This region represents a CpG dinucleotide"
  misc_feature (61)..(61): /note="Nucleotide may be methylated to form 5-methylcytosine"
accatattttgctcttagagcaataccctcaactatgctgccacaaaaccccagttcctgcgtgatctgtgtctaaaatgaaatgaaagatgacattcttctcccaattagttttttttaaa

SEQ ID NO: 15250 - DNA, 122 bp, Homo sapiens
  misc_feature (61)..(62): /note="This region represents a CpG dinucleotide"
  misc_feature (61)..(61): /note="Nucleotide may be methylated to form 5-methylcytosine"
cgtcagggttgctgagcaggtgggtgtgtcctcaaggtgcagtgagacgaaccctgttcccgctatataagccacagagtgacccccccagcaccccgggtgccctctcctgcgcctgctcc

SEQ ID NO: 15251 - DNA, 122 bp, Homo sapiens
  misc_feature (61)..(62): /note="This region represents a CpG dinucleotide"
  misc_feature (61)..(61): /note="Nucleotide may be methylated to form 5-methylcytosine"
catttcctctctagtctgatattccactggctgaacttgctgctatttgaatactcaatgcgttaatgcctcctgaacttttcatggaatagtctccttttcctggaatgtagttcctccct

SEQ ID NO: 15252 - DNA, 122 bp, Homo sapiens
  misc_feature (61)..(62): /note="This region represents a CpG dinucleotide"
  misc_feature (61)..(61): /note="Nucleotide may be methylated to form 5-methylcytosine"
gtgaggaggaaactcaccggatgcctgcacagggaatgccacggggccagtgctacactgcgcccatcaagtgagtcccagcagtgaggagaaacaaagcagcaaacaggaagcagaaaagt

SEQ ID NO: 15253 - DNA, 122 bp, Homo sapiens
  misc_feature (61)..(62): /note="This region represents a CpG dinucleotide"
  misc_feature (61)..(61): /note="Nucleotide may be methylated to form 5-methylcytosine"
gaaatagagtgggggattccggggtgggcaacaaatgcatggtgcttgtcactcacaagacggaaaattgggtttctgttgtaaaatattgtttacttaatagcaccgcttaagtactattt

SEQ ID NO: 15254 - DNA, 122 bp, Homo sapiens
  misc_feature (61)..(62): /note="This region represents a CpG dinucleotide"
  misc_feature (61)..(61): /note="Nucleotide may be methylated to form 5-methylcytosine"
caatgtaaaagtcatcatttaattactaacatcccctgtgagcaggatttagagactatacggacaaaaatatctggttcctagaggacctgaaagttactatggcagaaccaggcaccagg

SEQ ID NO: 15255 - DNA, 122 bp, Homo sapiens
  misc_feature (61)..(62): /note="This region represents a CpG dinucleotide"
  misc_feature (61)..(61): /note="Nucleotide may be methylated to form 5-methylcytosine"
tccatattgtgacctcttggaggttgggtccatgacttcttgggattttatgaagcctaacgtaggcctccagagggctagagccagacaatgaagaagacctgctctgttgtgttcaaaaa

SEQ ID NO: 15256 - DNA, 122 bp, Homo sapiens
  misc_feature (61)..(62): /note="This region represents a CpG dinucleotide"
  misc_feature (61)..(61): /note="Nucleotide may be methylated to form 5-methylcytosine"
ctgattggctcgtttcaatttccctaacatgtctgatttgtgaacttgatacgattttgacgtttttgagtagaggaccaggatgatacctttctcttgtgttgaaattcaaatgtaacatt

SEQ ID NO: 15257 - DNA, 122 bp, Homo sapiens
  misc_feature (61)..(62): /note="This region represents a CpG dinucleotide"
  misc_feature (61)..(61): /note="Nucleotide may be methylated to form 5-methylcytosine"
aaaccacctgacaaaaggcagattcataggaggaaaggcatacaaatttactaacatgcgcgggagtcttacaaaataaaagatctcaaagaaatggccaaatagttgatggttttatacca

SEQ ID NO: 15258 - DNA, 122 bp, Homo sapiens
  misc_feature (61)..(62): /note="This region represents a CpG dinucleotide"
  misc_feature (61)..(61): /note="Nucleotide may be methylated to form 5-methylcytosine"
tgttgctcttcctccaacttcgcttgcttggtggcggcatccggcccctgggcagctcgccgcttgttcacgtgtgtcccatcctcctgtggagtgggcacgccttcctgtcccgtcgctca

SEQ ID NO: 15259 - DNA, 122 bp, Homo sapiens
  misc_feature (61)..(62): /note="This region represents a CpG dinucleotide"
  misc_feature (61)..(61): /note="Nucleotide may be methylated to form 5-methylcytosine"
ctaagaagtgctgggattttcattttccatgccatatgtacatgcacatatgcatgtgcgcgcgcacacacacacacacacacacacacacatattaataggcctatattggttactataga

SEQ ID NO: 15260 - DNA, 122 bp, Homo sapiens
  misc_feature (61)..(62): /note="This region represents a CpG dinucleotide"
  misc_feature (61)..(61): /note="Nucleotide may be methylated to form 5-methylcytosine"
ctccaggaagtctttctggattagctatctcttgacccttgtgtgtcctggttattgccccgtcaccctacattgtgatcacctgttcaggtatgtttccgttatctacaaaccatcccaaa

SEQ ID NO: 15261 - DNA, 122 bp, Homo sapiens
  misc_feature (61)..(62): /note="This region represents a CpG dinucleotide"
  misc_feature (61)..(61): /note="Nucleotide may be methylated to form 5-methylcytosine"
ctctctcctatgttgcaaaggggcctgtccctgctgtctgtgctccaggggctgcggctgcgcagtggcactaatgcctgagtgtgtctaattcaagagcagagtatcaacaaggccacccg

SEQ ID NO: 15262 - DNA, 122 bp, Homo sapiens
  misc_feature (61)..(62): /note="This region represents a CpG dinucleotide"
  misc_feature (61)..(61): /note="Nucleotide may be methylated to form 5-methylcytosine"
gaggcgtcccgggggcctctgaggctgggcgatttggggtgccagagaccgctaaagcagcggcccactgcccaatttatgtgtgcgctaaatcacgaccatgatttctgcgtgttttctag

SEQ ID NO: 15263 - DNA, 122 bp, Homo sapiens
  misc_feature (61)..(62): /note="This region represents a CpG dinucleotide"
  misc_feature (61)..(61): /note="Nucleotide may be methylated to form 5-methylcytosine"
tgagctggaacagcctgaggttttggtgctcaggatgtgtgtttgtcttggcagctgggacgacagcagctccgtcagcagcggcatcagcgacaccatagacaacctcagcactgatgaca

SEQ ID NO: 15264 - DNA, 122 bp, Homo sapiens
  misc_feature (61)..(62): /note="This region represents a CpG dinucleotide"
  misc_feature (61)..(61): /note="Nucleotide may be methylated to form 5-methylcytosine"
aattccagaaactggccttaggagatccaaatattgaagcaaggtttcagggtcccacctcgggaaggaatgctgcaattgatttacagccttattgcttctggtcagaccaccaggtggcc

SEQ ID NO: 15265 - DNA, 122 bp, Homo sapiens
  misc_feature (61)..(62): /note="This region represents a CpG dinucleotide"
  misc_feature (61)..(61): /note="Nucleotide may be methylated to form 5-methylcytosine"
agtaagagcttaggtgctgaacacatgggtcagcattttaactattaaccgtactctcagcgttgaatcataatgtataacattctaacacatctactaaactgcatatactaatggatgct

SEQ ID NO: 15266 - DNA, 122 bp, Homo sapiens
  misc_feature (61)..(62): /note="This region represents a CpG dinucleotide"
  misc_feature (61)..(61): /note="Nucleotide may be methylated to form 5-methylcytosine"
ccctccctggccaggtcaattctcgagagagcctggagtgtgcatgctggctgctggccccgggtccagcatggcttgagatcagctttggaggatcttggaatgtggtcataaggactcaa

SEQ ID NO: 15267 - DNA, 122 bp, Homo sapiens
  misc_feature (61)..(62): /note="This region represents a CpG dinucleotide"
  misc_feature (61)..(61): /note="Nucleotide may be methylated to form 5-methylcytosine"
ggactggctggtggtgcagcagacatcatgagtaagcaccgagaagtctgttccttatcacgtgtgtaaggggaaaaaggtaagaaaatgtttttatttctcttagagattgaacttgagaa

SEQ ID NO: 15268 - DNA, 122 bp, Homo sapiens
  misc_feature (61)..(62): /note="This region represents a CpG dinucleotide"
  misc_feature (61)..(61): /note="Nucleotide may be methylated to form 5-methylcytosine"
aaatcatcttatgcctttgaatacattccagcaccactgactctaccatgtattttctaacgtatgggttcccgccacccatgctctgggactgagttaataatggtacttacagggttgtt

SEQ ID NO: 15269 - DNA, 122 bp, Homo sapiens
  misc_feature (61)..(62): /note="This region represents a CpG dinucleotide"
  misc_feature (61)..(61): /note="Nucleotide may be methylated to form 5-methylcytosine"
gatccatctgggcaaaaatcaacgacaagaaaggcaaagatgcaacactcaacccccgcacgggacgacacactggagctgaccaagcacacgtgttttaaactgttttcaaagtcaaacgt

SEQ ID NO: 15270 - DNA, 122 bp, Homo sapiens
  misc_feature (61)..(62): /note="This region represents a CpG dinucleotide"
  misc_feature (61)..(61): /note="Nucleotide may be methylated to form 5-methylcytosine"
cttgagtgagctgctctggtttcacagtcatcctgtggttttaaatacagctgagcagcacgtatctgcagttctgtgcagcatctgcaaaagttttcacatagtgatagatgctataatcg

SEQ ID NO: 15271 - DNA, 122 bp, Homo sapiens
  misc_feature (61)..(62): /note="This region represents a CpG dinucleotide"
  misc_feature (61)..(61): /note="Nucleotide may be methylated to form 5-methylcytosine"
atcatataagtaaataaagccctaggcaagcaggagataagtgcacagcagtgctccatacgaagcccattattgtcattggcatagagagttgtgtgatatctttcctccaaagactgaaa

SEQ ID NO: 15272 - DNA, 122 bp, Homo sapiens
  misc_feature (61)..(62): /note="This region represents a CpG dinucleotide"
  misc_feature (61)..(61): /note="Nucleotide may be methylated to form 5-methylcytosine"
tactttctccatctgtgaaatttaaataccaattcctcagccgggctgcagggaggagggcgtgtgggagcactgggcctccagcccaggacccgacagggacagcctccttggcaggctgg

SEQ ID NO: 15273 - DNA, 122 bp, Homo sapiens
  misc_feature (61)..(62): /note="This region represents a CpG dinucleotide"
  misc_feature (61)..(61): /note="Nucleotide may be methylated to form 5-methylcytosine"
tgcagtcatgtgacgagcgccgctccaaagctctggactggctctgcggcagatgggcggcggctgaggagcctaactcaacctggactagtcgtggaagagctaggacttagaggcgcgaa

SEQ ID NO: 15274 - DNA, 122 bp, Homo sapiens
  misc_feature (61)..(62): /note="This region represents a CpG dinucleotide"
  misc_feature (61)..(61): /note="Nucleotide may be methylated to form 5-methylcytosine"
gtcccccattcctttcccaggtctgctcctggtttctgtgagccgcgctgttactgtgagcgcgctgcctctcaggaagtcttccttgtgaaaggtaactcgtgctgctggaaagaagctga

SEQ ID NO: 15275 - DNA, 122 bp, Homo sapiens
  misc_feature (61)..(62): /note="This region represents a CpG dinucleotide"
  misc_feature (61)..(61): /note="Nucleotide may be methylated to form 5-methylcytosine"
ttgggcactctgtgctgcgtgctctacatgctaataagctatgtgtgaaagttgtgaatacgaattcttgatgtgaatatcagtcaggatgtgcaaatgctctgaaacactgtgcctcgggt

SEQ ID NO: 15276 - DNA, 122 bp, Homo sapiens
  misc_feature (61)..(62): /note="This region represents a CpG dinucleotide"
  misc_feature (61)..(61): /note="Nucleotide may be methylated to form 5-methylcytosine"
tggaacactcagcctgccatggaagactgaccttcagctctcattgctcaggccactaaacgggtaggaacaaccaatgtgtggtcttaagctgttcttccacaagcctttttttttttttt

SEQ ID NO: 15277 - DNA, 122 bp, Homo sapiens
  misc_feature (61)..(62): /note="This region represents a CpG dinucleotide"
  misc_feature (61)..(61): /note="Nucleotide may be methylated to form 5-methylcytosine"
tcaccaccagccctgccttcctcccccaaagatacccagaccctgtcccacctctcacagcggtgctctgtaagaacccagggtagcctttgctcaaaccggagcccttccttttttccatg

SEQ ID NO: 15278 - DNA, 122 bp, Homo sapiens
  misc_feature (61)..(62): /note="This region represents a CpG dinucleotide"
  misc_feature (61)..(61): /note="Nucleotide may be methylated to form 5-methylcytosine"
tcagagtgacggtgagcagcatgcattgaattctagctggaaagagggtttttaggcctgcgtttgagcttgccctgaatgaataaggctggaaacctataggccctggagaacattaatga

SEQ ID NO: 15279 - DNA, 122 bp, Homo sapiens
  misc_feature (61)..(62): /note="This region represents a CpG dinucleotide"
  misc_feature (61)..(61): /note="Nucleotide may be methylated to form 5-methylcytosine"
ggtgggagcttggctgagtgggctctcagccactgaggcagaccctgaaggaggtgacagcggcaggccatctgctaactgcaccccctactagtgggcagcagtggacaccattgaaagct

SEQ ID NO: 15280 - DNA, 122 bp, Homo sapiens
  misc_feature (61)..(62): /note="This region represents a CpG dinucleotide"
  misc_feature (61)..(61): /note="Nucleotide may be methylated to form 5-methylcytosine"
tgccggcgttaagggaacgcagggatgttctgggcttgcgcagtggcacaaaatgacgggcgtggcggctatgaatgtgagagcatgcgcaatgtggccccctaatggtggctgcgctgagc

SEQ ID NO: 15281 - DNA, 122 bp, Homo sapiens
  misc_feature (61)..(62): /note="This region represents a CpG dinucleotide"
  misc_feature (61)..(61): /note="Nucleotide may be methylated to form 5-methylcytosine"
tgacttgcttaccatcggccagtatcttgttgaggttcacacctcttaggaccgaacacacggactcgaaagatagatttctgctcagagtaacaaatggattcagaaaaatctgagaaata

SEQ ID NO: 15282 - DNA, 122 bp, Homo sapiens
  misc_feature (61)..(62): /note="This region represents a CpG dinucleotide"
  misc_feature (61)..(61): /note="Nucleotide may be methylated to form 5-methylcytosine"
gaaagggcctccaagttaatggtggcatgaataattcaccggcccctagaattagtaagccgatccctgggtacttcctttactcactgtaaagtgacggatctggtgtcaccaggtttaca

SEQ ID NO: 15283 - DNA, 122 bp, Homo sapiens
  misc_feature (61)..(62): /note="This region represents a CpG dinucleotide"
  misc_feature (61)..(61): /note="Nucleotide may be methylated to form 5-methylcytosine"
taaggcacagagagtaacttccccaatgctatacacatagtaagtcaccaacctggtattcgagcccaggcaggctagcttcaaagcctgagttctcaaaccacagctatgtgtctcataat

SEQ ID NO: 15284 - DNA, 122 bp, Homo sapiens
  misc_feature (61)..(62): /note="This region represents a CpG dinucleotide"
  misc_feature (61)..(61): /note="Nucleotide may be methylated to form 5-methylcytosine"
cactctgcctttggggatgagaacgtgtaccatactcatattacatatacagattcaggccgggcacggtggctcatgcctgtaatcccagcactttgggaggctgaggcgggtggatcact

SEQ ID NO: 15285 - DNA, 122 bp, Homo sapiens
  misc_feature (61)..(62): /note="This region represents a CpG dinucleotide"
  misc_feature (61)..(61): /note="Nucleotide may be methylated to form 5-methylcytosine"
taaatacgtgtaatcctcacagcaacactgggagaaatacccgtctcacagctgaagaaacgaagacgcagaaagggtagacagaagtaattttctaattacggtatcacactacgtctgct

SEQ ID NO: 15286 - DNA, 122 bp, Homo sapiens
  misc_feature (61)..(62): /note="This region represents a CpG dinucleotide"
  misc_feature (61)..(61): /note="Nucleotide may be methylated to form 5-methylcytosine"
tggaagacaccccggcctgtggagagactgccagggcctcaaatcacttaggaaagggcgcgggtccggttggaccttgaaggacaggcaggcgagggtactccagggaacagctaagcaaa

SEQ ID NO: 15287 - DNA, 122 bp, Homo sapiens
  misc_feature (61)..(62): /note="This region represents a CpG dinucleotide"
  misc_feature (61)..(61): /note="Nucleotide may be methylated to form 5-methylcytosine"
agttgaaggaggctcccccgggtgtgggaagcaccacgggccattgactcccctccagcacggcgctttcatctgaagcacatggctgtgtggccatttactgcaacatcagagagtcccag

SEQ ID NO: 15288 - DNA, 122 bp, Homo sapiens
  misc_feature (61)..(62): /note="This region represents a CpG dinucleotide"
  misc_feature (61)..(61): /note="Nucleotide may be methylated to form 5-methylcytosine"
ctccacctagtgctggtcttggcccttagcaagtgctcagtacacccgtgtggaattgggcggtgagggtaaagggaggaggagggaagggccaagagctccctgtgctcaatgaagagagg

SEQ ID NO: 15289 - DNA, 122 bp, Homo sapiens
  misc_feature (61)..(62): /note="This region represents a CpG dinucleotide"
  misc_feature (61)..(61): /note="Nucleotide may be methylated to form 5-methylcytosine"
aagtacctcatctaccgccgctaccgccagttccatgctttgcagagcaagctggaggagcgcttcgggccagacagcaagagcagtgccctggcctgtaccctgcccacactcccaggtag

SEQ ID NO: 15290 - DNA, 122 bp, Homo sapiens
  misc_feature (61)..(62): /note="This region represents a CpG dinucleotide"
  misc_feature (61)..(61): /note="Nucleotide may be methylated to form 5-methylcytosine"
gctgagagctcggcgctggtgctacacggagcaggcccaggtgcagcaggaggggctcaccgtccttggccacgtccccgatgggcacactgtgcttctgtgccatgtaccccaggaaggag

SEQ ID NO: 15291 - DNA, 122 bp, Homo sapiens
  misc_feature (61)..(62): /note="This region represents a CpG dinucleotide"
  misc_feature (61)..(61): /note="Nucleotide may be methylated to form 5-methylcytosine"
gtcgtccggcatccatgtagcgctggtgactggaggcaacaagggcatcggcttggccatcgtgcgcgacctgtgccggctgttctcgggggacgtggtgctcacggcgcgggacgtgacgc

SEQ ID NO: 15292 - DNA, 122 bp, Homo sapiens
  misc_feature (61)..(62): /note="This region represents a CpG dinucleotide"
  misc_feature (61)..(61): /note="Nucleotide may be methylated to form 5-methylcytosine"
gacatgaacgcagagttcattacatatgggccctgtacattcccacaacccacaggacaccgagcaactaggtaacaaaaccgaaaatgcatgctggagacataacaaaaccaggtaagctg

SEQ ID NO: 15293 - DNA, 122 bp, Homo sapiens
  misc_feature (61)..(62): /note="This region represents a CpG dinucleotide"
  misc_feature (61)..(61): /note="Nucleotide may be methylated to form 5-methylcytosine"
aaagtaaaattttgcagctgtaaaatgatatgacaaaacctctcaaaactgatctagaaacgggaaaacaaattatcaatatcctgaacaaaataggagatatccatatagattttacagtt

SEQ ID NO: 15294 - DNA, 122 bp, Homo sapiens
  misc_feature (61)..(62): /note="This region represents a CpG dinucleotide"
  misc_feature (61)..(61): /note="Nucleotide may be methylated to form 5-methylcytosine"
aagcgagctgaacacaaggaaaaaaagcttccttgggagacaagaatgctggcatctctacgacaggggcactgttagcattacggacctagaaagtgagatgtcacacatagtcccaacta

SEQ ID NO: 15295 - DNA, 122 bp, Homo sapiens
  misc_feature (61)..(62): /note="This region represents a CpG dinucleotide"
  misc_feature (61)..(61): /note="Nucleotide may be methylated to form 5-methylcytosine"
ataaaacaggagaaaatgcaccaaatagcaaacgtgaaaaaggaatcctagctagatgaacgcctggaatgctaccagaatagcactgtcatttagaaataacgaagaggaagtggtcaggg

SEQ ID NO: 15296 - DNA, 122 bp, Homo sapiens
  misc_feature (61)..(62): /note="This region represents a CpG dinucleotide"
  misc_feature (61)..(61): /note="Nucleotide may be methylated to form 5-methylcytosine"
cctggttttgtttcatcttgacatgactggctgatataatccaccttttcacatagcctgcgtaggcacagcctaggccagttaggcaagcggatttccatttttgtaatgatgagactttt

SEQ ID NO: 15297 - DNA, 122 bp, Homo sapiens
  misc_feature (61)..(62): /note="This region represents a CpG dinucleotide"
  misc_feature (61)..(61): /note="Nucleotide may be methylated to form 5-methylcytosine"
agggcagatctccctcacattgcctttgatctcctgatacccatcacactgtcagcttagcgtagcgtaactaaggcaggaagagacccattctaacatcttgcttgtagcagacacttagg

SEQ ID NO: 15298 - DNA, 122 bp, Homo sapiens
  misc_feature (61)..(62): /note="This region represents a CpG dinucleotide"
  misc_feature (61)..(61): /note="Nucleotide may be methylated to form 5-methylcytosine"
aacccagcaatctctctcctgtacccaggaaaaacccgtgcatgtgatcacccaaggatacgcacatgggtctatagcacaaatgggaaacaatccaggcgtctgtcaacaggaggatagat

SEQ ID NO: 15299 - DNA, 122 bp, Homo sapiens
  misc_feature (61)..(62): /note="This region represents a CpG dinucleotide"
  misc_feature (61)..(61): /note="Nucleotide may be methylated to form 5-methylcytosine"
ctttagaatgcttccttcactttctcacatacccacagtgtttcagagctagccacagaacgatgcatgttgcaatgctatgctggaaatacagactcatgttgaaatcgttgccaacaact

SEQ ID NO: 15300 - DNA, 122 bp, Homo sapiens
  misc_feature (61)..(62): /note="This region represents a CpG dinucleotide"
  misc_feature (61)..(61): /note="Nucleotide may be methylated to form 5-methylcytosine"
tttgcagtgtcattatataaggtactttgggctcagaatagaatcacatgtatagaacagcgaaatgactcaggttgatatcacagcattttccaatctagcagtgaaccttagaaaaggta

SEQ ID NO: 15301 - DNA, 122 bp, Homo sapiens
  misc_feature (61)..(62): /note="This region represents a CpG dinucleotide"
  misc_feature (61)..(61): /note="Nucleotide may be methylated to form 5-methylcytosine"
aggtttgcatcagtcactgcactgtcagggactctagtgaccaaacaagcccgggccagccggcccccaccttgccacctcccgccactcgcacccgtgtggacggaggcggccagcatcgg

SEQ ID NO: 15302 - DNA, 122 bp, Homo sapiens
  misc_feature (61)..(62): /note="This region represents a CpG dinucleotide"
  misc_feature (61)..(61): /note="Nucleotide may be methylated to form 5-methylcytosine"
taagaacatcagtgttaccgtccttagtatcaaataaatgcaggcaaaagcacaagactacggagttttatttagcctgaacagcctagtagtgttggatttaggaggtgtttaatgctgac

SEQ ID NO: 15303 - DNA, 122 bp, Homo sapiens
  misc_feature (61)..(62): /note="This region represents a CpG dinucleotide"
  misc_feature (61)..(61): /note="Nucleotide may be methylated to form 5-methylcytosine"
caaactcctgacctcggatgattcacctacctcggcctcccaaagtgctgggattacaggcgtgagccatcgcatgtggccaggaaatgatatttaaaggaaacataaacgtattagccaac

SEQ ID NO: 15304 - DNA, 122 bp, Homo sapiens
  misc_feature (61)..(62): /note="This region represents a CpG dinucleotide"
  misc_feature (61)..(61): /note="Nucleotide may be methylated to form 5-methylcytosine"
ctcacatcttctcttactgaagccatgatcattcatggaaaaggcactgaggggagtgtgcggagcctttgtgaagggagctgtgcttccctgtgctcccttcacatggaggtgagggggag

SEQ ID NO: 15305 - DNA, 122 bp, Homo sapiens
  misc_feature (61)..(62): /note="This region represents a CpG dinucleotide"
  misc_feature (61)..(61): /note="Nucleotide may be methylated to form 5-methylcytosine"
tggccaacatggtgaaatcccgtctttgctgaaaatacaaaaattagccgggtgtggtggcgcatggctgtaatcccagaaactcaggaggctgagtcaggagaatcacttaaatccgggag

SEQ ID NO: 15306 - DNA, 122 bp, Homo sapiens
  misc_feature (61)..(62): /note="This region represents a CpG dinucleotide"
  misc_feature (61)..(61): /note="Nucleotide may be methylated to form 5-methylcytosine"
gaagtaaagcagccaacctggctggaattgactcagagccaggaggaagcactattgtgacggacagaaaggtaagcaagagagccccagcagtctatagtttcaccatgaattctgcaatt

SEQ ID NO: 15307 - DNA, 122 bp, Homo sapiens
  misc_feature (61)..(62): /note="This region represents a CpG dinucleotide"
  misc_feature (61)..(61): /note="Nucleotide may be methylated to form 5-methylcytosine"
ttctgcttagatctttgggtttttccatttgtacagtctccttattaatgtccctcccaacgtaaagtcctgtttgatcttagagctaatgagtaaagctgggtggggcaaaaagcccgaga

SEQ ID NO: 15308 - DNA, 122 bp, Homo sapiens
  misc_feature (61)..(62): /note="This region represents a CpG dinucleotide"
  misc_feature (61)..(61): /note="Nucleotide may be methylated to form 5-methylcytosine"
cctaagtcctatgcatctttatgctaccccatgagggagcagctgcaagtcatgaacacacgtccatcatgcagcatcatgggtgtggcacccaaaggatgagctggaaaatgaaacattat

SEQ ID NO: 15309 - DNA, 122 bp, Homo sapiens
  misc_feature (61)..(62): /note="This region represents a CpG dinucleotide"
  misc_feature (61)..(61): /note="Nucleotide may be methylated to form 5-methylcytosine"
ctggataatatccagcacttggctaatagccaatggggatcagggaattgcctgattgtacgtaggttgacacatttgcttataggttagcagctcacttgtgtaatgactttcattaaggt

SEQ ID NO: 15310 - DNA, 122 bp, Homo sapiens
  misc_feature (61)..(62): /note="This region represents a CpG dinucleotide"
  misc_feature (61)..(61): /note="Nucleotide may be methylated to form 5-methylcytosine"
tctgggctctctccagtcttcggtggctgcgggcgtgaaagcagctgcaggtgcgaaagacgtctacctgtgggacgaggtgctggagctgcccagccctacctgaatgacaggatctaaac

SEQ ID NO: 15311 - DNA, 122 bp, Homo sapiens
  misc_feature (61)..(62): /note="This region represents a CpG dinucleotide"
  misc_feature (61)..(61): /note="Nucleotide may be methylated to form 5-methylcytosine"
ccagctttccccagttaggacttgatgcaaacagtatgtgttgaagaatgttttgtatgacgtgttcggtagtcatttttcatcatgttcacttgtaatgaatttcagcattttccacattg

SEQ ID NO: 15312 - DNA, 122 bp, Homo sapiens
  misc_feature (61)..(62): /note="This region represents a CpG dinucleotide"
  misc_feature (61)..(61): /note="Nucleotide may be methylated to form 5-methylcytosine"
aatgaaatgatgttattcgaggatctgctgtaatttgaaggtactcacaatttccagacacgaaaggctgtgtaacagtggactttataccctgagagtgaaagtaaaatgttcactctgag

SEQ ID NO: 15313 - DNA, 122 bp, Homo sapiens
  misc_feature (61)..(62): /note="This region represents a CpG dinucleotide"
  misc_feature (61)..(61): /note="Nucleotide may be methylated to form 5-methylcytosine"
gtaactggaaggccccgaagccagcttccagcaggcagggctgggaggttgaacttgagccggtttgggagccaggagcgagtgggtgacaggtcattcctgactgggaaggttgcttgaca

SEQ ID NO: 15314 - DNA, 122 bp, Homo sapiens
  misc_feature (61)..(62): /note="This region represents a CpG dinucleotide"
  misc_feature (61)..(61): /note="Nucleotide may be methylated to form 5-methylcytosine"
tcaaggcaaattcttttcctaattaaaggctggtctccacagctgtcattggggtgacctcgctaattcaaataaatagccacagggtttcaaagggaacagttttaactctgctttccata

SEQ ID NO: 15315 - DNA, 122 bp, Homo sapiens
  misc_feature (61)..(62): /note="This region represents a CpG dinucleotide"
  misc_feature (61)..(61): /note="Nucleotide may be methylated to form 5-methylcytosine"
acactacttcctcatttttctcacaagacaactgagattcatagaggccctgtaacttatcggagccccagagctagcaaatggcaggtgtaggatcggaaacacaggtttcaaagtccatg

SEQ ID NO: 15316 - DNA, 122 bp, Homo sapiens
  misc_feature (61)..(62): /note="This region represents a CpG dinucleotide"
  misc_feature (61)..(61): /note="Nucleotide may be methylated to form 5-methylcytosine"
cttttctcagcagtcagacattgttccttggctctagcaccaaggagttgtgcttcccatcgttagaaagatgatgcaagaggtctgccttcagtttgacatgtttgttttcaataacagga

SEQ ID NO: 15317 - DNA, 122 bp, Homo sapiens
  misc_feature (61)..(62): /note="This region represents a CpG dinucleotide"
  misc_feature (61)..(61): /note="Nucleotide may be methylated to form 5-methylcytosine"
tctcttgttaccatctctcaggtccctggggctctattcattttctcactctattttctccgttgttcagactgagtagtttctattgttctaccttatggtatgctgattcttccctttct

SEQ ID NO: 15318 - DNA, 122 bp, Homo sapiens
  misc_feature (61)..(62): /note="This region represents a CpG dinucleotide"
  misc_feature (61)..(61): /note="Nucleotide may be methylated to form 5-methylcytosine"
gacatgtaaccagaacaacacagtaaaggttgttgcctgggaattagaagtgaaacaccacgcccaaatggctcaagctggtggccagagataagaacttaaaggcatctctcccgcctagc

SEQ ID NO: 15319 - DNA, 122 bp, Homo sapiens
  misc_feature (61)..(62): /note="This region represents a CpG dinucleotide"
  misc_feature (61)..(61): /note="Nucleotide may be methylated to form 5-methylcytosine"
tgaattggccttagcttgctcttgcacttgcttacttgcttgcttgcttcttacagagggcggatggaataactcaacattccttccttcctccactgcaacacaagttacataggtgatga

SEQ ID NO: 15320 - DNA, 122 bp, Homo sapiens
  misc_feature (61)..(62): /note="This region represents a CpG dinucleotide"
  misc_feature (61)..(61): /note="Nucleotide may be methylated to form 5-methylcytosine"
ccattgacatcattgggattaaattactaatttcccttatgactatcttccagaccagaacgaaacatgtaggaagacaagaactatccctgccattctcagtgttaaatttggaaaggtgt

SEQ ID NO: 15321 - DNA, 122 bp, Homo sapiens
  misc_feature (61)..(62): /note="This region represents a CpG dinucleotide"
  misc_feature (61)..(61): /note="Nucleotide may be methylated to form 5-methylcytosine"
ttcaattaagaagccaaaacctgtaagaccatggagctccacacaggactgaggcggcggcgattttgttcaatgacacggagctcgctggaatccacgcccctgagtttgatcgtggtcac

SEQ ID NO: 15322 - DNA, 122 bp, Homo sapiens
  misc_feature (61)..(62): /note="This region represents a CpG dinucleotide"
  misc_feature (61)..(61): /note="Nucleotide may be methylated to form 5-methylcytosine"
tatctttttattcagtacaagttgaaattacagttgtattaaaactgactgaaggctgggcgcagtggctcatgcctgtaatcccagcactttgggaggccaaggtaggtagatcacttgag

SEQ ID NO: 15323 - DNA, 122 bp, Homo sapiens
  misc_feature (61)..(62): /note="This region represents a CpG dinucleotide"
  misc_feature (61)..(61): /note="Nucleotide may be methylated to form 5-methylcytosine"
gtctctgcattgccccccgactttgatttgtattacctgtttttttcctctaatgacctacgttgtaatagatgaaaattcagtgtgtgtgtgtgtgtatatgtgtgtgtgtgtgtgtagtt

SEQ ID NO: 15324 - DNA, 122 bp, Homo sapiens
  misc_feature (61)..(62): /note="This region represents a CpG dinucleotide"
  misc_feature (61)..(61): /note="Nucleotide may be methylated to form 5-methylcytosine"
taaacagggaagtaatggctctgtggccacctatgatgcagcatggaagttctactggcacgtgtcttctttctggatgtagtaccccctctaacacagccgccacatggtagagtagttgc

SEQ ID NO: 15325 - DNA, 122 bp, Homo sapiens
  misc_feature (61)..(62): /note="This region represents a CpG dinucleotide"
  misc_feature (61)..(61): /note="Nucleotide may be methylated to form 5-methylcytosine"
gaaccctatacagatgctcctcaagtttccatggagatacctcccaacaaaactatcatacgttgcaaatattataaattaaaaatgcattcaatacacctaacttaccaaacagcattgcc

SEQ ID NO: 15326 - DNA, 122 bp, Homo sapiens
  misc_feature (61)..(62): /note="This region represents a CpG dinucleotide"
  misc_feature (61)..(61): /note="Nucleotide may be methylated to form 5-methylcytosine"
aatggcccaaagctctatgttggctgacagctttgtgtcagagattcaacagcgccttagcggagtctattactaaaatacacagacccaggtctcatggtcctgtctgatgcttggccact

SEQ ID NO: 15327 - DNA, 122 bp, Homo sapiens
  misc_feature (61)..(62): /note="This region represents a CpG dinucleotide"
  misc_feature (61)..(61): /note="Nucleotide may be methylated to form 5-methylcytosine"
tggagggcaccttgaacataacaggaaatttcaaataacaggaaaccaagaccagcaaggcgggtggctccaccctgcgtcgggcctcagtcagcccccgggggaggccatgaacgccacgg

SEQ ID NO: 15328 - DNA, 122 bp, Homo sapiens
  misc_feature (61)..(62): /note="This region represents a CpG dinucleotide"
  misc_feature (61)..(61): /note="Nucleotide may be methylated to form 5-methylcytosine"
cccctttgggctcaagtgagagtgacccatagagacaatactcagttttgctctcccattcgccatccagtgcagattatgcaatttgtcttcccacaccctcttcctcaacactgcttacc

SEQ ID NO: 15329 - DNA, 122 bp, Homo sapiens
  misc_feature (61)..(62): /note="This region represents a CpG dinucleotide"
  misc_feature (61)..(61): /note="Nucleotide may be methylated to form 5-methylcytosine"
attttgccattacgggttgatcctgttggcttgtcagtctccaacagttctctatacagacgcaaatgttctggagaggcaggccacaggtcagccccagactgtgaacccagctcaggcag

SEQ ID NO: 15330 - DNA, 122 bp, Homo sapiens
  misc_feature (61)..(62): /note="This region represents a CpG dinucleotide"
  misc_feature (61)..(61): /note="Nucleotide may be methylated to form 5-methylcytosine"
tagcccatgaccgagcagctggcagccagcaacagctctgatctttctgtgaggaagggacggaaagccccggaagtcttcagaagtcccatgctccaacaaaatatcagataaggaactca

SEQ ID NO: 15331 - DNA, 122 bp, Homo sapiens
  misc_feature (61)..(62): /note="This region represents a CpG dinucleotide"
  misc_feature (61)..(61): /note="Nucleotide may be methylated to form 5-methylcytosine"
aacatgaccagttttcgaacttggcgtgctctgaattattaaaaataatcttatagtgtccgcccagccctctcaagcatacctgcctttaatcttgtaaacaagttcatagcaggaagggg

SEQ ID NO: 15332 - DNA, 122 bp, Homo sapiens
  misc_feature (61)..(62): /note="This region represents a CpG dinucleotide"
  misc_feature (61)..(61): /note="Nucleotide may be methylated to form 5-methylcytosine"
ctgctgcttcctgcctgtgtaacagcagaggctggagcctctgtttgcttatctataaaacgaggataatgaggcctatctcataaagctgttttgaagattgagataatgtgcagtgcctg

SEQ ID NO: 15333 - DNA, 122 bp, Homo sapiens
  misc_feature (61)..(62): /note="This region represents a CpG dinucleotide"
  misc_feature (61)..(61): /note="Nucleotide may be methylated to form 5-methylcytosine"
gcagcactagcagcaaagagaaaacctccctccctgcagctacctctgccgggatccagccggtacctgacatgacccaagaccccagagacagacagtgtggccacatgttgggagatcca

SEQ ID NO: 15334 - DNA, 122 bp, Homo sapiens
  misc_feature (61)..(62): /note="This region represents a CpG dinucleotide"
  misc_feature (61)..(61): /note="Nucleotide may be methylated to form 5-methylcytosine"
tagtagtcagttttgcattggaaatatacagtcatgttgcttaacaacagagatatgttccgagaaatgtgtcatcagacagtgtagtcattgtgtgaacaccatagagtgtactcacacaa

SEQ ID NO: 15335 - DNA, 122 bp, Homo sapiens
  misc_feature (61)..(62): /note="This region represents a CpG dinucleotide"
  misc_feature (61)..(61): /note="Nucleotide may be methylated to form 5-methylcytosine"
ctcttttcacccctctgcctttccaaaacattgacaagactcatttccagttaattaattcgagaaccctccctcttcattttgggtactgggctgtcttgtcactgagccctatccctttg

SEQ ID NO: 15336 - DNA, 122 bp, Homo sapiens
  misc_feature (61)..(62): /note="This region represents a CpG dinucleotide"
  misc_feature (61)..(61): /note="Nucleotide may be methylated to form 5-methylcytosine"
aaccaccatcaccatccatctccagaaagatttcatcaacacaccatgtttcaaacttctcgattttataaagtgcctctcattcaaatagtaacagctgaagaaaaaaatgcaggtaccat

SEQ ID NO: 15337 - DNA, 122 bp, Homo sapiens
  misc_feature (61)..(62): /note="This region represents a CpG dinucleotide"
  misc_feature (61)..(61): /note="Nucleotide may be methylated to form 5-methylcytosine"
cataaaaaaaaacaagagcataaaaataccctcaaaaacccctgtcttttaaaggaaatacgaatgagttggcaagaagaatacttgacatcaagacatcagatgacatcacttttatcctg

SEQ ID NO: 15338 - DNA, 122 bp, Homo sapiens
  misc_feature (61)..(62): /note="This region represents a CpG dinucleotide"
  misc_feature (61)..(61): /note="Nucleotide may be methylated to form 5-methylcytosine"
tccttgcttctggggtctcttgctgggcctctgagtaggtctgcaagtagggctgggcatcggggctcattttgaccacaagtgtttgctggttttggagtcaggcagacatgtgtcactgc

SEQ ID NO: 15339 - DNA, 122 bp, Homo sapiens
  misc_feature (61)..(62): /note="This region represents a CpG dinucleotide"
  misc_feature (61)..(61): /note="Nucleotide may be methylated to form 5-methylcytosine"
ctccttgagctctctgtggagcaatctcagagagcagtaaggtgtgacgcgaggctctgccggcttcgcagcaccgcctgcggaaagagcgcaggatggcggaggaagattaagagaaatcg

SEQ ID NO: 15340 - DNA, 122 bp, Homo sapiens
  misc_feature (61)..(62): /note="This region represents a CpG dinucleotide"
  misc_feature (61)..(61): /note="Nucleotide may be methylated to form 5-methylcytosine"
ctgggacgctggactcaggccctgccttaagaggctcagagtgtggtgaggggaaatagacgaggaaacagatacttatgaggaagaaccatcaaagaggaaggcagtaagctgcttcctgt

SEQ ID NO: 15341 - DNA, 122 bp, Homo sapiens
  misc_feature (61)..(62): /note="This region represents a CpG dinucleotide"
  misc_feature (61)..(61): /note="Nucleotide may be methylated to form 5-methylcytosine"
tttcttctttgtttcctatttcagggctatcagctacctttcaaactggtttctgacatgcgtagaggtggactcttctagaacagcagcctcagaattcacttaggaattgggcatgttca

SEQ ID NO: 15342 - DNA, 122 bp, Homo sapiens
  misc_feature (61)..(62): /note="This region represents a CpG dinucleotide"
  misc_feature (61)..(61): /note="Nucleotide may be methylated to form 5-methylcytosine"
catctctattctttgaagctggtctgctttgtttacaattatgccctagtcattagccaacggggactttgggagtagcttgttctgggaatacttcctgtcaggtttttcccagcctgtct

SEQ ID NO: 15343 - DNA, 122 bp, Homo sapiens
  misc_feature (61)..(62): /note="This region represents a CpG dinucleotide"
  misc_feature (61)..(61): /note="Nucleotide may be methylated to form 5-methylcytosine"
cccataaccctacaaatccttgcaaaacaacagttactcacattctttcttcacggcctacggcatgactggcagttctgcactgttgcccaatcccggatcactaggaaccagaaatcctt

SEQ ID NO: 15344 - DNA, 122 bp, Homo sapiens
  misc_feature (61)..(62): /note="This region represents a CpG dinucleotide"
  misc_feature (61)..(61): /note="Nucleotide may be methylated to form 5-methylcytosine"
gtaagttccccccagtagtaggagaatgtggtagcttgagctagagaagttgcctctttccggcagtggtcctcacccggtgagtcacagacactctgtgacactctggtcacaggcagctg

SEQ ID NO: 15345 - DNA, 122 bp, Homo sapiens
  misc_feature (61)..(62): /note="This region represents a CpG dinucleotide"
  misc_feature (61)..(61): /note="Nucleotide may be methylated to form 5-methylcytosine"
cagtcccaccgagagactttaatccattcctgggatgtgggagagggaccacccgccccccgtcctctcgggaaattcacatgctgcataacagcaccaggcagaacagcctgaagactttg

SEQ ID NO: 15346 - DNA, 122 bp, Homo sapiens
  misc_feature (61)..(62): /note="This region represents a CpG dinucleotide"
  misc_feature (61)..(61): /note="Nucleotide may be methylated to form 5-methylcytosine"
tttggaggtggtgtgttcatctagttggaaccaggggcagagatagcatcattcccactgcgcctgatttaacttggctttggatgatatcacaattggggttggaactttccacagtagat

SEQ ID NO: 15347 - DNA, 122 bp, Homo sapiens
  misc_feature (61)..(62): /note="This region represents a CpG dinucleotide"
  misc_feature (61)..(61): /note="Nucleotide may be methylated to form 5-methylcytosine"
agtaagtaaatgacaagatccctattcaacagatctcctggactctcattttgagaatcacgtttctctccgcgtgagttgcaccaaaccattcagctattattaagtgtctcattgtctgt

SEQ ID NO: 15348 - DNA, 122 bp, Homo sapiens
  misc_feature (61)..(62): /note="This region represents a CpG dinucleotide"
  misc_feature (61)..(61): /note="Nucleotide may be methylated to form 5-methylcytosine"
ccgggacacgacggcccagcggagccgcatgcctcccgccgcgcccgcgcgcagcacagacgggctgtcgctcgccttcctgcagagcctgcgcacgctgttccacatcctgtacgaccggc

SEQ ID NO: 15349 - DNA, 122 bp, Homo sapiens
  misc_feature (61)..(62): /note="This region represents a CpG dinucleotide"
  misc_feature (61)..(61): /note="Nucleotide may be methylated to form 5-methylcytosine"
ctttcctcttgggccaatcattgggtatttacattcactgtggtcacctgagccaggtaccgcaattgcatgtcctggagtagaaactgatgtgatacccaagactaacacttagttccttc

SEQ ID NO: 15350 - DNA, 122 bp, Homo sapiens
  misc_feature (61)..(62): /note="This region represents a CpG dinucleotide"
  misc_feature (61)..(61): /note="Nucleotide may be methylated to form 5-methylcytosine"
tcctagtcttagcctactctactcacttgtgtctaacgataaattcctttgtctgagtcccgtgctttccttttaaagaattagactgtcaaaagcatgttaaacaaaaggcacaggggcct

SEQ ID NO: 15351 - DNA, 122 bp, Homo sapiens
  misc_feature (61)..(62): /note="This region represents a CpG dinucleotide"
  misc_feature (61)..(61): /note="Nucleotide may be methylated to form 5-methylcytosine"
accacaagatagtgggtccctctgctgctgttgtcagatagaatttattgaagactgggacgtggaaacaaagaggaaggaagagacgttttaatctctgtgggtgttaggctgacttctga

SEQ ID NO: 15352 - DNA, 122 bp, Homo sapiens
  misc_feature (61)..(62): /note="This region represents a CpG dinucleotide"
  misc_feature (61)..(61): /note="Nucleotide may be methylated to form 5-methylcytosine"
tggagaacgtctcctttgtgacgtggagactgagaagggtgcgtgaatgtgttgtgtgaccgggacatagcgtgagtgtcctttgaaagcgtgctttgctataactctgtggtgtcactgac

SEQ ID NO: 15353 - DNA, 122 bp, Homo sapiens
  misc_feature (61)..(62): /note="This region represents a CpG dinucleotide"
  misc_feature (61)..(61): /note="Nucleotide may be methylated to form 5-methylcytosine"
tatttttaaagcctttgattatttttctaaaaatgtttttgcatgcttatagcctgatgccgtaaatgttttatgagtttaatgtacagcacctctaggtgctatttaaaattgttttttct

SEQ ID NO: 15354 - DNA, 122 bp, Homo sapiens
  misc_feature (61)..(62): /note="This region represents a CpG dinucleotide"
  misc_feature (61)..(61): /note="Nucleotide may be methylated to form 5-methylcytosine"
actgcccccttgcctggcccaccccgtggagaggtcacaagcttcagcatcagacagggccggggtcaagtccagctttggcattagctaagctgcatgaccttaagcaacccatgttaaac

SEQ ID NO: 15355 - DNA, 122 bp, Homo sapiens
  misc_feature (61)..(62): /note="This region represents a CpG dinucleotide"
  misc_feature (61)..(61): /note="Nucleotide may be methylated to form 5-methylcytosine"
ttccctacagaatcagctttactctcctgtgttttgccagaagaaacatttcataaaactcgtctttgaatctattggaaagatgttcttgagggtgtggcttcccactttccacagggtct

SEQ ID NO: 15356 - DNA, 122 bp, Homo sapiens
  misc_feature (61)..(62): /note="This region represents a CpG dinucleotide"
  misc_feature (61)..(61): /note="Nucleotide may be methylated to form 5-methylcytosine"
ttttatcacctatcagttgagtttttggaaagccttccagggcagcgttgtggttttgaacgcactcttgttcgtgatttatctggtagtacagctctgctgacaaggctctgaaaactcag

SEQ ID NO: 15357 - DNA, 122 bp, Homo sapiens
  misc_feature (61)..(62): /note="This region represents a CpG dinucleotide"
  misc_feature (61)..(61): /note="Nucleotide may be methylated to form 5-methylcytosine"
gtaaccaagatttcctgttatagaagcagccctatctgggggtgtgggggtagggagggacgaaagaggactaaataacacactgtaatgaaacctgcctttgggcagcacatgcttcggtt

SEQ ID NO: 15358 - DNA, 122 bp, Homo sapiens
  misc_feature (61)..(62): /note="This region represents a CpG dinucleotide"
  misc_feature (61)..(61): /note="Nucleotide may be methylated to form 5-methylcytosine"
agaaatgtccaggtaatgtgtatactcactcacttccctcatgacaggcttagccttaggcgtgaagttggaacagaggcatttctcttgcattttgtgtagtgttccgtgtgcctctttgt

SEQ ID NO: 15359 - DNA, 122 bp, Homo sapiens
  misc_feature (61)..(62): /note="This region represents a CpG dinucleotide"
  misc_feature (61)..(61): /note="Nucleotide may be methylated to form 5-methylcytosine"
gatgggggttgaagatgcgactcattttggagacgtggtcgttgtcacagtctaggtcctcgtcacctggctccatgctgaacttcctcttgctggggctgattgggggagggccggtgcgg

SEQ ID NO: 15360 - DNA, 122 bp, Homo sapiens
  misc_feature (61)..(62): /note="This region represents a CpG dinucleotide"
  misc_feature (61)..(61): /note="Nucleotide may be methylated to form 5-methylcytosine"
ccaatatggggcaactgattttccttactctccaagtcccattgtactagaggctaaaggcgagatattcccagtctggcctccagggtcaccttcaggtctgtcaaaaatacctcctgctg

SEQ ID NO: 15361 - DNA, 122 bp, Homo sapiens
  misc_feature (61)..(62): /note="This region represents a CpG dinucleotide"
  misc_feature (61)..(61): /note="Nucleotide may be methylated to form 5-methylcytosine"
gagtcaggtatcccagggatctgtgacgagggagctggggcatgggtgtcggaccaaagacgcctaagtttgaatcccagctgtgagcttgggcaagctcctcaacctctctgagcccatgc

SEQ ID NO: 15362 - DNA, 122 bp, Homo sapiens
  misc_feature (61)..(62): /note="This region represents a CpG dinucleotide"
  misc_feature (61)..(61): /note="Nucleotide may be methylated to form 5-methylcytosine"
actccagcactgggtcagatggaggtcataaggctggtcagtgtgggaatgtgccctgcacgcactcagacaaggccactccttaccctaagtgccactgccaagcaagggagatagccaaa

SEQ ID NO: 15363 - DNA, 122 bp, Homo sapiens
  misc_feature (61)..(62): /note="This region represents a CpG dinucleotide"
  misc_feature (61)..(61): /note="Nucleotide may be methylated to form 5-methylcytosine"
gtgtgggtcttggcaggaggaaggcagcatagaaatgggccaggggcagtagggaggggccgcttgtgcttgtgaccgagaggctatggctcagctctaggctgaccaccagtgccagccca

SEQ ID NO: 15364 - DNA, 122 bp, Homo sapiens
  misc_feature (61)..(62): /note="This region represents a CpG dinucleotide"
  misc_feature (61)..(61): /note="Nucleotide may be methylated to form 5-methylcytosine"
gggaagatgtaatcttactggattttataccctgggggaactcggattactgagctgaagcgttgcaggaccccaaggaaacagatcactgagctaaagtgttgcaagacatcctgtcctag

SEQ ID NO: 15365 - DNA, 122 bp, Homo sapiens
  misc_feature (61)..(62): /note="This region represents a CpG dinucleotide"
  misc_feature (61)..(61): /note="Nucleotide may be methylated to form 5-methylcytosine"
tagaatacttcttgcaacttttagatgacttccctgacaaaacccacactctacaatttgcgaagtttagtgaagaaaccagtgaggtttacgcagtttacagcttggtattccctgggctc

SEQ ID NO: 15366 - DNA, 122 bp, Homo sapiens
  misc_feature (61)..(62): /note="This region represents a CpG dinucleotide"
  misc_feature (61)..(61): /note="Nucleotide may be methylated to form 5-methylcytosine"
cacagctgccaggctgccccaagcaagcaacagccacagtgagtgaccccaagaaacatgcgcacacccagggttaaaaggcctttggagagacccacccatgtagagttacagcaataaca

SEQ ID NO: 15367 - DNA, 122 bp, Homo sapiens
  misc_feature (61)..(62): /note="This region represents a CpG dinucleotide"
  misc_feature (61)..(61): /note="Nucleotide may be methylated to form 5-methylcytosine"
gattaaaacatgggaaaatataagttataaaatttttatactgggtgcagtggctcacatcggtaataccaactacttgggaagctcaggcaggagggtcgcttgagggcaaaaacttgata

SEQ ID NO: 15368 - DNA, 122 bp, Homo sapiens
  misc_feature (61)..(62): /note="This region represents a CpG dinucleotide"
  misc_feature (61)..(61): /note="Nucleotide may be methylated to form 5-methylcytosine"
tccattagagtgaaaaagaattgtagaaatccaggtccctgctgtgccctttttgaagaacgaggcatacaagctgttgataaatgctatgtctccgtcagagagaataggatcttgacatc

SEQ ID NO: 15369 - DNA, 122 bp, Homo sapiens
  misc_feature (61)..(62): /note="This region represents a CpG dinucleotide"
  misc_feature (61)..(61): /note="Nucleotide may be methylated to form 5-methylcytosine"
aaaacaagggtgaggccgggcacagtggttcacacctgctatcccaggactttggtaggccgaggcaggatgattgcttgagcccaggagcttgagaccagcctgagcaacatagggacacc

SEQ ID NO: 15370 - DNA, 122 bp, Homo sapiens
  misc_feature (61)..(62): /note="This region represents a CpG dinucleotide"
  misc_feature (61)..(61): /note="Nucleotide may be methylated to form 5-methylcytosine"
tgagtggtgattgaatgtgaaagcttaggacacaaccgtacaccttataaacactgtacacgtagatggcactacatttataaaaaatatttttctttcttcaatactgaattaactttagc

SEQ ID NO: 15371 - DNA, 122 bp, Homo sapiens
  misc_feature (61)..(62): /note="This region represents a CpG dinucleotide"
  misc_feature (61)..(61): /note="Nucleotide may be methylated to form 5-methylcytosine"
aacatgggatttgggcggggacaaatatccaactctatcatttacttgactacaacaaagcgtgttgaggattagcagccagctctgacacataggaactagggtcccctgtttgcttctga

SEQ ID NO: 15372 - DNA, 122 bp, Homo sapiens
  misc_feature (61)..(62): /note="This region represents a CpG dinucleotide"
  misc_feature (61)..(61): /note="Nucleotide may be methylated to form 5-methylcytosine"
aagtcttccaaggtctgaaatattcaaaggaaaacaaaccaaaactggctctttgaaacgcgtgtctagcaaggaatatgtactaaatataagcgattcctatttctactgacgtaaaagat

SEQ ID NO: 15373 - DNA, 122 bp, Homo sapiens
  misc_feature (61)..(62): /note="This region represents a CpG dinucleotide"
  misc_feature (61)..(61): /note="Nucleotide may be methylated to form 5-methylcytosine"
acctcactcagtgaagaaaatcgcagatgcaaactatatgaaataccactttttacctatcggttgccccaaatccaaaagttgaaccacatattctatgggaggagctgtgaagaaataag

SEQ ID NO: 15374 - DNA, 122 bp, Homo sapiens
  misc_feature (61)..(62): /note="This region represents a CpG dinucleotide"
  misc_feature (61)..(61): /note="Nucleotide may be methylated to form 5-methylcytosine"
tttaaagtatattctctgttgcatgttttagaatatggtaacttctcatgaaataaccagcgaatttccccagtgaccaaaagaggaaaaagaaaaaatcagtggccaatttgaccatacta

SEQ ID NO: 15375 - DNA, 122 bp, Homo sapiens
  misc_feature (61)..(62): /note="This region represents a CpG dinucleotide"
  misc_feature (61)..(61): /note="Nucleotide may be methylated to form 5-methylcytosine"
ctgtatcacatgcctctgacaaactgaacaagaagccacaaggtctctgtgaccttttctcgcaaacttcctgtctctcaatcttctgtctgtcccaaagaacaggatgaagttgttctctg

SEQ ID NO: 15376 - DNA, 122 bp, Homo sapiens
  misc_feature (61)..(62): /note="This region represents a CpG dinucleotide"
  misc_feature (61)..(61): /note="Nucleotide may be methylated to form 5-methylcytosine"
tcttccaggagaactggcaggatttgaattgccaacatcttggaaatccatgcagaaagacgccatataaaatgtcttttaaactgagattgagttaaaggttctgctgtgtagaaaccaag

SEQ ID NO: 15377 - DNA, 122 bp, Homo sapiens
  misc_feature (61)..(62): /note="This region represents a CpG dinucleotide"
  misc_feature (61)..(61): /note="Nucleotide may be methylated to form 5-methylcytosine"
gtcacccaagctttgctgtgaatgacttaaagagctcccatgaacatatcagcacagtgacgggcattaggtagatgcccaacaaatacatgtgtagcctaagtctggatagattaatgtgt

SEQ ID NO: 15378 - DNA, 122 bp, Homo sapiens
  misc_feature (61)..(62): /note="This region represents a CpG dinucleotide"
  misc_feature (61)..(61): /note="Nucleotide may be methylated to form 5-methylcytosine"
aaaccagcatctccctatctgtctctcctaattgcacaaaggacttgatgtggattatcacgtcacactccacaaggaaatggcaaaacaaaaagaagtttggagaagcaaggaaagtacca

SEQ ID NO: 15379 - DNA, 122 bp, Homo sapiens
  misc_feature (61)..(62): /note="This region represents a CpG dinucleotide"
  misc_feature (61)..(61): /note="Nucleotide may be methylated to form 5-methylcytosine"
ctagcatatgctgtgcacaataagtacaggctcgatctagccacactgctagcatcaaagcgtattcttcattaattgaatgtgacagtgcacttacccctcctttttgagagaacaaaata

SEQ ID NO: 15380 - DNA, 122 bp, Homo sapiens
  misc_feature (61)..(62): /note="This region represents a CpG dinucleotide"
  misc_feature (61)..(61): /note="Nucleotide may be methylated to form 5-methylcytosine"
cccccatcaattacccctctctcgtttttcaatactgggtctcttgcagagttgcagtggcggccacctggtcagtgaaatcagcgaattgaaaaaccactgacttcattaacatgtctaaa

SEQ ID NO: 15381 - DNA, 122 bp, Homo sapiens
  misc_feature (61)..(62): /note="This region represents a CpG dinucleotide"
  misc_feature (61)..(61): /note="Nucleotide may be methylated to form 5-methylcytosine"
gagggaggtgggggggtcagccccccgcccggccagccgcccggtccgggaggtgaggggcgcctctcctcagccgcccctactgggacgtgaggagcccctctgcccggccaccaccccgt

SEQ ID NO: 15382 - DNA, 122 bp, Homo sapiens
  misc_feature (61)..(62): /note="This region represents a CpG dinucleotide"
  misc_feature (61)..(61): /note="Nucleotide may be methylated to form 5-methylcytosine"
gggcaaatggcaagccctcatttatattagttatgttcaccatttcttataaccccatgacgcaggcaccattattataatcatgttacaggagaggaaactgattatcagagaggatagca

SEQ ID NO: 15383 - DNA, 122 bp, Homo sapiens
  misc_feature (61)..(62): /note="This region represents a CpG dinucleotide"
  misc_feature (61)..(61): /note="Nucleotide may be methylated to form 5-methylcytosine"
cagtttaggccctttccagagggcatacagcttcctttcatctgaggcttagcgacttcgcggaccaaccatgcagtttgccttgtccaggtagtttagccaggtagccataactcagtctt

SEQ ID NO: 15384 - DNA, 122 bp, Homo sapiens
  misc_feature (61)..(62): /note="This region represents a CpG dinucleotide"
  misc_feature (61)..(61): /note="Nucleotide may be methylated to form 5-methylcytosine"
aatgtttcctccaccaagcctcaaaagttcgtgacagtgcctgaccaacttgtgttcagccgcaccttactcatctctgtcccagaacagtttattttcccaccaccatgccctcactcaaa

SEQ ID NO: 15385 - DNA, 122 bp, Homo sapiens
  misc_feature (61)..(62): /note="This region represents a CpG dinucleotide"
  misc_feature (61)..(61): /note="Nucleotide may be methylated to form 5-methylcytosine"
gacacatgtgtatgccatcgttctcataaatgctcatggaaaacaggacagtcttgtccccggtttccttcccaggcagattctaacccctgagtcacggactttgcagctagcttctgagc

SEQ ID NO: 15386 - DNA, 122 bp, Homo sapiens
  misc_feature (61)..(62): /note="This region represents a CpG dinucleotide"
  misc_feature (61)..(61): /note="Nucleotide may be methylated to form 5-methylcytosine"
tttatttctccagtaaacaaccaggtcaaaggcagggctctgtcatagttccacaagtcccgctgcctgtgccaagacctaataggatgcagagataggggggtgacctgaacacagcagag

SEQ ID NO: 15387 - DNA, 122 bp, Homo sapiens
  misc_feature (61)..(62): /note="This region represents a CpG dinucleotide"
  misc_feature (61)..(61): /note="Nucleotide may be methylated to form 5-methylcytosine"
ccgtcccacccctccctgagcacgccaccccgccctctccctctctgagagcgagatacccggccagacaccctcacctgcggtgcccagctgcccaggctgaggcaagagaaggccagaaa

SEQ ID NO: 15388 - DNA, 122 bp, Homo sapiens
  misc_feature (61)..(62): /note="This region represents a CpG dinucleotide"
  misc_feature (61)..(61): /note="Nucleotide may be methylated to form 5-methylcytosine"
taaacatttctgaaacattcctcttccatttattctgtgattttcttcagaaacacaaggcgtgcacgagtcagcttatcagcttatccttcacccacacgtaggctcttctttccaatcaa

SEQ ID NO: 15389 - DNA, 122 bp, Homo sapiens
  misc_feature (61)..(62): /note="This region represents a CpG dinucleotide"
  misc_feature (61)..(61): /note="Nucleotide may be methylated to form 5-methylcytosine"
gatattctcctaaaaaatttccaggttgattcaaataacttaggttaaactcaacttttacgtgttgggatggggaagagaagacttatttgtagccttcacacctttatgttcctgtttca

SEQ ID NO: 15390 - DNA, 122 bp, Homo sapiens
  misc_feature (61)..(62): /note="This region represents a CpG dinucleotide"
  misc_feature (61)..(61): /note="Nucleotide may be methylated to form 5-methylcytosine"
gaagggataaaagaaggttcaaaaaatattgcacacctgtagaataggtgtgacacaacacgcatgcatgtagacaactttatgtaaaagacttggaggtttcagctgacagtttaatgatt

SEQ ID NO: 15391 - DNA, 122 bp, Homo sapiens
  misc_feature (61)..(62): /note="This region represents a CpG dinucleotide"
  misc_feature (61)..(61): /note="Nucleotide may be methylated to form 5-methylcytosine"
gtgttgaaaagtggataattttaagcctatttacagatgaggaaacagagaccaagtaagcgcttaagtaatttgccccgggacatgtatcttttaagtgaccgagccagaatttaaatcca

SEQ ID NO: 15392 - DNA, 122 bp, Homo sapiens
  misc_feature (61)..(62): /note="This region represents a CpG dinucleotide"
  misc_feature (61)..(61): /note="Nucleotide may be methylated to form 5-methylcytosine"
gtgtgctatcgtctttgttttgtgaatacattttcttaatgacatttggaggccttcagtcgttctgcagccaccagagttgtggcaaagtgggaatgctgtccatttgacagtgttgtttc

SEQ ID NO: 15393 - DNA, 122 bp, Homo sapiens
  misc_feature (61)..(62): /note="This region represents a CpG dinucleotide"
  misc_feature (61)..(61): /note="Nucleotide may be methylated to form 5-methylcytosine"
tgccctaggcaagtgtgccattttaatcctttataccatatctttgctgcaccttttctacgtttagatatgtgtcacatgttacagttgcctggggtattcagtgcagcgtcatgctgtgt

SEQ ID NO: 15394 - DNA, 122 bp, Homo sapiens
  misc_feature (61)..(62): /note="This region represents a CpG dinucleotide"
  misc_feature (61)..(61): /note="Nucleotide may be methylated to form 5-methylcytosine"
ctgtgatatgtttagacaatgcactgtatttaactgaatttacagatgccccaactcagacgtggtagtaaacgccagagactaataggaaattaaacatgtacaatggactaactccattt

SEQ ID NO: 15395 - DNA, 122 bp, Homo sapiens
  misc_feature (61)..(62): /note="This region represents a CpG dinucleotide"
  misc_feature (61)..(61): /note="Nucleotide may be methylated to form 5-methylcytosine"
cataatcaatagcgtctgcaagcctagttctgcatgttaaaaacaaagcacaatgttagccgcacagagcagctcatgcttctccccacacagagacaatagtgagtcgtaatagactcacc

SEQ ID NO: 15396 - DNA, 122 bp, Homo sapiens
  misc_feature (61)..(62): /note="This region represents a CpG dinucleotide"
  misc_feature (61)..(61): /note="Nucleotide may be methylated to form 5-methylcytosine"
gtttcagtttcaaattacatcaaacatctaaattgggaatcccagctcctccaccaccagcgcatcaaaggtagatattcaaagcagtacttatttacaaacggcgatgcaaatctgtcccg

SEQ ID NO: 15397 - DNA, 122 bp, Homo sapiens
  misc_feature (61)..(62): /note="This region represents a CpG dinucleotide"
  misc_feature (61)..(61): /note="Nucleotide may be methylated to form 5-methylcytosine"
ctcttgggcacaaatcatgccaataatttaatcatcactataacttaattcctagcctgtcgtagatgcgcaatacatcctctggatggaggaagggaggtactacttctaggcaagctgcc

SEQ ID NO: 15398 - DNA, 122 bp, Homo sapiens
  misc_feature (61)..(62): /note="This region represents a CpG dinucleotide"
  misc_feature (61)..(61): /note="Nucleotide may be methylated to form 5-methylcytosine"
ctcctccttcgtgtgagcaaagcgccgcgcctccctcagggcggaacggaggcaactttccggagtctatttttgttaagacaatcaactccaataactgagctgaagtttttgtttaaaaa

SEQ ID NO: 15399 - DNA, 122 bp, Homo sapiens
  misc_feature (61)..(62): /note="This region represents a CpG dinucleotide"
  misc_feature (61)..(61): /note="Nucleotide may be methylated to form 5-methylcytosine"
cttatactcatttcttatatacctcatatcatgcccataaaacctgagggcataaactctcgctgttccatggttctctgcatatatctctgcatgcagaggccttcagctgaagtttactg

SEQ ID NO: 15400 - DNA, 122 bp, Homo sapiens
  misc_feature (61)..(62): /note="This region represents a CpG dinucleotide"
  misc_feature (61)..(61): /note="Nucleotide may be methylated to form 5-methylcytosine"
aactaattgcagcatcatgtcctgaatgcattactgagaaggcatgcacgtatactcatacgaggttgacagagtaagtcagagaaaccacaacaacaaattaataaactttccagaaccat

SEQ ID NO: 15401 - DNA, 122 bp, Homo sapiens
  misc_feature (61)..(62): /note="This region represents a CpG dinucleotide"
  misc_feature (61)..(61): /note="Nucleotide may be methylated to form 5-methylcytosine"
actcaagctggccatttaatccttgagagtcctggagctgtctagatacctctctgagtacgtgcacacaatatcaggtgtggcctgaataatgcagaatatcatgtctggggtagcactct

SEQ ID NO: 15402 - DNA, 122 bp, Homo sapiens
  misc_feature (61)..(62): /note="This region represents a CpG dinucleotide"
  misc_feature (61)..(61): /note="Nucleotide may be methylated to form 5-methylcytosine"
gggcgtcgtcctgttcctgcagtggcacatgcagttgtgggagagccagtgcccccacgccgtgtcatgcagcctgtttgtgagtgtccgcgtaacctttaattctgagctgattttgcttt

SEQ ID NO: 15403 - DNA, 122 bp, Homo sapiens
  misc_feature (61)..(62): /note="This region represents a CpG dinucleotide"
  misc_feature (61)..(61): /note="Nucleotide may be methylated to form 5-methylcytosine"
ggcagggatggtgagtctagctttcagtttcctgtacctggctgacatgattttcttcaccgtcacttgctctggctggtatttgtatccatatagaaaaatataaacataacaaaagcttt

SEQ ID NO: 15404 - DNA, 122 bp, Homo sapiens
  misc_feature (61)..(62): /note="This region represents a CpG dinucleotide"
  misc_feature (61)..(61): /note="Nucleotide may be methylated to form 5-methylcytosine"
actttgcgcgtagattaacttgcttctctgtttatgctaattaaaacagacctcagaagacgagcatgcaaacggagatactgtgattaggaggaggaggttttaaaatttttatcagttaa

SEQ ID NO: 15405 - DNA, 122 bp, Homo sapiens
  misc_feature (61)..(62): /note="This region represents a CpG dinucleotide"
  misc_feature (61)..(61): /note="Nucleotide may be methylated to form 5-methylcytosine"
agggaattatgaggaaatcttccagctggataaggattctagaaaagcctactaaaactacggttcttatttactggcaaactaaatgcagagaacaggtcatttgatggagagaagaatga

SEQ ID NO: 15406 - DNA, 122 bp, Homo sapiens
  misc_feature (61)..(62): /note="This region represents a CpG dinucleotide"
  misc_feature (61)..(61): /note="Nucleotide may be methylated to form 5-methylcytosine"
tagccctactgttttgctcaccccacactaggttttagggaaagagatataaggatacctcgtcctctgtgaggtgactcaacagtcacagacccaaactgaatgatggagcagaataaaat

SEQ ID NO: 15407 - DNA, 122 bp, Homo sapiens
  misc_feature (61)..(62): /note="This region represents a CpG dinucleotide"
  misc_feature (61)..(61): /note="Nucleotide may be methylated to form 5-methylcytosine"
cggcttgtctctgacacctttcatccaagggtccctgagctcctgactattattatctggcgacaatgatccttgaactcccgcctgacagatgcaagacctggcatgcacaggcgatggtc

SEQ ID NO: 15408 - DNA, 122 bp, Homo sapiens
  misc_feature (61)..(62): /note="This region represents a CpG dinucleotide"
  misc_feature (61)..(61): /note="Nucleotide may be methylated to form 5-methylcytosine"
tcttgcatggtggtgctgacaggatcgctcacctccaggctctcagcagtgatcctgtgacgcaagggctggccctgcactggggttgatcttcccacttccaggcccccttttcaggcctc

SEQ ID NO: 15409 - DNA, 122 bp, Homo sapiens
  misc_feature (61)..(62): /note="This region represents a CpG dinucleotide"
  misc_feature (61)..(61): /note="Nucleotide may be methylated to form 5-methylcytosine"
atatgcataaataattcaatacattttaaagccagtcaggcaatattatccacttaagaacggagataagatctgtttgtattctacattaagctatgcatacaatgttttctaagatttca

SEQ ID NO: 15410 - DNA, 122 bp, Homo sapiens
  misc_feature (61)..(62): /note="This region represents a CpG dinucleotide"
  misc_feature (61)..(61): /note="Nucleotide may be methylated to form 5-methylcytosine"
gcctgctccccgtcccacccctccctgagcacgccaccccgccctctccctctctgagagcgagatacccggccagacaccctcacctgcggtgcccagctgcccaggctgaggcaagagaa

SEQ ID NO: 15411 - DNA, 122 bp, Homo sapiens
  misc_feature (61)..(62): /note="This region represents a CpG dinucleotide"
  misc_feature (61)..(61): /note="Nucleotide may be methylated to form 5-methylcytosine"
tagtgatggattgtgtcacagccaagggatgccaataatggttttggggttcgtagacgccgatccagctgttacttgtttattcatgcaacacctctatatgcaacactgtcctggttcct

SEQ ID NO: 15412 - DNA, 122 bp, Homo sapiens
  misc_feature (61)..(62): /note="This region represents a CpG dinucleotide"
  misc_feature (61)..(61): /note="Nucleotide may be methylated to form 5-methylcytosine"
gtcagaagctaacaagttctgtgatcctgggcaggaaccttcatgcaaattgtatctttacgggcctaactttgttgacccatgcctcaatttcatcacctgcaaaattagggttttgaacc

SEQ ID NO: 15413 - DNA, 122 bp, Homo sapiens
  misc_feature (61)..(62): /note="This region represents a CpG dinucleotide"
  misc_feature (61)..(61): /note="Nucleotide may be methylated to form 5-methylcytosine"
gctttacatacagagcctcatgacctgtactcatagctggaggcatcagtcattgcactacgagaggaagtgggctttgaaataccttggggttgatgtcccaagaacacccttcttccgct

SEQ ID NO: 15414 - DNA, 122 bp, Homo sapiens
  misc_feature (61)..(62): /note="This region represents a CpG dinucleotide"
  misc_feature (61)..(61): /note="Nucleotide may be methylated to form 5-methylcytosine"
cccctcatcaaaggtggccgagagattttaaagcaggaatgaggctgagttctctgcggccggagcctcagttttcgactcgctacaaagttatgaacacactggcagccaagaagtattta

SEQ ID NO: 15415 - DNA, 122 bp, Homo sapiens
  misc_feature (61)..(62): /note="This region represents a CpG dinucleotide"
  misc_feature (61)..(61): /note="Nucleotide may be methylated to form 5-methylcytosine"
ggcaaagaatgactttcctgttactctggctcccagggtgaacacaggtaaggaaagtgacgaggcagtcaagagcaaagcccagctccctagggctttgtgaggaagaccagctccaccac

SEQ ID NO: 15416 - DNA, 122 bp, Homo sapiens
  misc_feature (61)..(62): /note="This region represents a CpG dinucleotide"
  misc_feature (61)..(61): /note="Nucleotide may be methylated to form 5-methylcytosine"
ttggtggtctctgatgtgctggacgtgctgttctgggacttgcttctttcactcacgttacgcgtttgggattcaccctgttgacactgagaggtgtggcttgtttgttccttgctgtattc

SEQ ID NO: 15417 - DNA, 122 bp, Homo sapiens
  misc_feature (61)..(62): /note="This region represents a CpG dinucleotide"
  misc_feature (61)..(61): /note="Nucleotide may be methylated to form 5-methylcytosine"
ttttgtcttcaacatcttgtacagtgtgacataaatagctcccaataaatatttggtgaacgagtgggtaaatgaatgaatggacaagctgagaacatggacaccctgttttatgatagctc

SEQ ID NO: 15418 - DNA, 122 bp, Homo sapiens
  misc_feature (61)..(62): /note="This region represents a CpG dinucleotide"
  misc_feature (61)..(61): /note="Nucleotide may be methylated to form 5-methylcytosine"
gacggcagggccagtcacacaagacgtctcttgtgaggtcaggctggcactggtggtatccgtactgcgactccctgtatgtctactttcggcatccctggagaagaccaacgcacatacgc

SEQ ID NO: 15419 - DNA, 122 bp, Homo sapiens
  misc_feature (61)..(62): /note="This region represents a CpG dinucleotide"
  misc_feature (61)..(61): /note="Nucleotide may be methylated to form 5-methylcytosine"
agaaaaaaaggtatttaaaaactctaaaaagcagattaggaaaattaagaagcagcaacacggcaggagcaaaagatacacaaacataaggcaaaacataaaagaaggtgagaggataaact

SEQ ID NO: 15420 - DNA, 122 bp, Homo sapiens
  misc_feature (61)..(62): /note="This region represents a CpG dinucleotide"
  misc_feature (61)..(61): /note="Nucleotide may be methylated to form 5-methylcytosine"
ctcttacagggaaatcggcgcccgagacacagccagcgggtgttcagaaaggaaaacgctcgctcaacagccttttcggttgattcttacattcaaggtgtgttactatttgtggcaagcat

SEQ ID NO: 15421 - DNA, 122 bp, Homo sapiens
  misc_feature (61)..(62): /note="This region represents a CpG dinucleotide"
  misc_feature (61)..(61): /note="Nucleotide may be methylated to form 5-methylcytosine"
cccttgagaaatgcagggaaggaggcacccccacagtgaacgcctcttcttcgccagagacgcctgagaattcacatcagggacacttcacatcagggacaggccggggcagagaccctgac

SEQ ID NO: 15422 - DNA, 122 bp, Homo sapiens
  misc_feature (61)..(62): /note="This region represents a CpG dinucleotide"
  misc_feature (61)..(61): /note="Nucleotide may be methylated to form 5-methylcytosine"
ttaccacaaggtttcaagtttctattctggcttctcatcttagctaccattttctgtctgcgtgatgttgcaaataaattttccttttggcatggctcagctgtcaggcacctctgttctat

SEQ ID NO: 15423 - DNA, 122 bp, Homo sapiens
  misc_feature (61)..(62): /note="This region represents a CpG dinucleotide"
  misc_feature (61)..(61): /note="Nucleotide may be methylated to form 5-methylcytosine"
gcgccagggccggttcctgacccgcctcctggctggagggttcaaaagacttcagacctccggggccctgtgcacagagatgctggctgcatggggcgtggaggggcgggatggggagccgg

SEQ ID NO: 15424 - DNA, 122 bp, Homo sapiens
  misc_feature (61)..(62): /note="This region represents a CpG dinucleotide"
  misc_feature (61)..(61): /note="Nucleotide may be methylated to form 5-methylcytosine"
gtgggtgagaggccgctcgatgagggggtttcgggagcggcggggcctaggtctgggaagcgggagcctggaaacaccacgaacgatgctggaaattgtctctgaggcgactgggaagaaaa

SEQ ID NO: 15425 - DNA, 122 bp, Homo sapiens
  misc_feature (61)..(62): /note="This region represents a CpG dinucleotide"
  misc_feature (61)..(61): /note="Nucleotide may be methylated to form 5-methylcytosine"
ctagatcttctaaaatacaggatggaatatgatttcctaggagtgggaagtggtagcatccggctgagaacctaggggtggaggaataggtctgagtcagacaccatggagaatgtgatgag

SEQ ID NO: 15426 - DNA, 122 bp, Homo sapiens
  misc_feature (61)..(62): /note="This region represents a CpG dinucleotide"
  misc_feature (61)..(61): /note="Nucleotide may be methylated to form 5-methylcytosine"
tgaaatgattaccacaatgaagttagttaacatatccatcatgtcacatagttaccattgcgtgtgtgtgatgagaatatttaagatctactctctcagcaaatttcaaatatgtaatacat

SEQ ID NO: 15427 - DNA, 122 bp, Homo sapiens
  misc_feature (61)..(62): /note="This region represents a CpG dinucleotide"
  misc_feature (61)..(61): /note="Nucleotide may be methylated to form 5-methylcytosine"
attagtgggtgaggagcagagcacctggacagacctgcacaggaaggagcctgcagcctgcggggtggggtcacttactgggctcctattggctggatgcagtgggattaggggtcagggtt

SEQ ID NO: 15428 - DNA, 122 bp, Homo sapiens
  misc_feature (61)..(62): /note="This region represents a CpG dinucleotide"
  misc_feature (61)..(61): /note="Nucleotide may be methylated to form 5-methylcytosine"
acacactaagtcctccttccttgtggagggaagggctcaagtagcaaatattggagcccccgcttggtgctgggagctgtgacaggcagctcctgaagaagcagtttaattggaaccagtga

SEQ ID NO: 15429 - DNA, 122 bp, Homo sapiens
  misc_feature (61)..(62): /note="This region represents a CpG dinucleotide"
  misc_feature (61)..(61): /note="Nucleotide may be methylated to form 5-methylcytosine"
cagtagcggtcatttcagctgcactccacaggaacagaaacacaagagctcttgctttaacgggcatttatattctctacatccatgacctttcaaagagatgcccagatgcatgataaaaa

SEQ ID NO: 15430 - DNA, 122 bp, Homo sapiens
  misc_feature (61)..(62): /note="This region represents a CpG dinucleotide"
  misc_feature (61)..(61): /note="Nucleotide may be methylated to form 5-methylcytosine"
tgtgactctgactgtgtgcttgtgcgtgactgggggttgataaatgttcattcatcctcgcgtctgagtgtgctgcctgtggctgtatatttatatttctctgtctaatgcaagggggtgga

SEQ ID NO: 15431 - DNA, 122 bp, Homo sapiens
  misc_feature (61)..(62): /note="This region represents a CpG dinucleotide"
  misc_feature (61)..(61): /note="Nucleotide may be methylated to form 5-methylcytosine"
taggcttagccctttgtgcacttttggtctctttccctttcaatttagcatccaaggaagcggctgtgaccaaaggtagctgtcatgttaaaggacaaagttcatagttacagcaaatattg

SEQ ID NO: 15432 - DNA, 122 bp, Homo sapiens
  misc_feature (61)..(62): /note="This region represents a CpG dinucleotide"
  misc_feature (61)..(61): /note="Nucleotide may be methylated to form 5-methylcytosine"
gaagtcattgtgacactgcttatttgagcaatatgtttattcagagttgctcacctcttacggtgatcttcacagtgtaaatttgtttgaagcagggatctgactgttcccaaattttgcct

SEQ ID NO: 15433 - DNA, 122 bp, Homo sapiens
  misc_feature (61)..(62): /note="This region represents a CpG dinucleotide"
  misc_feature (61)..(61): /note="Nucleotide may be methylated to form 5-methylcytosine"
ccctctggctcctcctatctccctccagtcctgggcccatcctcccatcctttgtttgctcggaagcccagtgtttcctgccaggccccagccagggacccccaagtgaacttgacctgcct

SEQ ID NO: 15434 - DNA, 122 bp, Homo sapiens
  misc_feature (61)..(62): /note="This region represents a CpG dinucleotide"
  misc_feature (61)..(61): /note="Nucleotide may be methylated to form 5-methylcytosine"
ctcaggtgatctacccacctcggcctccggaagtgctgggattacaggcgtgagccaccgcgcccagccccaaaagcctttttaaaactatcacaacttcggccgggtgtggtggctcatgc

SEQ ID NO: 15435 - DNA, 122 bp, Homo sapiens
  misc_feature (61)..(62): /note="This region represents a CpG dinucleotide"
  misc_feature (61)..(61): /note="Nucleotide may be methylated to form 5-methylcytosine"
acaaggtaaatttggattggttaggaactgccttttgtagtccagagagagattcaatggcgccatcaacagattaaattaggtaatatggaagaccagggaggaagaaaaaaatacaggag

SEQ ID NO: 15436 - DNA, 122 bp, Homo sapiens
  misc_feature (61)..(62): /note="This region represents a CpG dinucleotide"
  misc_feature (61)..(61): /note="Nucleotide may be methylated to form 5-methylcytosine"
aggtagataagattagtctaccccctcgcctttgagatgggcatgggtggcacctaaggtcgctttcaatactgagattcctagattcttagagttgactaaaaagtttaaaactgagagga

SEQ ID NO: 15437 - DNA, 122 bp, Homo sapiens
  misc_feature (61)..(62): /note="This region represents a CpG dinucleotide"
  misc_feature (61)..(61): /note="Nucleotide may be methylated to form 5-methylcytosine"
actcactcactacagatgagcaaggaagagcaagagccattcagaagtgaggaggtatgacgtacaaggaacacaggatatgtttcatgctgtgatgaagtttcacaatagacttggcatag

SEQ ID NO: 15438 - DNA, 122 bp, Homo sapiens
  misc_feature (61)..(62): /note="This region represents a CpG dinucleotide"
  misc_feature (61)..(61): /note="Nucleotide may be methylated to form 5-methylcytosine"
atgccctggggcccccaataggtccctcgatgtagttgggacaagattttcctcataaggcgtttggataacatttctgtctggtctggcaatatctgttttccttctgaattctttagcac

SEQ ID NO: 15439 - DNA, 122 bp, Homo sapiens
  misc_feature (61)..(62): /note="This region represents a CpG dinucleotide"
  misc_feature (61)..(61): /note="Nucleotide may be methylated to form 5-methylcytosine"
gggtgataggcctaagagagcacccagctccatgactcatctgggaaaggcactaaactgcggtgtggcaccctgcacacccagcagcaaggctaccatcaaaaggcagaaaatgccacgtg

SEQ ID NO: 15440 - DNA, 122 bp, Homo sapiens
  misc_feature (61)..(62): /note="This region represents a CpG dinucleotide"
  misc_feature (61)..(61): /note="Nucleotide may be methylated to form 5-methylcytosine"
gactgatatagtagtgaattaattctttgcctcaggaggtgttcatgtcttcattcaccccgaaacatttattgagctgttgcattataccagtcttgctagacactaaagacacaatgatg

SEQ ID NO: 15441 - DNA, 122 bp, Homo sapiens
  misc_feature (61)..(62): /note="This region represents a CpG dinucleotide"
  misc_feature (61)..(61): /note="Nucleotide may be methylated to form 5-methylcytosine"
catagcctgggagaccagatcgtgcacttcctggccaatgacctggacatttcttccaaacgcaggactcctcaagtggaaaatctttgttgtgaagcaccctttgaggtttgccaagattt

SEQ ID NO: 15442 - DNA, 122 bp, Homo sapiens
  misc_feature (61)..(62): /note="This region represents a CpG dinucleotide"
  misc_feature (61)..(61): /note="Nucleotide may be methylated to form 5-methylcytosine"
gaaagagtctacaccagttcacacaaggacagcacactctagagttgtatagtgtggccccgccagcattaagcaggaaactagggtgtggcctgttcagggaagggggttacttctctact

SEQ ID NO: 15443 - DNA, 122 bp, Homo sapiens
  misc_feature (61)..(62): /note="This region represents a CpG dinucleotide"
  misc_feature (61)..(61): /note="Nucleotide may be methylated to form 5-methylcytosine"
tgaatctcaggaagctaaaataatgaaactgaaagttgtccaggtgtggaacttcctggacgggtgggtagggctgggtgccccacctcccaagcctttagataagccaccttataactgag

SEQ ID NO: 15444 - DNA, 122 bp, Homo sapiens
  misc_feature (61)..(62): /note="This region represents a CpG dinucleotide"
  misc_feature (61)..(61): /note="Nucleotide may be methylated to form 5-methylcytosine"
ctgggattaggtccatgttagagtatgatcctcttatatgttgctagatttgatttcttgcgctatctttacctggctttgatgcaggtaaataccctgatgtcagggtaatacaggatgca

SEQ ID NO: 15445 - DNA, 122 bp, Homo sapiens
  misc_feature (61)..(62): /note="This region represents a CpG dinucleotide"
  misc_feature (61)..(61): /note="Nucleotide may be methylated to form 5-methylcytosine"
taccacagaagccataggcccttcccagaatctcataacaggaagtatgtgatgtccatacgtcttattactggcaatgttaaccttcatcacttggttaaggtaatgtctgctgggtttac

SEQ ID NO: 15446 - DNA, 122 bp, Homo sapiens
  misc_feature (61)..(62): /note="This region represents a CpG dinucleotide"
  misc_feature (61)..(61): /note="Nucleotide may be methylated to form 5-methylcytosine"
tggtgtctctggagccacatggtgtctcttgtcttcttagatctctttggtcttctctctcgggagaaaatggccacctctggaacaatcaggtttgcgtaaaatcatacagtcaggcgtca

SEQ ID NO: 15447 - DNA, 122 bp, Homo sapiens
  misc_feature (61)..(62): /note="This region represents a CpG dinucleotide"
  misc_feature (61)..(61): /note="Nucleotide may be methylated to form 5-methylcytosine"
aagaggactcagctctgtgcagggcaccagtcttggtaagcaaggtgcaggctggatttgcgtccctgctcaccgccttggtccagggcccttgtgcagtgaacaacctgtccaaccacaca

SEQ ID NO: 15448 - DNA, 122 bp, Homo sapiens
  misc_feature (61)..(62): /note="This region represents a CpG dinucleotide"
  misc_feature (61)..(61): /note="Nucleotide may be methylated to form 5-methylcytosine"
ctgatacttcattgttggaaggaattaaatctaattgaatagaatcaaatccaaattgaacgggcaggttctaaaccaggcttgcagatcagggccatcagcctcttaaatgcagcccagat

SEQ ID NO: 15449 - DNA, 122 bp, Homo sapiens
  misc_feature (61)..(62): /note="This region represents a CpG dinucleotide"
  misc_feature (61)..(61): /note="Nucleotide may be methylated to form 5-methylcytosine"
ctgaggacaccacatctgacacatagcagacagcaccacagcacagccctccaccagaggcgtctgcattaccggagcagcagcacagctactgagagtgtgccacaaccaggctccatgcc

SEQ ID NO: 15450 - DNA, 122 bp, Homo sapiens
  misc_feature (61)..(62): /note="This region represents a CpG dinucleotide"
  misc_feature (61)..(61): /note="Nucleotide may be methylated to form 5-methylcytosine"
ccccaaacgtcacaggggagggcccaagaagtatgtctggaattaggccttagccatggacgattataccaaagcaggaagttgggagctgcccacagatcaggcagacctgagccttgtcc

SEQ ID NO: 15451 - DNA, 122 bp, Homo sapiens
  misc_feature (61)..(62): /note="This region represents a CpG dinucleotide"
  misc_feature (61)..(61): /note="Nucleotide may be methylated to form 5-methylcytosine"
tttggtgttgttaattaaaataaattcaaacttatattctcatatgatagaaaatgacatcgagattctataatccaagcctcttaatttattgcaacattaactgagggagaaaaatatta

SEQ ID NO: 15452 - DNA, 122 bp, Homo sapiens
  misc_feature (61)..(62): /note="This region represents a CpG dinucleotide"
  misc_feature (61)..(61): /note="Nucleotide may be methylated to form 5-methylcytosine"
tggggaagttcacgaggttgacctgagccagggctggttcacagtggttgagcagcagagcgccctctggggtgcaggccagaggaggttggtggacaggggtgtgtgtggagagagagtcg

SEQ ID NO: 15453 - DNA, 122 bp, Homo sapiens
  misc_feature (61)..(62): /note="This region represents a CpG dinucleotide"
  misc_feature (61)..(61): /note="Nucleotide may be methylated to form 5-methylcytosine"
tgtagtttgcctctttgcaatctggctttaaggtgctgcaggcattgaagccaccaggttcgtaaatggcaagccacaagaattttgcaaaaggtcccagaaagtgaggaagccactgaggt

SEQ ID NO: 15454 - DNA, 122 bp, Homo sapiens
  misc_feature (61)..(62): /note="This region represents a CpG dinucleotide"
  misc_feature (61)..(61): /note="Nucleotide may be methylated to form 5-methylcytosine"
agctccctctctctcaggagtttagagaggactagccaggcaatagcaagaaaaagaaagcgtccttagttgcagatgggggctcaccatggagagaccacaggctccaggaccgggccccc

SEQ ID NO: 15455 - DNA, 122 bp, Homo sapiens
  misc_feature (61)..(62): /note="This region represents a CpG dinucleotide"
  misc_feature (61)..(61): /note="Nucleotide may be methylated to form 5-methylcytosine"
gtctcccccacgcagcgtttccgacccataagtgaggcgagctggcggcgggggcgagcacgctgcggctcaggccgccgggggcgcgccagaggctggcggggcgcgcgcgcgccgctccc

SEQ ID NO: 15456 - DNA, 122 bp, Homo sapiens
  misc_feature (61)..(62): /note="This region represents a CpG dinucleotide"
  misc_feature (61)..(61): /note="Nucleotide may be methylated to form 5-methylcytosine"
ctcctggagcccctgggcaagcatttctctgggtgtggacccattactacaccaggcatacgtccagcaagctaattaatgtgcagaattaagagataatgctaaactgttttccaaagcag

SEQ ID NO: 15457 - DNA, 122 bp, Homo sapiens
  misc_feature (61)..(62): /note="This region represents a CpG dinucleotide"
  misc_feature (61)..(61): /note="Nucleotide may be methylated to form 5-methylcytosine"
aaacagaacattctccactccaatcctgtcaagcaatatggggctaagtagttttcttcccgtttgatagaaaagcagccgaattgaagaacatctgaaattcaatggaacaaaggctaaat

SEQ ID NO: 15458 - DNA, 122 bp, Homo sapiens
  misc_feature (61)..(62): /note="This region represents a CpG dinucleotide"
  misc_feature (61)..(61): /note="Nucleotide may be methylated to form 5-methylcytosine"
cagacaagcatgtgcgcaaagttatccaacagcactgaccacaccatgagtcaaagcatccgtgttcagaggtttggggtcaaacagagctcacaccattcctgaccccgattgttatgagt

SEQ ID NO: 15459 - DNA, 122 bp, Homo sapiens
  misc_feature (61)..(62): /note="This region represents a CpG dinucleotide"
  misc_feature (61)..(61): /note="Nucleotide may be methylated to form 5-methylcytosine"
ataatcagtcaatgcaccattctgggtgttgggtgcagccaagcatggagaaaggaaccacgcagagtaaattctgccccaggcctgagagggaactgtactcaggctgaaacctagagata

SEQ ID NO: 15460 - DNA, 122 bp, Homo sapiens
  misc_feature (61)..(62): /note="This region represents a CpG dinucleotide"
  misc_feature (61)..(61): /note="Nucleotide may be methylated to form 5-methylcytosine"
ctggacatctttgtgtaaaccataatccacatgtgccgtaaatgatcttcactccttatccgagggcaaattcacaaggatccccaagatccacttttagaagccattctcatccagcagtg

SEQ ID NO: 15461 - DNA, 122 bp, Homo sapiens
  misc_feature (61)..(62): /note="This region represents a CpG dinucleotide"
  misc_feature (61)..(61): /note="Nucleotide may be methylated to form 5-methylcytosine"
gcagaaatgaagtaggaaaaaaatcattaggttgtagaggaagagagtgaatctgagtggcgaagacagaaataggattaatgatggtgaactccaaacctgcccctcagcttagcactggg

SEQ ID NO: 15462 - DNA, 122 bp, Homo sapiens
  misc_feature (61)..(62): /note="This region represents a CpG dinucleotide"
  misc_feature (61)..(61): /note="Nucleotide may be methylated to form 5-methylcytosine"
cctggtcctagtagtctaagggatcagcctcaccttggcctatcgggtaggtgctattatcgtgcctatttgacagatgaggaaacagactccaagagaggttaagccacttgcataaggtc

SEQ ID NO: 15463 - DNA, 122 bp, Homo sapiens
  misc_feature (61)..(62): /note="This region represents a CpG dinucleotide"
  misc_feature (61)..(61): /note="Nucleotide may be methylated to form 5-methylcytosine"
gaatagaaagcttcatcagcagctgcaagaagcccaggcatgataagcaggggtatgcaacgtgagtgagcactcgcctcatggaaaaaacagctcacagcaggagctcacagaacttccat

SEQ ID NO: 15464 - DNA, 122 bp, Homo sapiens
  misc_feature (61)..(62): /note="This region represents a CpG dinucleotide"
  misc_feature (61)..(61): /note="Nucleotide may be methylated to form 5-methylcytosine"
gagggtacatccttcacatattagtcattggaaataataaatgcacaaaagatcatgtttcgatatccctggctttacagggcttgacgattatttcctcaagatataagaggagagaaaat

SEQ ID NO: 15465 - DNA, 122 bp, Homo sapiens
  misc_feature (61)..(62): /note="This region represents a CpG dinucleotide"
  misc_feature (61)..(61): /note="Nucleotide may be methylated to form 5-methylcytosine"
agctggctcggcagttgacagtttaaatcctggcttgcctcggtgctgctggcttcggtccgcagctccctctagccagcccacacccagctggggagccactcagggctggacaggggtca

SEQ ID NO: 15466 - DNA, 122 bp, Homo sapiens
  misc_feature (61)..(62): /note="This region represents a CpG dinucleotide"
  misc_feature (61)..(61): /note="Nucleotide may be methylated to form 5-methylcytosine"
atgctttcaaagagttaacaaacaaaagaggttgatataaagtgaaagtaattaacttcacgagaacccaccaggcccccagagaaaactattaggctggtgcaaaagtaattgtggtaata

SEQ ID NO: 15467 - DNA, 122 bp, Homo sapiens
  misc_feature (61)..(62): /note="This region represents a CpG dinucleotide"
  misc_feature (61)..(61): /note="Nucleotide may be methylated to form 5-methylcytosine"
tattcttctggggaatatgaagggttcagtctttttaggaaattggatgatatctcttcccgaccactagcagcctctttcagtcactggaaaatgcttacaggcagtagccaccatcatgt

SEQ ID NO: 15468 - DNA, 122 bp, Homo sapiens
  misc_feature (61)..(62): /note="This region represents a CpG dinucleotide"
  misc_feature (61)..(61): /note="Nucleotide may be methylated to form 5-methylcytosine"
agtgacatggagggagcagaagccagagtacaggctcaggggatggagaagtgagggtggcgtaagaggtggacacagcaagggcacactatatgtttgagaaatttaattcaagatgaaaa

SEQ ID NO: 15469 - DNA, 122 bp, Homo sapiens
  misc_feature (61)..(62): /note="This region represents a CpG dinucleotide"
  misc_feature (61)..(61): /note="Nucleotide may be methylated to form 5-methylcytosine"
gtgagatccaacatggtcaaaacccctgtgaactctagagccctggcctcagactcttaccgccaccacagctgtcagggcagagaccatggagcttggcagcagaggaggggggctgcatg

SEQ ID NO: 15470 - DNA, 122 bp, Homo sapiens
  misc_feature (61)..(62): /note="This region represents a CpG dinucleotide"
  misc_feature (61)..(61): /note="Nucleotide may be methylated to form 5-methylcytosine"
gtgagctcacccttgttcaccacacaggccttttacacagcacaattacaacattgagctcgacacagagacaggcactgccctgcacttaacctcctgcttattcaaatcctcactctcgt

SEQ ID NO: 15471 - DNA, 122 bp, Homo sapiens
  misc_feature (61)..(62): /note="This region represents a CpG dinucleotide"
  misc_feature (61)..(61): /note="Nucleotide may be methylated to form 5-methylcytosine"
tgagttcttatcttcttctttccttctacaaatcatagtcattcatcttcctttaaaaggcgcttacctgacactctgtaggctgtttcagatagggctctctgagtcatgtgatggaagca

SEQ ID NO: 15472 - DNA, 122 bp, Homo sapiens
  misc_feature (61)..(62): /note="This region represents a CpG dinucleotide"
  misc_feature (61)..(61): /note="Nucleotide may be methylated to form 5-methylcytosine"
tctgtttgcaggggagtgtggccctgtggcctgggtggagcagtcatcctcccccttccccgtgcagggagcaggaaatcagtgctgggggtggtgggcggacaataggatcactgcctgcc

SEQ ID NO: 15473 - DNA, 122 bp, Homo sapiens
  misc_feature (61)..(62): /note="This region represents a CpG dinucleotide"
  misc_feature (61)..(61): /note="Nucleotide may be methylated to form 5-methylcytosine"
tttgtcagattctcatattctgccaacttctctgcattttctagaagctcattttccagacgactgttttcctgaacaagtatggggaaattaaatgtggtacagattaagaaattagcaaa

SEQ ID NO: 15474 - DNA, 122 bp, Homo sapiens
  misc_feature (61)..(62): /note="This region represents a CpG dinucleotide"
  misc_feature (61)..(61): /note="Nucleotide may be methylated to form 5-methylcytosine"
aacagaatacaaacagtaatatattgacctaacagattataaataaataacataaccacacggaagaggaagtgactaaaatgtaacctaagtaactttagaaaatagcatctgtatattac

SEQ ID NO: 15475 - DNA, 122 bp, Homo sapiens
  misc_feature (61)..(62): /note="This region represents a CpG dinucleotide"
  misc_feature (61)..(61): /note="Nucleotide may be methylated to form 5-methylcytosine"
ttcattgcagcggttcgctgtgttgactaagataatgcccatgcagcatttcctaagcagcgcatcctgtgatagtgggattttcccctgctcctatctttctttgtgcagagaacaccagt

SEQ ID NO: 15476 - DNA, 122 bp, Homo sapiens
  misc_feature (61)..(62): /note="This region represents a CpG dinucleotide"
  misc_feature (61)..(61): /note="Nucleotide may be methylated to form 5-methylcytosine"
ataaaaatcgatattaagctataaaacataaaaattacacgtacattacaataaaaataacgtattttccatttgtctaatttcaaaagtcaggatctgtttatccaagctggctgttctca

SEQ ID NO: 15477 - DNA, 122 bp, Homo sapiens
  misc_feature (61)..(62): /note="This region represents a CpG dinucleotide"
  misc_feature (61)..(61): /note="Nucleotide may be methylated to form 5-methylcytosine"
ttctctgagggtaaaattagtaggtgaattcaggacaatggcatgccaggaactatgtgacgcatcacaaccaccagctgaaccagggatttgtgaaggagccagaggcatgtgggcagcca

SEQ ID NO: 15478 - DNA, 122 bp, Homo sapiens
  misc_feature (61)..(62): /note="This region represents a CpG dinucleotide"
  misc_feature (61)..(61): /note="Nucleotide may be methylated to form 5-methylcytosine"
aggcctgactgaatccaacagtgccttaaaaacagttactctttaaagtaaatttcttcacgtcatgtagagctttcaaggttaatcatttccctaagcagctggcatgtctaacagaccca

SEQ ID NO: 15479 - DNA, 122 bp, Homo sapiens
  misc_feature (61)..(62): /note="This region represents a CpG dinucleotide"
  misc_feature (61)..(61): /note="Nucleotide may be methylated to form 5-methylcytosine"
acttgtcactgttttgtgtgtccatttatattaccatcttccggctacattgggcagcaccgtttcttattgctctctgtagccttaatgctggcactcattacataacagttagataaact

SEQ ID NO: 15480 - DNA, 122 bp, Homo sapiens
  misc_feature (61)..(62): /note="This region represents a CpG dinucleotide"
  misc_feature (61)..(61): /note="Nucleotide may be methylated to form 5-methylcytosine"
tccggtggatacaggaagtgctcagcaacgattacgccccgagggccaatcacagggctgcggccgagaaagaagccttaatagagctttctcaacctgcagccctcatctccgccggcgag

SEQ ID NO: 15481 - DNA, 122 bp, Homo sapiens
  misc_feature (61)..(62): /note="This region represents a CpG dinucleotide"
  misc_feature (61)..(61): /note="Nucleotide may be methylated to form 5-methylcytosine"
aggtggggaggttctagtgggtcatcaaatctagcctctcccatctgatgcaagaatcggcgttacaacttctctgacgttgctcaaccagcttctccttgaacacccccagatgtgagcta

SEQ ID NO: 15482 - DNA, 122 bp, Homo sapiens
  misc_feature (61)..(62): /note="This region represents a CpG dinucleotide"
  misc_feature (61)..(61): /note="Nucleotide may be methylated to form 5-methylcytosine"
agaaacagaaaagcgagtgctaaaacataggcccattaaaaaagtgtgtgtgtagccgggcgcggtggctcacgcctgtaatcccagcactttgggagggtgaggcgggtggatcgcctgag

SEQ ID NO: 15483 - DNA, 122 bp, Homo sapiens
  misc_feature (61)..(62): /note="This region represents a CpG dinucleotide"
  misc_feature (61)..(61): /note="Nucleotide may be methylated to form 5-methylcytosine"
aatagaaaattagtagaggagtttgaatttaccttacagcataaaccagatagaaaataacgcattcatccagtcatgcatccaatgattaccaaggcagaaggccaaacaccacataattt

SEQ ID NO: 15484 - DNA, 122 bp, Homo sapiens
  misc_feature (61)..(62): /note="This region represents a CpG dinucleotide"
  misc_feature (61)..(61): /note="Nucleotide may be methylated to form 5-methylcytosine"
tagtgagccggctcccgtgttgtgcctggcattgggttatgagctttacatacacgctctcgcccttgcaacatcctggagaggaaggtagaaatgcctccagttaaaagatgtggaaattt

SEQ ID NO: 15485 - DNA, 122 bp, Homo sapiens
  misc_feature (61)..(62): /note="This region represents a CpG dinucleotide"
  misc_feature (61)..(61): /note="Nucleotide may be methylated to form 5-methylcytosine"
gaaaaggaatgattacatatggcctatacatacaggatattgtctcgcctggtaatgaggcgctcacgaccattagattggtctttgttcagcttatccaaactccttgacatacgccacct

SEQ ID NO: 15486 - DNA, 122 bp, Homo sapiens
  misc_feature (61)..(62): /note="This region represents a CpG dinucleotide"
  misc_feature (61)..(61): /note="Nucleotide may be methylated to form 5-methylcytosine"
cacatatgttttaaggggtgtgtgtgtgtgttttcttttttccaagaacaatacagacatcgttttcttgccaagtcacaaatcaattgatgggttatttttatagtgaaaagttcaggact

SEQ ID NO: 15487 - DNA, 122 bp, Homo sapiens
  misc_feature (61)..(62): /note="This region represents a CpG dinucleotide"
  misc_feature (61)..(61): /note="Nucleotide may be methylated to form 5-methylcytosine"
gtacaaaatagcataagaagagcttatactattcttatcactttccaatttgtgttcactcgattttaaagaagtgacagagtaactaggatgatacaggaaaaggtatacacagaacttgg

SEQ ID NO: 15488 - DNA, 122 bp, Homo sapiens
  misc_feature (61)..(62): /note="This region represents a CpG dinucleotide"
  misc_feature (61)..(61): /note="Nucleotide may be methylated to form 5-methylcytosine"
tttgaggaagtggtcactgccagtgtcagtcacctagttatctgatacttgtcattgattcgtccctttcattattacaaagaacaagacttccctgggcaagaaccatttctcccatctca

SEQ ID NO: 15489 - DNA, 122 bp, Homo sapiens
  misc_feature (61)..(62): /note="This region represents a CpG dinucleotide"
  misc_feature (61)..(61): /note="Nucleotide may be methylated to form 5-methylcytosine"
cagtgctttataaatatctatactgcatgatggaatgacagcactgagtgcctccctacccggaccagcaagagaagagagacttccaaacaggcattataaacacttaaaaaaaaaaaaaa

SEQ ID NO: 15490 - DNA, 122 bp, Homo sapiens
  misc_feature (61)..(62): /note="This region represents a CpG dinucleotide"
  misc_feature (61)..(61): /note="Nucleotide may be methylated to form 5-methylcytosine"
agtaaacctaaaaatttaaactaatttaaaaaataaaaccaatatctaaaattttaaacacgtaagaaatcataattggattccatagcatgccatacaaatccgctgccacttgcaaatgc

SEQ ID NO: 15491 - DNA, 122 bp, Homo sapiens
  misc_feature (61)..(62): /note="This region represents a CpG dinucleotide"
  misc_feature (61)..(61): /note="Nucleotide may be methylated to form 5-methylcytosine"
aggttctgatttgattttttttttttcttcatgcctaccctttttttggaagtttccagccgcaatttgaaatgaaatgacaaggtgtatatttgatcaattttcattcccaccattgcatt

SEQ ID NO: 15492 - DNA, 122 bp, Homo sapiens
  misc_feature (61)..(62): /note="This region represents a CpG dinucleotide"
  misc_feature (61)..(61): /note="Nucleotide may be methylated to form 5-methylcytosine"
tttgcccaataaggttagctttccttttctgcataagaagatgaaaataaattgtaaaaacgttaacagaagttatttcttgatgtcggatcattggcagtcaacttttttctcataataaa

SEQ ID NO: 15493 - DNA, 122 bp, Homo sapiens
  misc_feature (61)..(62): /note="This region represents a CpG dinucleotide"
  misc_feature (61)..(61): /note="Nucleotide may be methylated to form 5-methylcytosine"
tgactcagtcaaactctaagctcatctaaactctgagctcatgctttttagtctgtagatcgatgggtttaggtacagagaattttaggacttttctgcaatgttccatagagaaagtttat

SEQ ID NO: 15494 - DNA, 122 bp, Homo sapiens
  misc_feature (61)..(62): /note="This region represents a CpG dinucleotide"
  misc_feature (61)..(61): /note="Nucleotide may be methylated to form 5-methylcytosine"
cggggccacctgcccgccgctccttcctctcctggcttattttccaaacaatttgcttaacgtgattcccggccaagctaaacatgactaatcgtgtttacccggtgatcccgcgcctcctg

SEQ ID NO: 15495 - DNA, 122 bp, Homo sapiens
  misc_feature (61)..(62): /note="This region represents a CpG dinucleotide"
  misc_feature (61)..(61): /note="Nucleotide may be methylated to form 5-methylcytosine"
agttgtggcccagaggctggctggagggagaaagacagaagaaggaccatcggccacagtcgggctttgatcccaggatgtttgttgaatgcaggaatgactccaagcatttaaagctgggg

SEQ ID NO: 15496 - DNA, 122 bp, Homo sapiens
  misc_feature (61)..(62): /note="This region represents a CpG dinucleotide"
  misc_feature (61)..(61): /note="Nucleotide may be methylated to form 5-methylcytosine"
aggccactggctctcaactcttagctaccatccatgttccccactggaagcatgtggaaacgtctgggctccctggctgcaccctacagccaagggagactgcacagcagatgtggaaaggg

SEQ ID NO: 15497 - DNA, 122 bp, Homo sapiens
  misc_feature (61)..(62): /note="This region represents a CpG dinucleotide"
  misc_feature (61)..(61): /note="Nucleotide may be methylated to form 5-methylcytosine"
aatggggagattaacctggattatccaagtggacccaacctaatcatgagtccttcaaagcggaggaccagtcagcaagatagtggactaagaagctacaggccctccttctcccacagagt

SEQ ID NO: 15498 - DNA, 122 bp, Homo sapiens
  misc_feature (61)..(62): /note="This region represents a CpG dinucleotide"
  misc_feature (61)..(61): /note="Nucleotide may be methylated to form 5-methylcytosine"
gcaacggcaagccttacatctggctcatgcaggactcgtgaatgttcttggtgacggcctcgtagacggtcgggggcaaggccaggtagaagaggcggttggcctgtgaccccaggtggagg

SEQ ID NO: 15499 - DNA, 122 bp, Homo sapiens
  misc_feature (61)..(62): /note="This region represents a CpG dinucleotide"
  misc_feature (61)..(61): /note="Nucleotide may be methylated to form 5-methylcytosine"
tgcagggcagtccttctgtaacctgaaccagaccttgctgctcctctgtgccactccctccggtggcttctcatcaccatggcctgcaaggctctgtgtgacctgtcttctggcactccctg

SEQ ID NO: 15500 - DNA, 122 bp, Homo sapiens
  misc_feature (61)..(62): /note="This region represents a CpG dinucleotide"
  misc_feature (61)..(61): /note="Nucleotide may be methylated to form 5-methylcytosine"
gatgagggttaaccagtatgccatttttatgcaagtcagtacaggtttctcagtaaagtacgggcaaatagaaatgtaatttatgaatatttcatcattctttgtcatataggccagccaga

SEQ ID NO: 15501 - DNA, 122 bp, Homo sapiens
  misc_feature (61)..(62): /note="This region represents a CpG dinucleotide"
  misc_feature (61)..(61): /note="Nucleotide may be methylated to form 5-methylcytosine"
gcaagctgcagccgggctcatgcaccaagactggtcaccgtttaagcagccagcatttagcgaggacctcaggcattacctgcttagtttgctctctctgaaatacctctagctgctccacc

SEQ ID NO: 15502 - DNA, 122 bp, Homo sapiens
  misc_feature (61)..(62): /note="This region represents a CpG dinucleotide"
  misc_feature (61)..(61): /note="Nucleotide may be methylated to form 5-methylcytosine"
aaatctggagccttgcaggttccctgacttcagacttactcactgcttgtgattctaatgcgtttctagtccacagagatgtttatctggttcttggaaacaaactataaacatttttatgt

SEQ ID NO: 15503 - DNA, 122 bp, Homo sapiens
  misc_feature (61)..(62): /note="This region represents a CpG dinucleotide"
  misc_feature (61)..(61): /note="Nucleotide may be methylated to form 5-methylcytosine"
tttcatactttcagtacctaataatctcacattatttactcattcatttacatcttgcttcgttccaaaacaagccaggtgcggtgctcatgcctataatcttagcagtctgggaggccaag

SEQ ID NO: 15504 - DNA, 122 bp, Homo sapiens
  misc_feature (61)..(62): /note="This region represents a CpG dinucleotide"
  misc_feature (61)..(61): /note="Nucleotide may be methylated to form 5-methylcytosine"
ccggccatttcctagtctcttacctaatacgcaaggagtctacctaacagtgtttaccttcggtcaagttctgtgtcactgaaggaagaatcagagtgagtaactccaactggaagatcttt

SEQ ID NO: 15505 - DNA, 122 bp, Homo sapiens
  misc_feature (61)..(62): /note="This region represents a CpG dinucleotide"
  misc_feature (61)..(61): /note="Nucleotide may be methylated to form 5-methylcytosine"
ttaactttatcaactgtaaaagaaaaaaattcaacatcttgttgttttaaaggagttccccggcatggaagcagatcatacacttgattcctgatgcaggaactgaaacaactctggcccag

SEQ ID NO: 15506 - DNA, 122 bp, Homo sapiens
  misc_feature (61)..(62): /note="This region represents a CpG dinucleotide"
  misc_feature (61)..(61): /note="Nucleotide may be methylated to form 5-methylcytosine"
tacttaccagcaaagcaaacttttcttctatgagcttccatcactcaagaaactttcctgcgcctactgaaaaggcaaacagccttttgagatctggaaaggctggatccatgagttttgta

SEQ ID NO: 15507 - DNA, 122 bp, Homo sapiens
  misc_feature (61)..(62): /note="This region represents a CpG dinucleotide"
  misc_feature (61)..(61): /note="Nucleotide may be methylated to form 5-methylcytosine"
tgcctaattggctgatgtttaaagtcagctgtggtgtgtgtgtgtgtgtgtgtgtgtgcacgctcatgtaattggcaaacattgttttgaaaaaaatttttaagcatgagttttagaaaata

SEQ ID NO: 15508 - DNA, 122 bp, Homo sapiens
  misc_feature (61)..(62): /note="This region represents a CpG dinucleotide"
  misc_feature (61)..(61): /note="Nucleotide may be methylated to form 5-methylcytosine"
cttgaaagctccaggagccccaaggacggcgaagggcagcctggagttggggggcgtcagcgagggcgcgggcaggggagagaggcgcccctggaagtggagccggcctggacagaggcagg

SEQ ID NO: 15509 - DNA, 122 bp, Homo sapiens
  misc_feature (61)..(62): /note="This region represents a CpG dinucleotide"
  misc_feature (61)..(61): /note="Nucleotide may be methylated to form 5-methylcytosine"
aagaaattacagcttttctttaaaatcagaaatacagaaatactcaggctttgtcagctacgaaagggtgacaaggcaagtgatttaagatgggggaaaaaccacctctcctccactaaatc

SEQ ID NO: 15510 - DNA, 122 bp, Homo sapiens
  misc_feature (61)..(62): /note="This region represents a CpG dinucleotide"
  misc_feature (61)..(61): /note="Nucleotide may be methylated to form 5-methylcytosine"
cagggagcaggatctgcttcccggactctgagcagaacaatgggagccccagcaggctggcgaggctgacaagccctaggacggtgacctctccgatctccagatcggaaactcagaaacgt

SEQ ID NO: 15511 - DNA, 122 bp, Homo sapiens
  misc_feature (61)..(62): /note="This region represents a CpG dinucleotide"
  misc_feature (61)..(61): /note="Nucleotide may be methylated to form 5-methylcytosine"
ttaccactgaagaaatcaaagcacggagagagtaacacaacttgcttagagtcaccaaaacggagtcaaaagcactaggacagaatccaagctttttgggtgagacactttcccttaacttt

SEQ ID NO: 15512 - DNA, 122 bp, Homo sapiens
  misc_feature (61)..(62): /note="This region represents a CpG dinucleotide"
  misc_feature (61)..(61): /note="Nucleotide may be methylated to form 5-methylcytosine"
aggtcatggccctgtcattccagaggaggctggagcagctcttcaggaaatgtggatgtgcgaagaggacaagcctggctgagcctaaaaggggctcttcagactcttctggagacctgcac

SEQ ID NO: 15513 - DNA, 122 bp, Homo sapiens
  misc_feature (61)..(62): /note="This region represents a CpG dinucleotide"
  misc_feature (61)..(61): /note="Nucleotide may be methylated to form 5-methylcytosine"
tgttcagggctgcagggagccgtgatgccatcattgctctctggcctggatgacagagtacgtccctgactcaaaaaaaaaaaaaaggagaaaaaaaatctctatctcttcctcatgctaga

SEQ ID NO: 15514 - DNA, 122 bp, Homo sapiens
  misc_feature (61)..(62): /note="This region represents a CpG dinucleotide"
  misc_feature (61)..(61): /note="Nucleotide may be methylated to form 5-methylcytosine"
atttttgcatcaaagaaaggacatgatgaagataatgttttaggaagcttcatctgagagcgttatacaggaggtactaaaggacgcatcagttacaatccccaacatgctgcttcagttgc

SEQ ID NO: 15515 - DNA, 122 bp, Homo sapiens
  misc_feature (61)..(62): /note="This region represents a CpG dinucleotide"
  misc_feature (61)..(61): /note="Nucleotide may be methylated to form 5-methylcytosine"
tgtcctgctgggtctttacctgtatcttcctccatcagaccattgcagtacatggcatgtcgttcaatctttgtgggtggaaagcattggtcacatagcgggcaggatacctggttactgga

SEQ ID NO: 15516 - DNA, 122 bp, Homo sapiens
  misc_feature (61)..(62): /note="This region represents a CpG dinucleotide"
  misc_feature (61)..(61): /note="Nucleotide may be methylated to form 5-methylcytosine"
ccatcccagggatgtaaaagaactcaacagttgctcagaataccccttttaccatctcaacgacatgggcaatcaaggactgccttgcttcctgccgggttcctgagtgaatcagtgggcat

SEQ ID NO: 15517 - DNA, 122 bp, Homo sapiens
  misc_feature (61)..(62): /note="This region represents a CpG dinucleotide"
  misc_feature (61)..(61): /note="Nucleotide may be methylated to form 5-methylcytosine"
tctcccatgcctccaggcctttccatgtgatgttttcactgctgaattttctctctggagcgctggattttctctcttgagtcctgggctgtaagagttcttccaggctagcccatgtggta

SEQ ID NO: 15518 - DNA, 122 bp, Homo sapiens
  misc_feature (61)..(62): /note="This region represents a CpG dinucleotide"
  misc_feature (61)..(61): /note="Nucleotide may be methylated to form 5-methylcytosine"
tcaattgctagttctacttggacccttatttgtggctaattccttctgctttgaattccacgtacttatgtaaacctgtttgtttcacaatgtcttcagggcaaagggcagatcctgtggat

SEQ ID NO: 15519 - DNA, 122 bp, Homo sapiens
  misc_feature (61)..(62): /note="This region represents a CpG dinucleotide"
  misc_feature (61)..(61): /note="Nucleotide may be methylated to form 5-methylcytosine"
ccgacactggggactggctctgtcccttgcttcctatctgtaagtaatcaacctgtgttgcgtaacttgtatgtgagcatgtaggtcaccagcgcatggaggactaaacagtagcccaggat

SEQ ID NO: 15520 - DNA, 122 bp, Homo sapiens
  misc_feature (61)..(62): /note="This region represents a CpG dinucleotide"
  misc_feature (61)..(61): /note="Nucleotide may be methylated to form 5-methylcytosine"
ttctgggtctcagatttcagatttcaaacttgttgcctttcacaatggaaaaaccacgcacgtactttaaaaaagtacttgttgatgataaactcacataacaacatggatagaatgacatt

SEQ ID NO: 15521 - DNA, 122 bp, Homo sapiens
  misc_feature (61)..(62): /note="This region represents a CpG dinucleotide"
  misc_feature (61)..(61): /note="Nucleotide may be methylated to form 5-methylcytosine"
gtggcttctgcaagactgactcaggggtaggccctgaggtggaaatgggctagtcactagcgggtgccaatgaagacatgaagtgatttttatacagtcatctggctgctatatacagtcgt

SEQ ID NO: 15522 - DNA, 122 bp, Homo sapiens
  misc_feature (61)..(62): /note="This region represents a CpG dinucleotide"
  misc_feature (61)..(61): /note="Nucleotide may be methylated to form 5-methylcytosine"
gaccctgctaatgggtccacgagggtggcaggctaaggaatgctaccctctatttactaacgagcaaagcgatgctgaaatacagtgaagaagctgtccagtgtcacatggtgaagagatgg

SEQ ID NO: 15523 - DNA, 122 bp, Homo sapiens
  misc_feature (61)..(62): /note="This region represents a CpG dinucleotide"
  misc_feature (61)..(61): /note="Nucleotide may be methylated to form 5-methylcytosine"
tgaatggactccagttcttggaacacttaatctttctataataaagaactcctggctgggcgcggtgtctcacacctgtaatcccagcactttgggaggccgaggcgggcggatcacctgag

SEQ ID NO: 15524 - DNA, 122 bp, Homo sapiens
  misc_feature (61)..(62): /note="This region represents a CpG dinucleotide"
  misc_feature (61)..(61): /note="Nucleotide may be methylated to form 5-methylcytosine"
ttgtgccaggcttgcactgcctctgggaatccaaacacgggaaaacagacctctccactccgctgggggagcttaaagagcagtaaaagtgaggccaaaaaccaaacacacaagagcttaga

SEQ ID NO: 15525 - DNA, 122 bp, Homo sapiens
  misc_feature (61)..(62): /note="This region represents a CpG dinucleotide"
  misc_feature (61)..(61): /note="Nucleotide may be methylated to form 5-methylcytosine"
tgtttcagatgactgaaattataaagcagagtgcacacaattgccaaacatagtggtatgcgtttatacatatcactttttgagctatttcttcatgaatatggtttccctgctcatattat

SEQ ID NO: 15526 - DNA, 122 bp, Homo sapiens
  misc_feature (61)..(62): /note="This region represents a CpG dinucleotide"
  misc_feature (61)..(61): /note="Nucleotide may be methylated to form 5-methylcytosine"
cttggattccagtcccggtgggactgattccaaaccctgtgttttgtccctgcctcatggcgtggcctcacactacaactcacagactttggaaagctgagggagcttggtgagcctaggga

SEQ ID NO: 15527 - DNA, 122 bp, Homo sapiens
  misc_feature (61)..(62): /note="This region represents a CpG dinucleotide"
  misc_feature (61)..(61): /note="Nucleotide may be methylated to form 5-methylcytosine"
ttcaccaggtcctgtgattcatgaggcagagaccaggtgccagctcatcttaggtgctgccggccagactcagccactccgatttgcctgccggtttgaacaaggacatgtttgtcaagcgg

SEQ ID NO: 15528 - DNA, 122 bp, Homo sapiens
  misc_feature (61)..(62): /note="This region represents a CpG dinucleotide"
  misc_feature (61)..(61): /note="Nucleotide may be methylated to form 5-methylcytosine"
catgggtgtcatcttagaattctccctaccacattttctttctatagaccttcactgttacgtagattcagtttttaagttgaataatgtgacaaatcatttggaacattaaatgtgattca

SEQ ID NO: 15529 - DNA, 122 bp, Homo sapiens
  misc_feature (61)..(62): /note="This region represents a CpG dinucleotide"
  misc_feature (61)..(61): /note="Nucleotide may be methylated to form 5-methylcytosine"
catgtggtattgcttaaggataaagcaaacaacatgagttgccctttactctcatttggacgaaagcctttttatgaattaaggtaccattacaatggaagtacatagcagtaatttttttg

SEQ ID NO: 15530 - DNA, 122 bp, Homo sapiens
  misc_feature (61)..(62): /note="This region represents a CpG dinucleotide"
  misc_feature (61)..(61): /note="Nucleotide may be methylated to form 5-methylcytosine"
cgaagtgggacagggcagattcaaagaggactttgcagaagggtttgggaggatctgagacgaagtgcatataagagggcagagtcaaagatgactaagataattgaggaaggacacgcaga

SEQ ID NO: 15531 - DNA, 122 bp, Homo sapiens
  misc_feature (61)..(62): /note="This region represents a CpG dinucleotide"
  misc_feature (61)..(61): /note="Nucleotide may be methylated to form 5-methylcytosine"
tccaagatgcaccccaagagcaggacctgcactggtggatgctgagcattctagaaacatcgttaacaggacacagggcagagctggtccctgcagcctcagccctgcagaagaggattcac

SEQ ID NO: 15532 - DNA, 122 bp, Homo sapiens
  misc_feature (61)..(62): /note="This region represents a CpG dinucleotide"
  misc_feature (61)..(61): /note="Nucleotide may be methylated to form 5-methylcytosine"
aaaaggatctctgcagcagggcttgagagcacctgaaggaatttccagaaatgccatcatcgtatgtgacacagaatttagaaaaatgactttgtgaagaatggccggaagagggaagctaa

SEQ ID NO: 15533 - DNA, 122 bp, Homo sapiens
  misc_feature (61)..(62): /note="This region represents a CpG dinucleotide"
  misc_feature (61)..(61): /note="Nucleotide may be methylated to form 5-methylcytosine"
cccaagtgatgtgcccgcctccacctgccaaagtgttgggattacaggcttgagccactgcgcccggcccagagacactaaatgccttacacaacatcaggagtgtccagatatattcagaa

SEQ ID NO: 15534 - DNA, 122 bp, Homo sapiens
  misc_feature (61)..(62): /note="This region represents a CpG dinucleotide"
  misc_feature (61)..(61): /note="Nucleotide may be methylated to form 5-methylcytosine"
ggactggtcctgtcctctgtcccatctccttgcctcttgctctcccttattctgctaggacggttctgcccataactggtgcctgggtcttgttcagacctgacctgcagtgtcacttcctc

SEQ ID NO: 15535 - DNA, 122 bp, Homo sapiens
  misc_feature (61)..(62): /note="This region represents a CpG dinucleotide"
  misc_feature (61)..(61): /note="Nucleotide may be methylated to form 5-methylcytosine"
agagcagaggctccaggttcaaatccatcctggctttactatttagtagctgagaggcctcgtgtaagttacttaaccactctgttcttcagtttccttagctgtaaactgagggtggcaat

SEQ ID NO: 15536 - DNA, 122 bp, Homo sapiens
  misc_feature (61)..(62): /note="This region represents a CpG dinucleotide"
  misc_feature (61)..(61): /note="Nucleotide may be methylated to form 5-methylcytosine"
cttttccatgtttacatatgtttagacacacagatacttaccatgaattacaatggtctgcggtattcagtacagccccatgctgtcaggtttgcagcctggaagcagcaggccacaccaca

SEQ ID NO: 15537 - DNA, 122 bp, Homo sapiens
  misc_feature (61)..(62): /note="This region represents a CpG dinucleotide"
  misc_feature (61)..(61): /note="Nucleotide may be methylated to form 5-methylcytosine"
gtttcataggatccacccccccatctcaccgatgttccttctctagcatttgctacctaacgtatagctcaggggtggtaaatggtgaccagtgggccccagcctgtggccagcttctgcac

SEQ ID NO: 15538 - DNA, 122 bp, Homo sapiens
  misc_feature (61)..(62): /note="This region represents a CpG dinucleotide"
  misc_feature (61)..(61): /note="Nucleotide may be methylated to form 5-methylcytosine"
tcctgctatacttaataaaattcacgtttcaaagccactcctttcatttactgatgtctacgctggtgactgacatgctgcatttttaagcagctgttcattaaacagcaagaaacagttat

SEQ ID NO: 15539 - DNA, 122 bp, Homo sapiens
  misc_feature (61)..(62): /note="This region represents a CpG dinucleotide"
  misc_feature (61)..(61): /note="Nucleotide may be methylated to form 5-methylcytosine"
ctggagtacgacagtggtagcctgaagatggaacctgggacttctaagtggcggagggagcggcctgagagctgtgatgattcatccaagggtggagaactgaaaaagcccatcagcctggg

SEQ ID NO: 15540 - DNA, 122 bp, Homo sapiens
  misc_feature (61)..(62): /note="This region represents a CpG dinucleotide"
  misc_feature (61)..(61): /note="Nucleotide may be methylated to form 5-methylcytosine"
ctgtgctttgctttccaggaaaacctgagcaggaagcaaaacccagttcagaaataactgcgtggtttatgcaaatcaggacttagctcagagtctcctatggcccagtgtggaccaggaga

SEQ ID NO: 15541 - DNA, 122 bp, Homo sapiens
  misc_feature (61)..(62): /note="This region represents a CpG dinucleotide"
  misc_feature (61)..(61): /note="Nucleotide may be methylated to form 5-methylcytosine"
gatcaaaggagccagcagctcctgaatttcacagctgccaaactcctgccacagtctcagcgccctaaatcccagagctaagggactgtcagtgccaggtttccaggtttccagatgatctg

SEQ ID NO: 15542 - DNA, 122 bp, Homo sapiens
  misc_feature (61)..(62): /note="This region represents a CpG dinucleotide"
  misc_feature (61)..(61): /note="Nucleotide may be methylated to form 5-methylcytosine"
cattacggcacttggcatgcaaatcgcttctgtgctgcaggccgggtgctgggcagggctcgcggaaggtttaaacagggttggagtcgtttacgaggggacaagtgacaaggaaaaaaaat

SEQ ID NO: 15543 - DNA, 122 bp, Homo sapiens
  misc_feature (61)..(62): /note="This region represents a CpG dinucleotide"
  misc_feature (61)..(61): /note="Nucleotide may be methylated to form 5-methylcytosine"
tccttcattagacgtttgctcttgtcttagatgctcagatggtagtggataggcctgtgacgaaggtgctaccatcgtgagagtaaggtaaggatttgcctctttgttaaggtcagaggggc

SEQ ID NO: 15544 - DNA, 122 bp, Homo sapiens
  misc_feature (61)..(62): /note="This region represents a CpG dinucleotide"
  misc_feature (61)..(61): /note="Nucleotide may be methylated to form 5-methylcytosine"
cctcaaacaaacaaacaaaacacctaactggggaggtcacagaaggtctcgcccagcagacggcacttgagctgaagccctgtgaatcttaaggttgtccagtctgactgtgggagcagaca

SEQ ID NO: 15545 - DNA, 122 bp, Homo sapiens
  misc_feature (61)..(62): /note="This region represents a CpG dinucleotide"
  misc_feature (61)..(61): /note="Nucleotide may be methylated to form 5-methylcytosine"
ctttccaaatcccctaagcacacagctggtcaggcctgttaggccaggtgttgctctgcacgtctggccatctttctcgctctctcattccacatagcatggtctggtccaaaggaaaggga

SEQ ID NO: 15546 - DNA, 122 bp, Homo sapiens
  misc_feature (61)..(62): /note="This region represents a CpG dinucleotide"
  misc_feature (61)..(61): /note="Nucleotide may be methylated to form 5-methylcytosine"
aagaagcagaagctgttaggacacaaaacacacctgaacagtctcactggtgtgagtaaacgcaatcacctgggagacgcaggcatcatcacacccaattgtgtaattatagccacacattg

SEQ ID NO: 15547 - DNA, 122 bp, Homo sapiens
  misc_feature (61)..(62): /note="This region represents a CpG dinucleotide"
  misc_feature (61)..(61): /note="Nucleotide may be methylated to form 5-methylcytosine"
catgggtggactgaggctcagactacgggggcacctggttcatgacggagacatcagctgcgtgagtccagtaacagtcgtgcacagagacgaaggtcaggcccttcctgtggcagagcgga

SEQ ID NO: 15548 - DNA, 122 bp, Homo sapiens
  misc_feature (61)..(62): /note="This region represents a CpG dinucleotide"
  misc_feature (61)..(61): /note="Nucleotide may be methylated to form 5-methylcytosine"
ctgacagcctgccatccctcagccttttattctaacacacagacagggagttagtgtgtgcggatctgtggtggagaaggtatctcattcctctctaacatcatctccactttgcatctgtc

SEQ ID NO: 15549 - DNA, 122 bp, Homo sapiens
  misc_feature (61)..(62): /note="This region represents a CpG dinucleotide"
  misc_feature (61)..(61): /note="Nucleotide may be methylated to form 5-methylcytosine"
gtggttttgcttgcgttccctgtcgaggtcaaatacgaagagacgaatctgtacatttagcgttttatttgggacacaggaattgcaagttcaggttatttacacatacagggtggtcttca

SEQ ID NO: 15550 - DNA, 122 bp, Homo sapiens
  misc_feature (61)..(62): /note="This region represents a CpG dinucleotide"
  misc_feature (61)..(61): /note="Nucleotide may be methylated to form 5-methylcytosine"
tggaatcctctttcaggtaccaaatgtcaccatactttttattccatagcacggctcccacgcagctcactacagacatgaccagagcagcaggaaccaaagggagacccgcccattgtcac

SEQ ID NO: 15551 - DNA, 122 bp, Homo sapiens
  misc_feature (61)..(62): /note="This region represents a CpG dinucleotide"
  misc_feature (61)..(61): /note="Nucleotide may be methylated to form 5-methylcytosine"
gagcagagcagagctgaaagagaccagtctcagagaagcaaacatgttcaagcaaagaaccgggcaagtcttgttttccctccaaacccaaacctcctagaaactaacagttggtttttgat

SEQ ID NO: 15552 - DNA, 122 bp, Homo sapiens
  misc_feature (61)..(62): /note="This region represents a CpG dinucleotide"
  misc_feature (61)..(61): /note="Nucleotide may be methylated to form 5-methylcytosine"
aagcagggtctcactttgtcacccaggcaggagtacaatggcatgatcttggctcactgacggagccaaaggatacagtcaaataaggaatcagtaagcagaaagatcagaaagaggaacac

SEQ ID NO: 15553 - DNA, 122 bp, Homo sapiens
  misc_feature (61)..(62): /note="This region represents a CpG dinucleotide"
  misc_feature (61)..(61): /note="Nucleotide may be methylated to form 5-methylcytosine"
ctaaaggaagcaagtagtttctggtctacagacttctactgtgatctacagttagtccttcgtttctctaagttttaccttgggaagtttttctttttaattcacaggtcttctttctgagt

SEQ ID NO: 15554 - DNA, 122 bp, Homo sapiens
  misc_feature (61)..(62): /note="This region represents a CpG dinucleotide"
  misc_feature (61)..(61): /note="Nucleotide may be methylated to form 5-methylcytosine"
agagcagccactattttttttttttttttacaaaaaatttcccactatatcctaaaaagtcggaattctgaaatagactggactcagacaccaactaaaggcagcatcactcatcactcccc

SEQ ID NO: 15555 - DNA, 122 bp, Homo sapiens
  misc_feature (61)..(62): /note="This region represents a CpG dinucleotide"
  misc_feature (61)..(61): /note="Nucleotide may be methylated to form 5-methylcytosine"
cctccaattcactggaggccaccctgctgtagggctgctgaaacaggcagtgccagggatcgtgtctcagcagtgacgtggctggggtgtatgagctgagccatttcataaccgagttctgc

SEQ ID NO: 15556 - DNA, 122 bp, Homo sapiens
  misc_feature (61)..(62): /note="This region represents a CpG dinucleotide"
  misc_feature (61)..(61): /note="Nucleotide may be methylated to form 5-methylcytosine"
aatataggtgaagcacttaatgtgctgccagttacatcagtacgcaagaaaagttagcaccgccattataataaccctgaatcataaagacctgaatgcccttagtcagagcaccacccaga

SEQ ID NO: 15557 - DNA, 122 bp, Homo sapiens
  misc_feature (61)..(62): /note="This region represents a CpG dinucleotide"
  misc_feature (61)..(61): /note="Nucleotide may be methylated to form 5-methylcytosine"
tacttcactattgattagtcactatccaaactaatctcatcagttcaatttatagtaactcgtatagtgctctttagagattagtctggtgaggaactgaagtacacaccaatgctagaaaa

SEQ ID NO: 15558 - DNA, 122 bp, Homo sapiens
  misc_feature (61)..(62): /note="This region represents a CpG dinucleotide"
  misc_feature (61)..(61): /note="Nucleotide may be methylated to form 5-methylcytosine"
acttattgaggacatgaaattagtaagaacacagtgaagcaactgattgctttctgagcccggctaatcactggactttagcttcatcataagcaaagtcatatgcaaggtcatcatatgcg

SEQ ID NO: 15559 - DNA, 122 bp, Homo sapiens
  misc_feature (61)..(62): /note="This region represents a CpG dinucleotide"
  misc_feature (61)..(61): /note="Nucleotide may be methylated to form 5-methylcytosine"
tgcccaggtgataggtgtggtgtgcatgagtcctcagccctgcccaggtgacaggtgtcccgtgtgctggtcctcagctgtgcccaggcttgggctgtgggtgccgcccgttcccagtggac

SEQ ID NO: 15560 - DNA, 122 bp, Homo sapiens
  misc_feature (61)..(62): /note="This region represents a CpG dinucleotide"
  misc_feature (61)..(61): /note="Nucleotide may be methylated to form 5-methylcytosine"
ataaagcactcactcaaaagtaatagccgtgatccttcgtgtggccagtgtcccagccagcggtgctggccctgcacactggctcaaaagcagcacctgtgtgcagagaagaaatagctgag

SEQ ID NO: 15561 - DNA, 122 bp, Homo sapiens
  misc_feature (61)..(62): /note="This region represents a CpG dinucleotide"
  misc_feature (61)..(61): /note="Nucleotide may be methylated to form 5-methylcytosine"
atagatttgtgcaaagcattgtgtaagcatggcatatatagtttaaagaattccttgttgcggaaactccaggttttgttattcgtttgaagggtatgtgtgtttcctcctcctttacttcc

SEQ ID NO: 15562 - DNA, 122 bp, Homo sapiens
  misc_feature (61)..(62): /note="This region represents a CpG dinucleotide"
  misc_feature (61)..(61): /note="Nucleotide may be methylated to form 5-methylcytosine"
atttgaaatcagttggggaaatccagtgtgaatttcctacttattttgatgtaaccgtcacgaggtgcacggcaaaagatcagaaatagaacggcagactttttatgattggctggggtgag

SEQ ID NO: 15563 - DNA, 122 bp, Homo sapiens
  misc_feature (61)..(62): /note="This region represents a CpG dinucleotide"
  misc_feature (61)..(61): /note="Nucleotide may be methylated to form 5-methylcytosine"
aagaaataaatattatttacctaagtgggtaggtgatgaaagaggagttttcaagagagacggagtaggtaaaggaagagagctagttgatttagtctgaaccttaagggaggaaaaaattt

SEQ ID NO: 15564 - DNA, 122 bp, Homo sapiens
  misc_feature (61)..(62): /note="This region represents a CpG dinucleotide"
  misc_feature (61)..(61): /note="Nucleotide may be methylated to form 5-methylcytosine"
gttccacaatggcgagtctgaggagagccacgagcagttcctgaaggcgctgcagaacgccgtcaccaccttcgtgaaccgcatgaagagtaaccacatgcggggccgcagcatcaccaatg

SEQ ID NO: 15565 - DNA, 122 bp, Homo sapiens
  misc_feature (61)..(62): /note="This region represents a CpG dinucleotide"
  misc_feature (61)..(61): /note="Nucleotide may be methylated to form 5-methylcytosine"
ttgagatcacacatttctgttgtttaacccaccccagctgtggtcttttgtcaaggtagccgtagcagacaaactcagttttccagcagaggaaactgcacatgcaaaagccctggaagtga

SEQ ID NO: 15566 - DNA, 122 bp, Homo sapiens
  misc_feature (61)..(62): /note="This region represents a CpG dinucleotide"
  misc_feature (61)..(61): /note="Nucleotide may be methylated to form 5-methylcytosine"
attacatatagcttttctaagagtgtttataagaaggcttctccatcaaattaagaaacacggtaggcactaaaatataaaggagaattgattaatcacactgtgctttgtaaatggtaaga

SEQ ID NO: 15567 - DNA, 122 bp, Homo sapiens
  misc_feature (61)..(62): /note="This region represents a CpG dinucleotide"
  misc_feature (61)..(61): /note="Nucleotide may be methylated to form 5-methylcytosine"
gccagaaatggacacaatttcacttgcactatattaaagtggtcaaggcagtcatgggcccgcccagatccaagggaaagggagtccaggagtctgtggtggcttgaacccaccacacccac

SEQ ID NO: 15568 - DNA, 122 bp, Homo sapiens
  misc_feature (61)..(62): /note="This region represents a CpG dinucleotide"
  misc_feature (61)..(61): /note="Nucleotide may be methylated to form 5-methylcytosine"
ttgcaagagtgtcaaatgccctgtatgaagacatcagaagctatgagcttgaccaaacaccgcaataaaataacaattctacataggattctggaattaagatttaagcctaaaaaactggc

SEQ ID NO: 15569 - DNA, 122 bp, Homo sapiens
  misc_feature (61)..(62): /note="This region represents a CpG dinucleotide"
  misc_feature (61)..(61): /note="Nucleotide may be methylated to form 5-methylcytosine"
tcagtggtgagcgggagacaggcccaaagagctgaggaagtgtaaactccagtgataaggcgataacttgaggaaattaaaaccccgtagtgtgggaaagaacaattagccaagacagaggg

SEQ ID NO: 15570 - DNA, 122 bp, Homo sapiens
  misc_feature (61)..(62): /note="This region represents a CpG dinucleotide"
  misc_feature (61)..(61): /note="Nucleotide may be methylated to form 5-methylcytosine"
gcacagcatgatagcaagccaggctgatgcccagtgaagccaggctgatgccctggcatgcgtgtgactctgggaagtgcccagtgatctctccccaggtcacacccaccccaggtgaagca

SEQ ID NO: 15571 - DNA, 122 bp, Homo sapiens
  misc_feature (61)..(62): /note="This region represents a CpG dinucleotide"
  misc_feature (61)..(61): /note="Nucleotide may be methylated to form 5-methylcytosine"
tacgaagagatcttttcatctcctctccgtgaacacttggggaggggctgggactccaggcgacacggaaacgccaccacacgcacactcgacggagcacaacactttctgagctgccatcc

SEQ ID NO: 15572 - DNA, 122 bp, Homo sapiens
  misc_feature (61)..(62): /note="This region represents a CpG dinucleotide"
  misc_feature (61)..(61): /note="Nucleotide may be methylated to form 5-methylcytosine"
tataaaagaggaacagcagatgctggaaaccctaattgtggttattgggcaatgttgtctcgtccctagctcaagactttgatacttactgactttaacagagttgtgcaattcatggacat

SEQ ID NO: 15573 - DNA, 122 bp, Homo sapiens
  misc_feature (61)..(62): /note="This region represents a CpG dinucleotide"
  misc_feature (61)..(61): /note="Nucleotide may be methylated to form 5-methylcytosine"
cttcccttctcgtcctagtcatttgttgagcatttacatgcattgcccccatttaattctcgtagagcgtgggaagtagttttctattcctacttaacagaagaggaaatgttacaggaggt

SEQ ID NO: 15574 - DNA, 122 bp, Homo sapiens
  misc_feature (61)..(62): /note="This region represents a CpG dinucleotide"
  misc_feature (61)..(61): /note="Nucleotide may be methylated to form 5-methylcytosine"
gaggtcctttacatgagggtggaggagctttctaggcagggagaacagtgaaagcttggacgctgggctggaatcaatgccacaggtatgaaagcaagtggagggattgctggactagagta

SEQ ID NO: 15575 - DNA, 122 bp, Homo sapiens
  misc_feature (61)..(62): /note="This region represents a CpG dinucleotide"
  misc_feature (61)..(61): /note="Nucleotide may be methylated to form 5-methylcytosine"
ccaagtgctgagatatattgggaagcccagagtcagcacttttggtggctcaggaggcagcgggccctgatttttgccgaatgcagaaagctagagcctccttgctgctcggtcccagagtc

SEQ ID NO: 15576 - DNA, 122 bp, Homo sapiens
  misc_feature (61)..(62): /note="This region represents a CpG dinucleotide"
  misc_feature (61)..(61): /note="Nucleotide may be methylated to form 5-methylcytosine"
aaacatatcttacgacacacagcaacttaagaaacatatccactaaaattcctagatgtccgtcattgtataattgttgatagaatgctttgttttttcttttttgtttgtattgttttctg

SEQ ID NO: 15577 - DNA, 122 bp, Homo sapiens
  misc_feature (61)..(62): /note="This region represents a CpG dinucleotide"
  misc_feature (61)..(61): /note="Nucleotide may be methylated to form 5-methylcytosine"
caaatatctggtgaaacttgatttccattcttatgttattaatatttataaatgaagtatcggtttatcaatgtaggtaactacagtggttttaacaattgttatgaaaggctggttttgca

SEQ ID NO: 15578 - DNA, 122 bp, Homo sapiens
  misc_feature (61)..(62): /note="This region represents a CpG dinucleotide"
  misc_feature (61)..(61): /note="Nucleotide may be methylated to form 5-methylcytosine"
cagaaggcggcttgccagcattttctcgggctgcagaggctggaggcttatggacgactccgtggtcgcctcccccggggttacgatatttggagaaggtttttcctccttgatcattttgg

SEQ ID NO: 15579 - DNA, 122 bp, Homo sapiens
  misc_feature (61)..(62): /note="This region represents a CpG dinucleotide"
  misc_feature (61)..(61): /note="Nucleotide may be methylated to form 5-methylcytosine"
tttggtgcagcaatttggtgacttattttgattgtcccaaagcctttttgtttagttccacgttctctattaccctttggaaaagcaacatttcaggacgaatgaggtgttactgtagcata

SEQ ID NO: 15580 - DNA, 122 bp, Homo sapiens
  misc_feature (61)..(62): /note="This region represents a CpG dinucleotide"
  misc_feature (61)..(61): /note="Nucleotide may be methylated to form 5-methylcytosine"
aaggtggtttatatctgtttgtatttctctcagatcatttgcatagcttatgattcattccgtttcagttgttattagtaaccgcttcaatgcctctgtcctagcatggtagcaaaaatgtc

SEQ ID NO: 15581 - DNA, 122 bp, Homo sapiens
  misc_feature (61)..(62): /note="This region represents a CpG dinucleotide"
  misc_feature (61)..(61): /note="Nucleotide may be methylated to form 5-methylcytosine"
gttgggggaggggagggaccactagggtggcttctcaagaatacagtgggcccagcccagcgtggcccataccagtcacctcccagctcctggccctagctcagctggggaggtagggagat

SEQ ID NO: 15582 - DNA, 122 bp, Homo sapiens
  misc_feature (61)..(62): /note="This region represents a CpG dinucleotide"
  misc_feature (61)..(61): /note="Nucleotide may be methylated to form 5-methylcytosine"
ggcctttaagcaagtggtgtgctcttgacagcaaattgtgcacatcccttctcaactctgcgttaagtgacatcatgttggtagctggaaatcaactgtagcaggagcatttacatagtgga

SEQ ID NO: 15583 - DNA, 122 bp, Homo sapiens
  misc_feature (61)..(62): /note="This region represents a CpG dinucleotide"
  misc_feature (61)..(61): /note="Nucleotide may be methylated to form 5-methylcytosine"
tggtggggcaggctcagctcacactcagccttggcaagtagctccagaaactgctagtgacgttgtcttcaagttaaatctcaggaggaaaagaaaatacgaggacaacaaagagaggaagt

SEQ ID NO: 15584 - DNA, 122 bp, Homo sapiens
  misc_feature (61)..(62): /note="This region represents a CpG dinucleotide"
  misc_feature (61)..(61): /note="Nucleotide may be methylated to form 5-methylcytosine"
tcctcagcttttccttcagggccaggtccctggattcttggataagacatttacaatatgcgggcaccacactgaatcaggactgtgtgcagagaagcaaaccaggcctttccacatagata

SEQ ID NO: 15585 - DNA, 122 bp, Homo sapiens
  misc_feature (61)..(62): /note="This region represents a CpG dinucleotide"
  misc_feature (61)..(61): /note="Nucleotide may be methylated to form 5-methylcytosine"
agtggtatttggaacaatattgctgctgatcagagggtccaagggagatgtaggtgccgacgtcactgagatcctgatctggccacgtttgaacgaactatttaagcccgacctcacttcct

SEQ ID NO: 15586 - DNA, 122 bp, Homo sapiens
  misc_feature (61)..(62): /note="This region represents a CpG dinucleotide"
  misc_feature (61)..(61): /note="Nucleotide may be methylated to form 5-methylcytosine"
gcccaagggatgccttagccctgatattgtagtattcgtaggctgattcatgatccctgccgacatatccttaaaagactggatagatgctacacacagctcagcccagccctcttctttct

SEQ ID NO: 15587 - DNA, 122 bp, Homo sapiens
  misc_feature (61)..(62): /note="This region represents a CpG dinucleotide"
  misc_feature (61)..(61): /note="Nucleotide may be methylated to form 5-methylcytosine"
ttgttctcatcatagcaatccacctactgctgtaggcttgatgttatcactcctgccattcgggcaggtgtctggagggtggaagtagggacaaagaccttagaaaagtggtagggtgatga

SEQ ID NO: 15588 - DNA, 122 bp, Homo sapiens
  misc_feature (61)..(62): /note="This region represents a CpG dinucleotide"
  misc_feature (61)..(61): /note="Nucleotide may be methylated to form 5-methylcytosine"
actccagcctacttcaaatcctgtatagcataaattatcatcattgtcaagagaactgggcgttgagaaaaggagaaaagcacacctggattcagcagaacgacattaaattattatgtctt

SEQ ID NO: 15589 - DNA, 122 bp, Homo sapiens
  misc_feature (61)..(62): /note="This region represents a CpG dinucleotide"
  misc_feature (61)..(61): /note="Nucleotide may be methylated to form 5-methylcytosine"
aagatggcacttgttgggcagcaatgtgtgacactccctctagaggctcagatcaattctcgtgcttttatcttttcttgaggctcagcatgatgaaaagtggcctatatctacagctgata

SEQ ID NO: 15590 - DNA, 122 bp, Homo sapiens
  misc_feature (61)..(62): /note="This region represents a CpG dinucleotide"
  misc_feature (61)..(61): /note="Nucleotide may be methylated to form 5-methylcytosine"
aattatttcttctgatgacagttgttcttttctttcttccttttcctgctttatgctgctcgttttcctctacggtcttggggtcttcagtagactgatttcctattgaaaatcaactaggc

SEQ ID NO: 15591 - DNA, 122 bp, Homo sapiens
  misc_feature (61)..(62): /note="This region represents a CpG dinucleotide"
  misc_feature (61)..(61): /note="Nucleotide may be methylated to form 5-methylcytosine"
ggaagagactggaggaattcccactccagccctgctgcctgctggctaaaggacttagtgcgagccatttccccttacccggcttcagttttctcatctataaaatggatgataccgacttc

SEQ ID NO: 15592 - DNA, 122 bp, Homo sapiens
  misc_feature (61)..(62): /note="This region represents a CpG dinucleotide"
  misc_feature (61)..(61): /note="Nucleotide may be methylated to form 5-methylcytosine"
tcgtgaaactccaagttagttttactaactatatcaagcttcatgtaaccttcaacttcccgtttcatcaggcacaaaccttcattattgttcaccattgtaattaggtagcattttaagac

SEQ ID NO: 15593 - DNA, 122 bp, Homo sapiens
  misc_feature (61)..(62): /note="This region represents a CpG dinucleotide"
  misc_feature (61)..(61): /note="Nucleotide may be methylated to form 5-methylcytosine"
catacagacacacacatataaacattgatcaacactgaaatgtttaatagtcattattttcgggtcgtaaaattcactgttcttcaatgaatacttgtagagcacatattatatgcagtagt

SEQ ID NO: 15594 - DNA, 122 bp, Homo sapiens
  misc_feature (61)..(62): /note="This region represents a CpG dinucleotide"
  misc_feature (61)..(61): /note="Nucleotide may be methylated to form 5-methylcytosine"
agtttctgaattccttggtcctaatagatttctcagttgataggttgccatctcacttgacgtctacttgatggctatgttctcttcttgtctgcctcccttttcactcctgttcttgaccc

SEQ ID NO: 15595 - DNA, 122 bp, Homo sapiens
  misc_feature (61)..(62): /note="This region represents a CpG dinucleotide"
  misc_feature (61)..(61): /note="Nucleotide may be methylated to form 5-methylcytosine"
ggagctagagttgcttaatccttcctttatagcccacagagaggtaaggcagggcaggagcgcagcccatagcatgcgagctgttctagtgccagttcaagaaatagctcgtgtgcttacca

SEQ ID NO: 15596 - DNA, 122 bp, Homo sapiens
  misc_feature (61)..(62): /note="This region represents a CpG dinucleotide"
  misc_feature (61)..(61): /note="Nucleotide may be methylated to form 5-methylcytosine"
caaacaagttcccctctctgtcaatgctgaatgaactggttgatgaaactgtataacagccgtggcatcgtgacagtcgaggtcggcccatcttcctttatgctttagccacacacagaagt

SEQ ID NO: 15597 - DNA, 122 bp, Homo sapiens
  misc_feature (61)..(62): /note="This region represents a CpG dinucleotide"
  misc_feature (61)..(61): /note="Nucleotide may be methylated to form 5-methylcytosine"
gtcttaatgggtctgggcctggctggtagggagctgagcagcttgtagaacaccagctcacgcagcatgtgatggggactggccccaggctataggttaataattgatcagacccaaccaca

SEQ ID NO: 15598 - DNA, 122 bp, Homo sapiens
  misc_feature (61)..(62): /note="This region represents a CpG dinucleotide"
  misc_feature (61)..(61): /note="Nucleotide may be methylated to form 5-methylcytosine"
ggcctccgcggtccagaacctctcccaggtgtgatggatcctccaagccgctctttgagccgctgtccaggtctgcaggtcctcgttcagggacatgaaatctccttgtcgtaggcggactt

SEQ ID NO: 15599 - DNA, 122 bp, Homo sapiens
  misc_feature (61)..(62): /note="This region represents a CpG dinucleotide"
  misc_feature (61)..(61): /note="Nucleotide may be methylated to form 5-methylcytosine"
tcttctgcccttaaataagcatcctaactagtggaatgagtcacagaacctggaaatagacgtgtgacaaagatggcattacaaatggaatggaaatgtctatcctgttcctgtcccaccat

SEQ ID NO: 15600 - DNA, 122 bp, Homo sapiens
  misc_feature (61)..(62): /note="This region represents a CpG dinucleotide"
  misc_feature (61)..(61): /note="Nucleotide may be methylated to form 5-methylcytosine"
tttccgtaagtggtaaggtcagcctcatacagtattgcacagcctttcccattccttttgcgtcagtgagaatcaaatgattcaacagtgaaaagcaaactcttggactggaatagcaagat

SEQ ID NO: 15601 - DNA, 122 bp, Homo sapiens
  misc_feature (61)..(62): /note="This region represents a CpG dinucleotide"
  misc_feature (61)..(61): /note="Nucleotide may be methylated to form 5-methylcytosine"
agacttctgtggcagagcagcaggtacaggactgggggtctctggcacccgcaccagccacgttcccagaccctgcaccaggaccctaggtgagggcccagggcaagcccctctgggatggc

SEQ ID NO: 15602 - DNA, 122 bp, Homo sapiens
  misc_feature (61)..(62): /note="This region represents a CpG dinucleotide"
  misc_feature (61)..(61): /note="Nucleotide may be methylated to form 5-methylcytosine"
ccagtctcttcccaccagtcttaagtctaggttttcagaacttctgactaactggcttcacgttggggttccaatgacctccttgttgggtttgatttgctggagtgactcacagaacttgg

SEQ ID NO: 15603 - DNA, 122 bp, Homo sapiens
  misc_feature (61)..(62): /note="This region represents a CpG dinucleotide"
  misc_feature (61)..(61): /note="Nucleotide may be methylated to form 5-methylcytosine"
ctgtgtctgacttttaatagcagattgtatcgtgatatccttgtctcctgatttcactgtcgtggatcaattctaaaacatcctaatagcattgatagttttttgttaatttattaagatct

SEQ ID NO: 15604 - DNA, 122 bp, Homo sapiens
  misc_feature (61)..(62): /note="This region represents a CpG dinucleotide"
  misc_feature (61)..(61): /note="Nucleotide may be methylated to form 5-methylcytosine"
tacgtgccacagccctggggacaccaggaagtcctatggcttggggttgggctctcgctgcgctggggaatccaatgtgctcctgggtcacggggaaggtactcaggtggagcaatgcactc

SEQ ID NO: 15605 - DNA, 122 bp, Homo sapiens
  misc_feature (61)..(62): /note="This region represents a CpG dinucleotide"
  misc_feature (61)..(61): /note="Nucleotide may be methylated to form 5-methylcytosine"
caaacaaacaaaaacgtcagagtaaagctactgaaacctctaaatgtttcttaacctacacgttcattaaatcatatcttgtttctgcgtgcctttaattttcacatctgcaaaattgcttt

SEQ ID NO: 15606 - DNA, 122 bp, Homo sapiens
  misc_feature (61)..(62): /note="This region represents a CpG dinucleotide"
  misc_feature (61)..(61): /note="Nucleotide may be methylated to form 5-methylcytosine"
aaccttatgtttgcaactgaagattaaaaactaaatattatttgacaagtttttatatgacgacataaagagtggctagtgcccgctgttgactcagacatttctgccaacctcttttgcct

SEQ ID NO: 15607 - DNA, 122 bp, Homo sapiens
  misc_feature (61)..(62): /note="This region represents a CpG dinucleotide"
  misc_feature (61)..(61): /note="Nucleotide may be methylated to form 5-methylcytosine"
ctaccacaacttctttccttgtttgtagtctggctggtttctgctcctagctagaccaagcgtccagctctctcagccctgcccatgctggtccctcagcccgcaaggcccttcctcccatc

SEQ ID NO: 15608 - DNA, 122 bp, Homo sapiens
  misc_feature (61)..(62): /note="This region represents a CpG dinucleotide"
  misc_feature (61)..(61): /note="Nucleotide may be methylated to form 5-methylcytosine"
ctagtgttgtaaatgttaaggatatcttgaatgtgtttacatttggtagttattaacacacgtctgcaggtaaacatgatttttctggttatcctttgcctttaggagagaaaaagaggcaa

SEQ ID NO: 15609 - DNA, 122 bp, Homo sapiens
  misc_feature (61)..(62): /note="This region represents a CpG dinucleotide"
  misc_feature (61)..(61): /note="Nucleotide may be methylated to form 5-methylcytosine"
aaaacctttctgggaaaatccaagttgcctgaactactgttgggaggaagtatggtaacacgtgaagatgactctggtcctttgggttaagtgatgacttaacaaaattcatcaggattcca

SEQ ID NO: 15610 - DNA, 122 bp, Homo sapiens
  misc_feature (61)..(62): /note="This region represents a CpG dinucleotide"
  misc_feature (61)..(61): /note="Nucleotide may be methylated to form 5-methylcytosine"
gcctgtttggagagtgaggggtgaccgtggctttgagcagagtgctggtgggacaggtgccgtcaggtgtcagggagcgaccacagcagcaagccagaaataaaggttaagccgttactctg

SEQ ID NO: 15611 - DNA, 122 bp, Homo sapiens
  misc_feature (61)..(62): /note="This region represents a CpG dinucleotide"
  misc_feature (61)..(61): /note="Nucleotide may be methylated to form 5-methylcytosine"
ctctctacaggggaaattccctactggagacagctttgctgaatgagcttgactgcagtgcgaatgctggggcttattgtggtgactatgaggtcaccaaggttgccaaatcccaagggcat

SEQ ID NO: 15612 - DNA, 122 bp, Homo sapiens
  misc_feature (61)..(62): /note="This region represents a CpG dinucleotide"
  misc_feature (61)..(61): /note="Nucleotide may be methylated to form 5-methylcytosine"
ttggtctgggatatgacctgagcgatgggatttttagaagtttcccaggtgattataatacgaagccaaggttgagaaccacaggtctacagctaatgccacagcccaaagaataagtctat

SEQ ID NO: 15613 - DNA, 122 bp, Homo sapiens
  misc_feature (61)..(62): /note="This region represents a CpG dinucleotide"
  misc_feature (61)..(61): /note="Nucleotide may be methylated to form 5-methylcytosine"
aagggacttacctttgtccctgttcctacatccttctaggctctaactggtttgatgaagcgtgagtagctcagagatatacatgccaagaacggcctggaacagttttattgcccctcccc

SEQ ID NO: 15614 - DNA, 122 bp, Homo sapiens
  misc_feature (61)..(62): /note="This region represents a CpG dinucleotide"
  misc_feature (61)..(61): /note="Nucleotide may be methylated to form 5-methylcytosine"
caggcaggcaaggaaggtatcaaccacactgcctgaggaggctgggagagggggaagggacgttaacaaagagaagatacggccttgcctctgaagaattttataatacagctggagaacca

SEQ ID NO: 15615 - DNA, 122 bp, Homo sapiens
  misc_feature (61)..(62): /note="This region represents a CpG dinucleotide"
  misc_feature (61)..(61): /note="Nucleotide may be methylated to form 5-methylcytosine"
aagggaaggccatgaagagaaatattcgcatgcataaatgcctaataacaaaaactaccacggcagactatgaaaactgcaaccttgcacaaaaaatgcttctaggaggacagctgcccagt

SEQ ID NO: 15616 - DNA, 122 bp, Homo sapiens
  misc_feature (61)..(62): /note="This region represents a CpG dinucleotide"
  misc_feature (61)..(61): /note="Nucleotide may be methylated to form 5-methylcytosine"
ctatgcaatatgaaacctgagaacaaggcttaataacagcccctccaggacggcggcaagcgagccctcaagcgcagtctgcatttccccagccgcagccaggcagctgccggcaccttggg

SEQ ID NO: 15617 - DNA, 122 bp, Homo sapiens
  misc_feature (61)..(62): /note="This region represents a CpG dinucleotide"
  misc_feature (61)..(61): /note="Nucleotide may be methylated to form 5-methylcytosine"
tggtgtctggtgagtgtgtcacctgatcagccttctcagagtgacaggccagcaggatgccgtgtccctggctgacagaaggaggaagccacaggccaaacccagactccctctgggtagaa

SEQ ID NO: 15618 - DNA, 122 bp, Homo sapiens
  misc_feature (61)..(62): /note="This region represents a CpG dinucleotide"
  misc_feature (61)..(61): /note="Nucleotide may be methylated to form 5-methylcytosine"
agtgtaggggaggcagcagtcactttggaatcaagcagtactggtatttaatggcacctccgtttattagtgtatattgtataacgtttattttcctatccagcaaataaaaataacaaaac

SEQ ID NO: 15619 - DNA, 122 bp, Homo sapiens
  misc_feature (61)..(62): /note="This region represents a CpG dinucleotide"
  misc_feature (61)..(61): /note="Nucleotide may be methylated to form 5-methylcytosine"
aatgaaatagtatgtgaagcattaacaccatgattattaccgtcattactgccactagaacgagatgacagtaatgcagactcagggcaggactaattttgtgctatattttaacttgcagt

SEQ ID NO: 15620 - DNA, 122 bp, Homo sapiens
  misc_feature (61)..(62): /note="This region represents a CpG dinucleotide"
  misc_feature (61)..(61): /note="Nucleotide may be methylated to form 5-methylcytosine"
caagctctaggtctcttcccttcccctgactccaactgtaattttttctagggcaggaatcgtgatttgtttgttgttgttttaccagagtatattcaggcttatagtaagaaccttgcttt

SEQ ID NO: 15621 - DNA, 122 bp, Homo sapiens
  misc_feature (61)..(62): /note="This region represents a CpG dinucleotide"
  misc_feature (61)..(61): /note="Nucleotide may be methylated to form 5-methylcytosine"
gattacaggcatgcaccactgcacctagccacacttctcattttcaaaacttaactacaacgctacagtgatcaaagcagtgtggtgatggcataaggacagatcatacagaacaatggaat

SEQ ID NO: 15622 - DNA, 122 bp, Homo sapiens
  misc_feature (61)..(62): /note="This region represents a CpG dinucleotide"
  misc_feature (61)..(61): /note="Nucleotide may be methylated to form 5-methylcytosine"
aggagtcctctgagactaggatgatcagtttagattccaggaagatctaggctctctctgcgcctgatatgatgtaaccttttgctttcctgcaccttgcccttgctgtattttcaagaagc

SEQ ID NO: 15623 - DNA, 122 bp, Homo sapiens
  misc_feature (61)..(62): /note="This region represents a CpG dinucleotide"
  misc_feature (61)..(61): /note="Nucleotide may be methylated to form 5-methylcytosine"
actctaccttatcagtaattacatttaagtgcttaaactctccaaacaaagggcaaagatcggtagaatggacttcaaaaagtaatctaacttgctgggcatagtgactcaggcctgtaatc

SEQ ID NO: 15624 - DNA, 122 bp, Homo sapiens
  misc_feature (61)..(62): /note="This region represents a CpG dinucleotide"
  misc_feature (61)..(61): /note="Nucleotide may be methylated to form 5-methylcytosine"
gaacctgacaagagatggtaagggctctgggagacaggcggggcagtgagagatgggaggcgcatttctgttggagagagtgtctatttcctggactcctgttacgatggtgggtcaagttc

SEQ ID NO: 15625 - DNA, 122 bp, Homo sapiens
  misc_feature (61)..(62): /note="This region represents a CpG dinucleotide"
  misc_feature (61)..(61): /note="Nucleotide may be methylated to form 5-methylcytosine"
caaaaacccctgaatgctttagggcccctgttattaactttattattaattttcctagtccgtgtcacacccagtctttccatttttttttcttacatcttttccaactctgagactcattc

SEQ ID NO: 15626 - DNA, 122 bp, Homo sapiens
  misc_feature (61)..(62): /note="This region represents a CpG dinucleotide"
  misc_feature (61)..(61): /note="Nucleotide may be methylated to form 5-methylcytosine"
cctgtttttaggcctatgccattaccatatttaccttgtgggcagtgattttaatttgagcggcatcattgattaatgttattttgaattttgctggtttggtgattttgtttgtatttaat

SEQ ID NO: 15627 - DNA, 122 bp, Homo sapiens
  misc_feature (61)..(62): /note="This region represents a CpG dinucleotide"
  misc_feature (61)..(61): /note="Nucleotide may be methylated to form 5-methylcytosine"
agcttcacctgcctggctctgtcatcctttgggcaccaacacttccttatttaagttgcacgggctgaccttgactgttgactccaggaatgtgtgcaaatccttgactcccatgaggaccg

SEQ ID NO: 15628 - DNA, 122 bp, Homo sapiens
  misc_feature (61)..(62): /note="This region represents a CpG dinucleotide"
  misc_feature (61)..(61): /note="Nucleotide may be methylated to form 5-methylcytosine"
ccacagccagcctcccaacagacatttccaagcaaagctcttgcctgagtccatgcctcccgctactgccctgagaatcctgagctgcacacaatgcttccctctccggagcaggcttcatt

SEQ ID NO: 15629 - DNA, 122 bp, Homo sapiens
  misc_feature (61)..(62): /note="This region represents a CpG dinucleotide"
  misc_feature (61)..(61): /note="Nucleotide may be methylated to form 5-methylcytosine"
gggattttaaggtagtgaaactcttgcagggcaggggagccccaaaactgggacaccgtccgggaaggctcttggcttcgtccaggaaggaattcaagggtgagctagaggaggaagaaaaa

SEQ ID NO: 15630 - DNA, 122 bp, Homo sapiens
  misc_feature (61)..(62): /note="This region represents a CpG dinucleotide"
  misc_feature (61)..(61): /note="Nucleotide may be methylated to form 5-methylcytosine"
tgggacttgaatttggaagtttgggaagatcagaatttgaggtgaagattgcaacctcagcggtgctcatgagtcactgatggttcaaactacctggtgagtcacacacggataactgagca

SEQ ID NO: 15631 - DNA, 122 bp, Homo sapiens
  misc_feature (61)..(62): /note="This region represents a CpG dinucleotide"
  misc_feature (61)..(61): /note="Nucleotide may be methylated to form 5-methylcytosine"
tcacagttttggaggctgggaagtccaagatccaggcactgatagattcagcgtctggtccgctccatagatggcgccttgtgcctgtgtcctcacatggtagaatgagtaaaagcagggag

SEQ ID NO: 15632 - DNA, 122 bp, Homo sapiens
  misc_feature (61)..(62): /note="This region represents a CpG dinucleotide"
  misc_feature (61)..(61): /note="Nucleotide may be methylated to form 5-methylcytosine"
gagctgaggacaggtcagtgagggcactaggctacaggaagaggcatttcctatagatgacggctgtaaaattttaagctgagttcctccaggaagtcatagagtaattagtggtttttttc

SEQ ID NO: 15633 - DNA, 122 bp, Homo sapiens
  misc_feature (61)..(62): /note="This region represents a CpG dinucleotide"
  misc_feature (61)..(61): /note="Nucleotide may be methylated to form 5-methylcytosine"
taaaaaaaaaaaaaaaaaaaggaaaactgttaataatgccactcaggctgccttaactgacgtagtagagatgtaataaaatgctcctgaaagctaagaaaagctaaatgactacaataaaa

SEQ ID NO: 15634 - DNA, 122 bp, Homo sapiens
  misc_feature (61)..(62): /note="This region represents a CpG dinucleotide"
  misc_feature (61)..(61): /note="Nucleotide may be methylated to form 5-methylcytosine"
acctatagagaaaaatgaggtaacatttaacttgagattacttcagagaattcccattctcgtcaccaggtgtcagtaaaataaccatcactgcaagaccctgttccctagaacaataattg

SEQ ID NO: 15635 - DNA, 122 bp, Homo sapiens
  misc_feature (61)..(62): /note="This region represents a CpG dinucleotide"
  misc_feature (61)..(61): /note="Nucleotide may be methylated to form 5-methylcytosine"
tatacttgtcaaccctaaaccaagccataattggagcagctactgttatcaaagtggggccgctctgtgacagcttaataaagctgaaactgttaaattaaatctcagatgcttaactcctt

SEQ ID NO: 15636 - DNA, 122 bp, Homo sapiens
  misc_feature (61)..(62): /note="This region represents a CpG dinucleotide"
  misc_feature (61)..(61): /note="Nucleotide may be methylated to form 5-methylcytosine"
aaaagaaagaaagaaaaggaagggaaggaaggaagggagaaagaaagaaagataatgtcacggtatgaccatatgcatggcatttgaaatattgttgagtcatagcttcatcactgggatgt

SEQ ID NO: 15637 - DNA, 122 bp, Homo sapiens
  misc_feature (61)..(62): /note="This region represents a CpG dinucleotide"
  misc_feature (61)..(61): /note="Nucleotide may be methylated to form 5-methylcytosine"
ccttgggttacctgccagacagacataccaagggccttgtttcttctctttctctactctcgcaccctcaacgtgagcttcattctgggattggctcccctcgtggttatacaggctggagg

SEQ ID NO: 15638 - DNA, 122 bp, Homo sapiens
  misc_feature (61)..(62): /note="This region represents a CpG dinucleotide"
  misc_feature (61)..(61): /note="Nucleotide may be methylated to form 5-methylcytosine"
catccctaaagttaaatctctctggagcagaaactgattcagcatcgacttacaaattatcgcattactaacatcaggtcttgcaacaactgaatttatcttagggaggcttctaactaaag

SEQ ID NO: 15639 - DNA, 122 bp, Homo sapiens
  misc_feature (61)..(62): /note="This region represents a CpG dinucleotide"
  misc_feature (61)..(61): /note="Nucleotide may be methylated to form 5-methylcytosine"
ggtagcaactcatattctttgtgggactaaagtttgtccttgccaatggtcaacagttatcgtggggagagaggagaggagagggacatattctctcccagcctttcacctgctaggcctat

SEQ ID NO: 15640 - DNA, 122 bp, Homo sapiens
  misc_feature (61)..(62): /note="This region represents a CpG dinucleotide"
  misc_feature (61)..(61): /note="Nucleotide may be methylated to form 5-methylcytosine"
cactactgccactaccttaaaaagtatggccacagagccactttggtgggcacggccggccggctggaggcagcttggagctaaaagccaaaccccaggtagccactcactgccttttcctc

SEQ ID NO: 15641 - DNA, 122 bp, Homo sapiens
  misc_feature (61)..(62): /note="This region represents a CpG dinucleotide"
  misc_feature (61)..(61): /note="Nucleotide may be methylated to form 5-methylcytosine"
ttattttttgagtctgtagcacccatggtctggttttataaacagcagaactgaggactacgaagagaattcggcagaataaattaaagatatgtaaacaaacaatgaaaagctagttttgc

SEQ ID NO: 15642 - DNA, 122 bp, Homo sapiens
  misc_feature (61)..(62): /note="This region represents a CpG dinucleotide"
  misc_feature (61)..(61): /note="Nucleotide may be methylated to form 5-methylcytosine"
tggtgtatttgttggggataaactcaccacacaggaaacagctgggtacatgctcacaaacgtcagtaccttgctggtcccaaaggctcatctgaagttgcaagtttgaatccccctttcca

SEQ ID NO: 15643 - DNA, 122 bp, Homo sapiens
  misc_feature (61)..(62): /note="This region represents a CpG dinucleotide"
  misc_feature (61)..(61): /note="Nucleotide may be methylated to form 5-methylcytosine"
aggtagttttacctgagtggggtaaagagagactgctggagtgagtgctggcaatgttctcgatatggatagtgatgtaagtatttacatatctagacatacatcaaatttctgtgccctta

SEQ ID NO: 15644 - DNA, 122 bp, Homo sapiens
  misc_feature (61)..(62): /note="This region represents a CpG dinucleotide"
  misc_feature (61)..(61): /note="Nucleotide may be methylated to form 5-methylcytosine"
aatggggaatttatgggaaagatgtaggggagctcacaggactcacaggattgaaggaaacgaggcacagaacatacagaaactagactgctccagagagtgtagtggcaggaagtgtagca

SEQ ID NO: 15645 - DNA, 122 bp, Homo sapiens
  misc_feature (61)..(62): /note="This region represents a CpG dinucleotide"
  misc_feature (61)..(61): /note="Nucleotide may be methylated to form 5-methylcytosine"
tgttcaggagcccatgttcttcctgctacagtgtgctaccatggtatcaccaggtttccacgttagccacttactcccaagtattacatatgtaaccagtgcttgcttcagtgatcctttaa

SEQ ID NO: 15646 - DNA, 122 bp, Homo sapiens
  misc_feature (61)..(62): /note="This region represents a CpG dinucleotide"
  misc_feature (61)..(61): /note="Nucleotide may be methylated to form 5-methylcytosine"
attcatgaacatttaccagattctccaaagggcgtgggttgccaaatgcttaggaacttccgctttcagtgtttagcaggttagcggggaaatattagtcccattatttaagctgagatttg

SEQ ID NO: 15647 - DNA, 122 bp, Homo sapiens
  misc_feature (61)..(62): /note="This region represents a CpG dinucleotide"
  misc_feature (61)..(61): /note="Nucleotide may be methylated to form 5-methylcytosine"
tatgggaacttaatctgactctgccattaccagcatggggacttgagcaagagttgctaccgtgaatggggccctcttcctcccctggttactcatctgtgaaataattggattaggcagca

SEQ ID NO: 15648 - DNA, 122 bp, Homo sapiens
  misc_feature (61)..(62): /note="This region represents a CpG dinucleotide"
  misc_feature (61)..(61): /note="Nucleotide may be methylated to form 5-methylcytosine"
ctgcactccagactgcatgagaacgtaaaaccctgacttaaaacaaaaacaaaaagaaaacgtgctcattggctaagcctggtagaagccacatgaccaaggctgatcattgctgccactgg

SEQ ID NO: 15649 - DNA, 122 bp, Homo sapiens
  misc_feature (61)..(62): /note="This region represents a CpG dinucleotide"
  misc_feature (61)..(61): /note="Nucleotide may be methylated to form 5-methylcytosine"
gctatatttaaccagtgttctcagcaagtcaagcctgtcaacagctgagaagtttggagccggctttactcagttcctaagcagctgggttatcagtggatacagcgctgctcaccctgtaa

SEQ ID NO: 15650 - DNA, 122 bp, Homo sapiens
  misc_feature (61)..(62): /note="This region represents a CpG dinucleotide"
  misc_feature (61)..(61): /note="Nucleotide may be methylated to form 5-methylcytosine"
cacagcagctgagctattttacagtctcaccaacagtgtatgattgttctgatttttgtacgtcttcaccaacacttatttttttctgtaattttggtgttctatactgttttaagtggtat

SEQ ID NO: 15651 - DNA, 122 bp, Homo sapiens
  misc_feature (61)..(62): /note="This region represents a CpG dinucleotide"
  misc_feature (61)..(61): /note="Nucleotide may be methylated to form 5-methylcytosine"
taagccttatatagtgcatttggctggagctcatgtgtacttctgtggaatgatggctttcgtccatggggcctactttgtggtgatctcattaggtttcacaaggtaaacagctgaaaact

SEQ ID NO: 15652 - DNA, 122 bp, Homo sapiens
  misc_feature (61)..(62): /note="This region represents a CpG dinucleotide"
  misc_feature (61)..(61): /note="Nucleotide may be methylated to form 5-methylcytosine"
aaacagcatgtagcaaatacatccacggatgtcctcctggtttaattggttctgtggcctcggtttctgtcttcctgatggcacctctgtgacaggagctcagaccccggcatcagaccggc

SEQ ID NO: 15653 - DNA, 122 bp, Homo sapiens
  misc_feature (61)..(62): /note="This region represents a CpG dinucleotide"
  misc_feature (61)..(61): /note="Nucleotide may be methylated to form 5-methylcytosine"
tccttccactccccttcccaagggcttctcccatgtgggctttcaatgtgcagggcccctcggcctactgtcctcatgtacattatggatctggtatgtgtagtctcccatgtcacaatctt

SEQ ID NO: 15654 - DNA, 122 bp, Homo sapiens
  misc_feature (61)..(62): /note="This region represents a CpG dinucleotide"
  misc_feature (61)..(61): /note="Nucleotide may be methylated to form 5-methylcytosine"
tatgtgctcaataatttattttccttgttttcttttccatttccttcttctcctctaaggcgctccacatctccgtgatatagcgtgtactcctttcctcattttcttttctctgagacaaa

SEQ ID NO: 15655 - DNA, 122 bp, Homo sapiens
  misc_feature (61)..(62): /note="This region represents a CpG dinucleotide"
  misc_feature (61)..(61): /note="Nucleotide may be methylated to form 5-methylcytosine"
ccagagtctggccttctggcagagcctcatatttctttcagactcaggagctggaggcaccgttttgtctttgctacctgtgtatctgattccgtacagatgcgaggctaggccctgagagg

SEQ ID NO: 15656 - DNA, 122 bp, Homo sapiens
  misc_feature (61)..(62): /note="This region represents a CpG dinucleotide"
  misc_feature (61)..(61): /note="Nucleotide may be methylated to form 5-methylcytosine"
ccactcctcctccttatcttcttcctcaaccactggcatagttttggtcatcctccttgtcgtcacaatggggcgcctgacaccatggagacccgggaaccccactgatcttgggtcctgca

SEQ ID NO: 15657 - DNA, 122 bp, Homo sapiens
  misc_feature (61)..(62): /note="This region represents a CpG dinucleotide"
  misc_feature (61)..(61): /note="Nucleotide may be methylated to form 5-methylcytosine"
accctcagaaccactacactttggggagcactgatgaagataggattgcattgaaagaaacgcgaatgttcttttggaaatatttactgatctctcagaattttctaagtgttttattaatt

SEQ ID NO: 15658 - DNA, 122 bp, Homo sapiens
  misc_feature (61)..(62): /note="This region represents a CpG dinucleotide"
  misc_feature (61)..(61): /note="Nucleotide may be methylated to form 5-methylcytosine"
ccagaccttttttgaaagggggtttaaccttttaaagacacagtacaccaattatcacttcggaatagctgtcactcccagcgcaggaagccagtcccatgcctaaaggcacagtaggcttg

SEQ ID NO: 15659 - DNA, 122 bp, Homo sapiens
  misc_feature (61)..(62): /note="This region represents a CpG dinucleotide"
  misc_feature (61)..(61): /note="Nucleotide may be methylated to form 5-methylcytosine"
ccccagcaacacgagagacctcacagagggagtcacactaacgtggtcggggctccagagcgaaaccccaaccactatgctcacagccaggaccgagcaggctgggccaacggcagtccctg

SEQ ID NO: 15660 - DNA, 122 bp, Homo sapiens
  misc_feature (61)..(62): /note="This region represents a CpG dinucleotide"
  misc_feature (61)..(61): /note="Nucleotide may be methylated to form 5-methylcytosine"
cacacttggctcacacccatgacactagccttgcacacacatttggaggtgatggcaccccggcactgatgccttggggatgctgagcttggacgaggcacgctgctcctggtgggggcttt

SEQ ID NO: 15661 - DNA, 122 bp, Homo sapiens
  misc_feature (61)..(62): /note="This region represents a CpG dinucleotide"
  misc_feature (61)..(61): /note="Nucleotide may be methylated to form 5-methylcytosine"
gcatgatggtttgatccagtttcctctcaaatgccaagaggtccatgtaagcctgggactcggggaccagctcccgaatctggagaaggaggagcagggcaggagtcagaggctcaagtcca

SEQ ID NO: 15662 - DNA, 122 bp, Homo sapiens
  misc_feature (61)..(62): /note="This region represents a CpG dinucleotide"
  misc_feature (61)..(61): /note="Nucleotide may be methylated to form 5-methylcytosine"
gattcatttccagtgtccaacggagaaggtgttgactcagttttgttcaatggatgacaacgtgaataagaaagtggccagtctctccctaagtgaatcctgcagatcagtcacttttctgt

SEQ ID NO: 15663 - DNA, 122 bp, Homo sapiens
  misc_feature (61)..(62): /note="This region represents a CpG dinucleotide"
  misc_feature (61)..(61): /note="Nucleotide may be methylated to form 5-methylcytosine"
tttacttgtggagtgagctaaaaggaggctccaagacagagtttggttcccaacagtgtccgtggccaaagggcacactcagaaggtctcctcctctcgtaggaactggaacacggatgaga

SEQ ID NO: 15664 - DNA, 122 bp, Homo sapiens
  misc_feature (61)..(62): /note="This region represents a CpG dinucleotide"
  misc_feature (61)..(61): /note="Nucleotide may be methylated to form 5-methylcytosine"
agtagatatggttaatgtcagtcatcctgagaagagagaaacacattttgagatatgatacgggagctcagacttagagaggaaaatggttactctctctaggccttggtcatctggatctg

SEQ ID NO: 15665 - DNA, 122 bp, Homo sapiens
  misc_feature (61)..(62): /note="This region represents a CpG dinucleotide"
  misc_feature (61)..(61): /note="Nucleotide may be methylated to form 5-methylcytosine"
taggcaggtcactgggacagatttgaggacagctgtcaggtgattcagccattctacacacgtctgcccctagactaccaattccattagtcattagggcaatgcaaatcaaagccacaatc

SEQ ID NO: 15666 - DNA, 122 bp, Homo sapiens
  misc_feature (61)..(62): /note="This region represents a CpG dinucleotide"
  misc_feature (61)..(61): /note="Nucleotide may be methylated to form 5-methylcytosine"
gcacaccaaggtggcccggaagaaccagaagtgcagcccctctcacaggcagctctgagccgcgctttcccctcctccctgggatggacgctgccgggagactgccagtggagacggaatct

SEQ ID NO: 15667 - DNA, 122 bp, Homo sapiens
  misc_feature (61)..(62): /note="This region represents a CpG dinucleotide"
  misc_feature (61)..(61): /note="Nucleotide may be methylated to form 5-methylcytosine"
tgctacgggggagagtgagtgctcctcctgtaatatttaatcagcaacctgggaggacagcgtcatctttacagacagctgctgctcacttagaggcagatgaatgagtgttcttagaagct

SEQ ID NO: 15668 - DNA, 122 bp, Homo sapiens
  misc_feature (61)..(62): /note="This region represents a CpG dinucleotide"
  misc_feature (61)..(61): /note="Nucleotide may be methylated to form 5-methylcytosine"
gcaaacatgctatttgtctgaggctctttgtccagtcagctggttgacaaatactgatcacgcccagtgtgcacagggacctcagttaagaataccagggctagagcaaagaacgaacatag

SEQ ID NO: 15669 - DNA, 122 bp, Homo sapiens
  misc_feature (61)..(62): /note="This region represents a CpG dinucleotide"
  misc_feature (61)..(61): /note="Nucleotide may be methylated to form 5-methylcytosine"
ttcagagaagagccagataacaaggtagcagagacagaaaacaggctgcccaagtaactgcgcagatctgcagatctgtctaatcctagagcttgggtatgactggccttgattaagtggaa

SEQ ID NO: 15670 - DNA, 122 bp, Homo sapiens
  misc_feature (61)..(62): /note="This region represents a CpG dinucleotide"
  misc_feature (61)..(61): /note="Nucleotide may be methylated to form 5-methylcytosine"
ccagcaggagcagcccggcacccccggagagcgatagagaggcgggggcctgggtggggtcgccaagatcagccccatggggtcacaagaaaaggcctcattgtgaggctctagctgaggct

SEQ ID NO: 15671 - DNA, 122 bp, Homo sapiens
  misc_feature (61)..(62): /note="This region represents a CpG dinucleotide"
  misc_feature (61)..(61): /note="Nucleotide may be methylated to form 5-methylcytosine"
atcttagagccatgagtgcacgtgtgcacacacacacacgcacacctgcacacactcacacgcacacctgcatgtggacacatgcatggggaggtgtggagcccctcccaccagggagaccc

SEQ ID NO: 15672 - DNA, 122 bp, Homo sapiens
  misc_feature (61)..(62): /note="This region represents a CpG dinucleotide"
  misc_feature (61)..(61): /note="Nucleotide may be methylated to form 5-methylcytosine"
gatattattcccatttcacagatgaggaagttgaggcttagagaggataaatgacctgcccgagttaccatagctaataagtagcaaagccagaacttctaaggtgtgcctgagtctaaagc

SEQ ID NO: 15673 - DNA, 122 bp, Homo sapiens
  misc_feature (61)..(62): /note="This region represents a CpG dinucleotide"
  misc_feature (61)..(61): /note="Nucleotide may be methylated to form 5-methylcytosine"
gacccctccctctaactctgcagttggcttactttcatacagagcttggcccgtgcagggcgttcagtaagcgtgtgttgagcagatgagcagatgagtgagtcaatgcatgccatgttctt

SEQ ID NO: 15674 - DNA, 122 bp, Homo sapiens
  misc_feature (61)..(62): /note="This region represents a CpG dinucleotide"
  misc_feature (61)..(61): /note="Nucleotide may be methylated to form 5-methylcytosine"
ttccagagtgtaccggaagccgctacctcccggggccagtgagctgtccgaggtgctgaccgggtgcgggcatcgcctcaccgactctgagaactagcttctagggaacaggggtggagtga

SEQ ID NO: 15675 - DNA, 122 bp, Homo sapiens
  misc_feature (61)..(62): /note="This region represents a CpG dinucleotide"
  misc_feature (61)..(61): /note="Nucleotide may be methylated to form 5-methylcytosine"
gcaacgtggtgggatgagcagcagttggaagaggcttcaggagcaggagccaatctcgcccggtgcccatcaggagatgtcgctgtggtgtccccagctacttcatgctcagtccctgctct

SEQ ID NO: 15676 - DNA, 122 bp, Homo sapiens
  misc_feature (61)..(62): /note="This region represents a CpG dinucleotide"
  misc_feature (61)..(61): /note="Nucleotide may be methylated to form 5-methylcytosine"
ctatctccaaagcatttgcatcatgaccttatacatttcaatcccttttatgctggattccgtttaaagaagacattattagagcaggaagtacaagcatttaaaatatgtagttcccatat

SEQ ID NO: 15677 - DNA, 122 bp, Homo sapiens
  misc_feature (61)..(62): /note="This region represents a CpG dinucleotide"
  misc_feature (61)..(61): /note="Nucleotide may be methylated to form 5-methylcytosine"
tgttttgagattttcaaaatgattgcattagctcttggcaatgctaaattatgttccttgcgaaccactatccagtttctcttgggccaagtccacctcctgctccgcaagaggaacaactc

SEQ ID NO: 15678 - DNA, 122 bp, Homo sapiens
  misc_feature (61)..(62): /note="This region represents a CpG dinucleotide"
  misc_feature (61)..(61): /note="Nucleotide may be methylated to form 5-methylcytosine"
aaaaactatagattacttaaacacaacttacatatatagtttaagatagagcttttaggccgggcatggtagctcacacctgtaatcccagcactttgggaggttgaggtgggaggattgct

SEQ ID NO: 15679 - DNA, 122 bp, Homo sapiens
  misc_feature (61)..(62): /note="This region represents a CpG dinucleotide"
  misc_feature (61)..(61): /note="Nucleotide may be methylated to form 5-methylcytosine"
agcccattccaacaatcagttcaagacaaatataggtcctttgagaattataaattacaacgggggattctcaaaaggatactcagaatttaaaaacgtctatggttttccagcttctggaa

SEQ ID NO: 15680 - DNA, 122 bp, Homo sapiens
  misc_feature (61)..(62): /note="This region represents a CpG dinucleotide"
  misc_feature (61)..(61): /note="Nucleotide may be methylated to form 5-methylcytosine"
ccaagaaccaagcaagccaattagcaaatttgttcttctgttaatgctttagttccaaagcggaattttaatgcatttaaagttagactttatgcctttattagatgagcttgcacatgaaa

SEQ ID NO: 15681 - DNA, 122 bp, Homo sapiens
  misc_feature (61)..(62): /note="This region represents a CpG dinucleotide"
  misc_feature (61)..(61): /note="Nucleotide may be methylated to form 5-methylcytosine"
ttctgggcgtatgagagtattatacctctctactaccttagagttaggcagagttgtgggcggaaggaacatgagtcacttttgggctgaagcaagactcttcagtgttctcttatgtggtg

SEQ ID NO: 15682 - DNA, 122 bp, Homo sapiens
  misc_feature (61)..(62): /note="This region represents a CpG dinucleotide"
  misc_feature (61)..(61): /note="Nucleotide may be methylated to form 5-methylcytosine"
gttgtaaggcacttctttggtccttgtccttttctgtttgcatgtccagagttctcttggcgtaaacacaaaaagaagagtttgtgcttgttcacgcaaatctctgtcaaacagatatacat

SEQ ID NO: 15683 - DNA, 122 bp, Homo sapiens
  misc_feature (61)..(62): /note="This region represents a CpG dinucleotide"
  misc_feature (61)..(61): /note="Nucleotide may be methylated to form 5-methylcytosine"
ctccatctcaaaaaaaaaaaaaaaaagtataagaacaaaactacaaattttcagatgttacgcaactgagagaacgcagagagagttgatctcaaaaaccttaccacttcagccggaaacca

SEQ ID NO: 15684 - DNA, 122 bp, Homo sapiens
  misc_feature (61)..(62): /note="This region represents a CpG dinucleotide"
  misc_feature (61)..(61): /note="Nucleotide may be methylated to form 5-methylcytosine"
tgtttttttcctccctcctgaaaatgaccctagagattgcccccacaggatttagaatcacgcgcacctggatttcaatactggctgtgcttcttggtgacaagactttgggaaagccgtgt

SEQ ID NO: 15685 - DNA, 122 bp, Homo sapiens
  misc_feature (61)..(62): /note="This region represents a CpG dinucleotide"
  misc_feature (61)..(61): /note="Nucleotide may be methylated to form 5-methylcytosine"
gctgggtggggatgctcctagtgccccgcctgcgtggcgccccccaggggccacccgccacggcgctcgtggtgtctgacccgcaagggcgcccctagtgacagccctcccttatacctccc

SEQ ID NO: 15686 - DNA, 122 bp, Homo sapiens
  misc_feature (61)..(62): /note="This region represents a CpG dinucleotide"
  misc_feature (61)..(61): /note="Nucleotide may be methylated to form 5-methylcytosine"
aagccttttctcaggccactgaatataggcttatgtaaacaggcagtataactcagtaggcggagatgaaacatttgcacttctctccaagcattataatgagaaagcaaaactctttatac

SEQ ID NO: 15687 - DNA, 122 bp, Homo sapiens
  misc_feature (61)..(62): /note="This region represents a CpG dinucleotide"
  misc_feature (61)..(61): /note="Nucleotide may be methylated to form 5-methylcytosine"
tggttttagtagtagcaaaaacccaggccccactgaatgtcaacacaaggaaactggtcacgtaaatataaacagcagacgtcccagacgagctgggtgtggttccaggacatgggtcctgc

SEQ ID NO: 15688 - DNA, 122 bp, Homo sapiens
  misc_feature (61)..(62): /note="This region represents a CpG dinucleotide"
  misc_feature (61)..(61): /note="Nucleotide may be methylated to form 5-methylcytosine"
tcatggtttgtaacaatttctttgtgaattgccctcagaattctgagacaacaaacacgtcgtgtgtctactaccacgtgctgaagaattcagacaccattattctggatgattacaaatct

SEQ ID NO: 15689 - DNA, 122 bp, Homo sapiens
  misc_feature (61)..(62): /note="This region represents a CpG dinucleotide"
  misc_feature (61)..(61): /note="Nucleotide may be methylated to form 5-methylcytosine"
tgaaggtgtatatatacacatcatacaggcagatgcaagccatctgtattcaaaacacaacggagtaagttattctagtcactcagaattcaacctgttcccctgaggactttcttaccact

SEQ ID NO: 15690 - DNA, 122 bp, Homo sapiens
  misc_feature (61)..(62): /note="This region represents a CpG dinucleotide"
  misc_feature (61)..(61): /note="Nucleotide may be methylated to form 5-methylcytosine"
gcatcaacaactccaaaggcattacttgtaaacatatgctttatctccgattgccatctccgcatttattataaaattctcggtttatagaccaaaacattagtctgaggaataaaacaaga

SEQ ID NO: 15691 - DNA, 122 bp, Homo sapiens
  misc_feature (61)..(62): /note="This region represents a CpG dinucleotide"
  misc_feature (61)..(61): /note="Nucleotide may be methylated to form 5-methylcytosine"
ggcaggcttgtcccagagctaggctgtgatgcccagaacctaccgggcatctgcttggctcggctgtaccaggtgggccacgtcattgagctggacattccggcgtatgagatccacagccc

SEQ ID NO: 15692 - DNA, 122 bp, Homo sapiens
  misc_feature (61)..(62): /note="This region represents a CpG dinucleotide"
  misc_feature (61)..(61): /note="Nucleotide may be methylated to form 5-methylcytosine"
ctctaccagccatgagcagccggatccgtgggactcactgtcacaactggttgtggggaccgtcccccacactggcaagttcaagtcaacaaactatgctaggcagtgttaaaggtagaggg

SEQ ID NO: 15693 - DNA, 122 bp, Homo sapiens
  misc_feature (61)..(62): /note="This region represents a CpG dinucleotide"
  misc_feature (61)..(61): /note="Nucleotide may be methylated to form 5-methylcytosine"
taggctttgcgggccatatggtctctgctcaacagctcagctctcttgtggtgtgaaaggcgtaatagaaaataagtaaacaaatgcttgtgtctgtgtggcagcaaactttacttataagt

SEQ ID NO: 15694 - DNA, 122 bp, Homo sapiens
  misc_feature (61)..(62): /note="This region represents a CpG dinucleotide"
  misc_feature (61)..(61): /note="Nucleotide may be methylated to form 5-methylcytosine"
agagataaaaggctgttactttgtatcagcaaggcgtctttttctgcaggactgagttcacgaaaggggaaggcggtgggcgggggagtagaaggaagcgggggccgttaatagactttgga

SEQ ID NO: 15695 - DNA, 122 bp, Homo sapiens
  misc_feature (61)..(62): /note="This region represents a CpG dinucleotide"
  misc_feature (61)..(61): /note="Nucleotide may be methylated to form 5-methylcytosine"
ctcatgatgattcaccatctggccacctgtcactaaccagaacctcgggctccttagctgcgaagtgagtgaaataatccctgcctcacttgttggatcgaatttcatgatacacgagaaag

SEQ ID NO: 15696 - DNA, 122 bp, Homo sapiens
  misc_feature (61)..(62): /note="This region represents a CpG dinucleotide"
  misc_feature (61)..(61): /note="Nucleotide may be methylated to form 5-methylcytosine"
aaggagggagtccttggtgatgatgtgatttccttggtctgtcataggtagcaaatcaaacgtaccttggactttactctctgagaaactcatagctgaattcaatgtttattcttatggac

SEQ ID NO: 15697 - DNA, 122 bp, Homo sapiens
  misc_feature (61)..(62): /note="This region represents a CpG dinucleotide"
  misc_feature (61)..(61): /note="Nucleotide may be methylated to form 5-methylcytosine"
aaatataaatgcccagttttatagatagaggtgtgtgaggttgtcctgagatgaagtttgcgatctgcattttggcaggttcatgcctgcctgggtcccgtgctattcccacctctgatctt

SEQ ID NO: 15698 - DNA, 122 bp, Homo sapiens
  misc_feature (61)..(62): /note="This region represents a CpG dinucleotide"
  misc_feature (61)..(61): /note="Nucleotide may be methylated to form 5-methylcytosine"
cctggcggcttttgttggccgcgtgctaatagccagggcttaaaagttttccatcttgagcggcaatcagctttcttcctctccatctctggccaaagccccctcgtccctgggacgcgctg

SEQ ID NO: 15699 - DNA, 122 bp, Homo sapiens
  misc_feature (61)..(62): /note="This region represents a CpG dinucleotide"
  misc_feature (61)..(61): /note="Nucleotide may be methylated to form 5-methylcytosine"
ctttgcccattttctcatctataaaatgggagtggatagtattgatagtatttatctcaccgaattgttgacaaagattgggataatttatatagaatactggtacacattagggactcagt

SEQ ID NO: 15700 - DNA, 122 bp, Homo sapiens
  misc_feature (61)..(62): /note="This region represents a CpG dinucleotide"
  misc_feature (61)..(61): /note="Nucleotide may be methylated to form 5-methylcytosine"
taaacagagaagggattcctggctgtgcctggtgtgtccaaaaaggcttcctggtcaaagcgatccctaatctgggctgggaaggggagaactgagcaagggccttccaaggttggtcacag

SEQ ID NO: 15701 - DNA, 122 bp, Homo sapiens
  misc_feature (61)..(62): /note="This region represents a CpG dinucleotide"
  misc_feature (61)..(61): /note="Nucleotide may be methylated to form 5-methylcytosine"
caggccagagtgcaatggcgcaatatcggctcactgcaacctccacctcccgggttcaagcgattctcctgcctaagccccccagcagcagggaacacaggtacgtgccaccatgcccggcc

SEQ ID NO: 15702 - DNA, 122 bp, Homo sapiens
  misc_feature (61)..(62): /note="This region represents a CpG dinucleotide"
  misc_feature (61)..(61): /note="Nucleotide may be methylated to form 5-methylcytosine"
gctctggaacttctctacactgtctacaagttaaaaataagctgatgttccaggagagtacggttggatcctgagagtaagacctggtagaataaacagtatcgtcagtgttctcagattcc

SEQ ID NO: 15703 - DNA, 122 bp, Homo sapiens
  misc_feature (61)..(62): /note="This region represents a CpG dinucleotide"
  misc_feature (61)..(61): /note="Nucleotide may be methylated to form 5-methylcytosine"
ttaactgccacattacctgactcatctattaaagaatctacagaaagataaacatgacagcgctgcgttttaaagtacgcttatacctactaggttaagtaaattacacactggaagtacaa

SEQ ID NO: 15704 - DNA, 122 bp, Homo sapiens
  misc_feature (61)..(62): /note="This region represents a CpG dinucleotide"
  misc_feature (61)..(61): /note="Nucleotide may be methylated to form 5-methylcytosine"
caacacaaggagaccttgtctctatattgcctaggctggtcttgaactcttggccttaaacgatccttttgtttaaaaaataagaacattagctgggcattgtggtgtgtgcttatagtcct

SEQ ID NO: 15705 - DNA, 122 bp, Homo sapiens
  misc_feature (61)..(62): /note="This region represents a CpG dinucleotide"
  misc_feature (61)..(61): /note="Nucleotide may be methylated to form 5-methylcytosine"
cggggttgttcctgcctgttcggggttgttcctctctgttctgtgttgttactctctcttcggggttgttcctctctctttggggttgttactctctgttcggggttgttactgcctgtttg

SEQ ID NO: 15706 - DNA, 122 bp, Homo sapiens
  misc_feature (61)..(62): /note="This region represents a CpG dinucleotide"
  misc_feature (61)..(61): /note="Nucleotide may be methylated to form 5-methylcytosine"
catcccaccatattcattaagacttagccaatgacctcaggggtgccaaccaacttgaaacgtcactggaagctcagaactctcatttgggttcttagggtcaactcataaaacacaaaacc

SEQ ID NO: 15707 - DNA, 122 bp, Homo sapiens
  misc_feature (61)..(62): /note="This region represents a CpG dinucleotide"
  misc_feature (61)..(61): /note="Nucleotide may be methylated to form 5-methylcytosine"
aaacaaagttttaatcacctttgcccatccacacaagtcttaagtaagagtttacccaagcgtgagtcctacaggttattgtgactgtttactctttgaaagagtaaaataaatcaacactc

SEQ ID NO: 15708 - DNA, 122 bp, Homo sapiens
  misc_feature (61)..(62): /note="This region represents a CpG dinucleotide"
  misc_feature (61)..(61): /note="Nucleotide may be methylated to form 5-methylcytosine"
aaacacagaggcacagccaagatgtttgttttagaagtgggagacattgatcttatgacacgtttctattacaatgactctatttctgttacactcagggcaggctctatgtaaaattatgc

SEQ ID NO: 15709 - DNA, 122 bp, Homo sapiens
  misc_feature (61)..(62): /note="This region represents a CpG dinucleotide"
  misc_feature (61)..(61): /note="Nucleotide may be methylated to form 5-methylcytosine"
ctaattcgtttttaaaacttacgagacaactggcttatagcaattttccagttaacaacacgaacacaacccacaagccaagaacaacagaagaggagagacagaaagaacataaaacatta

SEQ ID NO: 15710 - DNA, 122 bp, Homo sapiens
  misc_feature (61)..(62): /note="This region represents a CpG dinucleotide"
  misc_feature (61)..(61): /note="Nucleotide may be methylated to form 5-methylcytosine"
tctctttccctctctatgctgttatttttggatttcaaataactcggttgttgaaacctccgatatccctaggggtgaactgaatgaagtgttgcacggcattaaatgtcattgaatgggat

SEQ ID NO: 15711 - DNA, 122 bp, Homo sapiens
  misc_feature (61)..(62): /note="This region represents a CpG dinucleotide"
  misc_feature (61)..(61): /note="Nucleotide may be methylated to form 5-methylcytosine"
agtcaggctctgtcgcccaggctagagtgcagtggcatgatctcagctcactgcaacctccgccacaagagtttgagcaattgtcctgcctcaacctcccaagtagctgggattacaggcat

SEQ ID NO: 15712 - DNA, 122 bp, Homo sapiens
  misc_feature (61)..(62): /note="This region represents a CpG dinucleotide"
  misc_feature (61)..(61): /note="Nucleotide may be methylated to form 5-methylcytosine"
ttacatgatcaatttaactttggcaaaactgacaaatggaaggagactgtgtgatctgcacgaggtcaatgagtcagttgttttcctattagacatggtcacactctgaatctttcattcta

SEQ ID NO: 15713 - DNA, 122 bp, Homo sapiens
  misc_feature (61)..(62): /note="This region represents a CpG dinucleotide"
  misc_feature (61)..(61): /note="Nucleotide may be methylated to form 5-methylcytosine"
agtgatcttttttccttaatcttgtgtcaatagatacagagagttttcagagacctcacacgctggaggattaaatcatagaaggtgtttgtttggagagtgtttacttgaaggtggccagc

SEQ ID NO: 15714 - DNA, 122 bp, Homo sapiens
  misc_feature (61)..(62): /note="This region represents a CpG dinucleotide"
  misc_feature (61)..(61): /note="Nucleotide may be methylated to form 5-methylcytosine"
ggggttacagcagaggggtggcacatctccttggggtaataaagtgttctaaagtggttacggtggtggcagatgcacaactctgagaacagactctaaaccactgagttgtttaccttagg

SEQ ID NO: 15715 - DNA, 122 bp, Homo sapiens
  misc_feature (61)..(62): /note="This region represents a CpG dinucleotide"
  misc_feature (61)..(61): /note="Nucleotide may be methylated to form 5-methylcytosine"
gacagttcagcaagatgagctatgagccgggcagtgagacaagggcatgagctcatcttccggccacccacagcctgacccagcctgctgcaggccagagtggtgcaagctcaggctggctt

SEQ ID NO: 15716 - DNA, 122 bp, Homo sapiens
  misc_feature (61)..(62): /note="This region represents a CpG dinucleotide"
  misc_feature (61)..(61): /note="Nucleotide may be methylated to form 5-methylcytosine"
gtttataaatcctctgaattgaaaagtgtagtgccatattcttaatcagcagcttttccacgtgacaaatcaactgactctatttctcaaacttccctcacacttctaagctccaccccaag

SEQ ID NO: 15717 - DNA, 122 bp, Homo sapiens
  misc_feature (61)..(62): /note="This region represents a CpG dinucleotide"
  misc_feature (61)..(61): /note="Nucleotide may be methylated to form 5-methylcytosine"
gtagtggcagctgagctgctggcctgagctggggactccacttattgaggagttgggtgtcgagggctcacagggaagagagactggattcctctaagtatggtgactgtggcatgctgtaa

SEQ ID NO: 15718 - DNA, 122 bp, Homo sapiens
  misc_feature (61)..(62): /note="This region represents a CpG dinucleotide"
  misc_feature (61)..(61): /note="Nucleotide may be methylated to form 5-methylcytosine"
aatgatttggtacacttgggtaaatatatgtatagcctagtgaaaggtttcagtttggaacgtgacgtattatgtcaagtgacataagatttgctgtgttgactttataacctgtgtttatg

SEQ ID NO: 15719 - DNA, 122 bp, Homo sapiens
  misc_feature (61)..(62): /note="This region represents a CpG dinucleotide"
  misc_feature (61)..(61): /note="Nucleotide may be methylated to form 5-methylcytosine"
ctcatcatgagaaaatgctgcacccaaactgagggatgctcaccacagtcctggccagtgcgtctcaagtgtccaggtcttgaaagacagggaggctcagaatttcctgcaggcaggtggcc

SEQ ID NO: 15720 - DNA, 122 bp, Homo sapiens
  misc_feature (61)..(62): /note="This region represents a CpG dinucleotide"
  misc_feature (61)..(61): /note="Nucleotide may be methylated to form 5-methylcytosine"
atttcaagtatgaaagatctaggctgttctcatattagatggaaacttaaaacacctgaacgttagctagtaagaacagtttcctgtaatttagtatttactggaagcattgtgtgccatgc

SEQ ID NO: 15721 - DNA, 122 bp, Homo sapiens
  misc_feature (61)..(62): /note="This region represents a CpG dinucleotide"
  misc_feature (61)..(61): /note="Nucleotide may be methylated to form 5-methylcytosine"
cattcagagtaaagtgcaggctccatgccttgctccctgactctcccttccaggacctggcgcctgcctatctcacaggcctcacccactgccacgcccccacaagcaacctttgccccagc

SEQ ID NO: 15722 - DNA, 122 bp, Homo sapiens
  misc_feature (61)..(62): /note="This region represents a CpG dinucleotide"
  misc_feature (61)..(61): /note="Nucleotide may be methylated to form 5-methylcytosine"
ttatttctgtcatattgtggtgctctgctcttggaagggggcagggacctcaaggattcacgcccatcctggaaagataagctctagttcctggcttaacactgtagtttctgaattaggtg

SEQ ID NO: 15723 - DNA, 122 bp, Homo sapiens
  misc_feature (61)..(62): /note="This region represents a CpG dinucleotide"
  misc_feature (61)..(61): /note="Nucleotide may be methylated to form 5-methylcytosine"
atctacagataagctgatttgctttatggagttttgattccctttcctactgaacaccagcgatcagaatcaggaaaaaattcataaattgcatgcaaagctatttgtacttctttaaaaaa

SEQ ID NO: 15724 - DNA, 122 bp, Homo sapiens
  misc_feature (61)..(62): /note="This region represents a CpG dinucleotide"
  misc_feature (61)..(61): /note="Nucleotide may be methylated to form 5-methylcytosine"
cacaggatttgacacatgggacccctgggagaaggaggaaacacccacggcttacaaacccgcagcaaacccagagtcctcagcctaggaaaggggctggggacagggcctgacaccctgaa

SEQ ID NO: 15725 - DNA, 122 bp, Homo sapiens
  misc_feature (61)..(62): /note="This region represents a CpG dinucleotide"
  misc_feature (61)..(61): /note="Nucleotide may be methylated to form 5-methylcytosine"
tcagcaatgtaaataattaacacaactaagatttgttgtcagaattttcagtctagtgatcgctttgctttggcagcatacatactaaaactggaaagatacagagaaaattagcttggctc

SEQ ID NO: 15726 - DNA, 122 bp, Homo sapiens
  misc_feature (61)..(62): /note="This region represents a CpG dinucleotide"
  misc_feature (61)..(61): /note="Nucleotide may be methylated to form 5-methylcytosine"
actgctttccatgagcctccttgatttgttaaatattgaaggcacttacctaaatactgccgtgttgccagtagcgtgccggttaccagtttggccgttcttgtacacaatatgtgagtaat

SEQ ID NO: 15727 - DNA, 122 bp, Homo sapiens
  misc_feature (61)..(62): /note="This region represents a CpG dinucleotide"
  misc_feature (61)..(61): /note="Nucleotide may be methylated to form 5-methylcytosine"
tcacctagctgctcttacactgcatacctatgtgtgagtgctcatttcatccagggtctgcgggacagacccagcagaggatatttcctgtcatagctgaagtgtgaataggccttatgttc

SEQ ID NO: 15728 - DNA, 122 bp, Homo sapiens
  misc_feature (61)..(62): /note="This region represents a CpG dinucleotide"
  misc_feature (61)..(61): /note="Nucleotide may be methylated to form 5-methylcytosine"
ctaaaagaagaagatggcctcttggatcactttggtaattaattaccactaacaaaggaacgaaataaaggtgagacaaacagcagattacagacactaagggccgttgctcctagtctcag

SEQ ID NO: 15729 - DNA, 122 bp, Homo sapiens
  misc_feature (61)..(62): /note="This region represents a CpG dinucleotide"
  misc_feature (61)..(61): /note="Nucleotide may be methylated to form 5-methylcytosine"
accttgtgatccgcccaccttggcctcccaaagtgctgggattacaggcgtgagccaccacgcccggccaattcatatgggttttagtgtgttcacaatgttattgtgaccatcaccactat

SEQ ID NO: 15730 - DNA, 122 bp, Homo sapiens
  misc_feature (61)..(62): /note="This region represents a CpG dinucleotide"
  misc_feature (61)..(61): /note="Nucleotide may be methylated to form 5-methylcytosine"
agacatggcagttgttttctgctggtgtctctgtgatggccatctgccaacaaaggtaaccgcagagtcagtacagtgtgaaagtgtttcaataatcagatcttttacggctttttaaaaaa

SEQ ID NO: 15731 - DNA, 122 bp, Homo sapiens
  misc_feature (61)..(62): /note="This region represents a CpG dinucleotide"
  misc_feature (61)..(61): /note="Nucleotide may be methylated to form 5-methylcytosine"
agtttagagggtttacatgtaatccaaccttagccatcttactttttttccttcaggaaacgtttctaacttggttttttatctagccctcagttgaaatcctaagatctccattttcaggg

SEQ ID NO: 15732 - DNA, 122 bp, Homo sapiens
  misc_feature (61)..(62): /note="This region represents a CpG dinucleotide"
  misc_feature (61)..(61): /note="Nucleotide may be methylated to form 5-methylcytosine"
ttttaattttatttatttatttatctgagatggagtctccctctgtcgctcagaccagaccgcagtggcacaatctcggctcacttgcccaggctggagagaagtggcgtgcctggccataa

SEQ ID NO: 15733 - DNA, 122 bp, Homo sapiens
  misc_feature (61)..(62): /note="This region represents a CpG dinucleotide"
  misc_feature (61)..(61): /note="Nucleotide may be methylated to form 5-methylcytosine"
gacagggaccctggggctacaaggaggggcagggtgggaatgtgaaggagccctgaagaacggggtgtcagtaccactatgtagggcttatcagtgccagacactaagccaagcactttaca

SEQ ID NO: 15734 - DNA, 122 bp, Homo sapiens
  misc_feature (61)..(62): /note="This region represents a CpG dinucleotide"
  misc_feature (61)..(61): /note="Nucleotide may be methylated to form 5-methylcytosine"
tacgtttgtggttttaagaaagcctgagggcctgaaggcagcccctggagaagccctttccgagggcattcggaaccttctggtcctagaggtgaagctgaactgtcaccaggacttatgac

SEQ ID NO: 15735 - DNA, 122 bp, Homo sapiens
  misc_feature (61)..(62): /note="This region represents a CpG dinucleotide"
  misc_feature (61)..(61): /note="Nucleotide may be methylated to form 5-methylcytosine"
cacgcggagagaaaggcggttccttcacagagcagcctcccctcgtgaagctcccccacccgaactcacttagaacagtccagccccgcccagaaccttcgctcacagcctggcctgcttaa

SEQ ID NO: 15736 - DNA, 122 bp, Homo sapiens
  misc_feature (61)..(62): /note="This region represents a CpG dinucleotide"
  misc_feature (61)..(61): /note="Nucleotide may be methylated to form 5-methylcytosine"
cttcttccccaaggccggtgggctctagggagtcccacttctctgccagccaagtgagaacgcaggcttgaaggggaaggaggaagagagacttgttggcggggctcccgctgggtcgagag

SEQ ID NO: 15737 - DNA, 122 bp, Homo sapiens
  misc_feature (61)..(62): /note="This region represents a CpG dinucleotide"
  misc_feature (61)..(61): /note="Nucleotide may be methylated to form 5-methylcytosine"
aacaatatacagtggtccctccttaaccatagcttccttttctaccgttgcagttacccacggtcaaatgtggtttgaaaatgtattcccacagtcaaatgtggtctgaaaatgtatcctga

SEQ ID NO: 15738 - DNA, 122 bp, Homo sapiens
  misc_feature (61)..(62): /note="This region represents a CpG dinucleotide"
  misc_feature (61)..(61): /note="Nucleotide may be methylated to form 5-methylcytosine"
tagtttagattcccatttgacatctaaactgccagactttagactggtcatgaagtctctcgtgttgatttaatgaccagtttcctgtgatacttctaatattcctgccaaaggcttgagag

SEQ ID NO: 15739 - DNA, 122 bp, Homo sapiens
  misc_feature (61)..(62): /note="This region represents a CpG dinucleotide"
  misc_feature (61)..(61): /note="Nucleotide may be methylated to form 5-methylcytosine"
gtggcccggaatacagccagaggagtaaggcgactgggtgggaactgtgtgggaacccctcgcagcccagctctctgctaggcctgtgtatcacaatctgagctcgccttgtattcctacgt

SEQ ID NO: 15740 - DNA, 122 bp, Homo sapiens
  misc_feature (61)..(62): /note="This region represents a CpG dinucleotide"
  misc_feature (61)..(61): /note="Nucleotide may be methylated to form 5-methylcytosine"
aaaacttgcaaaggtggaattagagcactaacttgaactttctcagtgacaaataagctgcgatccatcagcttactcagacacgtttttgtaacattttgtagacactgaggaatactttt

SEQ ID NO: 15741 - DNA, 122 bp, Homo sapiens
  misc_feature (61)..(62): /note="This region represents a CpG dinucleotide"
  misc_feature (61)..(61): /note="Nucleotide may be methylated to form 5-methylcytosine"
tgttcatagaaccatgccaagcagggcggcgggcagcaggtgaagctctgcagtgtctgacgtagctgtagtgtccacacagaggcatctacttcctgccagcatggagggttttgtggatc

SEQ ID NO: 15742 - DNA, 122 bp, Homo sapiens
  misc_feature (61)..(62): /note="This region represents a CpG dinucleotide"
  misc_feature (61)..(61): /note="Nucleotide may be methylated to form 5-methylcytosine"
aggaccaggaaacctggctgagtagtgtggtctatggaggtgcatgggcttcagagacaacgttgatcctgagtccaagccagctgcttagtagatgtgggagagttttatacttacctgca

SEQ ID NO: 15743 - DNA, 122 bp, Homo sapiens
  misc_feature (61)..(62): /note="This region represents a CpG dinucleotide"
  misc_feature (61)..(61): /note="Nucleotide may be methylated to form 5-methylcytosine"
tgccagaccagacagctgtcaaggactactctgaagctggattgaatttccagcactcagcgtggcctcattcatcccatggattctttttcatctccagagtttgtgtatgttcgtacagg

SEQ ID NO: 15744 - DNA, 122 bp, Homo sapiens
  misc_feature (61)..(62): /note="This region represents a CpG dinucleotide"
  misc_feature (61)..(61): /note="Nucleotide may be methylated to form 5-methylcytosine"
caactttaaaagtagtcaagtgtgtttacttaaaaggaaaagctgatcacacctcacatccggttatgaccatcaaagagtcacaggaagttgctgacttattcccagcagaggagagattt

SEQ ID NO: 15745 - DNA, 122 bp, Homo sapiens
  misc_feature (61)..(62): /note="This region represents a CpG dinucleotide"
  misc_feature (61)..(61): /note="Nucleotide may be methylated to form 5-methylcytosine"
cgtgacaggatgagtgacagcatcggatacacagaggtggagggatcctgggagtggtgacgacctgacaatatctgagcttatatgcaccagattgagggagagctggggggagtgcagtg

SEQ ID NO: 15746 - DNA, 122 bp, Homo sapiens
  misc_feature (61)..(62): /note="This region represents a CpG dinucleotide"
  misc_feature (61)..(61): /note="Nucleotide may be methylated to form 5-methylcytosine"
cgggcgggcaggcaggctggggtgctgagcgtgagggcgcgggctcccggctgtgtggctcgtggcgcctggctccgtgcaatccctgccggcactgccggctgcccgccttcctccaggac

SEQ ID NO: 15747 - DNA, 122 bp, Homo sapiens
  misc_feature (61)..(62): /note="This region represents a CpG dinucleotide"
  misc_feature (61)..(61): /note="Nucleotide may be methylated to form 5-methylcytosine"
ggtttgtagagatatttcatacaaaacttatgaggaaacccctgtcactttcgttctccccgtcagcatgagaacgactctccactgaggaatatttccccaacatgtttttctgttgcaca

SEQ ID NO: 15748 - DNA, 122 bp, Homo sapiens
  misc_feature (61)..(62): /note="This region represents a CpG dinucleotide"
  misc_feature (61)..(61): /note="Nucleotide may be methylated to form 5-methylcytosine"
atttcttaaccccttcatgttcagcgttaaaattagccatagtaaaaaacaacgaacccgcggcaaaactctgcaatccagacgacgagaaaggcttgatccttgtgtccggttaaaaatgc

SEQ ID NO: 15749 - DNA, 122 bp, Homo sapiens
  misc_feature (61)..(62): /note="This region represents a CpG dinucleotide"
  misc_feature (61)..(61): /note="Nucleotide may be methylated to form 5-methylcytosine"
agaaagccctcagaattcaggcatatattacaaaattgcccattcatgtggataggactacgagtcatgtaacagctaacctctgtggcttctgtgactcatcacagggacagggttatttc

SEQ ID NO: 15750 - DNA, 122 bp, Homo sapiens
  misc_feature (61)..(62): /note="This region represents a CpG dinucleotide"
  misc_feature (61)..(61): /note="Nucleotide may be methylated to form 5-methylcytosine"
cttcccttctgaaaccacagagggctagcacttcaacccaaattagagcccaaagattcacgcagtcaccaagtttctgacctggtagagtcttagagatcctaagtcctgattcccatcta

SEQ ID NO: 15751 - DNA, 122 bp, Homo sapiens
  misc_feature (61)..(62): /note="This region represents a CpG dinucleotide"
  misc_feature (61)..(61): /note="Nucleotide may be methylated to form 5-methylcytosine"
aacagcacttggcacagcgtcaaggtgcaataagcatgagccactctgagtcactgtcatcgtttaagcttaaagccccagggggttcttttaagagaaagagaaccagttcccaacactga

SEQ ID NO: 15752 - DNA, 122 bp, Homo sapiens
  misc_feature (61)..(62): /note="This region represents a CpG dinucleotide"
  misc_feature (61)..(61): /note="Nucleotide may be methylated to form 5-methylcytosine"
aaaaatacttcatacccttcattgtttgggtttcatgtcttcattacattccttttacttcgtattatcttttaagattttgtagaagaatttcacttgggtaactgtaggcttaaatgatg

SEQ ID NO: 15753 - DNA, 122 bp, Homo sapiens
  misc_feature (61)..(62): /note="This region represents a CpG dinucleotide"
  misc_feature (61)..(61): /note="Nucleotide may be methylated to form 5-methylcytosine"
cagggatggtgggcgctaggtgtgcgctgaggggatgtggtggcaggcgctgggggcaggcggcgcccaggtcctggttatgaggtcggcgcggggtttgcagcgagcctcgggtctggtgg

SEQ ID NO: 15754 - DNA, 122 bp, Homo sapiens
  misc_feature (61)..(62): /note="This region represents a CpG dinucleotide"
  misc_feature (61)..(61): /note="Nucleotide may be methylated to form 5-methylcytosine"
aggttccggagctgttggacaagtctcttattccccatgctacacaacctgaaagcaaggcgttctccttgaaaatgaaaggagattgtttcgggtatctttctggggtggcgtctggagac

SEQ ID NO: 15755 - DNA, 122 bp, Homo sapiens
  misc_feature (61)..(62): /note="This region represents a CpG dinucleotide"
  misc_feature (61)..(61): /note="Nucleotide may be methylated to form 5-methylcytosine"
ataacagcagctaccatttaccgagaatatattatatgccaggctctggtctaagcattacgttctttattcttcaaagcaacctcatgaggtgggagctatcacaaccctgttttaaaact

SEQ ID NO: 15756 - DNA, 122 bp, Homo sapiens
  misc_feature (61)..(62): /note="This region represents a CpG dinucleotide"
  misc_feature (61)..(61): /note="Nucleotide may be methylated to form 5-methylcytosine"
aatgttggatgtatgctaggcactgtgtgagcacttggcatccattctctctttggttcccgcaagttaggaattggccccttttctcagaggagaatgaggccctgtgaggttaagctgat

SEQ ID NO: 15757 - DNA, 122 bp, Homo sapiens
  misc_feature (61)..(62): /note="This region represents a CpG dinucleotide"
  misc_feature (61)..(61): /note="Nucleotide may be methylated to form 5-methylcytosine"
tgacagcagagttgagtagttgtgacagagtctgtgtggcctacaaagccaaaatatttacgatctggccctttccaggaagttttccagcccctggtttaaaagagtacaaattacctctg

SEQ ID NO: 15758 - DNA, 122 bp, Homo sapiens
  misc_feature (61)..(62): /note="This region represents a CpG dinucleotide"
  misc_feature (61)..(61): /note="Nucleotide may be methylated to form 5-methylcytosine"
ggggacttcaatcatcaccttctaagtgttgtcctcgtgtagactttttcctcattggatcgggtttgttctgtgtaaccaacagtgtgtaacaaaagtgatggtgtgctcaagagattaga

SEQ ID NO: 15759 - DNA, 122 bp, Homo sapiens
  misc_feature (61)..(62): /note="This region represents a CpG dinucleotide"
  misc_feature (61)..(61): /note="Nucleotide may be methylated to form 5-methylcytosine"
accttctgttgtcaatttcatggagaagtgcacgggcagtgggggccaccacaacccgcacgctcagcctggacacacagcctgggatcatttatcaaaccagcagaggggaaaatccccca

SEQ ID NO: 15760 - DNA, 122 bp, Homo sapiens
  misc_feature (61)..(62): /note="This region represents a CpG dinucleotide"
  misc_feature (61)..(61): /note="Nucleotide may be methylated to form 5-methylcytosine"
ctctggcagaagaattgctcagggaccctcgtctccatagaaaccatgtcaggaaagagacggaggagggagaggataaacagcaaataataaacacaggctcccgcctcctgtgcacaagc

SEQ ID NO: 15761 - DNA, 122 bp, Homo sapiens
  misc_feature (61)..(62): /note="This region represents a CpG dinucleotide"
  misc_feature (61)..(61): /note="Nucleotide may be methylated to form 5-methylcytosine"
tatgaaccaggtgccttcatcatttatctcacctgagccacttaacaggttgtgcagagacggaaacaggttgagagatgtacagtcacctgcttgccagtacacagcaatcaaaagtggcc

SEQ ID NO: 15762 - DNA, 122 bp, Homo sapiens
  misc_feature (61)..(62): /note="This region represents a CpG dinucleotide"
  misc_feature (61)..(61): /note="Nucleotide may be methylated to form 5-methylcytosine"
ataaaaggaggtggttggcaagatgacttgagaccctttctactcagaaactgttactctcgtgttatctgccccagtggtctaggggtaggtattatggttttttagactgactggataaa

SEQ ID NO: 15763 - DNA, 122 bp, Homo sapiens
  misc_feature (61)..(62): /note="This region represents a CpG dinucleotide"
  misc_feature (61)..(61): /note="Nucleotide may be methylated to form 5-methylcytosine"
aagattgtgggggcggatggcaagataggacagtgcagggagaatattccaggatggtatcgtgggagccccaaggcaggcagacattgaaagctggccaccaaggctagaatacaatgaat

SEQ ID NO: 15764 - DNA, 122 bp, Homo sapiens
  misc_feature (61)..(62): /note="This region represents a CpG dinucleotide"
  misc_feature (61)..(61): /note="Nucleotide may be methylated to form 5-methylcytosine"
ctgtctctacccttggagaataccaacacctaacttatccctcagatgagtccccgaatccggcttgcctctggctcagagcagagcaggctgtgtgctgatgacacaccatgccatcagtc

SEQ ID NO: 15765 - DNA, 122 bp, Homo sapiens
  misc_feature (61)..(62): /note="This region represents a CpG dinucleotide"
  misc_feature (61)..(61): /note="Nucleotide may be methylated to form 5-methylcytosine"
gtgcctgtgaatgaagcgggattggcagcctttgaaacaaactctgtctttgttcctgaccgtacctcccagaccagggcagtgccagctttcttcactccatcctgcccacattctttggc

SEQ ID NO: 15766 - DNA, 122 bp, Homo sapiens
  misc_feature (61)..(62): /note="This region represents a CpG dinucleotide"
  misc_feature (61)..(61): /note="Nucleotide may be methylated to form 5-methylcytosine"
ctcagttttgtttttaaacccataggggagacagtttccggacgcccaacaatcacagggcggcccaggaccgagagagagcaatagactcgcctcttgcttccgcatccccagttctggtc

SEQ ID NO: 15767 - DNA, 122 bp, Homo sapiens
  misc_feature (61)..(62): /note="This region represents a CpG dinucleotide"
  misc_feature (61)..(61): /note="Nucleotide may be methylated to form 5-methylcytosine"
gcactaatgcttccagagtgcaaatcccacttggtcatgtaataggaacaccagtgctgacgcagcaggcagacaggagcccaggctgcaccggggcaggaggtaggcgcagacattcagcc

SEQ ID NO: 15768 - DNA, 122 bp, Homo sapiens
  misc_feature (61)..(62): /note="This region represents a CpG dinucleotide"
  misc_feature (61)..(61): /note="Nucleotide may be methylated to form 5-methylcytosine"
gccccgaggcgctggcgagccagggtgtggtcaagggccctggctgccaccacggtctcccgcagagcccctaccaggcgcgcgcgtccctgacccagtcgctcagcatcaaagtgcaggtc

SEQ ID NO: 15769 - DNA, 122 bp, Homo sapiens
  misc_feature (61)..(62): /note="This region represents a CpG dinucleotide"
  misc_feature (61)..(61): /note="Nucleotide may be methylated to form 5-methylcytosine"
tgtatgttatttcttccaatgtaatttttatgaatgatagaaaaatgtgtgagtggtatacgtggatagccttgcacagagaaatcttagcctaatttaatcagaaaattaaggcaatgatt

SEQ ID NO: 15770 - DNA, 122 bp, Homo sapiens
  misc_feature (61)..(62): /note="This region represents a CpG dinucleotide"
  misc_feature (61)..(61): /note="Nucleotide may be methylated to form 5-methylcytosine"
ctgagggtggggggtccagagagtgggcctggggcctgggccccggcccaggcaccctgacggcctcaggcggccggtgagtgggcatcgcccacccccacccccacccggcatctggctgc

SEQ ID NO: 15771 - DNA, 122 bp, Homo sapiens
  misc_feature (61)..(62): /note="This region represents a CpG dinucleotide"
  misc_feature (61)..(61): /note="Nucleotide may be methylated to form 5-methylcytosine"
taaatttcacactgaaagaaaaagaaaataaacttctagaaaattagataagtttataaacgatatagtgaaaatgggtatttgcaaggttttagagttgcattacattgacccattaaact

SEQ ID NO: 15772 - DNA, 122 bp, Homo sapiens
  misc_feature (61)..(62): /note="This region represents a CpG dinucleotide"
  misc_feature (61)..(61): /note="Nucleotide may be methylated to form 5-methylcytosine"
agtgaggttaactgtacttctataggtcactcagtgagtcaacgactgagctatgattaacgttgacagctggtgagctgctaggctgttgctaactgagcaacattgacattcattttgat

SEQ ID NO: 15773 - DNA, 122 bp, Homo sapiens
  misc_feature (61)..(62): /note="This region represents a CpG dinucleotide"
  misc_feature (61)..(61): /note="Nucleotide may be methylated to form 5-methylcytosine"
atggtcttgacaatttaatcaacctctctaacaatctgtctcatgatctttgaaagaaaacgtttgggggagaggtcacttccactcctaaaatttaaatattaaattcagtttccttagag

SEQ ID NO: 15774 - DNA, 122 bp, Homo sapiens
  misc_feature (61)..(62): /note="This region represents a CpG dinucleotide"
  misc_feature (61)..(61): /note="Nucleotide may be methylated to form 5-methylcytosine"
tctccctttctgtctttcacattaggcttagagcctatcagaaatccaggataatctcatcgtgatatatttaatttgattatacttacaaatcacatcaaatgtaattacaaaataattta

SEQ ID NO: 15775 - DNA, 122 bp, Homo sapiens
  misc_feature (61)..(62): /note="This region represents a CpG dinucleotide"
  misc_feature (61)..(61): /note="Nucleotide may be methylated to form 5-methylcytosine"
ctccagcctgcggtttcatgggaaacctgatcttgccgtgttctcagggacctgggcttccgtctggcctcacctttctctttatggaaaaaatccccgggttgattgtttcccatggccag

SEQ ID NO: 15776 - DNA, 122 bp, Homo sapiens
  misc_feature (61)..(62): /note="This region represents a CpG dinucleotide"
  misc_feature (61)..(61): /note="Nucleotide may be methylated to form 5-methylcytosine"
tctttcttaagcctccttgttcctcagagcaggcagtgcaggctatgggattccccaggacggagaggcctctgccccggctgcttgatgcaaggctcagagaggccactaggtttctacca

SEQ ID NO: 15777 - DNA, 122 bp, Homo sapiens
  misc_feature (61)..(62): /note="This region represents a CpG dinucleotide"
  misc_feature (61)..(61): /note="Nucleotide may be methylated to form 5-methylcytosine"
tggtatgagagacttgtcttctttagtggttcctcaagcgctcacagggatttcttgggtcgtagaaaggtgatggggacaggaagaggcttggggtttctgtttgtggttttttctttgtg

SEQ ID NO: 15778 - DNA, 122 bp, Homo sapiens
  misc_feature (61)..(62): /note="This region represents a CpG dinucleotide"
  misc_feature (61)..(61): /note="Nucleotide may be methylated to form 5-methylcytosine"
acaggtgacatacaggaagccccaggaagcatgaggttctggtcatagtaaacacccaaccgtactctgtggttatgacttcatctcctttgacttaccttgctctacacctactgacacgg

SEQ ID NO: 15779 - DNA, 122 bp, Homo sapiens
  misc_feature (61)..(62): /note="This region represents a CpG dinucleotide"
  misc_feature (61)..(61): /note="Nucleotide may be methylated to form 5-methylcytosine"
ccccacatgctgtcccaggagcatagcaggcatcgtacactgtgcagtgtggggtacacacgtaggcacttcagacccaggaatcacggactcctgtctcctgccatatatgtgggaggtct

SEQ ID NO: 15780 - DNA, 122 bp, Homo sapiens
  misc_feature (61)..(62): /note="This region represents a CpG dinucleotide"
  misc_feature (61)..(61): /note="Nucleotide may be methylated to form 5-methylcytosine"
tggcagtgcaaccggcccagtgccaagcatggcccggagaagctgtctgagaagttccagcgcttcacacctttcaccctgggcaaggagttcaaagaaggacacagctactactacatctg

SEQ ID NO: 15781 - DNA, 122 bp, Homo sapiens
  misc_feature (61)..(62): /note="This region represents a CpG dinucleotide"
  misc_feature (61)..(61): /note="Nucleotide may be methylated to form 5-methylcytosine"
tttgacaattttaaattactgtttcctttcttaaaaactcctttccagaagctgatctcccgtacatttccagtacataatttttcatccttatctgtcctgacagtgattcagctttgaat

SEQ ID NO: 15782 - DNA, 122 bp, Homo sapiens
  misc_feature (61)..(62): /note="This region represents a CpG dinucleotide"
  misc_feature (61)..(61): /note="Nucleotide may be methylated to form 5-methylcytosine"
cagtaaattgcccaaggtcctacagcagagctgagattcagtgtcagctgggattccaatcgttgaaaccctatttggctttcaagtccactctctttctgctggccacactatagtatcaa

SEQ ID NO: 15783 - DNA, 122 bp, Homo sapiens
  misc_feature (61)..(62): /note="This region represents a CpG dinucleotide"
  misc_feature (61)..(61): /note="Nucleotide may be methylated to form 5-methylcytosine"
tccaaacccaaagaatggactcagagacccagagaacagcgaaagtgagacttgtgatgacggtcttgcaaaatcgggtgtctcttgagcaggcacacccagcacagtttcaacaagcagtt

SEQ ID NO: 15784 - DNA, 122 bp, Homo sapiens
  misc_feature (61)..(62): /note="This region represents a CpG dinucleotide"
  misc_feature (61)..(61): /note="Nucleotide may be methylated to form 5-methylcytosine"
gcctaagtcttaatgatctaccaagctgcacagaagcaaatcctcattctttgactccctcgggcccaactagacatgaagctgctgaagtcctagagatggacttttccagcttgctgata

SEQ ID NO: 15785 - DNA, 122 bp, Homo sapiens
  misc_feature (61)..(62): /note="This region represents a CpG dinucleotide"
  misc_feature (61)..(61): /note="Nucleotide may be methylated to form 5-methylcytosine"
tacagccctccggcttccaccacagctcagatggaaagggagagtgccctggattggccgcgggccgagcaggggccatgccttcatctgcctagggctctaattcaccccagcctgtaatt

SEQ ID NO: 15786 - DNA, 122 bp, Homo sapiens
  misc_feature (61)..(62): /note="This region represents a CpG dinucleotide"
  misc_feature (61)..(61): /note="Nucleotide may be methylated to form 5-methylcytosine"
cttgtctgtgcctgggacaaagagccgcaaggtggtgctattgtcttaggttaataaaaacgaggccaactatacagtcctccttgggtatccacagggattggttccacagtctaccgctg

SEQ ID NO: 15787 - DNA, 122 bp, Homo sapiens
  misc_feature (61)..(62): /note="This region represents a CpG dinucleotide"
  misc_feature (61)..(61): /note="Nucleotide may be methylated to form 5-methylcytosine"
atatataaatatagaaactcatactcactgtgtcagctcaagtgtagcttttctggagagcgcccaggctattttttcatctttttctttagggatgtcatttttatcctcataagccaaga

SEQ ID NO: 15788 - DNA, 122 bp, Homo sapiens
  misc_feature (61)..(62): /note="This region represents a CpG dinucleotide"
  misc_feature (61)..(61): /note="Nucleotide may be methylated to form 5-methylcytosine"
aagattacagccccatgagccatccttacctatacctcaattcctttaaggaagttaaatcgtatgtaggaaataatctctttaggatacagcccagtagttcctcctctaatacagacatt

SEQ ID NO: 15789 - DNA, 122 bp, Homo sapiens
  misc_feature (61)..(62): /note="This region represents a CpG dinucleotide"
  misc_feature (61)..(61): /note="Nucleotide may be methylated to form 5-methylcytosine"
cccagaaatggtctctgggcagtgagctggggcaataggagggctcacctcattcattcccgtctctcagggaccacagtgttttaccgcttggtgtagagccttgcaaacttgtttcgtag

SEQ ID NO: 15790 - DNA, 122 bp, Homo sapiens
  misc_feature (61)..(62): /note="This region represents a CpG dinucleotide"
  misc_feature (61)..(61): /note="Nucleotide may be methylated to form 5-methylcytosine"
gtgtggcatgtgtgctgacctagttaggagttgaggcttcatttctaattctgtccctttcgttttgagctgtgtgaccttgggcatgtcacctaacttctctgtatatgtcttcttatcca

SEQ ID NO: 15791 - DNA, 122 bp, Homo sapiens
  misc_feature (61)..(62): /note="This region represents a CpG dinucleotide"
  misc_feature (61)..(61): /note="Nucleotide may be methylated to form 5-methylcytosine"
attttatcgaagaacccagtacttgcaggcgaattatgttctttgctacctcctccccaccggctgctgtattacagtactaacctcacggaatgtagtacagaataaatgaaataaagtaa

SEQ ID NO: 15792 - DNA, 122 bp, Homo sapiens
  misc_feature (61)..(62): /note="This region represents a CpG dinucleotide"
  misc_feature (61)..(61): /note="Nucleotide may be methylated to form 5-methylcytosine"
cctgagaagttttccagtaggatagaatgtgaaagcccaaacaatgacctcagcagattccgaggcttcctgtgagtaatacatgatgaacatttgtgggtgtaagtggaattgtgtgttgc

SEQ ID NO: 15793 - DNA, 122 bp, Homo sapiens
  misc_feature (61)..(62): /note="This region represents a CpG dinucleotide"
  misc_feature (61)..(61): /note="Nucleotide may be methylated to form 5-methylcytosine"
tgtgagtcatacagatccagcaagcacttatcacttcttatcatcagcctatgtggactccgagcttggagaaaacaagcataagggtctaaagcctgaaatgattaataacatagttgaaa

SEQ ID NO: 15794 - DNA, 122 bp, Homo sapiens
  misc_feature (61)..(62): /note="This region represents a CpG dinucleotide"
  misc_feature (61)..(61): /note="Nucleotide may be methylated to form 5-methylcytosine"
ttccaagagtccaagcttggcgagtgcaccgcagagagaaacatgctccccatagaaagacgagggcatccatcattgaggatcctgtcccccgagcacccctggtctgcaacagaaacctg

SEQ ID NO: 15795 - DNA, 122 bp, Homo sapiens
  misc_feature (61)..(62): /note="This region represents a CpG dinucleotide"
  misc_feature (61)..(61): /note="Nucleotide may be methylated to form 5-methylcytosine"
acgattatgcttttactcagtagaccattacctaaccggcaaaatttgaaattggcttgacgctccttattatttttaattatgtcgtttttcctaatccctggtccgtcaattcccctcca

SEQ ID NO: 15796 - DNA, 122 bp, Homo sapiens
  misc_feature (61)..(62): /note="This region represents a CpG dinucleotide"
  misc_feature (61)..(61): /note="Nucleotide may be methylated to form 5-methylcytosine"
cgtgattcgctcgcctcagcctcccaaagtgctgggattacaggcatgagtcactgcacccggccgaagagatgtctttctaattcactcacagatgctatataggctagctggggctctgc

SEQ ID NO: 15797 - DNA, 122 bp, Homo sapiens
  misc_feature (61)..(62): /note="This region represents a CpG dinucleotide"
  misc_feature (61)..(61): /note="Nucleotide may be methylated to form 5-methylcytosine"
agggcttctgacattttgctccaaggtttgtttgtttttacttagaaaaaatgccatcaacgtcagtgactgtatgctcagttctgctgaagagctgcaaatgttatagatggatttgttat

SEQ ID NO: 15798 - DNA, 122 bp, Homo sapiens
  misc_feature (61)..(62): /note="This region represents a CpG dinucleotide"
  misc_feature (61)..(61): /note="Nucleotide may be methylated to form 5-methylcytosine"
aacctgttcaggttccagggccgtgcatgcatgacaaatttaccatccaatacggcctttcgtggatttggcttcccacaaggagccctagtaacagaatcttgcatcacagctgtggcagc

SEQ ID NO: 15799 - DNA, 122 bp, Homo sapiens
  misc_feature (61)..(62): /note="This region represents a CpG dinucleotide"
  misc_feature (61)..(61): /note="Nucleotide may be methylated to form 5-methylcytosine"
tcttcgcctcaggtctagtttaccggcaccccggcgtttcgccaatcgtcacctccttaacgctgggcacctcagaggcgtcataaaggcagatagccaacacctctgtgctgggtcctggc

SEQ ID NO: 15800 - DNA, 122 bp, Homo sapiens
  misc_feature (61)..(62): /note="This region represents a CpG dinucleotide"
  misc_feature (61)..(61): /note="Nucleotide may be methylated to form 5-methylcytosine"
ttcaatgtgctctttcagcaccattcaatctgctgagtcatgtggcccaagatcagcttgcgtagaagcttagagctgccacagaagcttctgttgctctggaatccattcaaatctatggg

SEQ ID NO: 15801 - DNA, 122 bp, Homo sapiens
  misc_feature (61)..(62): /note="This region represents a CpG dinucleotide"
  misc_feature (61)..(61): /note="Nucleotide may be methylated to form 5-methylcytosine"
gggaaataatcctagaacatgagtgagtcataagcaacatgagtcctacccttcagcacacgagaggaagcagaagtttgtctatcctatagtgtcccaaagttgaatgtaggagtaaaagc

SEQ ID NO: 15802 - DNA, 122 bp, Homo sapiens
  misc_feature (61)..(62): /note="This region represents a CpG dinucleotide"
  misc_feature (61)..(61): /note="Nucleotide may be methylated to form 5-methylcytosine"
acaatgaccaaggtgaatctcaatcattttaggaggtttatttggccaaagttaaggatgcgtgcccagaggtaggtctacgtctttctccaaagatgattttgagggcttcaatatttgaa

SEQ ID NO: 15803 - DNA, 122 bp, Homo sapiens
  misc_feature (61)..(62): /note="This region represents a CpG dinucleotide"
  misc_feature (61)..(61): /note="Nucleotide may be methylated to form 5-methylcytosine"
aggattaggaatttcagacatgtgttacttaagcttctcattcccagaaccaaaattcctcgcaataaaagaaagaaagaagtcagcatgatggctccatcgctgggctgacctcagatcgt

SEQ ID NO: 15804 - DNA, 122 bp, Homo sapiens
  misc_feature (61)..(62): /note="This region represents a CpG dinucleotide"
  misc_feature (61)..(61): /note="Nucleotide may be methylated to form 5-methylcytosine"
tgggtggaaagctttctttgcccggaaactggctttctgaaaccaagggcttttgtgtcacgttcatggagagatggcagtgcgggttgaggcagaagtgctcagtcagaactgatgagtcc

SEQ ID NO: 15805 - DNA, 122 bp, Homo sapiens
  misc_feature (61)..(62): /note="This region represents a CpG dinucleotide"
  misc_feature (61)..(61): /note="Nucleotide may be methylated to form 5-methylcytosine"
ccacttcctgttttgagaacaccaactcagataactggactctttatttgttttcctgggcgtgggtccatgtgataaactgtctctttccacaatgccaccttagatgtttggatcctatg

SEQ ID NO: 15806 - DNA, 122 bp, Homo sapiens
  misc_feature (61)..(62): /note="This region represents a CpG dinucleotide"
  misc_feature (61)..(61): /note="Nucleotide may be methylated to form 5-methylcytosine"
ggaccgccccatagggaccccacccatagggacgggctgcattgcgcatgtctgcaagggcgtggcaaggggaggaatgagcgggaaggggcggggctgagtggactggcgggacgagaaaa

SEQ ID NO: 15807 - DNA, 122 bp, Homo sapiens
  misc_feature (61)..(62): /note="This region represents a CpG dinucleotide"
  misc_feature (61)..(61): /note="Nucleotide may be methylated to form 5-methylcytosine"
tcccatgtccttctgtgagagcctgcacttcctgtttcataggaatcataggacttaccacgtgattatagctttcggtaatatgtcttctctacactctgagaaccataactaaaccatta

SEQ ID NO: 15808 - DNA, 122 bp, Homo sapiens
  misc_feature (61)..(62): /note="This region represents a CpG dinucleotide"
  misc_feature (61)..(61): /note="Nucleotide may be methylated to form 5-methylcytosine"
caacctcaggcaggtttgactgggggtgaggtcagaacagtgtcctgattccctacctagcgggggtttgaacaaacacaaacctcaaggagggaatacaaaccacagagtggggcacgagc

SEQ ID NO: 15809 - DNA, 122 bp, Homo sapiens
  misc_feature (61)..(62): /note="This region represents a CpG dinucleotide"
  misc_feature (61)..(61): /note="Nucleotide may be methylated to form 5-methylcytosine"
cggcgggcggcactaaacagacgctttcctggggcaacaaacccagccgggcgcgggcaccgctcaggctcccttggtctagcgccctccagtgttgccggccagcactgctgcagaggccg

SEQ ID NO: 15810 - DNA, 122 bp, Homo sapiens
  misc_feature (61)..(62): /note="This region represents a CpG dinucleotide"
  misc_feature (61)..(61): /note="Nucleotide may be methylated to form 5-methylcytosine"
tgtaaacacctataacttacactggatttaggtctaccttcctaacccagtgttttaccacgtaccactattcttggacttagtgaatgactcattcgtaaccataatatcctacattggct

SEQ ID NO: 15811 - DNA, 122 bp, Homo sapiens
  misc_feature (61)..(62): /note="This region represents a CpG dinucleotide"
  misc_feature (61)..(61): /note="Nucleotide may be methylated to form 5-methylcytosine"
ttaagtgtgttagccttatattttacacatgaatcacaagcatttttctcagttggtttccgctttataactttatggtgagcctgtcctttcattagttggctgtggtccagtaaaaacca

SEQ ID NO: 15812 - DNA, 122 bp, Homo sapiens
  misc_feature (61)..(62): /note="This region represents a CpG dinucleotide"
  misc_feature (61)..(61): /note="Nucleotide may be methylated to form 5-methylcytosine"
cacacacctgctcagttcatacctagctggtgtcagtttacatccttaaattcatcctgccgctcctccccgctttttatttattcatgcccttgccttgtcccagaaagcgtttctataaa

SEQ ID NO: 15813 - DNA, 122 bp, Homo sapiens
  misc_feature (61)..(62): /note="This region represents a CpG dinucleotide"
  misc_feature (61)..(61): /note="Nucleotide may be methylated to form 5-methylcytosine"
ccaagcaagccacagccagcatgtcagaaagcaagattcaagtcagggtccccttggcttcgactggctctactggatcaaacagctccagcggggacagaggcagcaggaaagagcttcct

SEQ ID NO: 15814 - DNA, 122 bp, Homo sapiens
  misc_feature (61)..(62): /note="This region represents a CpG dinucleotide"
  misc_feature (61)..(61): /note="Nucleotide may be methylated to form 5-methylcytosine"
ccggctacctttgttgtacacgttggtgggcagctgcacgctgctgatggaggtgttcaccggcaggttgctgaagtgagcattggactccaggaggaactcggcgcccagctccacgaagt

SEQ ID NO: 15815 - DNA, 122 bp, Homo sapiens
  misc_feature (61)..(62): /note="This region represents a CpG dinucleotide"
  misc_feature (61)..(61): /note="Nucleotide may be methylated to form 5-methylcytosine"
gcaggaggaaagggggcacaccaggcaacccaggacgaagaaagagacagtcagcagctgcgtcatctgggagggtcagggaggcatatgggtgatctgtcagcactgccattgcctagagg

SEQ ID NO: 15816 - DNA, 122 bp, Homo sapiens
  misc_feature (61)..(62): /note="This region represents a CpG dinucleotide"
  misc_feature (61)..(61): /note="Nucleotide may be methylated to form 5-methylcytosine"
tatacagaaaagctggagttccttggcaagttcaaacaccctgagaacagttttgcatcacgtaggattacaaaaattgttgaggtcatggtaacagctgccttgagcaagatttctaacac

SEQ ID NO: 15817 - DNA, 122 bp, Homo sapiens
  misc_feature (61)..(62): /note="This region represents a CpG dinucleotide"
  misc_feature (61)..(61): /note="Nucleotide may be methylated to form 5-methylcytosine"
attgacagagtgttcttaaaatatggccactgaatcacatccgacttttctttctgcagacgccgaaccagtcagggtacatttctctgttaataacatctcctttcagaaggcatctactc

SEQ ID NO: 15818 - DNA, 122 bp, Homo sapiens
  misc_feature (61)..(62): /note="This region represents a CpG dinucleotide"
  misc_feature (61)..(61): /note="Nucleotide may be methylated to form 5-methylcytosine"
ttgaaagccatgatgaaaagtttcaagatggttatattcacataaaatgcatgaaggaaacgatagaaatgccagaagaaataaataggaatctagttggaagtgggatttttaacaaaaaa

SEQ ID NO: 15819 - DNA, 122 bp, Homo sapiens
  misc_feature (61)..(62): /note="This region represents a CpG dinucleotide"
  misc_feature (61)..(61): /note="Nucleotide may be methylated to form 5-methylcytosine"
agcagctggactgaacaaagtggactccctgaggttacttttgccctcctgacttgagaacgtcccagacaccaatcccaaggcagtgaagagatgaaaagatgaaagcattacaagagtta

SEQ ID NO: 15820 - DNA, 122 bp, Homo sapiens
  misc_feature (61)..(62): /note="This region represents a CpG dinucleotide"
  misc_feature (61)..(61): /note="Nucleotide may be methylated to form 5-methylcytosine"
ctgatgaggctggaaaaacatcaggaattaaacttatggccagctcatcagaggagcatgcggcatccacaggatactctggttgttttttctgttgaaaaaaatttccaagaattttttac

SEQ ID NO: 15821 - DNA, 122 bp, Homo sapiens
  misc_feature (61)..(62): /note="This region represents a CpG dinucleotide"
  misc_feature (61)..(61): /note="Nucleotide may be methylated to form 5-methylcytosine"
gaagaattacatgacaatgaagtaggcagcagagcagaacacagagaaggcattaagtagcggagacacagatgagctgagtcaccatgacagaacactatagtagggagcagtggatattt

SEQ ID NO: 15822 - DNA, 122 bp, Homo sapiens
  misc_feature (61)..(62): /note="This region represents a CpG dinucleotide"
  misc_feature (61)..(61): /note="Nucleotide may be methylated to form 5-methylcytosine"
tttctagattattctgccaaggcctgttgtatgtgtgaaccaccaagctagatcatagaacgtcttcaatatttaagaaaatcagtaattggcaatagagagccaagtatagtttttgacca

SEQ ID NO: 15823 - DNA, 122 bp, Homo sapiens
  misc_feature (61)..(62): /note="This region represents a CpG dinucleotide"
  misc_feature (61)..(61): /note="Nucleotide may be methylated to form 5-methylcytosine"
gtcaactccgctggtcccaacagctagcctctggaaagttggcctcaagagagctgaccacgagagcatgggtcagaattcactggagaacccatcctaatatggaaaatgtcaacacttgc

SEQ ID NO: 15824 - DNA, 122 bp, Homo sapiens
  misc_feature (61)..(62): /note="This region represents a CpG dinucleotide"
  misc_feature (61)..(61): /note="Nucleotide may be methylated to form 5-methylcytosine"
tagtgtggtggtgcagacaacacccagttcataaagggcagctcatgtttcatgaaccctcgcatgctgaggacccaagattaagtcagatgctaggatgtggaagagggcttgcttttgct

SEQ ID NO: 15825 - DNA, 122 bp, Homo sapiens
  misc_feature (61)..(62): /note="This region represents a CpG dinucleotide"
  misc_feature (61)..(61): /note="Nucleotide may be methylated to form 5-methylcytosine"
gactgccctgtttcagatctgggttcatggagtgtttcacctgcctggctgaagaaggaacgtggccgtacttgtgaagctaatagtgagaggttcatttgtttaaacagcagttggtggaa

SEQ ID NO: 15826 - DNA, 122 bp, Homo sapiens
  misc_feature (61)..(62): /note="This region represents a CpG dinucleotide"
  misc_feature (61)..(61): /note="Nucleotide may be methylated to form 5-methylcytosine"
ttgctgttttttcctactagactgtaaagtcctctgtaatatcacaaattacttcctctccgtatgctaatttcttacccagttcccaaccatagtagttatttgatctgtacttaaaaatt

SEQ ID NO: 15827 - DNA, 122 bp, Homo sapiens
  misc_feature (61)..(62): /note="This region represents a CpG dinucleotide"
  misc_feature (61)..(61): /note="Nucleotide may be methylated to form 5-methylcytosine"
aatatacagtacagtactgatttggcatcagaactgccttatttaatgcgcatgaccttacggtcaagaatttattggctgttctttgtgttcaacattgccaggccctgttttaattttca

SEQ ID NO: 15828 - DNA, 122 bp, Homo sapiens
  misc_feature (61)..(62): /note="This region represents a CpG dinucleotide"
  misc_feature (61)..(61): /note="Nucleotide may be methylated to form 5-methylcytosine"
acctggctgtgtgagttgggcaggttgcttgacctctctgagcctgcatggtgatgctcccgtcttcctccatagcctaacaagtgccctcctcgaagtcttgcctcccaccgacatcagaa

SEQ ID NO: 15829 - DNA, 122 bp, Homo sapiens
  misc_feature (61)..(62): /note="This region represents a CpG dinucleotide"
  misc_feature (61)..(61): /note="Nucleotide may be methylated to form 5-methylcytosine"
cccctgaggtggagccccgcctagtgtactgctacccagtccggctggctgtgtctgcaccgcccatgcccagcgtggagatgcacatggagaacaacgtggtctgcatccggtataaggga

SEQ ID NO: 15830 - DNA, 122 bp, Homo sapiens
  misc_feature (61)..(62): /note="This region represents a CpG dinucleotide"
  misc_feature (61)..(61): /note="Nucleotide may be methylated to form 5-methylcytosine"
agtccaagaagggaatttattaacttacacaattcaaggaagggttgaataagcacaccacgagaaaggcagataagcaactgccctgcaggaacaaacagatccaggaactcaaatgccag

SEQ ID NO: 15831 - DNA, 122 bp, Homo sapiens
  misc_feature (61)..(62): /note="This region represents a CpG dinucleotide"
  misc_feature (61)..(61): /note="Nucleotide may be methylated to form 5-methylcytosine"
ctagagatttggggtttagtgaatgattacaaactctgcaaagggaaaactcttccagagcgccagtgttgtcagcccagtgctgcataagctgttgttcaacaaatggactttggccgagt

SEQ ID NO: 15832 - DNA, 122 bp, Homo sapiens
  misc_feature (61)..(62): /note="This region represents a CpG dinucleotide"
  misc_feature (61)..(61): /note="Nucleotide may be methylated to form 5-methylcytosine"
ctgtaaacaacccacaagactcatcaaaccaaaacctctgatgaagatggtatcttcttacgtaagtacacatacaaaaatttcaatccctgttgctctagactctgagtttagctgataaa

SEQ ID NO: 15833 - DNA, 122 bp, Homo sapiens
  misc_feature (61)..(62): /note="This region represents a CpG dinucleotide"
  misc_feature (61)..(61): /note="Nucleotide may be methylated to form 5-methylcytosine"
gccagtttactgtctgtggtaaggcttcctgctctcagctcccagagttccttgtgaagccgtgttggtggtcaagattaagaaggttgctgacctctttctaggcaagattttcttggata

SEQ ID NO: 15834 - DNA, 122 bp, Homo sapiens
  misc_feature (61)..(62): /note="This region represents a CpG dinucleotide"
  misc_feature (61)..(61): /note="Nucleotide may be methylated to form 5-methylcytosine"
gcagtccggccttcctatttcagaagtccccagcaccgcgttctggggtgggaatagatgcgcccctgagaggtcctcatgctgcttcagatcctgtggttggcagatcatgttctctccaa

SEQ ID NO: 15835 - DNA, 122 bp, Homo sapiens
  misc_feature (61)..(62): /note="This region represents a CpG dinucleotide"
  misc_feature (61)..(61): /note="Nucleotide may be methylated to form 5-methylcytosine"
ccttgagaagagtctgattttcagcaccttgatcaatgtgtgacacatacatgcttcatgcgcagagaaggaaatgatttcactacagtgtaattattctcagaattcaatacctgtatttc

SEQ ID NO: 15836 - DNA, 122 bp, Homo sapiens
  misc_feature (61)..(62): /note="This region represents a CpG dinucleotide"
  misc_feature (61)..(61): /note="Nucleotide may be methylated to form 5-methylcytosine"
tttcccagctgatgcatctgttacagaactgggttctatataattcttttttgtgtgccccgccccactgccagttctatatataattcttaaactttgcagcatcaaatgctacagggaaa

SEQ ID NO: 15837 - DNA, 122 bp, Homo sapiens
  misc_feature (61)..(62): /note="This region represents a CpG dinucleotide"
  misc_feature (61)..(61): /note="Nucleotide may be methylated to form 5-methylcytosine"
cacttaactttgtgctcagaactgatgctgacttcaagtgtgatctggtcatcaggttgccggtatccaatatgagactttaccaacttagaggcggatgaatcatcagtaccatttcttcc

SEQ ID NO: 15838 - DNA, 122 bp, Homo sapiens
  misc_feature (61)..(62): /note="This region represents a CpG dinucleotide"
  misc_feature (61)..(61): /note="Nucleotide may be methylated to form 5-methylcytosine"
gcaacaaactatcagtcatgctaaagagcagaacaaaggaaatgtatattaaactatcagcgctgcaaacataggaaggtaccaggagaagattaaagacattgtattattcatccttgcag

SEQ ID NO: 15839 - DNA, 122 bp, Homo sapiens
  misc_feature (61)..(62): /note="This region represents a CpG dinucleotide"
  misc_feature (61)..(61): /note="Nucleotide may be methylated to form 5-methylcytosine"
atggatcacttaatcataaggcaacgctctcctgtgggaagaatttgggaagaaaagccacgcctgtttggggcacatacagtgtgtttatagtttggtgtgatgatctttcttttctcatt

SEQ ID NO: 15840 - DNA, 122 bp, Homo sapiens
  misc_feature (61)..(62): /note="This region represents a CpG dinucleotide"
  misc_feature (61)..(61): /note="Nucleotide may be methylated to form 5-methylcytosine"
atccctggggccagtggcatatggggcctggacacagggcggcctgagggctgggggccacgccccctggtcaacttgggccatctgagaggccacagagacagccaatggtttgctgtgcc

SEQ ID NO: 15841 - DNA, 122 bp, Homo sapiens
  misc_feature (61)..(62): /note="This region represents a CpG dinucleotide"
  misc_feature (61)..(61): /note="Nucleotide may be methylated to form 5-methylcytosine"
ggttttctgctcagaaagggatgacacactgggagagctagctaagggccccgacgaagacgaccctggggacacagccaatggcactgtacttaatacttgtgctgctggaacaggggact

SEQ ID NO: 15842 - DNA, 122 bp, Homo sapiens
  misc_feature (61)..(62): /note="This region represents a CpG dinucleotide"
  misc_feature (61)..(61): /note="Nucleotide may be methylated to form 5-methylcytosine"
acctctagagaattaaagtgatttcttcaagagccaggcttgcaggggaaatctaagggccggcagcctttcatgcacagacagctcagctctggcctttgttctaagagacagcagccagc

SEQ ID NO: 15843 - DNA, 122 bp, Homo sapiens
  misc_feature (61)..(62): /note="This region represents a CpG dinucleotide"
  misc_feature (61)..(61): /note="Nucleotide may be methylated to form 5-methylcytosine"
ctctggtcttctgtgtttgctaattcattagtcaacaaatgtttactaagcacaaagactcgttctttgttctcaagggagggaggcagacagatgattgcagcaaggttgaggataaagag

SEQ ID NO: 15844 - DNA, 122 bp, Homo sapiens
  misc_feature (61)..(62): /note="This region represents a CpG dinucleotide"
  misc_feature (61)..(61): /note="Nucleotide may be methylated to form 5-methylcytosine"
ccccaggaaggctttaaatgctgatgcctaagcctcacccatagattctgattctacttccgtcagtatcgaatgcctctccccaggtgctcctgctgccctatgagcattgagaaccctga

SEQ ID NO: 15845 - DNA, 122 bp, Homo sapiens
  misc_feature (61)..(62): /note="This region represents a CpG dinucleotide"
  misc_feature (61)..(61): /note="Nucleotide may be methylated to form 5-methylcytosine"
aagcaagagggagtcagttaagctggagctctttcactgtctcagtcataatcttgcaaacgtggtttcaatctctccctttgggttttatagcaccttaatcttttttgttgttttgtttt

SEQ ID NO: 15846 - DNA, 122 bp, Homo sapiens
  misc_feature (61)..(62): /note="This region represents a CpG dinucleotide"
  misc_feature (61)..(61): /note="Nucleotide may be methylated to form 5-methylcytosine"
tcattaatttgccaccaggcctttgtaaggagtgtaaccaggacgaacttgcctgttatccgtcttactaggtacaacaccaacaccaaaggtgcagctgctttgggtttaccagaagtcta

SEQ ID NO: 15847 - DNA, 122 bp, Homo sapiens
  misc_feature (61)..(62): /note="This region represents a CpG dinucleotide"
  misc_feature (61)..(61): /note="Nucleotide may be methylated to form 5-methylcytosine"
aaaagctaaagagattagctaagaagtgcctatatttagatctgctattgagctgggaagcggaggcacagttgtgctgaaatacctctgtaccccatgaaacagtggctgctctgagcttc

SEQ ID NO: 15848 - DNA, 122 bp, Homo sapiens
  misc_feature (61)..(62): /note="This region represents a CpG dinucleotide"
  misc_feature (61)..(61): /note="Nucleotide may be methylated to form 5-methylcytosine"
aaatgatgtaacttgtgccagtgttatgggaagttaaagatccatctacaagggttaatacgcccttgtttgttacatgagtaggaggatttcacccatttagattagctcagcatttaaag

SEQ ID NO: 15849 - DNA, 122 bp, Homo sapiens
  misc_feature (61)..(62): /note="This region represents a CpG dinucleotide"
  misc_feature (61)..(61): /note="Nucleotide may be methylated to form 5-methylcytosine"
tgcaacctccgcttcccgggttcaagcaattttccttcctcagctgggattagaggcacccgccaccatgcccagctaatttttttgttttttgttttttttttgagacagagtttcgcttt

SEQ ID NO: 15850 - DNA, 122 bp, Homo sapiens
  misc_feature (61)..(62): /note="This region represents a CpG dinucleotide"
  misc_feature (61)..(61): /note="Nucleotide may be methylated to form 5-methylcytosine"
tcggagagcaggagcaggcagacgagtaagagagcacgcgcgcaagagagggctcacatccgtcctggaggaagaacggcacagacggagggaggctggggttggcagagactgggacggaa

SEQ ID NO: 15851 - DNA, 122 bp, Homo sapiens
  misc_feature (61)..(62): /note="This region represents a CpG dinucleotide"
  misc_feature (61)..(61): /note="Nucleotide may be methylated to form 5-methylcytosine"
gcccttgtgaagacctttctgactcaagtgactgtggctctgacaggagtatctttccttcgtctgctgaatcatctttcacttcacagccctgcactggggctgtggtgcccacacaatgg

SEQ ID NO: 15852 - DNA, 122 bp, Homo sapiens
  misc_feature (61)..(62): /note="This region represents a CpG dinucleotide"
  misc_feature (61)..(61): /note="Nucleotide may be methylated to form 5-methylcytosine"
tgaggggtccaaacaatctcaagccttgaattcggtttaaggagatcccacactggctgacgcaaaagtaagtgttctctggaggaagcgaccctcattccaggcctcaaaagaatcctaca

SEQ ID NO: 15853 - DNA, 122 bp, Homo sapiens
  misc_feature (61)..(62): /note="This region represents a CpG dinucleotide"
  misc_feature (61)..(61): /note="Nucleotide may be methylated to form 5-methylcytosine"
gtgtttcttaattttcccaggggtgcccttggccctgatacagatttagctaccttcccccgaaagcctcaaagttctgcaaactcacagccaagcaaaacgcagctgcagtcgagccagcc

SEQ ID NO: 15854 - DNA, 122 bp, Homo sapiens
  misc_feature (61)..(62): /note="This region represents a CpG dinucleotide"
  misc_feature (61)..(61): /note="Nucleotide may be methylated to form 5-methylcytosine"
cctgctccactattttctctccagttgctcaagccacagttcctagatgacctttgacaccgttctctcctacacacccttgcacatattcagagcttagtcacatctcattgtctacactg

SEQ ID NO: 15855 - DNA, 122 bp, Homo sapiens
  misc_feature (61)..(62): /note="This region represents a CpG dinucleotide"
  misc_feature (61)..(61): /note="Nucleotide may be methylated to form 5-methylcytosine"
gtgatgcaactgtgacaatagctcacagatacacccccaaagagcaactgaagattcatacgcagctggcagatattatcatagttgctgcaggtaagtccttagtgactgttattttttgg

SEQ ID NO: 15856 - DNA, 122 bp, Homo sapiens
  misc_feature (61)..(62): /note="This region represents a CpG dinucleotide"
  misc_feature (61)..(61): /note="Nucleotide may be methylated to form 5-methylcytosine"
catatcagaaaatagatctaaaaaacttgtccaagttcttcattcctcttctgcttctttcgtatgctgttagttcagatgatctgacagttttctacttttggaatgctttctagtcatgt

SEQ ID NO: 15857 - DNA, 122 bp, Homo sapiens
  misc_feature (61)..(62): /note="This region represents a CpG dinucleotide"
  misc_feature (61)..(61): /note="Nucleotide may be methylated to form 5-methylcytosine"
tgttcctgctttgagacctgtgaattcttgtgggacagttccactgacagcttgcgttcccgaggtaccagtcctcagtgacctcgggaaccccaaccacttaggtcccaaagccacaaggg

SEQ ID NO: 15858 - DNA, 122 bp, Homo sapiens
  misc_feature (61)..(62): /note="This region represents a CpG dinucleotide"
  misc_feature (61)..(61): /note="Nucleotide may be methylated to form 5-methylcytosine"
ttcacaggttactgccctgttcccactcccaactaaattgtaagcttctaagggcagggacgtagtccacctctgccatgtggttggtttttttagtgtctgacacagcactttgctcaaca

SEQ ID NO: 15859 - DNA, 122 bp, Homo sapiens
  misc_feature (61)..(62): /note="This region represents a CpG dinucleotide"
  misc_feature (61)..(61): /note="Nucleotide may be methylated to form 5-methylcytosine"
atgggatcacctaaggaatagtctagacagagaaaacattcaagtactaaaccctgaggacgccccaacatttaaaggctggaaattgaggagaaaccagtaaagaaaactgagtagccagt

SEQ ID NO: 15860 - DNA, 122 bp, Homo sapiens
  misc_feature (61)..(62): /note="This region represents a CpG dinucleotide"
  misc_feature (61)..(61): /note="Nucleotide may be methylated to form 5-methylcytosine"
gcccacttgacaaattccagagagtgtctggatccacccacacagctgtgaatggacaggcgtagggtaggggagaagagacacaaatcttggctctctccagcccgtccctatttctggac

SEQ ID NO: 15861 - DNA, 122 bp, Homo sapiens
  misc_feature (61)..(62): /note="This region represents a CpG dinucleotide"
  misc_feature (61)..(61): /note="Nucleotide may be methylated to form 5-methylcytosine"
aggtttccggcagccatggatcctgtgtgctgaactcagcaagcctttgtgagatgacgacgtggcatcctgctgcagggaggcttgggccgttgcaatctgaccagtgcccagccgtccct

SEQ ID NO: 15862 - DNA, 122 bp, Homo sapiens
  misc_feature (61)..(62): /note="This region represents a CpG dinucleotide"
  misc_feature (61)..(61): /note="Nucleotide may be methylated to form 5-methylcytosine"
caatttttcctctgcctctccttcgttcttcacccacttctttccctcttggacccacaccgtctttcactaacaggttggaaatctggggaccacagcagggtttcccagacaagaaatac

SEQ ID NO: 15863 - DNA, 122 bp, Homo sapiens
  misc_feature (61)..(62): /note="This region represents a CpG dinucleotide"
  misc_feature (61)..(61): /note="Nucleotide may be methylated to form 5-methylcytosine"
gggctatattccagttcctgcttgccaaattgatcaaggtgtgtgctaggccaaaggtagcgtttgcttcctagtcccagctcggtcttcagatctccccagcctccatcccttattcaagt

SEQ ID NO: 15864 - DNA, 122 bp, Homo sapiens
  misc_feature (61)..(62): /note="This region represents a CpG dinucleotide"
  misc_feature (61)..(61): /note="Nucleotide may be methylated to form 5-methylcytosine"
catccagatatactgcggctcaggaagccaagaacagtctcctattggacatcatcagttcgtcatagggataatttcctggccttcttagataagagagttcaacttccctgtggtctttt

SEQ ID NO: 15865 - DNA, 122 bp, Homo sapiens
  misc_feature (61)..(62): /note="This region represents a CpG dinucleotide"
  misc_feature (61)..(61): /note="Nucleotide may be methylated to form 5-methylcytosine"
gggagcagggatgagcaacagaggtcatgatttggcaacagcaatggctgaaagtttaatcgtttgttcatgagagttttattctggttttagttttttattttgttttgctggctgaggca

SEQ ID NO: 15866 - DNA, 122 bp, Homo sapiens
  misc_feature (61)..(62): /note="This region represents a CpG dinucleotide"
  misc_feature (61)..(61): /note="Nucleotide may be methylated to form 5-methylcytosine"
atctgaacctctgtagggccctggaaatgggggatctcctgccttgacagctcatcagtacgtgtgaaaagccaacaagagtggatatgataggaactgcaatcacacagcactttggagaa

SEQ ID NO: 15867 - DNA, 122 bp, Homo sapiens
  misc_feature (61)..(62): /note="This region represents a CpG dinucleotide"
  misc_feature (61)..(61): /note="Nucleotide may be methylated to form 5-methylcytosine"
tcctgtgagaaggtgtccccgctcagccagtaaccttcattggatgacttcacctaggcccgcctgccctttttcttcccccggcttttttttttttttttctggcatgactaggcacccac

SEQ ID NO: 15868 - DNA, 122 bp, Homo sapiens
  misc_feature (61)..(62): /note="This region represents a CpG dinucleotide"
  misc_feature (61)..(61): /note="Nucleotide may be methylated to form 5-methylcytosine"
caaagacacttcatcagctttacaattgcacttaataatgctgccacacctcttcagagacgtttcatttcctatggcatgtcctatctaatcccctagctgaactacaggggacagggaag

SEQ ID NO: 15869 - DNA, 122 bp, Homo sapiens
  misc_feature (61)..(62): /note="This region represents a CpG dinucleotide"
  misc_feature (61)..(61): /note="Nucleotide may be methylated to form 5-methylcytosine"
agtcacagtttccacccacactcaggggaagggattatactggatgtgaacaccaagtggcggagatccctggagatcacctgagggtcttctggccacactgctttgtatctctgtcccca

SEQ ID NO: 15870 - DNA, 122 bp, Homo sapiens
  misc_feature (61)..(62): /note="This region represents a CpG dinucleotide"
  misc_feature (61)..(61): /note="Nucleotide may be methylated to form 5-methylcytosine"
ggcaagccatccaacctctctgagcctcaatgtttctcagctgtcaaatggagaattcatcgtatcctcatggggttattgtcaggatgtgcgaaataggatggtgggttaaaagacgttgt

SEQ ID NO: 15871 - DNA, 122 bp, Homo sapiens
  misc_feature (61)..(62): /note="This region represents a CpG dinucleotide"
  misc_feature (61)..(61): /note="Nucleotide may be methylated to form 5-methylcytosine"
aggattgtgtcctcctccaccttccctgtgctcggtctccacctgtctcccattctgtgacgatggttcaatggaagagactctgccagctgcattacttgtgggctctgggctgctatatg

SEQ ID NO: 15872 - DNA, 122 bp, Homo sapiens
  misc_feature (61)..(62): /note="This region represents a CpG dinucleotide"
  misc_feature (61)..(61): /note="Nucleotide may be methylated to form 5-methylcytosine"
gatttgacttctgcttgtaggcatttccacagttctcacatttatagggcctttcctctgcgtgagttttctgatgtttatcaagcttccacttctccccgaatgctcttccacagctatga

SEQ ID NO: 15873 - DNA, 122 bp, Homo sapiens
  misc_feature (61)..(62): /note="This region represents a CpG dinucleotide"
  misc_feature (61)..(61): /note="Nucleotide may be methylated to form 5-methylcytosine"
tgctaaccagggaagctccaccaagccttggtgtccagattttttcttgagggttggtcacgtaggcatagcatgactgatagcccatgtggctgaccttcagttttcagcccctccaaaga

SEQ ID NO: 15874 - DNA, 122 bp, Homo sapiens
  misc_feature (61)..(62): /note="This region represents a CpG dinucleotide"
  misc_feature (61)..(61): /note="Nucleotide may be methylated to form 5-methylcytosine"
ttggcatctgaacttctcctgttctgtcttcgctgtctgtgtggtatagctgggattgtacgtgaaagaaaacttaatacaccctatctacacagaggaacatggtgtcccatctcccagaa

SEQ ID NO: 15875 - DNA, 122 bp, Homo sapiens
  misc_feature (61)..(62): /note="This region represents a CpG dinucleotide"
  misc_feature (61)..(61): /note="Nucleotide may be methylated to form 5-methylcytosine"
gcctcctgttgtctgaacaagctagtatggaagtagcatctaggcaagctggtgttaagacgcaagtaattactcagagaaattgctggtgtgtcaaactgcttgatatgtaagtttcctcc

SEQ ID NO: 15876 - DNA, 122 bp, Homo sapiens
  misc_feature (61)..(62): /note="This region represents a CpG dinucleotide"
  misc_feature (61)..(61): /note="Nucleotide may be methylated to form 5-methylcytosine"
tgttatccctaaccccctaaccgcctgaggttgccctgacctgctggcccacactcccgtcgccatttagtagtaccatcatttcggggcctcagtttaccccgccatcccacccggcagga

SEQ ID NO: 15877 - DNA, 122 bp, Homo sapiens
  misc_feature (61)..(62): /note="This region represents a CpG dinucleotide"
  misc_feature (61)..(61): /note="Nucleotide may be methylated to form 5-methylcytosine"
aagaatcactgtttcataacccaaaacaaagactgtatgtaggaccaataagccatttcacgtagcctttaccactaaagattgtgaaatacatgttttgtaactataattagtattattat

SEQ ID NO: 15878 - DNA, 122 bp, Homo sapiens
  misc_feature (61)..(62): /note="This region represents a CpG dinucleotide"
  misc_feature (61)..(61): /note="Nucleotide may be methylated to form 5-methylcytosine"
tatgatagaactaacactttgtgagtcatctgggatcctccctgcagagactgagtctctcgctacctgcctgctccctttccccacccattcaacttcattcatctttcaagtttcacagc

SEQ ID NO: 15879 - DNA, 122 bp, Homo sapiens
  misc_feature (61)..(62): /note="This region represents a CpG dinucleotide"
  misc_feature (61)..(61): /note="Nucleotide may be methylated to form 5-methylcytosine"
tggattctaagctcttagatgccagagcctactggatcttttactgtatgtgaagtcacccgtactgccaaggatcctgaagtgaacatgctgacccctttgagagattcttggaaatatga

SEQ ID NO: 15880 - DNA, 122 bp, Homo sapiens
  misc_feature (61)..(62): /note="This region represents a CpG dinucleotide"
  misc_feature (61)..(61): /note="Nucleotide may be methylated to form 5-methylcytosine"
ggtgagttgcagctagaagtgcccagcagaaatgcctccaaagaatttacaaaagtgtctcggagagaattggctttaagtcagataaatagtccctttgttctcctgtgagaacacataaa

SEQ ID NO: 15881 - DNA, 122 bp, Homo sapiens
  misc_feature (61)..(62): /note="This region represents a CpG dinucleotide"
  misc_feature (61)..(61): /note="Nucleotide may be methylated to form 5-methylcytosine"
tctttgtatttctttgggccacctcaaaaacacctccaggttggtatcccaggaaaacaacggttaagttcaggacgtttactgaccaattgcttcatattggagatgtagagcttttctac

SEQ ID NO: 15882 - DNA, 122 bp, Homo sapiens
  misc_feature (61)..(62): /note="This region represents a CpG dinucleotide"
  misc_feature (61)..(61): /note="Nucleotide may be methylated to form 5-methylcytosine"
caacattacgctaagcatttagtagcccctacattgcaaacaaatcttttgaagattccccgtgaagagtgtaaatgaatcactttcaactattggccttatataactgactcatattctgc

SEQ ID NO: 15883 - DNA, 122 bp, Homo sapiens
  misc_feature (61)..(62): /note="This region represents a CpG dinucleotide"
  misc_feature (61)..(61): /note="Nucleotide may be methylated to form 5-methylcytosine"
gacagaaataagcaactatcagaggtccaagaaaggggctgtactgtgctgatgtcattacgtgtacactctgtggatgatcatgtctgggaactcctatggcccaacctctttgtcctgag

SEQ ID NO: 15884 - DNA, 122 bp, Homo sapiens
  misc_feature (61)..(62): /note="This region represents a CpG dinucleotide"
  misc_feature (61)..(61): /note="Nucleotide may be methylated to form 5-methylcytosine"
gctattgaacaaagccttgaatgtgtttcagatattagcttatttaattcctcacagcaacgctgtgatggatagctgctcagagattgagtgacaggtggttagtgacagaatggaggttg

SEQ ID NO: 15885 - DNA, 122 bp, Homo sapiens
  misc_feature (61)..(62): /note="This region represents a CpG dinucleotide"
  misc_feature (61)..(61): /note="Nucleotide may be methylated to form 5-methylcytosine"
gtctgtgaatgtttgcatgtattttcagcgtttgcttcctcccctcaccactacccctgtcggttaaaagtctgttaaaagaatgagagcgagagagagagagagagagagagagagaggag

SEQ ID NO: 15886 - DNA, 122 bp, Homo sapiens
  misc_feature (61)..(62): /note="This region represents a CpG dinucleotide"
  misc_feature (61)..(61): /note="Nucleotide may be methylated to form 5-methylcytosine"
ctgacaggagagaggaatttcagagagaggagggaggcagtgccagaacttgtaaggagacggagggtgaaggtgtctgtgttcacattctaactatagttacctttgcttcctgagtgaca

SEQ ID NO: 15887 - DNA, 122 bp, Homo sapiens
  misc_feature (61)..(62): /note="This region represents a CpG dinucleotide"
  misc_feature (61)..(61): /note="Nucleotide may be methylated to form 5-methylcytosine"
gtgtggtcatcagggaatcatttacctaagtcttcttaatgctgcttagtgaatatttagcgtgctatagtaaatacaagctaaccactaaattggaggggaaggagggagaacaaagaggc

SEQ ID NO: 15888 - DNA, 122 bp, Homo sapiens
  misc_feature (61)..(62): /note="This region represents a CpG dinucleotide"
  misc_feature (61)..(61): /note="Nucleotide may be methylated to form 5-methylcytosine"
ttggctgcactggagtctctctgagtctattccagctcaggggctgcctgattaatgaatcgttctttgctccattaaactctgataaatttaatttgtctaaggtttttcttttaacacct

SEQ ID NO: 15889 - DNA, 122 bp, Homo sapiens
  misc_feature (61)..(62): /note="This region represents a CpG dinucleotide"
  misc_feature (61)..(61): /note="Nucleotide may be methylated to form 5-methylcytosine"
ccagcccattttaaccattttaagtgtacaattcagtagcatgaaattcattcaccatgtcgtgcatgcatgcatcaccactatgactcaaacctgtaatcccagcacaaaaacggtaggtt

SEQ ID NO: 15890 - DNA, 122 bp, Homo sapiens
  misc_feature (61)..(62): /note="This region represents a CpG dinucleotide"
  misc_feature (61)..(61): /note="Nucleotide may be methylated to form 5-methylcytosine"
accagtgttactaaatgagtcactccaatgaagaactttaactggaaatttggtgtcctacggagaggccgtagcatgcaaagatgccagctgtcctcattgatacttctacctacccttcc

SEQ ID NO: 15891 - DNA, 122 bp, Homo sapiens
  misc_feature (61)..(62): /note="This region represents a CpG dinucleotide"
  misc_feature (61)..(61): /note="Nucleotide may be methylated to form 5-methylcytosine"
acattgaccttaaaaggtaaagtcacaagttttcctcacccataagaaaatattcactggcgtgacctgacatataatctcatgggtttcatggatctgtatccctgggcatttatgccctc

SEQ ID NO: 15892 - DNA, 122 bp, Homo sapiens
  misc_feature (61)..(62): /note="This region represents a CpG dinucleotide"
  misc_feature (61)..(61): /note="Nucleotide may be methylated to form 5-methylcytosine"
cttaacaacactcactgtttcttccagaggttatgagtcagacatgaactgggagaaaggcgaaggccagcccttcgaatactttgtttatggagctgcctgttccgaggttgaaatagact

SEQ ID NO: 15893 - DNA, 122 bp, Homo sapiens
  misc_feature (61)..(62): /note="This region represents a CpG dinucleotide"
  misc_feature (61)..(61): /note="Nucleotide may be methylated to form 5-methylcytosine"
cctcggccccagttcccactcacacttcctggagctggaggagggggcaagagggtgatgcgtcataagcctgcatggacattgtcactgaaatgaaagctcagcttccagggtccggagac

SEQ ID NO: 15894 - DNA, 122 bp, Homo sapiens
  misc_feature (61)..(62): /note="This region represents a CpG dinucleotide"
  misc_feature (61)..(61): /note="Nucleotide may be methylated to form 5-methylcytosine"
atcaccaaacccattacatcttacttccctccttcatactttattcaaagaaaacactgacgaatttcttaagaaaacttggttaaggactgtcatttgtatgagatggaaaaagagaccat

SEQ ID NO: 15895 - DNA, 122 bp, Homo sapiens
  misc_feature (61)..(62): /note="This region represents a CpG dinucleotide"
  misc_feature (61)..(61): /note="Nucleotide may be methylated to form 5-methylcytosine"
ttactattctgtatcagtttacaaactaaaattaaactgacacacacttaacagaattcccgacaacacaataacattaccatacaaaagataataccaaggttgttatgagttatctagtt

SEQ ID NO: 15896 - DNA, 122 bp, Homo sapiens
  misc_feature (61)..(62): /note="This region represents a CpG dinucleotide"
  misc_feature (61)..(61): /note="Nucleotide may be methylated to form 5-methylcytosine"
ggacttgaggggcgaattaatctcattcctgtacaatacggggtgcctctcccaaaatcacgaaaaccagaaacgcggcaggagagtcatgaacccatggaggtgaacagttcagctgctgg

SEQ ID NO: 15897 - DNA, 122 bp, Homo sapiens
  misc_feature (61)..(62): /note="This region represents a CpG dinucleotide"
  misc_feature (61)..(61): /note="Nucleotide may be methylated to form 5-methylcytosine"
ttcccaggacaaaaacaatgacagacttgtccgagctaccatcgaagtcttgggtctgcacgcaaaggatggaatcccccatctccattcccaaaagtttccctacgggagcctggtgttgt

SEQ ID NO: 15898 - DNA, 122 bp, Homo sapiens
  misc_feature (61)..(62): /note="This region represents a CpG dinucleotide"
  misc_feature (61)..(61): /note="Nucleotide may be methylated to form 5-methylcytosine"
agtgtttcctctgccttaatgctcttttctccctgcattacctaattaatgcctcttatccgtaagattcccttcaactgtgaaaatctttcctaacttccttaatgaggtcacttttctta

SEQ ID NO: 15899 - DNA, 122 bp, Homo sapiens
  misc_feature (61)..(62): /note="This region represents a CpG dinucleotide"
  misc_feature (61)..(61): /note="Nucleotide may be methylated to form 5-methylcytosine"
caatatcatagcattttagaaaccaacttataaaaatctaaaaagtaaataaaagtggtgcgggtgatacctgggcggaatgtcttggcactcaggtgtaaaggattctggaaatagggatg

SEQ ID NO: 15900 - DNA, 122 bp, Homo sapiens
  misc_feature (61)..(62): /note="This region represents a CpG dinucleotide"
  misc_feature (61)..(61): /note="Nucleotide may be methylated to form 5-methylcytosine"
gtgattttacaagttagctctactaaacattcaaaaaagagataaccaacttcatgcaaacgattccaaagaacgggaaaagaaggaaaaccttcaaactattttatgaggtaaatataacc

SEQ ID NO: 15901 - DNA, 122 bp, Homo sapiens
  misc_feature (61)..(62): /note="This region represents a CpG dinucleotide"
  misc_feature (61)..(61): /note="Nucleotide may be methylated to form 5-methylcytosine"
gaccttgagcaaataactcctggtttcatcatccaagttaagctgatgatgcttgttttacgtgtctaagtgagattatttacatgaagtacttggtatagtaggtactcaataaaaacatt

SEQ ID NO: 15902 - DNA, 122 bp, Homo sapiens
  misc_feature (61)..(62): /note="This region represents a CpG dinucleotide"
  misc_feature (61)..(61): /note="Nucleotide may be methylated to form 5-methylcytosine"
cttcatttaaccccagtgactacctaaaaggccgtattcaaatagtcgtattaggccaggcgcagtggctcacgcctgtaattctagcactttgggaagccgaggcagatggattgcctgag

SEQ ID NO: 15903 - DNA, 122 bp, Homo sapiens
  misc_feature (61)..(62): /note="This region represents a CpG dinucleotide"
  misc_feature (61)..(61): /note="Nucleotide may be methylated to form 5-methylcytosine"
gcaacatctgcccttccattcttactcatatgtgtctctcacatgtcaaccaaatgcaatcgtggttcaagtaaaccaactgtaaaaatatttacagtatgaggcaagagggggaaatttga

SEQ ID NO: 15904 - DNA, 122 bp, Homo sapiens
  misc_feature (61)..(62): /note="This region represents a CpG dinucleotide"
  misc_feature (61)..(61): /note="Nucleotide may be methylated to form 5-methylcytosine"
actgtgttcctcatgccgggctcatgaacatatctcatctccaggtcccatacactcccacggtggctttgccggtgccttcctatgctgataatctctgtgactcagaaggcttaattgat

SEQ ID NO: 15905 - DNA, 122 bp, Homo sapiens
  misc_feature (61)..(62): /note="This region represents a CpG dinucleotide"
  misc_feature (61)..(61): /note="Nucleotide may be methylated to form 5-methylcytosine"
ttatctacggtttattatgaaatcaggaagtgaatcatgttttgtttgttattcctcttccgagtactatttgctgcagaaccaagtcattgcttaggattgatttcgctggtcttgtagag

SEQ ID NO: 15906 - DNA, 122 bp, Homo sapiens
  misc_feature (61)..(62): /note="This region represents a CpG dinucleotide"
  misc_feature (61)..(61): /note="Nucleotide may be methylated to form 5-methylcytosine"
cagtaacgacctcccatacataccaagaagcttctgccatctggtggtatatgtggaggacgtggtagtcaagatccgcagaaggatcaaatcccccagtccagatcccagcttccagatct

SEQ ID NO: 15907 - DNA, 122 bp, Homo sapiens
  misc_feature (61)..(62): /note="This region represents a CpG dinucleotide"
  misc_feature (61)..(61): /note="Nucleotide may be methylated to form 5-methylcytosine"
tcataaaaagaccaactttagcaccattttcaatcaagaatattccttgaggccaggcggcgtggctcacacctgtaatcccagcactctgggaggcttggggcgggtggatcacctgagct

SEQ ID NO: 15908 - DNA, 122 bp, Homo sapiens
  misc_feature (61)..(62): /note="This region represents a CpG dinucleotide"
  misc_feature (61)..(61): /note="Nucleotide may be methylated to form 5-methylcytosine"
ttaccgccattgcagctgaagagcctgagggtcgtagacctgcggtgtgggtctccaaggcgtgggctcttttcactaaacaataggccacctctgtaggaagaagaaaatgggactcttgc

SEQ ID NO: 15909 - DNA, 122 bp, Homo sapiens
  misc_feature (61)..(62): /note="This region represents a CpG dinucleotide"
  misc_feature (61)..(61): /note="Nucleotide may be methylated to form 5-methylcytosine"
accccataagtcctggattaaaacaagctctttgctcataacattggtctctcaacatagcgtgacataatcagacatataattatgcacttcccagtagagatacgcatgtaaaagctaca

SEQ ID NO: 15910 - DNA, 122 bp, Homo sapiens
  misc_feature (61)..(62): /note="This region represents a CpG dinucleotide"
  misc_feature (61)..(61): /note="Nucleotide may be methylated to form 5-methylcytosine"
ggtgatctgcctgcctcagcctcccaaagtgctgggattataggtgtgagccactgcgtccggcatgtgtcagatttttaaatggcactttttatgtagcaatataaatttttttaaaaatt

SEQ ID NO: 15911 - DNA, 122 bp, Homo sapiens
  misc_feature (61)..(62): /note="This region represents a CpG dinucleotide"
  misc_feature (61)..(61): /note="Nucleotide may be methylated to form 5-methylcytosine"
ctgaatctaatacccatctgataatgcaacttagttcagtgcctcctttagtgcttaaaacgtgttgtcttttctgcttaattaatctgccttgatcacttctccttattctcattgttcag

SEQ ID NO: 15912 - DNA, 122 bp, Homo sapiens
  misc_feature (61)..(62): /note="This region represents a CpG dinucleotide"
  misc_feature (61)..(61): /note="Nucleotide may be methylated to form 5-methylcytosine"
tatgatagatgaagtggagactcagccaggtctgtgagctcatgtgcttggaatcttaaccgctgggcgacagtgccacctgtccttccttgagtatggaacagtctctcataaggcaggtt

SEQ ID NO: 15913 - DNA, 122 bp, Homo sapiens
  misc_feature (61)..(62): /note="This region represents a CpG dinucleotide"
  misc_feature (61)..(61): /note="Nucleotide may be methylated to form 5-methylcytosine"
ggttctgtgaactcaagggagggggaatagagtaaatttccaggagtacttctggttcctcgtgtccacgtgggtcttagggcagtactatatacatcaaatgttgtctaatacttccagtg

SEQ ID NO: 15914 - DNA, 122 bp, Homo sapiens
  misc_feature (61)..(62): /note="This region represents a CpG dinucleotide"
  misc_feature (61)..(61): /note="Nucleotide may be methylated to form 5-methylcytosine"
gggagggatgctgagtggcaagtaggcaggctgggtacatttccttttgggatgtggtagcgacagtgtcctacagagtcagactggtggctttaacatcacagggctttgtccagctggat

SEQ ID NO: 15915 - DNA, 122 bp, Homo sapiens
  misc_feature (61)..(62): /note="This region represents a CpG dinucleotide"
  misc_feature (61)..(61): /note="Nucleotide may be methylated to form 5-methylcytosine"
aatgaggccctccaacagtacgcaaacaatgtgagtttcacagaatcaagcagccctggtcggtcaaaatcatttttagtttactctgggagcaaaaaacacaggataaataattttatgtt

SEQ ID NO: 15916 - DNA, 122 bp, Homo sapiens
  misc_feature (61)..(62): /note="This region represents a CpG dinucleotide"
  misc_feature (61)..(61): /note="Nucleotide may be methylated to form 5-methylcytosine"
cttccgtcctacttgggacgaaatccataacgcactccgcggtccgaagttgtggggtctcggagcttccaggtgtgtctcgtgaactgcacaagcatttttttgtccccatgcgtcctacc

SEQ ID NO: 15917 - DNA, 122 bp, Homo sapiens
  misc_feature (61)..(62): /note="This region represents a CpG dinucleotide"
  misc_feature (61)..(61): /note="Nucleotide may be methylated to form 5-methylcytosine"
gcccgcagcggacccagccaggtagcgaagggcttcccacgccttcccctctggcgcatgcgtgtagagacatcctgcgtcctagaacatccatttatcagtgattcatcttttaatttata

SEQ ID NO: 15918 - DNA, 122 bp, Homo sapiens
  misc_feature (61)..(62): /note="This region represents a CpG dinucleotide"
  misc_feature (61)..(61): /note="Nucleotide may be methylated to form 5-methylcytosine"
tttacagataaggcaatgggagggccagagagggtgcctctcactcccatagtctctgagcgtgataacggtagcgccagaccagcacacaggcttcatgattttcagcagcatgttcttcc

SEQ ID NO: 15919 - DNA, 122 bp, Homo sapiens
  misc_feature (61)..(62): /note="This region represents a CpG dinucleotide"
  misc_feature (61)..(61): /note="Nucleotide may be methylated to form 5-methylcytosine"
agggctgtggggctgtgattcggagctgtgattcatcaataagacccacaggattgtcagcgttcttcagttatgtgtttgtgccttcctcatgagccagggaaaggctggggttaccaccg

SEQ ID NO: 15920 - DNA, 122 bp, Homo sapiens
  misc_feature (61)..(62): /note="This region represents a CpG dinucleotide"
  misc_feature (61)..(61): /note="Nucleotide may be methylated to form 5-methylcytosine"
ccctcttgtcacattggttttccagtcccagagctgttggccaaaagcacacctccagcccgaccagaagcactatctttgttgctgtgtgtgtgaaaacgaatgtctctttttgttttgcc

SEQ ID NO: 15921 - DNA, 122 bp, Homo sapiens
  misc_feature (61)..(62): /note="This region represents a CpG dinucleotide"
  misc_feature (61)..(61): /note="Nucleotide may be methylated to form 5-methylcytosine"
atcctcatgcccctttgtaatctgtaatctatcatccctcctttactccatttcaggcaacgactggctttgctctctgtcatcacagattagtttgcatttttaaaaactagtctgggcac

SEQ ID NO: 15922 - DNA, 122 bp, Homo sapiens
  misc_feature (61)..(62): /note="This region represents a CpG dinucleotide"
  misc_feature (61)..(61): /note="Nucleotide may be methylated to form 5-methylcytosine"
gccacaaacctagactgtatgcaacatcctattgttcccaggctacaaaactgtacagcacgtactgtaccgaatactgtagacaattgtaacacaaagtgtttgtgtatctaaacacagaa

SEQ ID NO: 15923 - DNA, 122 bp, Homo sapiens
  misc_feature (61)..(62): /note="This region represents a CpG dinucleotide"
  misc_feature (61)..(61): /note="Nucleotide may be methylated to form 5-methylcytosine"
aagcaaaaatacacaatggataatgcacataagtcccatctgtggggatcctgccaatggcgtatccagcttgaacatgtgccattctattaccctttgtgggcgtgcttgcatggggaaat

SEQ ID NO: 15924 - DNA, 122 bp, Homo sapiens
  misc_feature (61)..(62): /note="This region represents a CpG dinucleotide"
  misc_feature (61)..(61): /note="Nucleotide may be methylated to form 5-methylcytosine"
caacacagagaactgacagcttcaatggggacaatgcccagactaaacctttaaggaacccgtcatatgtatcacgaagtgacacatgcttaggagggacagaggagggcgagggagtgcag

SEQ ID NO: 15925 - DNA, 122 bp, Homo sapiens
  misc_feature (61)..(62): /note="This region represents a CpG dinucleotide"
  misc_feature (61)..(61): /note="Nucleotide may be methylated to form 5-methylcytosine"
ttttgggagttttcaagctcatgaatcaaaacatggttttcctcttgcgcttttagtcaccgtacaattctttccgagtgcttctgagtcacacaccatccgacagaagtggggacaaggca

SEQ ID NO: 15926 - DNA, 122 bp, Homo sapiens
  misc_feature (61)..(62): /note="This region represents a CpG dinucleotide"
  misc_feature (61)..(61): /note="Nucleotide may be methylated to form 5-methylcytosine"
agttgtggagccacttgtagaactgatcagcctggacttgttctgatcagagcccagtgacgtgtttgctccgcaccagccatgcccagtacacctctgtgttgacgatacctggtttggtt

SEQ ID NO: 15927 - DNA, 122 bp, Homo sapiens
  misc_feature (61)..(62): /note="This region represents a CpG dinucleotide"
  misc_feature (61)..(61): /note="Nucleotide may be methylated to form 5-methylcytosine"
tctggaagaagaaataataggatttggtatctaggggatggagcctgagggaagggttaacgatgacttaaaggaattgagcatgagcagttaggagaatggtattaccattaactgaggtt

SEQ ID NO: 15928 - DNA, 122 bp, Homo sapiens
  misc_feature (61)..(62): /note="This region represents a CpG dinucleotide"
  misc_feature (61)..(61): /note="Nucleotide may be methylated to form 5-methylcytosine"
taaatcttctaaaattagtaacagcagccactatttattaagaaccagtgagtgcagacacgaagccaagaacttcacatacgctgtctcattgaatcctcccaagtaattcctgagaaatc

SEQ ID NO: 15929 - DNA, 122 bp, Homo sapiens
  misc_feature (61)..(62): /note="This region represents a CpG dinucleotide"
  misc_feature (61)..(61): /note="Nucleotide may be methylated to form 5-methylcytosine"
atttcaaatagattacctaagagaaaacacaggaattcaacagagaagtgacaggaaacacgtaacacaaagaaggagagagaagtgagtcagcctgctcagctgcaactggctagaatctc

SEQ ID NO: 15930 - DNA, 122 bp, Homo sapiens
  misc_feature (61)..(62): /note="This region represents a CpG dinucleotide"
  misc_feature (61)..(61): /note="Nucleotide may be methylated to form 5-methylcytosine"
aggtgtgggaaggaacttccaaaggtaatagcatctggtcctagcaaggtcttaaaacgccgtttgatttcagaatgcctcattttgtagatttaatccagaatctgcagtttctggcgacg

SEQ ID NO: 15931 - DNA, 122 bp, Homo sapiens
  misc_feature (61)..(62): /note="This region represents a CpG dinucleotide"
  misc_feature (61)..(61): /note="Nucleotide may be methylated to form 5-methylcytosine"
tttatgctccacctatgagtgcctgagtagaaaataatcttttgtaacactttcttttgacgtgattaagactcacagaagttgcagtaatagtacagaggattcccgtgtctccgataatt

SEQ ID NO: 15932 - DNA, 122 bp, Homo sapiens
  misc_feature (61)..(62): /note="This region represents a CpG dinucleotide"
  misc_feature (61)..(61): /note="Nucleotide may be methylated to form 5-methylcytosine"
aaataggaggaggagctgaggcgcgaacaactactggatccaacactcaaggatgggcggcgactcagggaagatgtgcagattccagggtaaagatggaaaacaagaaagtagagctgagt

SEQ ID NO: 15933 - DNA, 122 bp, Homo sapiens
  misc_feature (61)..(62): /note="This region represents a CpG dinucleotide"
  misc_feature (61)..(61): /note="Nucleotide may be methylated to form 5-methylcytosine"
accaaatggccttaccgccacagggcattcacacagcttccacatcctgggcctcaaggacgcctactgactgacaggtctctgtacaagctctggtctgtcctgatcctccttctcccttc

SEQ ID NO: 15934 - DNA, 122 bp, Homo sapiens
  misc_feature (61)..(62): /note="This region represents a CpG dinucleotide"
  misc_feature (61)..(61): /note="Nucleotide may be methylated to form 5-methylcytosine"
tcccccgcccatctataatccttggatcactgacgcagcatgatgtaatgggctttccatcgctctaatagtctggcctgtcagtgtggatttatctcaacatgtacagggacatggggcct

SEQ ID NO: 15935 - DNA, 122 bp, Homo sapiens
  misc_feature (61)..(62): /note="This region represents a CpG dinucleotide"
  misc_feature (61)..(61): /note="Nucleotide may be methylated to form 5-methylcytosine"
cctgagagcaagggaccaaatctcccaaacttagccacagaatatttttccccttcaaagcgtctttccccagaatgcactctgggcaatcctgcctgactgctgtctttcagttggctcag

SEQ ID NO: 15936 - DNA, 122 bp, Homo sapiens
  misc_feature (61)..(62): /note="This region represents a CpG dinucleotide"
  misc_feature (61)..(61): /note="Nucleotide may be methylated to form 5-methylcytosine"
tgtttgttttttagcacactttggagtcctaaaatgacaacctcaggtgctgaaacagagcgtagagagaaagaacgccaggactggtgactttcctcttctcttagcaactcgcctgtcca

SEQ ID NO: 15937 - DNA, 122 bp, Homo sapiens
  misc_feature (61)..(62): /note="This region represents a CpG dinucleotide"
  misc_feature (61)..(61): /note="Nucleotide may be methylated to form 5-methylcytosine"
caagtattgtttgttgttcctcctaagtatctttcaaatcaaccgctttgtctctccttacgtagacactattttgcaattcttgattgggcaatttagcagcctcctaaaccagtcactcc

SEQ ID NO: 15938 - DNA, 122 bp, Homo sapiens
  misc_feature (61)..(62): /note="This region represents a CpG dinucleotide"
  misc_feature (61)..(61): /note="Nucleotide may be methylated to form 5-methylcytosine"
aacttttaatatgtaaataagtgtgacagtagccagaatactccaaaccacttctcccctcgtaatccttaaacaaggaacctttgacgtaggcagaattccaggatgaggctgcaggaaac

SEQ ID NO: 15939 - DNA, 122 bp, Homo sapiens
  misc_feature (61)..(62): /note="This region represents a CpG dinucleotide"
  misc_feature (61)..(61): /note="Nucleotide may be methylated to form 5-methylcytosine"
tggacctgtgactcatgactcataacttacccagtcctgtggcccatactcagaggtagacgtagtgtatgaggatcatttttcacacccctatgattttatcctcaaccaatcagcagtac

SEQ ID NO: 15940 - DNA, 122 bp, Homo sapiens
  misc_feature (61)..(62): /note="This region represents a CpG dinucleotide"
  misc_feature (61)..(61): /note="Nucleotide may be methylated to form 5-methylcytosine"
ttgcagaataagaaaactaatttgtcaggtctccagtgacaactgaggggccacagaagccgccatggggttgacatattgaaatggcttgtttaatgaacactgagaaattaagacatcaa

SEQ ID NO: 15941 - DNA, 122 bp, Homo sapiens
  misc_feature (61)..(62): /note="This region represents a CpG dinucleotide"
  misc_feature (61)..(61): /note="Nucleotide may be methylated to form 5-methylcytosine"
ccatccacagaccatcagtgtatcttaaatgaaaagcaaactaagagggaagaagaagaacgcaaaaaataacaaggaatgaggaagctgacaacatacaatgatgaattcaactgctaacg

SEQ ID NO: 15942 - DNA, 122 bp, Homo sapiens
  misc_feature (61)..(62): /note="This region represents a CpG dinucleotide"
  misc_feature (61)..(61): /note="Nucleotide may be methylated to form 5-methylcytosine"
cattggcttcatctactagattatatgctccaccaaaacagagattaagtttgtctcacacgctatgctagccatagctcaggcatgtgatcatgttggtgcttagtaagagtctaataaat

SEQ ID NO: 15943 - DNA, 122 bp, Homo sapiens
  misc_feature (61)..(62): /note="This region represents a CpG dinucleotide"
  misc_feature (61)..(61): /note="Nucleotide may be methylated to form 5-methylcytosine"
cattaggcaatttagcacttacctgctgagttccaagtgctcatcttacctcatgtgatacggtaaatttggcaagtgctctgtactagtagtttggcatttaaggaaaatcaagctataat

SEQ ID NO: 15944 - DNA, 122 bp, Homo sapiens
  misc_feature (61)..(62): /note="This region represents a CpG dinucleotide"
  misc_feature (61)..(61): /note="Nucleotide may be methylated to form 5-methylcytosine"
aattgaggaagaaccagccccaatgtggtcatgccatatgacactgcagaacccctagttcggaatggagtcaaaactgaaaagataaggcaaccaggctgatttattgtctgggtccctag

SEQ ID NO: 15945 - DNA, 122 bp, Homo sapiens
  misc_feature (61)..(62): /note="This region represents a CpG dinucleotide"
  misc_feature (61)..(61): /note="Nucleotide may be methylated to form 5-methylcytosine"
tgattaattcatctcactggaaatctggttgcagaaactccctgatgtcacagacacaaacgtaaaaaccaatcaataatttaaatttttacctttcgacaagctcttttgatggcactgac

SEQ ID NO: 15946 - DNA, 122 bp, Homo sapiens
  misc_feature (61)..(62): /note="This region represents a CpG dinucleotide"
  misc_feature (61)..(61): /note="Nucleotide may be methylated to form 5-methylcytosine"
ttaaaaactcacactacctcgtaaggaaaatctacagtggcctattaatttttgcttttccgtgtaagttttagacccagattggcaagttcccccaaaataaacaagtcagtattttgact

SEQ ID NO: 15947 - DNA, 122 bp, Homo sapiens
  misc_feature (61)..(62): /note="This region represents a CpG dinucleotide"
  misc_feature (61)..(61): /note="Nucleotide may be methylated to form 5-methylcytosine"
gattcagcccagcaggctgtattcatgtgctgttcctctgtacacccagagctgtcttctcgctcatcatttattaatctttcccatgcaagtcatacgtgaatatatccttgtggtaaagt

SEQ ID NO: 15948 - DNA, 122 bp, Homo sapiens
  misc_feature (61)..(62): /note="This region represents a CpG dinucleotide"
  misc_feature (61)..(61): /note="Nucleotide may be methylated to form 5-methylcytosine"
tcagcggacagggcatgtggaactgttaaacgttaaaactctctgctctggggcccagcccgtgctctctaaataaaggtaggagcggaaagagtgttgttgccatcatgaaatcacacttc

SEQ ID NO: 15949 - DNA, 122 bp, Homo sapiens
  misc_feature (61)..(62): /note="This region represents a CpG dinucleotide"
  misc_feature (61)..(61): /note="Nucleotide may be methylated to form 5-methylcytosine"
ccctggtatccaggccagagagctgcagcaggaggggccatcacgctgctctctctccctcgcctgtggcttcataaactaaacagtacagcatcaaggggagcgggcatgcaggctgagct

SEQ ID NO: 15950 - DNA, 122 bp, Homo sapiens
  misc_feature (61)..(62): /note="This region represents a CpG dinucleotide"
  misc_feature (61)..(61): /note="Nucleotide may be methylated to form 5-methylcytosine"
gggaactgaggccaccgggaacctgctgccagcgccctcccatgtttgtcttcttggcagcgccatcagggcagtggccaagaacaccacccccggggcagccctgcctgcgggggagtggg

SEQ ID NO: 15951 - DNA, 122 bp, Homo sapiens
  misc_feature (61)..(62): /note="This region represents a CpG dinucleotide"
  misc_feature (61)..(61): /note="Nucleotide may be methylated to form 5-methylcytosine"
gtcttaaaaaaataataatacagatgacatctctaatcactatgcaatctaatttaaagacgagtgacaggactaggggaaattctctagcacagcaaaatttaaaaactcttgggtacaag

SEQ ID NO: 15952 - DNA, 122 bp, Homo sapiens
  misc_feature (61)..(62): /note="This region represents a CpG dinucleotide"
  misc_feature (61)..(61): /note="Nucleotide may be methylated to form 5-methylcytosine"
tgaaaggcagctaagggaacaggaaagatcactggcatctagtcctagttcaattatggacgaaccatgtgatcttgggcctcctggacctcagtttcctcatatgcaaatgctagggttgg

SEQ ID NO: 15953 - DNA, 122 bp, Homo sapiens
  misc_feature (61)..(62): /note="This region represents a CpG dinucleotide"
  misc_feature (61)..(61): /note="Nucleotide may be methylated to form 5-methylcytosine"
gagaagcagttatttttaattgcttaaaaagccgtttcattttagaaaattttaaatatacgaaaagagagagagaaatgttactataatgaactcccttgaatgttattacccagtgccaa

SEQ ID NO: 15954 - DNA, 122 bp, Homo sapiens
  misc_feature (61)..(62): /note="This region represents a CpG dinucleotide"
  misc_feature (61)..(61): /note="Nucleotide may be methylated to form 5-methylcytosine"
ggaagtgaaagggattgggcactttttgagcccattcaaagtcccaggcactctgttagacgctttccattcatctcctttaatcctttcaataaccctatgaaacgattggtgtcatctcc

SEQ ID NO: 15955 - DNA, 122 bp, Homo sapiens
  misc_feature (61)..(62): /note="This region represents a CpG dinucleotide"
  misc_feature (61)..(61): /note="Nucleotide may be methylated to form 5-methylcytosine"
cattttgtatctggctttgtaaattcagcataatgcagatgagtttcatccctgttgttacgtttaccaatagtttgttcctttttattccataggaatattatagtggtctgtaagcttca

SEQ ID NO: 15956 - DNA, 122 bp, Homo sapiens
  misc_feature (61)..(62): /note="This region represents a CpG dinucleotide"
  misc_feature (61)..(61): /note="Nucleotide may be methylated to form 5-methylcytosine"
tgtgtttgtttcctctttttgtatccaatagctgagattttcttgtcacaaagcaccttacgactttctattgtgattgggaaataagtaggaaaccttgggctgctcaagatttatgaaat

SEQ ID NO: 15957 - DNA, 122 bp, Homo sapiens
  misc_feature (61)..(62): /note="This region represents a CpG dinucleotide"
  misc_feature (61)..(61): /note="Nucleotide may be methylated to form 5-methylcytosine"
ttagctcctggtactattcacattttctgcagtccgttatgccacttttgcatcatgagacgctattccttatgttgatctatacctctgacagatgaaccatcccaaaagaagagtccata

SEQ ID NO: 15958 - DNA, 122 bp, Homo sapiens
  misc_feature (61)..(62): /note="This region represents a CpG dinucleotide"
  misc_feature (61)..(61): /note="Nucleotide may be methylated to form 5-methylcytosine"
caacaatcaatcttctctaaaccaggagctaatcctagaggaatgcaggaacttgttgcacgaagcattggttagtatgtgcttattaaacactcaatggttgcctaagacagacaggtaca

SEQ ID NO: 15959 - DNA, 122 bp, Homo sapiens
  misc_feature (61)..(62): /note="This region represents a CpG dinucleotide"
  misc_feature (61)..(61): /note="Nucleotide may be methylated to form 5-methylcytosine"
taaaaataaatctgaatatatcaacatgtacagtcaactaatttgctgacttcaaaatagcgtgatgaaactctttgcctgttaaacctattattgcccataatgaaagattccatatgcac

SEQ ID NO: 15960 - DNA, 122 bp, Homo sapiens
  misc_feature (61)..(62): /note="This region represents a CpG dinucleotide"
  misc_feature (61)..(61): /note="Nucleotide may be methylated to form 5-methylcytosine"
aaaataagtgcctcccacacaccctccctcccacctccagagtccccacattcccaggagcgggctggtctcattccatgatcctgcagggcctgctgggcgtgacatcaccagtcaccatg

SEQ ID NO: 15961 - DNA, 122 bp, Homo sapiens
  misc_feature (61)..(62): /note="This region represents a CpG dinucleotide"
  misc_feature (61)..(61): /note="Nucleotide may be methylated to form 5-methylcytosine"
ttcctcaacaaaaatcttatcaaatccaacccaattgagcatataaaagatattacactacgaccatacttagtaaccccaggtatgcaaggatggcttaacaggagaaaatccatacatgt

SEQ ID NO: 15962 - DNA, 122 bp, Homo sapiens
  misc_feature (61)..(62): /note="This region represents a CpG dinucleotide"
  misc_feature (61)..(61): /note="Nucleotide may be methylated to form 5-methylcytosine"
tttctgtcagcctggaaagttgatgactaaggcctttctagtcactcctgttcttggtttcgtgaaaagaatggtgcctgtattttcatcctcgagacagcaggatagcgtagacattgtgt

SEQ ID NO: 15963 - DNA, 122 bp, Homo sapiens
  misc_feature (61)..(62): /note="This region represents a CpG dinucleotide"
  misc_feature (61)..(61): /note="Nucleotide may be methylated to form 5-methylcytosine"
ggaggcggaggttgcagtgagctgtggtggtgccactgcactccagcctgggcaccagaacgagaccctgtctcaagaaagatgaaaaggaatatactggagattctgaaggcaatgaccac

SEQ ID NO: 15964 - DNA, 122 bp, Homo sapiens
  misc_feature (61)..(62): /note="This region represents a CpG dinucleotide"
  misc_feature (61)..(61): /note="Nucleotide may be methylated to form 5-methylcytosine"
aggggctggaatgacgcaatgggcctcttagaaatggcattactcaccatgcttgggaggcgtcctacaagcaggtagggttcccccacccaacaattttattttattttgtttgtttgttt

SEQ ID NO: 15965 - DNA, 122 bp, Homo sapiens
  misc_feature (61)..(62): /note="This region represents a CpG dinucleotide"
  misc_feature (61)..(61): /note="Nucleotide may be methylated to form 5-methylcytosine"
tcatgcaattgagtgctatgaaagtgcaatgagagaatataggaggagaacctaagtctacgggaaagcagaatatcacggaaacacccttggagaaagaatatttaagaactgaaaaatac

SEQ ID NO: 15966 - DNA, 122 bp, Homo sapiens
  misc_feature (61)..(62): /note="This region represents a CpG dinucleotide"
  misc_feature (61)..(61): /note="Nucleotide may be methylated to form 5-methylcytosine"
acagcatacgaaacagtccagccttaaagccagagctgtacacttgtcacctgcatatgacgacttcaattaagcccacagacctactggcaagtgaatgatttgggggccagaggaagggg

SEQ ID NO: 15967 - DNA, 122 bp, Homo sapiens
  misc_feature (61)..(62): /note="This region represents a CpG dinucleotide"
  misc_feature (61)..(61): /note="Nucleotide may be methylated to form 5-methylcytosine"
aaaggcagagaagaccccttcagaaggaaatacagggatatagggcataggttggttgaacgaacctaaagcaaatatttaaattaataagcaaaagacttggaagccaccgtattgttcat

SEQ ID NO: 15968 - DNA, 122 bp, Homo sapiens
  misc_feature (61)..(62): /note="This region represents a CpG dinucleotide"
  misc_feature (61)..(61): /note="Nucleotide may be methylated to form 5-methylcytosine"
ataaattgttgcacaatgctctggaattggcaacctattcctgcagctaatctcaaagggcggctagacgcttgctcatggttaagaaagagcacacatcatgccacaggtccctcacctca

SEQ ID NO: 15969 - DNA, 122 bp, Homo sapiens
  misc_feature (61)..(62): /note="This region represents a CpG dinucleotide"
  misc_feature (61)..(61): /note="Nucleotide may be methylated to form 5-methylcytosine"
tctttatttttgacattccaaattaatctgtaattagccatgatcagtcttaaacaaatgcgaaaagtggggaaaatgtctctgcattgccccccgactttgatttgtattacctgtttttt

SEQ ID NO: 15970 - DNA, 122 bp, Homo sapiens
  misc_feature (61)..(62): /note="This region represents a CpG dinucleotide"
  misc_feature (61)..(61): /note="Nucleotide may be methylated to form 5-methylcytosine"
acagtcagtttcactttcactgtttctaagtttacacacaccctaagtgtccaataataacgtaatcacattaagaaagaaaatattacatctttgaacaaatgctgatgatttcctttatt

SEQ ID NO: 15971 - DNA, 122 bp, Homo sapiens
  misc_feature (61)..(62): /note="This region represents a CpG dinucleotide"
  misc_feature (61)..(61): /note="Nucleotide may be methylated to form 5-methylcytosine"
atgtctctgacacctcagtgcactcctgaagggcagggactacgtccgcaccttccagaacgctaggacacagaccaggctctagaagcccggggaaaccccagatgcatgcatactgtttt

SEQ ID NO: 15972 - DNA, 122 bp, Homo sapiens
  misc_feature (61)..(62): /note="This region represents a CpG dinucleotide"
  misc_feature (61)..(61): /note="Nucleotide may be methylated to form 5-methylcytosine"
aacaaagaatttttattgcatccttagttacactgccagccaatgtggaggcagtgatcacggacaagacaaacatggttcttccctcgtgcagtttattgtccaatgggggaaatagtaaa

SEQ ID NO: 15973 - DNA, 122 bp, Homo sapiens
  misc_feature (61)..(62): /note="This region represents a CpG dinucleotide"
  misc_feature (61)..(61): /note="Nucleotide may be methylated to form 5-methylcytosine"
tgaacccaggaggcggaggttgcagtgagccaaggttgcgccattgcactccagcctggacgacaggagtgaaactgcattgcaaaaacagcaacaaaaaaaatccattcatctagtttgtc

SEQ ID NO: 15974 - DNA, 122 bp, Homo sapiens
  misc_feature (61)..(62): /note="This region represents a CpG dinucleotide"
  misc_feature (61)..(61): /note="Nucleotide may be methylated to form 5-methylcytosine"
agcaagctcccagttcgcacaggtcagaacgtgaaggatgcctttgcagggcggtgcttacggcccagggcacctggcttcacgcactaatgatcagagagccgcgtgcctccgtgcaaaac

SEQ ID NO: 15975 - DNA, 122 bp, Homo sapiens
  misc_feature (61)..(62): /note="This region represents a CpG dinucleotide"
  misc_feature (61)..(61): /note="Nucleotide may be methylated to form 5-methylcytosine"
aaataaataaataaataaaatatatatatatatatatatatacacacgcacacacacacacggtaaattgttgttgattatagtcattgtatagtgctatagaacactagaacttattcttc

SEQ ID NO: 15976 - DNA, 122 bp, Homo sapiens
  misc_feature (61)..(62): /note="This region represents a CpG dinucleotide"
  misc_feature (61)..(61): /note="Nucleotide may be methylated to form 5-methylcytosine"
tccaagaacctggtgagagcttatagtgtcttgccacagaaaattacaatgtcaaaaaaacggattttagaaagatacactgtttgaaacctaaaattccaaaataatgtaacagaaagatt

SEQ ID NO: 15977 - DNA, 122 bp, Homo sapiens
  misc_feature (61)..(62): /note="This region represents a CpG dinucleotide"
  misc_feature (61)..(61): /note="Nucleotide may be methylated to form 5-methylcytosine"
aacaatgtgaccactcctgcaacaacttcctcctggcgcccacaaaccgaggcgcagacacggaatgagctccgtctccatgaacttgccagaaaacaaaatagggggaagactattaatcc

SEQ ID NO: 15978 - DNA, 122 bp, Homo sapiens
  misc_feature (61)..(62): /note="This region represents a CpG dinucleotide"
  misc_feature (61)..(61): /note="Nucleotide may be methylated to form 5-methylcytosine"
agaagcggcagcagccggcgggttttgagcttccgagtcccgggtgcgcaagagtgtggacgccacccctccagggctgccaagcctccagggctgccaagccgagaggctccaagccaagg

SEQ ID NO: 15979 - DNA, 122 bp, Homo sapiens
  misc_feature (61)..(62): /note="This region represents a CpG dinucleotide"
  misc_feature (61)..(61): /note="Nucleotide may be methylated to form 5-methylcytosine"
acccagaacccacggtgagcacccggcaggaagtggccacagcaccatcactggaggccacgcggagtctgaggacagcagctttcccccctatgctgttgtggggactccaggctcagcct

SEQ ID NO: 15980 - DNA, 122 bp, Homo sapiens
  misc_feature (61)..(62): /note="This region represents a CpG dinucleotide"
  misc_feature (61)..(61): /note="Nucleotide may be methylated to form 5-methylcytosine"
tttgaattgctagagggcaggaactgactcatggtcatctttgtatctcccagcttctggcgaaagtagatgcctaataaatgtgtattgaacaaatggaaacaaacacaagtgtttctgtt

SEQ ID NO: 15981 - DNA, 122 bp, Homo sapiens
  misc_feature (61)..(62): /note="This region represents a CpG dinucleotide"
  misc_feature (61)..(61): /note="Nucleotide may be methylated to form 5-methylcytosine"
ccgcacctcggctgacatgttggacaggcagcaccatggcccctccccgggccgggggctcggggtcctcctgtcacagggcctggcagcccctgtccaggccctggagccctggctgcatg

SEQ ID NO: 15982 - DNA, 122 bp, Homo sapiens
  misc_feature (61)..(62): /note="This region represents a CpG dinucleotide"
  misc_feature (61)..(61): /note="Nucleotide may be methylated to form 5-methylcytosine"
ttgctcatgcctctgaggttatggtaatattttatccatctttcttcatgaagacacagtcgctgctgctattgacaaccggaggccagcactgaggagtgacgtgggcagggggccagggg

SEQ ID NO: 15983 - DNA, 122 bp, Homo sapiens
  misc_feature (61)..(62): /note="This region represents a CpG dinucleotide"
  misc_feature (61)..(61): /note="Nucleotide may be methylated to form 5-methylcytosine"
gaacttctgctgggtgaggatgaaaaggcctcttttcacagtagcaaagcagagctagcacgtgagatcagccccatatgagtaatgaaggagtgacaccaggcttcatgcctcatcggcca

SEQ ID NO: 15984 - DNA, 122 bp, Homo sapiens
  misc_feature (61)..(62): /note="This region represents a CpG dinucleotide"
  misc_feature (61)..(61): /note="Nucleotide may be methylated to form 5-methylcytosine"
atatgtgacaataacagatgggtgagccacatgtccctgaaggcccctccagggcaagggcgggagagccccacatcacaggttcgtgccacgccacagacatgggaacagaggaaggttcc

SEQ ID NO: 15985 - DNA, 122 bp, Homo sapiens
  misc_feature (61)..(62): /note="This region represents a CpG dinucleotide"
  misc_feature (61)..(61): /note="Nucleotide may be methylated to form 5-methylcytosine"
ttcccaaggtgtaggtgtcagacatttgtttcttcattaccgctcacttcctaaagagtacgtagattcacagctattttgcatgttttctagacggtccaaatgtcatcactatcgcctag

SEQ ID NO: 15986 - DNA, 122 bp, Homo sapiens
  misc_feature (61)..(62): /note="This region represents a CpG dinucleotide"
  misc_feature (61)..(61): /note="Nucleotide may be methylated to form 5-methylcytosine"
ttgggttagagttctctcttctactcctacagggacaagacacagatcccttctgagctccgagttttacctttacaaggagaaggctggctgagatgcctctggggctgcctccagcttca

SEQ ID NO: 15987 - DNA, 122 bp, Homo sapiens
  misc_feature (61)..(62): /note="This region represents a CpG dinucleotide"
  misc_feature (61)..(61): /note="Nucleotide may be methylated to form 5-methylcytosine"
aaataagcagcagatgcagcaaggcctctgcagatttaaaaaaaaaaaaaaagcatgttgcgtcagagcacatgtctccccaaagggtacgtgtacgaacagcatgcagacttgtgaactga

SEQ ID NO: 15988 - DNA, 122 bp, Homo sapiens
  misc_feature (61)..(62): /note="This region represents a CpG dinucleotide"
  misc_feature (61)..(61): /note="Nucleotide may be methylated to form 5-methylcytosine"
tggcagtacttgcattgttttcagaatctagtgcccaggttttcctactgtttttcttgccgtctttaagacagaatttctatttacatccttgtcgatttttgtatccctaaataaattat

SEQ ID NO: 15989 - DNA, 122 bp, Homo sapiens
  misc_feature (61)..(62): /note="This region represents a CpG dinucleotide"
  misc_feature (61)..(61): /note="Nucleotide may be methylated to form 5-methylcytosine"
ataaaaggaggggaacaggaactttactatgaggaagctgggtgtggcacatagctcaggcgcctgtggccatcttaccacagcataattaacagtcaacctgatatgtgaagagggcatgc

SEQ ID NO: 15990 - DNA, 122 bp, Homo sapiens
  misc_feature (61)..(62): /note="This region represents a CpG dinucleotide"
  misc_feature (61)..(61): /note="Nucleotide may be methylated to form 5-methylcytosine"
aagttgtgaaaagaaaaaagagcatgcgggttatagctgggtcatgcagaccaagaaaaacggaatttcatgggttctggttgtccagttgctatagttgctttgaaaaccagaagtagctg

SEQ ID NO: 15991 - DNA, 122 bp, Homo sapiens
  misc_feature (61)..(62): /note="This region represents a CpG dinucleotide"
  misc_feature (61)..(61): /note="Nucleotide may be methylated to form 5-methylcytosine"
tggtgcccagggaggagtccagctctgctgtctgctgagcaagatggctcacatgggctccgtgggccgagacttgagcctccagcaggtcatgcctctgcagcagctccaccacttctgcc

SEQ ID NO: 15992 - DNA, 122 bp, Homo sapiens
  misc_feature (61)..(62): /note="This region represents a CpG dinucleotide"
  misc_feature (61)..(61): /note="Nucleotide may be methylated to form 5-methylcytosine"
cagaaggccaagtccaggggtggacggcggacacagagcccttggcagcctccaggctcacgtggggcacacctccgactgcaccgcatcccggagagctgcatgctctgctcactgaggtg

SEQ ID NO: 15993 - DNA, 122 bp, Homo sapiens
  misc_feature (61)..(62): /note="This region represents a CpG dinucleotide"
  misc_feature (61)..(61): /note="Nucleotide may be methylated to form 5-methylcytosine"
ttccacttctcatttcagaattcatgaatcttgtctccttaatgtttttctgtcatggcacggtattaagagtttgtcttcagagtatggtctcatcatccaaatcaactttataagccaca

SEQ ID NO: 15994 - DNA, 122 bp, Homo sapiens
  misc_feature (61)..(62): /note="This region represents a CpG dinucleotide"
  misc_feature (61)..(61): /note="Nucleotide may be methylated to form 5-methylcytosine"
tttcattcaatgtctactatattccagtccttgtgcacagaatattctgaggatattaaacgaataccttctttagcatttctagtcttaaggaatcacactatcctttaatagaaaattaa

SEQ ID NO: 15995 - DNA, 122 bp, Homo sapiens
  misc_feature (61)..(62): /note="This region represents a CpG dinucleotide"
  misc_feature (61)..(61): /note="Nucleotide may be methylated to form 5-methylcytosine"
tttcagcaggaaactgtgagctataaaaaactgacatagcagatttgggtaaaaaaattccggaagcaaaagaatatgagaccaaatttttaaaaattgggctagtagattagttataattg

SEQ ID NO: 15996 - DNA, 122 bp, Homo sapiens
  misc_feature (61)..(62): /note="This region represents a CpG dinucleotide"
  misc_feature (61)..(61): /note="Nucleotide may be methylated to form 5-methylcytosine"
gtcccagggtcatgagggcagagcatcctttttagggcgagctctctacaagcaccaggtcgccacagcagctcctctgcggctatgcattcgccattcttccctgtgtcagccgtggtgct

SEQ ID NO: 15997 - DNA, 122 bp, Homo sapiens
  misc_feature (61)..(62): /note="This region represents a CpG dinucleotide"
  misc_feature (61)..(61): /note="Nucleotide may be methylated to form 5-methylcytosine"
tgttccattttaacaagcacagaactataaaagaagatgctccttacaaaacagcaaggacgcccaaggagtgttcttgtacatccagagccccgagcacagtgtccagatgggataagttc

SEQ ID NO: 15998 - DNA, 122 bp, Homo sapiens
  misc_feature (61)..(62): /note="This region represents a CpG dinucleotide"
  misc_feature (61)..(61): /note="Nucleotide may be methylated to form 5-methylcytosine"
aaggcctagggaagttttcacagcctaaaacacagtcagtatacttactgttcttagaaacgtaacactccccgacgctgagatgcagacagctaagatgccagggattcaagtatgttatt

SEQ ID NO: 15999 - DNA, 122 bp, Homo sapiens
  misc_feature (61)..(62): /note="This region represents a CpG dinucleotide"
  misc_feature (61)..(61): /note="Nucleotide may be methylated to form 5-methylcytosine"
ccacctctgcctaaatcataaaaagatcgaggagtgcaatgaacttcaggaatcatgcaccgtttccctgaagcctgtccaggaacctaacttctggacccagaaacttctgcaaagacaga

SEQ ID NO: 16000 - DNA, 122 bp, Homo sapiens
  misc_feature (61)..(62): /note="This region represents a CpG dinucleotide"
  misc_feature (61)..(61): /note="Nucleotide may be methylated to form 5-methylcytosine"
tgcattaaattgcctgattgtggctccctgggtggacttagttgaattgttattttacgtcgtgcctttttcccctacaggttaagattctgtgtcaccagttgctggtccaggtttgtgac

SEQ ID NO: 16001 - DNA, 122 bp, Homo sapiens
  misc_feature (61)..(62): /note="This region represents a CpG dinucleotide"
  misc_feature (61)..(61): /note="Nucleotide may be methylated to form 5-methylcytosine"
taaacctttcaaccatggttaattaacgactttccttactgttcatataggtcataccaccgtctgtcctttcctgtttttaatgttaaaaacaggaagccacttccttgctgtttctatgc

SEQ ID NO: 16002 - DNA, 122 bp, Homo sapiens
  misc_feature (61)..(62): /note="This region represents a CpG dinucleotide"
  misc_feature (61)..(61): /note="Nucleotide may be methylated to form 5-methylcytosine"
atttcaaacctgactcctgagtcagcagcaactccaaacaactccagattaatagcttttcggcttattgcagtgattcaacagggccatctttagggttttagaacatggccaagtcatta

SEQ ID NO: 16003 - DNA, 122 bp, Homo sapiens
  misc_feature (61)..(62): /note="This region represents a CpG dinucleotide"
  misc_feature (61)..(61): /note="Nucleotide may be methylated to form 5-methylcytosine"
ggaacgattagagttttctgaaaaacagtgtgaattacaaccagctgctccctggctcagcgagtctcccatgctgtgccattttgttaagcctgataacaatagttattttgccccattga

SEQ ID NO: 16004 - DNA, 122 bp, Homo sapiens
  misc_feature (61)..(62): /note="This region represents a CpG dinucleotide"
  misc_feature (61)..(61): /note="Nucleotide may be methylated to form 5-methylcytosine"
gccttttttttttttttttttaagcctgccgggacatttagataagttgagcctccaacccgtggccccaagacatcaaaaggcgcggggtccagtaatgctggaggcagccatcactaagc

SEQ ID NO: 16005 - DNA, 122 bp, Homo sapiens
  misc_feature (61)..(62): /note="This region represents a CpG dinucleotide"
  misc_feature (61)..(61): /note="Nucleotide may be methylated to form 5-methylcytosine"
tcaaaggactgtgtcaaatctcagaactgttacttttacactgtgtgacctcagaccattcgccaaacttctctagtttccttacctttaaaatggaaagaatgcaaagacatgtacacaac

SEQ ID NO: 16006 - DNA, 122 bp, Homo sapiens
  misc_feature (61)..(62): /note="This region represents a CpG dinucleotide"
  misc_feature (61)..(61): /note="Nucleotide may be methylated to form 5-methylcytosine"
attttcacattatgaagctacacaattccaaaatacacatgctgaggctctttttaagtccgaattgtctagtaattacaaaaaagtgaagagtttacagatatacaaggaaataaaggcga

SEQ ID NO: 16007 - DNA, 122 bp, Homo sapiens
  misc_feature (61)..(62): /note="This region represents a CpG dinucleotide"
  misc_feature (61)..(61): /note="Nucleotide may be methylated to form 5-methylcytosine"
tcaaagagttccaccatactcctgggaatccagaaaaccacatggatgtgtagagttgtgcgcatgcccagaaaggacctgagaaggccctaatctcacctcttgctaacctggaggctgta

SEQ ID NO: 16008 - DNA, 122 bp, Homo sapiens
  misc_feature (61)..(62): /note="This region represents a CpG dinucleotide"
  misc_feature (61)..(61): /note="Nucleotide may be methylated to form 5-methylcytosine"
aataataataatgataatcataataaatccctgtaaaatagacagaggtatgccttatgccgttttctcttgaagctgaggaaataagacaaaagagatcaaaatgttttttctaagagccc

SEQ ID NO: 16009 - DNA, 122 bp, Homo sapiens
  misc_feature (61)..(62): /note="This region represents a CpG dinucleotide"
  misc_feature (61)..(61): /note="Nucleotide may be methylated to form 5-methylcytosine"
ttggagcagcaaggagacatgagagagaaagggctggaggatgcatttataaaagacagccgagaaggggaatggctatttattgctgttgcaaaggtctgtctcttaaaacccgagtcgaa

SEQ ID NO: 16010 - DNA, 122 bp, Homo sapiens
  misc_feature (61)..(62): /note="This region represents a CpG dinucleotide"
  misc_feature (61)..(61): /note="Nucleotide may be methylated to form 5-methylcytosine"
aagagtatcagttcatgataagtgctatgtagacgattatagggcaccttaaacttagatcgggtgctacagagacaattatataatagggcacctactctgaaaagatcactctagggtga

SEQ ID NO: 16011 - DNA, 122 bp, Homo sapiens
  misc_feature (61)..(62): /note="This region represents a CpG dinucleotide"
  misc_feature (61)..(61): /note="Nucleotide may be methylated to form 5-methylcytosine"
cctgcagtgcttagaccaccataactaaaaattgtccagctccaaatgtcaatagtgccacggatgagagaccctggctaaggctaagtgctagcataacagtattggtgacccacatgtct

SEQ ID NO: 16012 - DNA, 122 bp, Homo sapiens
  misc_feature (61)..(62): /note="This region represents a CpG dinucleotide"
  misc_feature (61)..(61): /note="Nucleotide may be methylated to form 5-methylcytosine"
tttaattgtaggcctcggcaagccacaaaagctttgttgccacacatggtcgtggtgagtcgactgtttgaaaagctgcttgcacagagccagacacaagcgaatgcccagtgggggctgtc

SEQ ID NO: 16013 - DNA, 122 bp, Homo sapiens
  misc_feature (61)..(62): /note="This region represents a CpG dinucleotide"
  misc_feature (61)..(61): /note="Nucleotide may be methylated to form 5-methylcytosine"
aaagaatgtttgaggccagatcacctacagaagttcaacacgtttgtcccatatagatgacgttaagctgttctgccttcatgttaccctcagcacatgtccccaggcacagttgctgcatt

SEQ ID NO: 16014 - DNA, 122 bp, Homo sapiens
  misc_feature (61)..(62): /note="This region represents a CpG dinucleotide"
  misc_feature (61)..(61): /note="Nucleotide may be methylated to form 5-methylcytosine"
aacctcacatcatctgtttcccattaatctgtcacagctcccaggagacagatcccaaggcgtgcatgtgtctagaaggcccttaggtctcggctgagggagatttcttaggcaggtcagcc

SEQ ID NO: 16015 - DNA, 122 bp, Homo sapiens
  misc_feature (61)..(62): /note="This region represents a CpG dinucleotide"
  misc_feature (61)..(61): /note="Nucleotide may be methylated to form 5-methylcytosine"
attcactacttttagaccaaccaagaagaagaatagttttgaccagaattggaatttgaacgctcccccaagttgagtatgtctgtgtgctagtggagtggggaagggttgagtcacaatcc

SEQ ID NO: 16016 - DNA, 122 bp, Homo sapiens
  misc_feature (61)..(62): /note="This region represents a CpG dinucleotide"
  misc_feature (61)..(61): /note="Nucleotide may be methylated to form 5-methylcytosine"
aaagggaatctctgcattttgcttgtcagtcctgaggccagtgacagctgtgcttttctacgttactaaaagaaggtttggcatcaatgtttaaaaaaatataaaaaagtgcatctctcatc

SEQ ID NO: 16017 - DNA, 122 bp, Homo sapiens
  misc_feature (61)..(62): /note="This region represents a CpG dinucleotide"
  misc_feature (61)..(61): /note="Nucleotide may be methylated to form 5-methylcytosine"
cagagggcttgtgactcaaatgaagcattaagaaaatgagaaatcaccatgagtcatcaacgattagggttactgaaaaataactgaaactaagaatgttaaatccacagatgctaaaggtc

SEQ ID NO: 16018 - DNA, 122 bp, Homo sapiens
  misc_feature (61)..(62): /note="This region represents a CpG dinucleotide"
  misc_feature (61)..(61): /note="Nucleotide may be methylated to form 5-methylcytosine"
gagggggctccatgtgttgtactcatgttctaggctcagtactgatggctttacatgaatcgcacaactgaaaactcataatatttcctcatggttttatagaaactgagcacagaaagact

SEQ ID NO: 16019 - DNA, 122 bp, Homo sapiens
  misc_feature (61)..(62): /note="This region represents a CpG dinucleotide"
  misc_feature (61)..(61): /note="Nucleotide may be methylated to form 5-methylcytosine"
tggaatcgggacgctgcctatcccgtcattcttgtcatgcctatttttggtggttggaatcgcatgagcagcaaacacctgttgttgattttgcaggagaggcatggagagcaggtgcagca

SEQ ID NO: 16020 - DNA, 122 bp, Homo sapiens
  misc_feature (61)..(62): /note="This region represents a CpG dinucleotide"
  misc_feature (61)..(61): /note="Nucleotide may be methylated to form 5-methylcytosine"
cctcagctctgtctccttgagcttggggctgggttgggttttataagcatagggtaatgacgcatgatcggattagattttgcgatgaggtgatgctgggatgctcatctgactggaccctg

SEQ ID NO: 16021 - DNA, 122 bp, Homo sapiens
  misc_feature (61)..(62): /note="This region represents a CpG dinucleotide"
  misc_feature (61)..(61): /note="Nucleotide may be methylated to form 5-methylcytosine"
aaaccatgaggtttcccagaaaggctgccatttattaaaatgagttaattaatagactcacggactctttcagggtctagtctgaattcactcacaggaaactaaacagactaaactctttt

SEQ ID NO: 16022 - DNA, 122 bp, Homo sapiens
  misc_feature (61)..(62): /note="This region represents a CpG dinucleotide"
  misc_feature (61)..(61): /note="Nucleotide may be methylated to form 5-methylcytosine"
aggcaagttgccagtgattcaaactcagcaggtttgtgggtgattttttccttactgttacgtttgtggagtaggaaaaactagaaaggaaaaaaaaatcccaaaggttgaaaaactgtatc

SEQ ID NO: 16023 - DNA, 122 bp, Homo sapiens
  misc_feature (61)..(62): /note="This region represents a CpG dinucleotide"
  misc_feature (61)..(61): /note="Nucleotide may be methylated to form 5-methylcytosine"
gaaggaatgaatgagtaaggaaaaaagggaatctggtgtcatgtgagacatgtgaagccacgaagggccttaaatcccagccctgtagccatctattggcagagccttaagacctcaaacca

SEQ ID NO: 16024 - DNA, 122 bp, Homo sapiens
  misc_feature (61)..(62): /note="This region represents a CpG dinucleotide"
  misc_feature (61)..(61): /note="Nucleotide may be methylated to form 5-methylcytosine"
aatgagacagtaagcctaagtgttgtgaagattgacagaacctgtgtgaggaacttagaacggggcccgcatctactgggtgtacaccatcagcatttcatcactgcagctaatatctaccc

SEQ ID NO: 16025 - DNA, 122 bp, Homo sapiens
  misc_feature (61)..(62): /note="This region represents a CpG dinucleotide"
  misc_feature (61)..(61): /note="Nucleotide may be methylated to form 5-methylcytosine"
ttagctaacagcagctggaaactgagttatccctacatggatcattgatgcataagcttacgtcattaaaacttctcactaccagtggctgaaacttataactacttcatggctatcctagt

SEQ ID NO: 16026 - DNA, 122 bp, Homo sapiens
  misc_feature (61)..(62): /note="This region represents a CpG dinucleotide"
  misc_feature (61)..(61): /note="Nucleotide may be methylated to form 5-methylcytosine"
aaaaaaataaaatgtcctttagttcaagccaaacttctgttggtgccacttcagtgggcacgtgtgctaggagatgggtcctccatgccgagagtcactcctgccggcttctgcaagagagc

SEQ ID NO: 16027 - DNA, 122 bp, Homo sapiens
  misc_feature (61)..(62): /note="This region represents a CpG dinucleotide"
  misc_feature (61)..(61): /note="Nucleotide may be methylated to form 5-methylcytosine"
ccaacagccccgccggccactggcccaggactcagcgtgccgttcctccaggacgcagaccggggctccctaccagccttgagtgagagaccacaagcagcctctgaagtcatcttcctctc

SEQ ID NO: 16028 - DNA, 122 bp, Homo sapiens
  misc_feature (61)..(62): /note="This region represents a CpG dinucleotide"
  misc_feature (61)..(61): /note="Nucleotide may be methylated to form 5-methylcytosine"
ggcgaggttgcttggctggtacttacagagcccctgctgtaagcttttgatctgtctgctcgcctcttcgtcatgctgatagtcagtccagagcccagaaatggaagctgaggtctctcatc

SEQ ID NO: 16029 - DNA, 122 bp, Homo sapiens
  misc_feature (61)..(62): /note="This region represents a CpG dinucleotide"
  misc_feature (61)..(61): /note="Nucleotide may be methylated to form 5-methylcytosine"
tatcttctggatcaccacctgaagactaatagcactatgtctagaattcttgtcatgggccgtgttagtaaaacagtaataaaagtgatagagtagttcactattttatgtcctgtggctgg

SEQ ID NO: 16030 - DNA, 122 bp, Homo sapiens
  misc_feature (61)..(62): /note="This region represents a CpG dinucleotide"
  misc_feature (61)..(61): /note="Nucleotide may be methylated to form 5-methylcytosine"
aaatgacagatcattaacaagtgaaaattgaaagccgagatgaaaacctcccccaggaaacgtagtcaggctgctccattctccagagatgtaaatcaataaaataattccagagagcttaa

SEQ ID NO: 16031 - DNA, 122 bp, Homo sapiens
  misc_feature (61)..(62): /note="This region represents a CpG dinucleotide"
  misc_feature (61)..(61): /note="Nucleotide may be methylated to form 5-methylcytosine"
agcgagactccgtctcaaaaacaaccaaagcaccaaaacttctggttaatttaattgattcgtcggattcagatgctggaaagtgggcctgggatatacagtaagcgatcaataataacact

SEQ ID NO: 16032 - DNA, 122 bp, Homo sapiens
  misc_feature (61)..(62): /note="This region represents a CpG dinucleotide"
  misc_feature (61)..(61): /note="Nucleotide may be methylated to form 5-methylcytosine"
gacaaacaaacatctgctctttcattacacaaagaaatttccaagcacctccctccccctcgctcctgggatgtgtatgcttgtttattttgcaactgtatttagtcatggaatttccagaa

SEQ ID NO: 16033 - DNA, 122 bp, Homo sapiens
  misc_feature (61)..(62): /note="This region represents a CpG dinucleotide"
  misc_feature (61)..(61): /note="Nucleotide may be methylated to form 5-methylcytosine"
gcatagtccccacccaaacagcttttgatctatttctgcatttgaaaaacctcagaatggcgtttgctaaatccaaaagcctccaacttcagtattacacacacacacacaaaactcacaga

SEQ ID NO: 16034 - DNA, 122 bp, Homo sapiens
  misc_feature (61)..(62): /note="This region represents a CpG dinucleotide"
  misc_feature (61)..(61): /note="Nucleotide may be methylated to form 5-methylcytosine"
ttgaataactatgatttattgaattcttaccatgttctaagttctttatgtatactgtttcgtttaatcttcacaacaattctaggagtcaggttcaattgttattgccatttgatagatga

SEQ ID NO: 16035 - DNA, 122 bp, Homo sapiens
  misc_feature (61)..(62): /note="This region represents a CpG dinucleotide"
  misc_feature (61)..(61): /note="Nucleotide may be methylated to form 5-methylcytosine"
gcaaaggggcataattgccatctagtggcacaaacccacaagtgtgagctccattcttggcgtctgtagtctcttcaggtaagaaattgttatggcctatacaacctcctctgtcctcttcc

SEQ ID NO: 16036 - DNA, 122 bp, Homo sapiens
  misc_feature (61)..(62): /note="This region represents a CpG dinucleotide"
  misc_feature (61)..(61): /note="Nucleotide may be methylated to form 5-methylcytosine"
caagccgggaaaagtcagcagttgcccccttgaagctggggaacagtcatgttctgacttcgctggcactgccacaaaccatccttggctaaagtcagccagtgactcataatagtgttcaa

SEQ ID NO: 16037 - DNA, 122 bp, Homo sapiens
  misc_feature (61)..(62): /note="This region represents a CpG dinucleotide"
  misc_feature (61)..(61): /note="Nucleotide may be methylated to form 5-methylcytosine"
ggcttcagcctccaaggaggtatagcagtggccaggtctcatcctgtgctagtccagggccgtgctcaggaatcacatttgttaccgtgctgtgagtctagggagagggccagagggcacca

SEQ ID NO: 16038 - DNA, 122 bp, Homo sapiens
  misc_feature (61)..(62): /note="This region represents a CpG dinucleotide"
  misc_feature (61)..(61): /note="Nucleotide may be methylated to form 5-methylcytosine"
tataaactgaatacaaatataagggagcatcagccggctcattcaattagtcactatatacgctcctaagaaaggtaatgagaaaaattatggaatgacctggctgaatacttgaacccaca

SEQ ID NO: 16039 - DNA, 122 bp, Homo sapiens
  misc_feature (61)..(62): /note="This region represents a CpG dinucleotide"
  misc_feature (61)..(61): /note="Nucleotide may be methylated to form 5-methylcytosine"
gtcagtgtgtggctcgactcaagacctaagcattggaaatgtgttccaccagagtagctacgggaagaaagggttcaccgctcttgtgacataggtcagagtaactcagagagagtttcagt

SEQ ID NO: 16040 - DNA, 122 bp, Homo sapiens
  misc_feature (61)..(62): /note="This region represents a CpG dinucleotide"
  misc_feature (61)..(61): /note="Nucleotide may be methylated to form 5-methylcytosine"
catggatattgaacaatccaatcctcactctccatgcagctggaaaagcctataaagtgacggcgagaccttgaaagatggaaaggtttaaatggccatctctaactcagcaagagatgaat

SEQ ID NO: 16041 - DNA, 122 bp, Homo sapiens
  misc_feature (61)..(62): /note="This region represents a CpG dinucleotide"
  misc_feature (61)..(61): /note="Nucleotide may be methylated to form 5-methylcytosine"
acatatctggttccaaaaccaggactcttttcattacagcagtggttctcaacagagttgcgattttgccccccagggaatatttcacaatgtctggagacatttatgactgtcaggattgg

SEQ ID NO: 16042 - DNA, 122 bp, Homo sapiens
  misc_feature (61)..(62): /note="This region represents a CpG dinucleotide"
  misc_feature (61)..(61): /note="Nucleotide may be methylated to form 5-methylcytosine"
cagtgactagtgtgttttagtcactcaaccaaatggtagcacagtgatcctcactgtcctcgtttaggtgacaacagacgttagaggaatgagttcatggtctcgattttcaaagtgtggtc

SEQ ID NO: 16043 - DNA, 122 bp, Homo sapiens
  misc_feature (61)..(62): /note="This region represents a CpG dinucleotide"
  misc_feature (61)..(61): /note="Nucleotide may be methylated to form 5-methylcytosine"
aaaactgactgactcataagtgaatgttcacaaaggtgcaagaataaagcaattcctctgcgtaatctaggagggtggatgattaactgaccaacatctgctaaggccagtctagccttaaa

SEQ ID NO: 16044 - DNA, 122 bp, Homo sapiens
  misc_feature (61)..(62): /note="This region represents a CpG dinucleotide"
  misc_feature (61)..(61): /note="Nucleotide may be methylated to form 5-methylcytosine"
ggccctaagaaagcatagtcacctccttgacagtggacaacaagagagtacatcctgaatcgtcctcaagtttgtgtcccagatatgtagccaattttctcttacctattttcccatataaa

SEQ ID NO: 16045 - DNA, 122 bp, Homo sapiens
  misc_feature (61)..(62): /note="This region represents a CpG dinucleotide"
  misc_feature (61)..(61): /note="Nucleotide may be methylated to form 5-methylcytosine"
attatgttacatttatataagattctgtcttgctagcagactgctctagagactccttaccggcttgatgaagttacaatagcagctgtgttaggaaagcctgtgtgatgagtaactgcagg

SEQ ID NO: 16046 - DNA, 122 bp, Homo sapiens
  misc_feature (61)..(62): /note="This region represents a CpG dinucleotide"
  misc_feature (61)..(61): /note="Nucleotide may be methylated to form 5-methylcytosine"
atgaagttgccatcattcccatgggcaatggcagttcaattattttacatgtgaatatatcgaatatcaattgctactctgccctttatatgatacagtggacatactttcaataacttttc

SEQ ID NO: 16047 - DNA, 122 bp, Homo sapiens
  misc_feature (61)..(62): /note="This region represents a CpG dinucleotide"
  misc_feature (61)..(61): /note="Nucleotide may be methylated to form 5-methylcytosine"
gccctgggtgtttcctgtttctggcacagcatggcaactgtcccagcaaggggcagcccacgggagctcctttgcacacaagccctgctgctcctaaaggctctggacacacaggagacctc

SEQ ID NO: 16048 - DNA, 122 bp, Homo sapiens
  misc_feature (61)..(62): /note="This region represents a CpG dinucleotide"
  misc_feature (61)..(61): /note="Nucleotide may be methylated to form 5-methylcytosine"
tttgctttttaaaaagttcccttttctactcagtctgaggaaaatatcaagtaacgaaaacgtctaagtatgtttgcaacactagacactgagagtcataaggatgacaaactttctgcatt

SEQ ID NO: 16049 - DNA, 122 bp, Homo sapiens
  misc_feature (61)..(62): /note="This region represents a CpG dinucleotide"
  misc_feature (61)..(61): /note="Nucleotide may be methylated to form 5-methylcytosine"
aggccgggacgcgatgagagatttacaaggtgtcctttcaaaaagaattcccagtggagacgaggctgaaacgtcttctttacaattacaaccaaaataattagaaaagcgcaaagtacatt

SEQ ID NO: 16050 - DNA, 122 bp, Homo sapiens
  misc_feature (61)..(62): /note="This region represents a CpG dinucleotide"
  misc_feature (61)..(61): /note="Nucleotide may be methylated to form 5-methylcytosine"
tccagccaacaaccacatgagtaagcttagtagccaaccttccagccccagctgagccatcggatgactgtagccacagatggcagcttgactgccatctcctgaaagatgatgagtcagaa

SEQ ID NO: 16051 - DNA, 122 bp, Homo sapiens
  misc_feature (61)..(62): /note="This region represents a CpG dinucleotide"
  misc_feature (61)..(61): /note="Nucleotide may be methylated to form 5-methylcytosine"
ttacatgcacataaaatcgtatttccttctagtaacaaagtgatttttctagaggcagctcgtgtatacatatctgtgatcgtttatgttctgagatggcgagaagccattcttcctgcaaa

SEQ ID NO: 16052 - DNA, 122 bp, Homo sapiens
  misc_feature (61)..(62): /note="This region represents a CpG dinucleotide"
  misc_feature (61)..(61): /note="Nucleotide may be methylated to form 5-methylcytosine"
tgtttcaacacctaataaattgacagtgactaatttcttcacaggtaaactcaagttttacgaaaagaaaatattccccacataaaattattaaacagacatgagtccataccactagggta

SEQ ID NO: 16053 - DNA, 122 bp, Homo sapiens
  misc_feature (61)..(62): /note="This region represents a CpG dinucleotide"
  misc_feature (61)..(61): /note="Nucleotide may be methylated to form 5-methylcytosine"
agcacttttgttgagctatccttcccaggctatttaacctcacccccgtggggaggggggcgagcgggtatttgacccttctaaaagcctcaagtgaagggaacaaagctgtcaaaatgaca

SEQ ID NO: 16054 - DNA, 122 bp, Homo sapiens
  misc_feature (61)..(62): /note="This region represents a CpG dinucleotide"
  misc_feature (61)..(61): /note="Nucleotide may be methylated to form 5-methylcytosine"
tttgatggtcttcccttcaagaggtggagcttaattcttcttagtatgggctggacctggcgacatgcttctaaggattgtaattcttcagcagaagtgatggtttgtgacactgaaaactt

SEQ ID NO: 16055 - DNA, 122 bp, Homo sapiens
  misc_feature (61)..(62): /note="This region represents a CpG dinucleotide"
  misc_feature (61)..(61): /note="Nucleotide may be methylated to form 5-methylcytosine"
gtgaccgtccagtgacccctgcagtagcgctgtttgccagagcctgtaccaggtggatggcgtcagtgtgggtgctggaagtggcaacagcctcggccttgaggccagggtgtggtcctcga

SEQ ID NO: 16056 - DNA, 122 bp, Homo sapiens
  misc_feature (61)..(62): /note="This region represents a CpG dinucleotide"
  misc_feature (61)..(61): /note="Nucleotide may be methylated to form 5-methylcytosine"
ctagtctctataggtctttagagcagtcaggaagagatctccatgccctgcacggttaggcgggaagtagcttcagcaggaagtagcttcagaagatgagatctttggacctttctccttaa

SEQ ID NO: 16057 - DNA, 122 bp, Homo sapiens
  misc_feature (61)..(62): /note="This region represents a CpG dinucleotide"
  misc_feature (61)..(61): /note="Nucleotide may be methylated to form 5-methylcytosine"
aatcagcctcctggagtttcctcctcctctctgcgggtggaaaccccaagtcagctcaagcgcctggcattccatggaaaatgtgtgtctttattgtccatggcaaggcaccaacagccgtt

SEQ ID NO: 16058 - DNA, 122 bp, Homo sapiens
  misc_feature (61)..(62): /note="This region represents a CpG dinucleotide"
  misc_feature (61)..(61): /note="Nucleotide may be methylated to form 5-methylcytosine"
aatgtcctgtacctgcttgacaccatgactcagtaagcaatctcaaatgaaaattaataccgtctatagtataatcttagttataagtaacagctgatcgtgtttagaaaatgaaaacctca

SEQ ID NO: 16059 - DNA, 122 bp, Homo sapiens
  misc_feature (61)..(62): /note="This region represents a CpG dinucleotide"
  misc_feature (61)..(61): /note="Nucleotide may be methylated to form 5-methylcytosine"
tcaggccccaagagattaagtttctttcatcagcaaccatggcaagatctgtttgccttgcgcacttggtcttttacgcattatggacagctgaagttcatgcaggccttacggtgtgcttc

SEQ ID NO: 16060 - DNA, 122 bp, Homo sapiens
  misc_feature (61)..(62): /note="This region represents a CpG dinucleotide"
  misc_feature (61)..(61): /note="Nucleotide may be methylated to form 5-methylcytosine"
ttctcagtcacttacatgatgaatctgggcgttaccctagattcattcatctgcctttcccgtgtcatccagctggtctcctggcattatctatcctgtccttattcatttctgaacacctc

SEQ ID NO: 16061 - DNA, 122 bp, Homo sapiens
  misc_feature (61)..(62): /note="This region represents a CpG dinucleotide"
  misc_feature (61)..(61): /note="Nucleotide may be methylated to form 5-methylcytosine"
gttgatgttgggagtcagaggagaacctactaaatatgcagagatagcagaaagaccatacgagagagcatgtgaaaggtgtcagtcccttgagtcatctcaaaccgaactttctactttac

SEQ ID NO: 16062 - DNA, 122 bp, Homo sapiens
  misc_feature (61)..(62): /note="This region represents a CpG dinucleotide"
  misc_feature (61)..(61): /note="Nucleotide may be methylated to form 5-methylcytosine"
tgaagctgggcaagccatttcctctttctgggactcaatcatgtgaaacacagttgtgctcgtcatctctctactttctgttacaacatattatgattctgtttgggaccagccttgagcaa

SEQ ID NO: 16063 - DNA, 122 bp, Homo sapiens
  misc_feature (61)..(62): /note="This region represents a CpG dinucleotide"
  misc_feature (61)..(61): /note="Nucleotide may be methylated to form 5-methylcytosine"
taagaagttgaggtggtgatatcacaaatttgtcttctcatctggttggcctaggtacggcgagagacagtacttgactcatctgctgggcacagatgcagtaccagatactgggtcctgct

SEQ ID NO: 16064 - DNA, 122 bp, Homo sapiens
  misc_feature (61)..(62): /note="This region represents a CpG dinucleotide"
  misc_feature (61)..(61): /note="Nucleotide may be methylated to form 5-methylcytosine"
cctttaccacgtcccaaagctcctcccctccagcgaggtgtgtctggagctatgtgggggcgggaggaagggtgaagtgttaagagacccaaagcccggagaggtgctgctaagctggtctg

SEQ ID NO: 16065 - DNA, 122 bp, Homo sapiens
  misc_feature (61)..(62): /note="This region represents a CpG dinucleotide"
  misc_feature (61)..(61): /note="Nucleotide may be methylated to form 5-methylcytosine"
acttgtaaagtcaataaaagcccttgggaaactagcctcacaccttgcctgctcagtccccggacaaggtttctgatctgtaataagtaagaaatgtcactttctttcttttttttttggag

SEQ ID NO: 16066 - DNA, 122 bp, Homo sapiens
  misc_feature (61)..(62): /note="This region represents a CpG dinucleotide"
  misc_feature (61)..(61): /note="Nucleotide may be methylated to form 5-methylcytosine"
ctggtacaccccaggcctgtgagtctttagaggttgagtttttgtctgaaagagatatggcgcctacaggaggtcagggacaggccttctgtttcttgggaggccctaccccaccccttagt

SEQ ID NO: 16067 - DNA, 122 bp, Homo sapiens
  misc_feature (61)..(62): /note="This region represents a CpG dinucleotide"
  misc_feature (61)..(61): /note="Nucleotide may be methylated to form 5-methylcytosine"
gtgctgggattacaggtgtgagccaccacgcccagcctagaattccatttctctgtcacacggtgatcacattttaagtgtgctcaatagccacatgtggctagcagctaatatatcaggca

SEQ ID NO: 16068 - DNA, 122 bp, Homo sapiens
  misc_feature (61)..(62): /note="This region represents a CpG dinucleotide"
  misc_feature (61)..(61): /note="Nucleotide may be methylated to form 5-methylcytosine"
ggaaaccacacaagtattccagttgcatcagcctctagtgtgcccagcacatgataaatgcgtgattctccaataatcagagagttgcgtaactattaaatataggtcctcaagtgtttatc

SEQ ID NO: 16069 - DNA, 122 bp, Homo sapiens
  misc_feature (61)..(62): /note="This region represents a CpG dinucleotide"
  misc_feature (61)..(61): /note="Nucleotide may be methylated to form 5-methylcytosine"
cattggagtggaggagtccaggtggaagttgatggattggacaggtaaagagaagagtcccgcctcctcatgcctatagttgggtatatattaggaaaccttaaattatgtacagagagaga

SEQ ID NO: 16070 - DNA, 122 bp, Homo sapiens
  misc_feature (61)..(62): /note="This region represents a CpG dinucleotide"
  misc_feature (61)..(61): /note="Nucleotide may be methylated to form 5-methylcytosine"
tataatttcatttctaaaatttcagtcagatgtcaaatataaaccaacaaatacaaaacccgccagtccagatattaacttcctggttggcataatattcttaatagatttgaactaaaaat

SEQ ID NO: 16071 - DNA, 122 bp, Homo sapiens
  misc_feature (61)..(62): /note="This region represents a CpG dinucleotide"
  misc_feature (61)..(61): /note="Nucleotide may be methylated to form 5-methylcytosine"
cgacaatactcagtttggtattatcgtctttctgaaatgtaccctgactctccccacctacgcctgagctgagttaggtaagtgctacttcctttttgctcctgcagtatggtaagtgtttg

SEQ ID NO: 16072 - DNA, 122 bp, Homo sapiens
  misc_feature (61)..(62): /note="This region represents a CpG dinucleotide"
  misc_feature (61)..(61): /note="Nucleotide may be methylated to form 5-methylcytosine"
ccttgtcttggcatctgtaaactgttgtggcactggtgagggtatctcatagcatgctaacgtattaaaattagcatataatgagcagtcatgataaccagaggttattctggtcgccatct

SEQ ID NO: 16073 - DNA, 122 bp, Homo sapiens
  misc_feature (61)..(62): /note="This region represents a CpG dinucleotide"
  misc_feature (61)..(61): /note="Nucleotide may be methylated to form 5-methylcytosine"
aacctactagacttttctccttgttcataatgtgtttgtatcctcaaaataaaagctccccgttactcttctcacacttcctgctgttacagggctcatgacctgtttcctgttgataaatc

SEQ ID NO: 16074 - DNA, 122 bp, Homo sapiens
  misc_feature (61)..(62): /note="This region represents a CpG dinucleotide"
  misc_feature (61)..(61): /note="Nucleotide may be methylated to form 5-methylcytosine"
actagagttcccaactttggccaatagtttgtaagcactgataaggatatgtaacattctcgtgtaatttctaaataagtttcattacttctaacctcaagattatcatttttgtccttttt

SEQ ID NO: 16075 - DNA, 122 bp, Homo sapiens
  misc_feature (61)..(62): /note="This region represents a CpG dinucleotide"
  misc_feature (61)..(61): /note="Nucleotide may be methylated to form 5-methylcytosine"
gttgccattataacttgtctcaagaaatgctttattttcttcctaatttctttattcacacgctcatcactcaggagcatattatttaatttccatatatttgcatagtttccaaaattcct

SEQ ID NO: 16076 - DNA, 122 bp, Homo sapiens
  misc_feature (61)..(62): /note="This region represents a CpG dinucleotide"
  misc_feature (61)..(61): /note="Nucleotide may be methylated to form 5-methylcytosine"
agaaaatctcttatctctgtagtagtttgagtaacttctcttatcagtaaagctgtcttacgcagctgtggttatgtatctatgcaagcacaaagcaccgccttttttgtttgcataactgt

SEQ ID NO: 16077 - DNA, 122 bp, Homo sapiens
  misc_feature (61)..(62): /note="This region represents a CpG dinucleotide"
  misc_feature (61)..(61): /note="Nucleotide may be methylated to form 5-methylcytosine"
ctctagaatttgtactaaaggtgggtggaaattccactcttagatccaggcaccctcaggcgtcagccctgagccctgtgctttgcaaacttctcaagctattattatgtaaaaatagatat

SEQ ID NO: 16078 - DNA, 122 bp, Homo sapiens
  misc_feature (61)..(62): /note="This region represents a CpG dinucleotide"
  misc_feature (61)..(61): /note="Nucleotide may be methylated to form 5-methylcytosine"
gaggctggggatggtgtctgctgcggggtgttgtctggcagtgaagctggggacggtgtccgctgcagtgtgatgtctggcagtgaggctggggacggtgtctgctgcggtgtgatgtctgg

SEQ ID NO: 16079 - DNA, 122 bp, Homo sapiens
  misc_feature (61)..(62): /note="This region represents a CpG dinucleotide"
  misc_feature (61)..(61): /note="Nucleotide may be methylated to form 5-methylcytosine"
cttctcagaaagtgacccaaggtaaataaaccatgtatacctgaaaagctctgcatcttacgtaggtggtttatggacaactcacagactcttatactaacaatgcatttctcatcaaatct

SEQ ID NO: 16080 - DNA, 122 bp, Homo sapiens
  misc_feature (61)..(62): /note="This region represents a CpG dinucleotide"
  misc_feature (61)..(61): /note="Nucleotide may be methylated to form 5-methylcytosine"
gctatgaccttatttttctgtcctgtgctttagcttcctttccgaaataaacacctcccacgattgttctaagggtcaagtgagttaatgagtaaacaatggcttaaacttcctcttgcaaa

SEQ ID NO: 16081 - DNA, 122 bp, Homo sapiens
  misc_feature (61)..(62): /note="This region represents a CpG dinucleotide"
  misc_feature (61)..(61): /note="Nucleotide may be methylated to form 5-methylcytosine"
gaacagggaaaattttacccacatttcctgcttccataaataatcactattagcagttggcgtatttcctcccatatccttttccatgcctaggcaatggaggctttttgttcttgcaaccg

SEQ ID NO: 16082 - DNA, 122 bp, Homo sapiens
  misc_feature (61)..(62): /note="This region represents a CpG dinucleotide"
  misc_feature (61)..(61): /note="Nucleotide may be methylated to form 5-methylcytosine"
tttagaagtgctgcagagagccagcagttgatggttattgagtcagcacctgctgctcagcgcttgtgggaggtaaaagggtgtgatgctgactgctacaattccagtaagttcttctggca

SEQ ID NO: 16083 - DNA, 122 bp, Homo sapiens
  misc_feature (61)..(62): /note="This region represents a CpG dinucleotide"
  misc_feature (61)..(61): /note="Nucleotide may be methylated to form 5-methylcytosine"
agtttcttatctgcttgtcattaagcagatatccacgaatctacacttttgtaccaaacacgtaaaacagatcccctatttatttagatggttatttaatgtcgaaagaaatattaagctta

SEQ ID NO: 16084 - DNA, 122 bp, Homo sapiens
  misc_feature (61)..(62): /note="This region represents a CpG dinucleotide"
  misc_feature (61)..(61): /note="Nucleotide may be methylated to form 5-methylcytosine"
tttctcatcgctgccttttgaatatttttcctcttatgtaaataatttctaccagtattacgcaatgttctgctatcttaagataaaacaacagccaaaactatttgttgcttgttttctta

SEQ ID NO: 16085 - DNA, 122 bp, Homo sapiens
  misc_feature (61)..(62): /note="This region represents a CpG dinucleotide"
  misc_feature (61)..(61): /note="Nucleotide may be methylated to form 5-methylcytosine"
caggaaagagacactttggtgttgcttctgctagatggagtttgctctgattcagcaaaacgaattcctgacttatgattactagatgcagcagcccctgggggtgctccacccacacgcaa

SEQ ID NO: 16086 - DNA, 122 bp, Homo sapiens
  misc_feature (61)..(62): /note="This region represents a CpG dinucleotide"
  misc_feature (61)..(61): /note="Nucleotide may be methylated to form 5-methylcytosine"
gagtggacatcagacgtgcccaacgggctttggattgggtgttcgggggacggggcgtgacgagaagtgccaggtgtacagaaagattctcccttggttcccagattgggtccgcctgtgag

SEQ ID NO: 16087 - DNA, 122 bp, Homo sapiens
  misc_feature (61)..(62): /note="This region represents a CpG dinucleotide"
  misc_feature (61)..(61): /note="Nucleotide may be methylated to form 5-methylcytosine"
ggtctcagcttggagctagtgtcctctgactgctgccacattccagtggccaaggcaagtcgcaggaccaagcccgacatcagtggagtggggaaatacgcgcctctcaagctcctccccat

SEQ ID NO: 16088 - DNA, 122 bp, Homo sapiens
  misc_feature (61)..(62): /note="This region represents a CpG dinucleotide"
  misc_feature (61)..(61): /note="Nucleotide may be methylated to form 5-methylcytosine"
ggtgacttttttgagtcatgttgagttgctcagaagctggcaaggaagaggaaggactgacggggcccattgcacaaggacaggtggaaacccaagttgaaggaaacatggatcaagctgcc

SEQ ID NO: 16089 - DNA, 122 bp, Homo sapiens
  misc_feature (61)..(62): /note="This region represents a CpG dinucleotide"
  misc_feature (61)..(61): /note="Nucleotide may be methylated to form 5-methylcytosine"
caacaccttgcagatgcgattggctgctgtctccgcctggcaacaagacagagagagtcacgaccagccagccccagcagcaggggcacctggtacacacctgtgctgacaaagcccctccc

SEQ ID NO: 16090 - DNA, 122 bp, Homo sapiens
  misc_feature (61)..(62): /note="This region represents a CpG dinucleotide"
  misc_feature (61)..(61): /note="Nucleotide may be methylated to form 5-methylcytosine"
aaagaatatccatacacctttaactagtcacacttacttaaggggtcacaccccaccttccgctactggcatttctgaatctcagagtagtcttgattcaaggagaacgtgtgttattcttt

SEQ ID NO: 16091 - DNA, 122 bp, Homo sapiens
  misc_feature (61)..(62): /note="This region represents a CpG dinucleotide"
  misc_feature (61)..(61): /note="Nucleotide may be methylated to form 5-methylcytosine"
agtgtaagccctgctgtcggtcccgccggtggctgccctctgcctcccccgcacactccgcgcattgtttgggactgtcgggaagacgcctcgcacctcacaaatcatttaagcacctcagt

SEQ ID NO: 16092 - DNA, 122 bp, Homo sapiens
  misc_feature (61)..(62): /note="This region represents a CpG dinucleotide"
  misc_feature (61)..(61): /note="Nucleotide may be methylated to form 5-methylcytosine"
tgtttttgtgcttccagtgtaaaactctttctggagtctgtgaccacatcatatccctgtcgtcagatcctctggtttcacagtctgctcacctggaagtgattcaactggcaaacattaaa

SEQ ID NO: 16093 - DNA, 122 bp, Homo sapiens
  misc_feature (61)..(62): /note="This region represents a CpG dinucleotide"
  misc_feature (61)..(61): /note="Nucleotide may be methylated to form 5-methylcytosine"
gttgtcttgcttaagtccaagcctgactcagaattggtgtcactgtctgtgtcaggctctcgttccctcttgtgccttttgtcctgtggttccatgatgccaccacaaaccttctctgatga

SEQ ID NO: 16094 - DNA, 122 bp, Homo sapiens
  misc_feature (61)..(62): /note="This region represents a CpG dinucleotide"
  misc_feature (61)..(61): /note="Nucleotide may be methylated to form 5-methylcytosine"
ctctgtgtgcccacctttcatggaagcagggcatgtacagccgtgtggcggcagcaacagcgtaagatggttccgacaggctccagagcacaggagacgggcctggctctgggccgcatgcg

SEQ ID NO: 16095 - DNA, 122 bp, Homo sapiens
  misc_feature (61)..(62): /note="This region represents a CpG dinucleotide"
  misc_feature (61)..(61): /note="Nucleotide may be methylated to form 5-methylcytosine"
cttctttggccatcatcctgtgaagtggtggcactgcctctcacagtgaggtcactgagccgtctcaggagagtgatgctctgagggaggaacgtgagtgggagctgaagggagaggcatgg

SEQ ID NO: 16096 - DNA, 122 bp, Homo sapiens
  misc_feature (61)..(62): /note="This region represents a CpG dinucleotide"
  misc_feature (61)..(61): /note="Nucleotide may be methylated to form 5-methylcytosine"
tgacttaactacatttaaagacagagtaggaaaagagaatgaggcctcattttgcggaagcgaaggctgcctgagagccagctgcagtaaacactaaagaaaaagaacaatgactgagaaaa

SEQ ID NO: 16097 - DNA, 122 bp, Homo sapiens
  misc_feature (61)..(62): /note="This region represents a CpG dinucleotide"
  misc_feature (61)..(61): /note="Nucleotide may be methylated to form 5-methylcytosine"
accactacctgtgggcagagtgaccatccgccttgaggtagtcgtgtcacatctaggtgccgtctcctcctactcacagcaacttcctaaccacctcctgtccacaccatcttccttgagga

SEQ ID NO: 16098 - DNA, 122 bp, Homo sapiens
  misc_feature (61)..(62): /note="This region represents a CpG dinucleotide"
  misc_feature (61)..(61): /note="Nucleotide may be methylated to form 5-methylcytosine"
gggtcatttgcatgagaacagattcctttgtgtaaagttggcctgcctgttctctgtccacgtttatagtccttcaagtcttcgtgttgggttgctaggcagatatgaccctggcttgcaaa

SEQ ID NO: 16099 - DNA, 122 bp, Homo sapiens
  misc_feature (61)..(62): /note="This region represents a CpG dinucleotide"
  misc_feature (61)..(61): /note="Nucleotide may be methylated to form 5-methylcytosine"
tcacatcctgttttttaccccttcatttaaacatagtaaacatttcgctacattgtataccgtcatgttttttagtgtcttagtcttcccgtgaaggaatttgcccataatttacttaacca

SEQ ID NO: 16100 - DNA, 122 bp, Homo sapiens
  misc_feature (61)..(62): /note="This region represents a CpG dinucleotide"
  misc_feature (61)..(61): /note="Nucleotide may be methylated to form 5-methylcytosine"
gagtattcatgaataaggttcttgggttaattcatttttctactctttcttcctttctcccgcaagtccttattaagcacttacctaatgctgtcctaggctcaggggaaacagcaatgagt

SEQ ID NO: 16101 - DNA, 122 bp, Homo sapiens
  misc_feature (61)..(62): /note="This region represents a CpG dinucleotide"
  misc_feature (61)..(61): /note="Nucleotide may be methylated to form 5-methylcytosine"
tgggaattaccctgtggacccagttttaatggcctacatttgcatattaaaggttgccggcgggttctaagagccagagctttcctgctaaacagacatttctggagctgctttaaaagaga

SEQ ID NO: 16102 - DNA, 122 bp, Homo sapiens
  misc_feature (61)..(62): /note="This region represents a CpG dinucleotide"
  misc_feature (61)..(61): /note="Nucleotide may be methylated to form 5-methylcytosine"
caggcaatttattttgagccagaaaaataaaatataatcttaggccatctggttctgtaacgcactgtatttgtttagaaaggtcactgttgtcaagttattgaatgttatctctggaattg

SEQ ID NO: 16103 - DNA, 122 bp, Homo sapiens
  misc_feature (61)..(62): /note="This region represents a CpG dinucleotide"
  misc_feature (61)..(61): /note="Nucleotide may be methylated to form 5-methylcytosine"
gacctctccaaggcagacctaatgtggtgacaaaacctatcacacttgcttactgtggcacgatgcttttgcgttgtgacacagcatagctacagtgcttacagcacaatgctgtgagccca

SEQ ID NO: 16104 - DNA, 122 bp, Homo sapiens
  misc_feature (61)..(62): /note="This region represents a CpG dinucleotide"
  misc_feature (61)..(61): /note="Nucleotide may be methylated to form 5-methylcytosine"
gagagagaactggagaaggttaagctttgtgccttattacagctgggcccttccagatcccgtgactaagaactgccatgtcctgactgagaagcagggaggcgtgtgacacacaggaaggg

SEQ ID NO: 16105 - DNA, 122 bp, Homo sapiens
  misc_feature (61)..(62): /note="This region represents a CpG dinucleotide"
  misc_feature (61)..(61): /note="Nucleotide may be methylated to form 5-methylcytosine"
gctttgtttctatgcaatcagcttatccagggctttcaaaccagtacttgctgaagtgtgcggacccaaatgaagcattaagcagagtcctagaatgagtcaggaagataatctgaataggt

SEQ ID NO: 16106 - DNA, 122 bp, Homo sapiens
  misc_feature (61)..(62): /note="This region represents a CpG dinucleotide"
  misc_feature (61)..(61): /note="Nucleotide may be methylated to form 5-methylcytosine"
gaggacgccggagtgcgcactagccctccgtggaagacgggagcagaggacatcggagtgcgcactagcagtccatggaagtcaggagcagagaatgcctggagggcgcactagccctccat

SEQ ID NO: 16107 - DNA, 122 bp, Homo sapiens
  misc_feature (61)..(62): /note="This region represents a CpG dinucleotide"
  misc_feature (61)..(61): /note="Nucleotide may be methylated to form 5-methylcytosine"
tgagtatattttatgaatctttgcctttggatttcatcatgtgatttgctttagctgagacgatgaagcagaagtgagaggatgctgagtcagaccaggcctcaagagaccttggagttttc

SEQ ID NO: 16108 - DNA, 122 bp, Homo sapiens
  misc_feature (61)..(62): /note="This region represents a CpG dinucleotide"
  misc_feature (61)..(61): /note="Nucleotide may be methylated to form 5-methylcytosine"
cccctatgcacagataacacaaacagctaacgagtattgatcttactatgggccaggcaacgtgacagttgctttatacatcaaatctcttgtaatccccactccaacccggtgaggtaggt

SEQ ID NO: 16109 - DNA, 122 bp, Homo sapiens
  misc_feature (61)..(62): /note="This region represents a CpG dinucleotide"
  misc_feature (61)..(61): /note="Nucleotide may be methylated to form 5-methylcytosine"
accctcttgacccactgattccagcccatcagtggtggacatgaccttgcatgtggccagcgtcccgtaagtgggtgtctccctgctttcctgcctcagggttttcaaagctgtggcccatt

SEQ ID NO: 16110 - DNA, 122 bp, Homo sapiens
  misc_feature (61)..(62): /note="This region represents a CpG dinucleotide"
  misc_feature (61)..(61): /note="Nucleotide may be methylated to form 5-methylcytosine"
tcttggcggtcctcaggtgttttgtggaagccgggcctgggtggcgggcgcggggaatggcggctgcgctgaggaggcgtcgcggcgcgacagcagtgggggagggggagggggagcgccga

SEQ ID NO: 16111 - DNA, 122 bp, Homo sapiens
  misc_feature (61)..(62): /note="This region represents a CpG dinucleotide"
  misc_feature (61)..(61): /note="Nucleotide may be methylated to form 5-methylcytosine"
ccacaggcagttaaagtcaagcaactagtagttcagcaggcttcaggaggcagtgaaaaacgggtgaccacacttacacattcctcagcattgaccattcagaaatctggatagaagacaat

SEQ ID NO: 16112 - DNA, 122 bp, Homo sapiens
  misc_feature (61)..(62): /note="This region represents a CpG dinucleotide"
  misc_feature (61)..(61): /note="Nucleotide may be methylated to form 5-methylcytosine"
caggcagtacacacaggtcaggaggaggaaaaaaaaaaaaaagaaaaagaaaaaagctctcgtgcctcttagaacctccataaccgccagattgaaaactgactgtccaagactgcctaaat

SEQ ID NO: 16113 - DNA, 122 bp, Homo sapiens
  misc_feature (61)..(62): /note="This region represents a CpG dinucleotide"
  misc_feature (61)..(61): /note="Nucleotide may be methylated to form 5-methylcytosine"
ttgcctttactttgaagactggttcaattcggagtggtagaagatgctcaagatgtagaacgtggaagccttttgagtctagagaagtctttgatgatgttctccttggctgctgcccataa

SEQ ID NO: 16114 - DNA, 122 bp, Homo sapiens
  misc_feature (61)..(62): /note="This region represents a CpG dinucleotide"
  misc_feature (61)..(61): /note="Nucleotide may be methylated to form 5-methylcytosine"
aagatcaataaatgtttattaaatgaggcactttacttcacaaaggatatggcattttaacggttacaagcgttcccagtcaacgcatccacaaagcattaggccacctataaactaggaat

SEQ ID NO: 16115 - DNA, 122 bp, Homo sapiens
  misc_feature (61)..(62): /note="This region represents a CpG dinucleotide"
  misc_feature (61)..(61): /note="Nucleotide may be methylated to form 5-methylcytosine"
ccaagaactacgtgatggcagtctccagctaggcccttccgcccccgccctgggcgccgccgtgctcatgctgccgtgacaacaggccaccacatacctcaacctggggaactgtattttta

SEQ ID NO: 16116 - DNA, 122 bp, Homo sapiens
  misc_feature (61)..(62): /note="This region represents a CpG dinucleotide"
  misc_feature (61)..(61): /note="Nucleotide may be methylated to form 5-methylcytosine"
ttcttaaaaatcttccttttaaaaagtaggggaatgtaggcttagagaataaatttcattcggcaagctgagtccttactgcgtgtggcactgtgacatagtggaagaagaactcttgttgt

SEQ ID NO: 16117 - DNA, 122 bp, Homo sapiens
  misc_feature (61)..(62): /note="This region represents a CpG dinucleotide"
  misc_feature (61)..(61): /note="Nucleotide may be methylated to form 5-methylcytosine"
ccttcttagtgacagtgctattccagaacagagggcagaatataaaatccattattatgacgatgaatctagcgtcataaatgtggcattagttgacatttccactagtttctggtatttag

SEQ ID NO: 16118 - DNA, 122 bp, Homo sapiens
  misc_feature (61)..(62): /note="This region represents a CpG dinucleotide"
  misc_feature (61)..(61): /note="Nucleotide may be methylated to form 5-methylcytosine"
cactaggtctaggagatgtacctttccctcctgccgtatgcagcattttcaggtgatccacggtcatctgcaggatctcggctttttctagcttagcagatccctaaagatgagaatggcaa

SEQ ID NO: 16119 - DNA, 122 bp, Homo sapiens
  misc_feature (61)..(62): /note="This region represents a CpG dinucleotide"
  misc_feature (61)..(61): /note="Nucleotide may be methylated to form 5-methylcytosine"
actctgtacctggctctgtgcctggcttgcctttggcagccgtgggatccagggtggtagcgtgagccgagtgcagcttgccaggtcgagtgggtggaaccagcccagcaggcatgagcaaa

SEQ ID NO: 16120 - DNA, 122 bp, Homo sapiens
  misc_feature (61)..(62): /note="This region represents a CpG dinucleotide"
  misc_feature (61)..(61): /note="Nucleotide may be methylated to form 5-methylcytosine"
aaacagaggtacacagatctagtgacacctccccaagtaatatactggaaggatttagggcggcaaactgtttggaaagaagagactttttgtagtcttttaggaaaaattgagaaaatgtt

SEQ ID NO: 16121 - DNA, 122 bp, Homo sapiens
  misc_feature (61)..(62): /note="This region represents a CpG dinucleotide"
  misc_feature (61)..(61): /note="Nucleotide may be methylated to form 5-methylcytosine"
tttctatttatttatctgatcccgaataacaagccgggaagttctgcttcatgggggtgacgtaagtgatggatgtgagtaccgcgtttcctaagccacatgcccggcctcacggtctgaca

SEQ ID NO: 16122 - DNA, 122 bp, Homo sapiens
  misc_feature (61)..(62): /note="This region represents a CpG dinucleotide"
  misc_feature (61)..(61): /note="Nucleotide may be methylated to form 5-methylcytosine"
cactcaaagcagcagcattttacttctcagattccaggtgtaagctctacttttttatcacgccttcataataaagaaaatctgttctggagattcgtatattgatttctttgcaaagttat

SEQ ID NO: 16123 - DNA, 122 bp, Homo sapiens
  misc_feature (61)..(62): /note="This region represents a CpG dinucleotide"
  misc_feature (61)..(61): /note="Nucleotide may be methylated to form 5-methylcytosine"
tccttttggtaatggagataatgaatgactgcacaaacaagaaggattgctcatcactgacgccagtgtggcttcaaactggaaaaggcctggagtacaaattttaatggactgaaaacact

SEQ ID NO: 16124 - DNA, 122 bp, Homo sapiens
  misc_feature (61)..(62): /note="This region represents a CpG dinucleotide"
  misc_feature (61)..(61): /note="Nucleotide may be methylated to form 5-methylcytosine"
actagctacagccctctaatccacacgccatgcttcagtgaaagtgttattcatttttaccgtgcttgtcacttggggcaggtgtgctcacagtggccagcccatcttgaacttgtgcttgt

SEQ ID NO: 16125 - DNA, 122 bp, Homo sapiens
  misc_feature (61)..(62): /note="This region represents a CpG dinucleotide"
  misc_feature (61)..(61): /note="Nucleotide may be methylated to form 5-methylcytosine"
taaagaatattttcactgcgctaagaactttttgtattctaactatacattcctctctctcgttcctgtcccttgatattcactaatccttttcctatctccacatttttcccttttcagaa

SEQ ID NO: 16126 - DNA, 122 bp, Homo sapiens
  misc_feature (61)..(62): /note="This region represents a CpG dinucleotide"
  misc_feature (61)..(61): /note="Nucleotide may be methylated to form 5-methylcytosine"
tgccccgcagaagggatatttatcaatgtctgaagacatttttccttgacataaacgaagcgtctagtgtcaaggccaggggtgctactaaacagcctccaatgcacagggtagcccacata

SEQ ID NO: 16127 - DNA, 122 bp, Homo sapiens
  misc_feature (61)..(62): /note="This region represents a CpG dinucleotide"
  misc_feature (61)..(61): /note="Nucleotide may be methylated to form 5-methylcytosine"
gatcacctgaggtcgggcattcgagaccagcctgaccaacatggtaaaaccccatctctacgaaaagtacccaaaaaattagccaggtgaggtggcagatgcctttaatcccagctactggg

SEQ ID NO: 16128 - DNA, 122 bp, Homo sapiens
  misc_feature (61)..(62): /note="This region represents a CpG dinucleotide"
  misc_feature (61)..(61): /note="Nucleotide may be methylated to form 5-methylcytosine"
caaggatttagcagaacaaacgggatcttaggacccctgccaggctgaaatcttccccaccgcagggtaccacgcttgtaccgagcccacctccttggagtaccccctgggtacgtttcgct

SEQ ID NO: 16129 - DNA, 122 bp, Homo sapiens
  misc_feature (61)..(62): /note="This region represents a CpG dinucleotide"
  misc_feature (61)..(61): /note="Nucleotide may be methylated to form 5-methylcytosine"
aggcaaagcccatccttcttttaccaatgcggctataaaatgtaacttgcatgcctcaatcgctaggaaacaatctttccccaagtcttgggttctcgtttcataagtagtcatttcctgat

SEQ ID NO: 16130 - DNA, 122 bp, Homo sapiens
  misc_feature (61)..(62): /note="This region represents a CpG dinucleotide"
  misc_feature (61)..(61): /note="Nucleotide may be methylated to form 5-methylcytosine"
actacaacagtatctaccaataatcacatacatgaccaaatagctttcacttctagctgccgttaagaagaaagaaaaggatgaaaagaaaaaaaatcctataaaccccagttcttgaaagc

SEQ ID NO: 16131 - DNA, 122 bp, Homo sapiens
  misc_feature (61)..(62): /note="This region represents a CpG dinucleotide"
  misc_feature (61)..(61): /note="Nucleotide may be methylated to form 5-methylcytosine"
agtgtgtaaggcctgggacatctggctttgaggcagttctttctccaggttttatttatgcgaatccactcatctggcaggaatgatttgttggtgtgaaatcaggtgttggcccagcatcc

SEQ ID NO: 16132 - DNA, 122 bp, Homo sapiens
  misc_feature (61)..(62): /note="This region represents a CpG dinucleotide"
  misc_feature (61)..(61): /note="Nucleotide may be methylated to form 5-methylcytosine"
tcagttaccaaccgcattaagaaaaggcacaatattcaaagagaaagacacttttctctacgttttctcagtgctgagcttccattaccaggtcatataggtattgggagatttccctattg

SEQ ID NO: 16133 - DNA, 122 bp, Homo sapiens
  misc_feature (61)..(62): /note="This region represents a CpG dinucleotide"
  misc_feature (61)..(61): /note="Nucleotide may be methylated to form 5-methylcytosine"
ttgctgaatttagctatgacactcgctgagtcactgcagtgggcaagaagaaatgcagtccgatagttctctgcttcaaaaaacaggggagatcttatcctggtgaaggtgggtcagcacac

SEQ ID NO: 16134 - DNA, 122 bp, Homo sapiens
  misc_feature (61)..(62): /note="This region represents a CpG dinucleotide"
  misc_feature (61)..(61): /note="Nucleotide may be methylated to form 5-methylcytosine"
atttttctcttaaccttccaagggtacctcaccattccacctgtctccccatggaagatgcgagtgagaatgccatgactctgtgacctcacaatactaaaagaattttgcttctgcaggat

SEQ ID NO: 16135 - DNA, 122 bp, Homo sapiens
  misc_feature (61)..(62): /note="This region represents a CpG dinucleotide"
  misc_feature (61)..(61): /note="Nucleotide may be methylated to form 5-methylcytosine"
tactgctctggtgccagaggatattcccaatgcctggcgtccccaccctggttcttccttcgttccaatgaatgtaggtaaaactgccttcatttgaggcccagtaggacaaacagcaacag

SEQ ID NO: 16136 - DNA, 122 bp, Homo sapiens
  misc_feature (61)..(62): /note="This region represents a CpG dinucleotide"
  misc_feature (61)..(61): /note="Nucleotide may be methylated to form 5-methylcytosine"
tactagtccactcaggtagagccgagactcctgcaggtggaatcactgcataccaaaaagcgtgccttccgattagtggaagtttaatcaattgcgagtgctgtcacagcttaatcatccag

SEQ ID NO: 16137 - DNA, 122 bp, Homo sapiens
  misc_feature (61)..(62): /note="This region represents a CpG dinucleotide"
  misc_feature (61)..(61): /note="Nucleotide may be methylated to form 5-methylcytosine"
tgctttaccctccccgcatcctttgaccaggaaattctttctttggcttccccccatccccggctccaacattctgcaaactgaagaggtagtttcttagatgttcagtgtggttaatccaa

SEQ ID NO: 16138 - DNA, 122 bp, Homo sapiens
  misc_feature (61)..(62): /note="This region represents a CpG dinucleotide"
  misc_feature (61)..(61): /note="Nucleotide may be methylated to form 5-methylcytosine"
ggcctccctaaggttttgctcagccagttcctcttactgttttgcctcatgcagttcagccgcttggttagatctgcccctggggccgagttcatttctacagtcacgtccccactggactg

SEQ ID NO: 16139 - DNA, 122 bp, Homo sapiens
  misc_feature (61)..(62): /note="This region represents a CpG dinucleotide"
  misc_feature (61)..(61): /note="Nucleotide may be methylated to form 5-methylcytosine"
tccaatcgtccccctggagttcgtgttggaagatgccagtgagcacgtctcagggctctacgccttgcacggatgagtatggggtgactcagagggaaggggtggtggcagatgcctgcagc

SEQ ID NO: 16140 - DNA, 122 bp, Homo sapiens
  misc_feature (61)..(62): /note="This region represents a CpG dinucleotide"
  misc_feature (61)..(61): /note="Nucleotide may be methylated to form 5-methylcytosine"
tccaccttgccataggctgttagtccaaaggcaacttacgccagcttgcagccagatggccgggggagccactgtgccttacgccctaactactgtaaaggctgcatgtggattcaggaaga

SEQ ID NO: 16141 - DNA, 122 bp, Homo sapiens
  misc_feature (61)..(62): /note="This region represents a CpG dinucleotide"
  misc_feature (61)..(61): /note="Nucleotide may be methylated to form 5-methylcytosine"
gtgtggaagaaggaaacaccgagtctctgtataatctatttacataaaatgggtgatatgcgaacagcaaaccaataaactgtctcaatgctgattcattctctcggctcggctctcacgtc

SEQ ID NO: 16142 - DNA, 122 bp, Homo sapiens
  misc_feature (61)..(62): /note="This region represents a CpG dinucleotide"
  misc_feature (61)..(61): /note="Nucleotide may be methylated to form 5-methylcytosine"
ttttggattctcttctctgcagggtgagaaaccttctgggaattttgaggagagaggtggcgtcataggattaacttctccaaaggctacattggctgctgtgtgcagggtggattctagga

SEQ ID NO: 16143 - DNA, 122 bp, Homo sapiens
  misc_feature (61)..(62): /note="This region represents a CpG dinucleotide"
  misc_feature (61)..(61): /note="Nucleotide may be methylated to form 5-methylcytosine"
gtaggctttttaccatgtatcactgctattcctttttttttttttttgagaggaagaaggcgtgagttgacctggtattactcacccaaaagtgaggcattggggatatttatattcagcaa

SEQ ID NO: 16144 - DNA, 122 bp, Homo sapiens
  misc_feature (61)..(62): /note="This region represents a CpG dinucleotide"
  misc_feature (61)..(61): /note="Nucleotide may be methylated to form 5-methylcytosine"
ccagtgagagtcagcgtactttggcaccactctcatcccctctcaattccacagcctcagcggttacccagtttctgcttgagaagttgctcaatctagtgttagttgtggcttgaatgagt

SEQ ID NO: 16145 - DNA, 122 bp, Homo sapiens
  misc_feature (61)..(62): /note="This region represents a CpG dinucleotide"
  misc_feature (61)..(61): /note="Nucleotide may be methylated to form 5-methylcytosine"
cgtttaaagttccttcattggtgttttccctgtaagcagttgttgaaggactgagtcacccgtgaggtagcctgtggttggatgtgggctgaggttattcagtgactaatttccaaggggag

SEQ ID NO: 16146 - DNA, 122 bp, Homo sapiens
  misc_feature (61)..(62): /note="This region represents a CpG dinucleotide"
  misc_feature (61)..(61): /note="Nucleotide may be methylated to form 5-methylcytosine"
ctggacggccgccctggggaccgggtgaatctctcctgcggaggagtctctcatcccatccgctgggtctgggcacccagcttcccggcctgcaagggcctgtccaaaggacgccgaccgat

SEQ ID NO: 16147 - DNA, 122 bp, Homo sapiens
  misc_feature (61)..(62): /note="This region represents a CpG dinucleotide"
  misc_feature (61)..(61): /note="Nucleotide may be methylated to form 5-methylcytosine"
aactaccaagttttacaggaacacagcctttggccagcagtttcaggtctaggggttcatcgtacagatatcttcgcacatgtgtaaaatgaagtatgtgcaatgctacgcttgacagaaat

SEQ ID NO: 16148 - DNA, 122 bp, Homo sapiens
  misc_feature (61)..(62): /note="This region represents a CpG dinucleotide"
  misc_feature (61)..(61): /note="Nucleotide may be methylated to form 5-methylcytosine"
aatactgcaaaggcaattgcagaatggggtctggattatgttgtcctgacatctgtggatcgagatggttagtgtgtcatcatggcctctaccagaaactggctctaaatgatgacatcatc

SEQ ID NO: 16149 - DNA, 122 bp, Homo sapiens
  misc_feature (61)..(62): /note="This region represents a CpG dinucleotide"
  misc_feature (61)..(61): /note="Nucleotide may be methylated to form 5-methylcytosine"
cctgcaccagccttgtcttactaaatgttggagtagtttaactttggctccctcttctggcgggttgtaggattctgcacttttggagagaaaatacctaagattactgctatttcccaatt

SEQ ID NO: 16150 - DNA, 122 bp, Homo sapiens
  misc_feature (61)..(62): /note="This region represents a CpG dinucleotide"
  misc_feature (61)..(61): /note="Nucleotide may be methylated to form 5-methylcytosine"
gcttggctgtggggctgtgaggatgagctggaggcaggtggaagcttgatttttgagtgtcgcaaatactggactgatgactcggaacttgacttggtagtggggggcagtggtagtcttgt

SEQ ID NO: 16151 - DNA, 122 bp, Homo sapiens
  misc_feature (61)..(62): /note="This region represents a CpG dinucleotide"
  misc_feature (61)..(61): /note="Nucleotide may be methylated to form 5-methylcytosine"
ccccatgatccgaaattccacctaggtacaggagtgtgtacacacgagcaccaggagacacgcacaagaatattgacggtggcattatctgtcatagtcaaaagctggaaacaatgcatgct

SEQ ID NO: 16152 - DNA, 122 bp, Homo sapiens
  misc_feature (61)..(62): /note="This region represents a CpG dinucleotide"
  misc_feature (61)..(61): /note="Nucleotide may be methylated to form 5-methylcytosine"
cagccaaacctgttgaaggctggctcaaccctaatctgtgccttcctgtcttctcacaaacgtagtctgatttgctggctagatttctagtaacagccacagagcagaaatgtgtcccttcc

SEQ ID NO: 16153 - DNA, 122 bp, Homo sapiens
  misc_feature (61)..(62): /note="This region represents a CpG dinucleotide"
  misc_feature (61)..(61): /note="Nucleotide may be methylated to form 5-methylcytosine"
tcagtccgcagtgacccagtctcgtgtaggtgggaccagcatcttcaccggccgaggagacgcccctggaccacctgcgtgggcaggatccaggcaggcgacagggctcagggctgcagcca

SEQ ID NO: 16154 - DNA, 122 bp, Homo sapiens
  misc_feature (61)..(62): /note="This region represents a CpG dinucleotide"
  misc_feature (61)..(61): /note="Nucleotide may be methylated to form 5-methylcytosine"
aaattatgtcatttaaacctccctgttgagtaacagacttgacttctctcaacagtcaatcggatccacaagatgaagaatgccattgtgtgagtacagatttgaaccctgttgctaatcac

SEQ ID NO: 16155 - DNA, 122 bp, Homo sapiens
  misc_feature (61)..(62): /note="This region represents a CpG dinucleotide"
  misc_feature (61)..(61): /note="Nucleotide may be methylated to form 5-methylcytosine"
ctgtctcttctgttcatttcactgtcctgcatggggttatgcttttttctttcaatgaagcgtaggaagtctccttgggaatcatctgtgctgatctctgtgtgtgtgttttaaattgcaat

SEQ ID NO: 16156 - DNA, 122 bp, Homo sapiens
  misc_feature (61)..(62): /note="This region represents a CpG dinucleotide"
  misc_feature (61)..(61): /note="Nucleotide may be methylated to form 5-methylcytosine"
aaaggaggcgactctggacattctcatcaccttatttaaagcggggtacgctgactaatacgtgaagctgtgcattaatggcctaaattaagttacaggtatgaattttacataaaacagat

SEQ ID NO: 16157 - DNA, 122 bp, Homo sapiens
  misc_feature (61)..(62): /note="This region represents a CpG dinucleotide"
  misc_feature (61)..(61): /note="Nucleotide may be methylated to form 5-methylcytosine"
tggctctgtgtgtgtgtttttgagaagttcatatgtacatgtacctcaggtaagcttgggcgtgctggactggagtgtggggttggctctgtgactctctgagtgacagtgagaggaggctt

SEQ ID NO: 16158 - DNA, 122 bp, Homo sapiens
  misc_feature (61)..(62): /note="This region represents a CpG dinucleotide"
  misc_feature (61)..(61): /note="Nucleotide may be methylated to form 5-methylcytosine"
gcaggtcaagccaggtgagctggaactcagcctggggctgggaggccgtctgaaaggcctcgatgctgttgcagctcaggtctagcacccgcagctgctggaggctgaagtcggagatgcag

SEQ ID NO: 16159 - DNA, 122 bp, Homo sapiens
  misc_feature (61)..(62): /note="This region represents a CpG dinucleotide"
  misc_feature (61)..(61): /note="Nucleotide may be methylated to form 5-methylcytosine"
agaaaacaccaatcaaatgtgcaatagggtgccttactgttccctgcaagcttgggcagccgcattccaggtgcctttctgctctgtgatcaagatgtgacagtagcctgagtgctggtgcc

SEQ ID NO: 16160 - DNA, 122 bp, Homo sapiens
  misc_feature (61)..(62): /note="This region represents a CpG dinucleotide"
  misc_feature (61)..(61): /note="Nucleotide may be methylated to form 5-methylcytosine"
cagtgcacacgccgcgtgctgccaccacccagctcgatgattctctccttccacaccttccggtccccaaaagtgactgaaagcaggattctgctgcggaaaaactggacttggaggaaggg

SEQ ID NO: 16161 - DNA, 122 bp, Homo sapiens
  misc_feature (61)..(62): /note="This region represents a CpG dinucleotide"
  misc_feature (61)..(61): /note="Nucleotide may be methylated to form 5-methylcytosine"
caaccatgagacaggtccttgatataaaatcaacaaaacgtctgggattaaaactaatctcgagcaatgaaataaaactgcacatagggatcattataccattctacttttgtacgttgcac

SEQ ID NO: 16162 - DNA, 122 bp, Homo sapiens
  misc_feature (61)..(62): /note="This region represents a CpG dinucleotide"
  misc_feature (61)..(61): /note="Nucleotide may be methylated to form 5-methylcytosine"
aaaggagtgagaacattcagatatccttcaaatggaaagggacaatagtgaattcctgatcgggcaatctggggctggcttagaaagcttctaaagcactcctgctctctataccaacctga

SEQ ID NO: 16163 - DNA, 122 bp, Homo sapiens
  misc_feature (61)..(62): /note="This region represents a CpG dinucleotide"
  misc_feature (61)..(61): /note="Nucleotide may be methylated to form 5-methylcytosine"
gcaacgtatgcgcgtgtgtgcatgcatgtgcctacatgtgcctgtgtgtgcctgcgggagcgtgggcagtctgtgaggacaggtgtgtgtgcacagatgcattgagtgtcctgagcctctgc

SEQ ID NO: 16164 - DNA, 122 bp, Homo sapiens
  misc_feature (61)..(62): /note="This region represents a CpG dinucleotide"
  misc_feature (61)..(61): /note="Nucleotide may be methylated to form 5-methylcytosine"
taatttccttggaataatcttcccatcagtatttcaggctaggcaaactctacaaagacacgctatgagtcatccctcactatttcaaattacttgacacttggtgacttcagctatttctc

SEQ ID NO: 16165 - DNA, 122 bp, Homo sapiens
  misc_feature (61)..(62): /note="This region represents a CpG dinucleotide"
  misc_feature (61)..(61): /note="Nucleotide may be methylated to form 5-methylcytosine"
gacttttcatttttgcacctgcctcagcactgtatgaatctagctagacccatgtggggacgtgccaagctctgtgaagaagctgattatgctggtcctctaggtccagctggtgacaaata

SEQ ID NO: 16166 - DNA, 122 bp, Homo sapiens
  misc_feature (61)..(62): /note="This region represents a CpG dinucleotide"
  misc_feature (61)..(61): /note="Nucleotide may be methylated to form 5-methylcytosine"
tattctggaagaaggcttgcctggcacctggaattccacacccttgagctctccttttcacggaacagcattcgtcagatttactgacagcatagcagtggcataattaacaaataatccag

SEQ ID NO: 16167 - DNA, 122 bp, Homo sapiens
  misc_feature (61)..(62): /note="This region represents a CpG dinucleotide"
  misc_feature (61)..(61): /note="Nucleotide may be methylated to form 5-methylcytosine"
tatgctatgtacttcaccctccactgacacatctgatcccattatgtgcctgacctttaacggtcatcaaatcaaagtcattctggtcagttcagtctgggcctgacacatgcccaggtcac

SEQ ID NO: 16168 - DNA, 122 bp, Homo sapiens
  misc_feature (61)..(62): /note="This region represents a CpG dinucleotide"
  misc_feature (61)..(61): /note="Nucleotide may be methylated to form 5-methylcytosine"
ggtttcagctgaatccaccaccacatttcatatggattgcacagtggtcctcaaatgaagcgtctgccagactcagctgcagggcttgctaaacacaaacttctgggcccctcctcagagtt

SEQ ID NO: 16169 - DNA, 122 bp, Homo sapiens
  misc_feature (61)..(62): /note="This region represents a CpG dinucleotide"
  misc_feature (61)..(61): /note="Nucleotide may be methylated to form 5-methylcytosine"
cacacatttgaaaggccagaggaaccccgaaccccacccaccgcccatgcatctccctgccgcccacggagatgcctccggttcaagacaaaaatcctttagcatgcttagctgtttcttgt

SEQ ID NO: 16170 - DNA, 122 bp, Homo sapiens
  misc_feature (61)..(62): /note="This region represents a CpG dinucleotide"
  misc_feature (61)..(61): /note="Nucleotide may be methylated to form 5-methylcytosine"
ctcctaacaccatcacattgggagttagatttcatcatatgaattttgtggggacacagacgatcagtccatagcattcagggaacatcaatcaaggcaggaaagcctggaggtgggagcag

SEQ ID NO: 16171 - DNA, 122 bp, Homo sapiens
  misc_feature (61)..(62): /note="This region represents a CpG dinucleotide"
  misc_feature (61)..(61): /note="Nucleotide may be methylated to form 5-methylcytosine"
agaggtctgacctatttataccccagccaggccctgcccatagcaggggacaggggagagcggatactgccttcctgctgtgggctgatgcggtaagtgccacagcaccctccaccagccca

SEQ ID NO: 16172 - DNA, 122 bp, Homo sapiens
  misc_feature (61)..(62): /note="This region represents a CpG dinucleotide"
  misc_feature (61)..(61): /note="Nucleotide may be methylated to form 5-methylcytosine"
tcactctgtccccagggtttggcgtgacagtcccatagaaatgactcatttcctttgcaccgcatgtcatccaaccagatggttccagttccctggccaaacgaagcgtccctcagggcagc

SEQ ID NO: 16173 - DNA, 122 bp, Homo sapiens
  misc_feature (61)..(62): /note="This region represents a CpG dinucleotide"
  misc_feature (61)..(61): /note="Nucleotide may be methylated to form 5-methylcytosine"
cacaataagtggggttcattacaatgtcaatctcacaaggtagttgtgagtaccaaaaagcgtggtgcatatcaaagttcctcgcaaaactttgatactgaaagcatggtccaatgaggtca

SEQ ID NO: 16174 - DNA, 122 bp, Homo sapiens
  misc_feature (61)..(62): /note="This region represents a CpG dinucleotide"
  misc_feature (61)..(61): /note="Nucleotide may be methylated to form 5-methylcytosine"
aagtcgcttacactttgtgaattttacctccaggaactatccaggttctcacagtgaagacggaagaaaaatccccttgtgcttctggcagcaggaggagaaagggaaccatgtttatatac

SEQ ID NO: 16175 - DNA, 122 bp, Homo sapiens
  misc_feature (61)..(62): /note="This region represents a CpG dinucleotide"
  misc_feature (61)..(61): /note="Nucleotide may be methylated to form 5-methylcytosine"
ttagtaagagcatcctggtagcaaaggtcaatcattatcagactgcaggagtagtttcaacggcaacaatgcagcaacagcatcaatggaaacaacaaaatgaagagaatggccatttccca

SEQ ID NO: 16176 - DNA, 122 bp, Homo sapiens
  misc_feature (61)..(62): /note="This region represents a CpG dinucleotide"
  misc_feature (61)..(61): /note="Nucleotide may be methylated to form 5-methylcytosine"
tttaatccacagatggggaacctgaggatatggaaggctgactaagagatggttcataagcggccttaaaaatataaaatgaggccgggcacggtggctcacgcctgtgatcccagcacttt

SEQ ID NO: 16177 - DNA, 122 bp, Homo sapiens
  misc_feature (61)..(62): /note="This region represents a CpG dinucleotide"
  misc_feature (61)..(61): /note="Nucleotide may be methylated to form 5-methylcytosine"
gtgaacactatggggtgataaagagtccctttcttatgttcctgctcagccactgggtgacgtgaccttgtgcaaatccaccccactctaaatctgttctctttacctgtaacagaaggatt

SEQ ID NO: 16178 - DNA, 122 bp, Homo sapiens
  misc_feature (61)..(62): /note="This region represents a CpG dinucleotide"
  misc_feature (61)..(61): /note="Nucleotide may be methylated to form 5-methylcytosine"
gtccctccctggccgcgtggcttattgcacaagaatgggggaggggcggctagagagagccggtcaggaccagagcggttgagaaggttgaaacccacctcaccaactcaggtgggctcttc

SEQ ID NO: 16179 - DNA, 122 bp, Homo sapiens
  misc_feature (61)..(62): /note="This region represents a CpG dinucleotide"
  misc_feature (61)..(61): /note="Nucleotide may be methylated to form 5-methylcytosine"
tttacaagaaagacttatatcaataggaagcaccaccccaatagaaaaattggtagtggacgtgaacaagcatttcacaaacaaatgaaatgccaactgctgacgggaagattctgcgcctg

SEQ ID NO: 16180 - DNA, 122 bp, Homo sapiens
  misc_feature (61)..(62): /note="This region represents a CpG dinucleotide"
  misc_feature (61)..(61): /note="Nucleotide may be methylated to form 5-methylcytosine"
caaagttctgttccatgcctcatcagttccgtgcttctgtgttctttctagagtttgtgacgtgaatggtgagttgaactataggagaattattgttgttcattgaggtccatgttcagcaa

SEQ ID NO: 16181 - DNA, 122 bp, Homo sapiens
  misc_feature (61)..(62): /note="This region represents a CpG dinucleotide"
  misc_feature (61)..(61): /note="Nucleotide may be methylated to form 5-methylcytosine"
cgttgctatggcgactggggaggggcggtgtctgttctgaatcgctgtgtgtcacccgggcgctgcccaggaagggcagggctggggtgatgaccatggtaacacccgggggggagttcgtg

SEQ ID NO: 16182 - DNA, 122 bp, Homo sapiens
  misc_feature (61)..(62): /note="This region represents a CpG dinucleotide"
  misc_feature (61)..(61): /note="Nucleotide may be methylated to form 5-methylcytosine"
gattccacaggataatggcaccaagctacccaagtagatgtttctggtattctagactgccgttcatgcttgtttcctaaagtatacttaaaagtttcaaatacagtttcacttagaaactg

SEQ ID NO: 16183 - DNA, 122 bp, Homo sapiens
  misc_feature (61)..(62): /note="This region represents a CpG dinucleotide"
  misc_feature (61)..(61): /note="Nucleotide may be methylated to form 5-methylcytosine"
tgtacctgattgtacctaatcctcctaatatttattttattatgtatgagaaatcaaagacgtaggaaagttaaataacttactaaagttatggcttatagatggcagagctgaatttgaac

SEQ ID NO: 16184 - DNA, 122 bp, Homo sapiens
  misc_feature (61)..(62): /note="This region represents a CpG dinucleotide"
  misc_feature (61)..(61): /note="Nucleotide may be methylated to form 5-methylcytosine"
attactgacaccttgagaacatccaccaagttgaggatggtgaaagatacctaagtcactcgaggaaagcaggttggtacaaagtagaaaaattacaccaggttggagaacaagaccagcag

SEQ ID NO: 16185 - DNA, 122 bp, Homo sapiens
  misc_feature (61)..(62): /note="This region represents a CpG dinucleotide"
  misc_feature (61)..(61): /note="Nucleotide may be methylated to form 5-methylcytosine"
gactccgtgagctagattatagaattcctgttgacagttataattggtaggcacagaaagcgtaaagatggagtttggaatggaatctggcctgtctgactctaagccctggatccactgta

SEQ ID NO: 16186 - DNA, 122 bp, Homo sapiens
  misc_feature (61)..(62): /note="This region represents a CpG dinucleotide"
  misc_feature (61)..(61): /note="Nucleotide may be methylated to form 5-methylcytosine"
ttgagaggatctacaggtctctgctagaccacctgtaattggagggatcatttacacctgcggttgattagcgaaagaatcctaaaagctcctttaatcaaaactattacagataccctttt

SEQ ID NO: 16187 - DNA, 122 bp, Homo sapiens
  misc_feature (61)..(62): /note="This region represents a CpG dinucleotide"
  misc_feature (61)..(61): /note="Nucleotide may be methylated to form 5-methylcytosine"
atattttccccttgacaaccagttgccaggctgcaattgagtcacagtgtctcctaacatcgccgtggagctacccttgacaatcgctcactcctgtccttttggaagcctagcagcacttc

SEQ ID NO: 16188 - DNA, 122 bp, Homo sapiens
  misc_feature (61)..(62): /note="This region represents a CpG dinucleotide"
  misc_feature (61)..(61): /note="Nucleotide may be methylated to form 5-methylcytosine"
tctttcttttgcttctcgaaactccaagcaacaaaactgccaattttaatctagaccactcggtggcagtaaaacagaaatgtctgcaaagaaagcagaaatcccttcagaattataataag

SEQ ID NO: 16189 - DNA, 122 bp, Homo sapiens
  misc_feature (61)..(62): /note="This region represents a CpG dinucleotide"
  misc_feature (61)..(61): /note="Nucleotide may be methylated to form 5-methylcytosine"
ctggaatccacacttacaactgtgtgaccttgggcaagtgtattcacttctctgagactccgtgtaaagtggcgttaggggagacagaaaatccacctcccggctgggcgcggtggctcaca

SEQ ID NO: 16190 - DNA, 122 bp, Homo sapiens
  misc_feature (61)..(62): /note="This region represents a CpG dinucleotide"
  misc_feature (61)..(61): /note="Nucleotide may be methylated to form 5-methylcytosine"
aatcaaaagagaatgttgtttaagtgagtcataggtattcaatgactgaggtttaaaaatcgtcttgtcaatgtgtggatcattaagcaattaggcccgctgcttaactgatattttgtgta

SEQ ID NO: 16191 - DNA, 122 bp, Homo sapiens
  misc_feature (61)..(62): /note="This region represents a CpG dinucleotide"
  misc_feature (61)..(61): /note="Nucleotide may be methylated to form 5-methylcytosine"
tggccaccagctactgcgggaggctctgggaggccagcggaaggcgcagcgcgcggtggacggtgctcgggcgtagagggggagagcggccggtagagggggagagcagaccagcccggccg

SEQ ID NO: 16192 - DNA, 122 bp, Homo sapiens
  misc_feature (61)..(62): /note="This region represents a CpG dinucleotide"
  misc_feature (61)..(61): /note="Nucleotide may be methylated to form 5-methylcytosine"
ggaggcctcccagcactatccaaagtgggaagatacccagacccaaagtgtcttctgactcgtcatcacagctatatccctggaagaggagtgtctctccccacagtgccttcgcctctcct

SEQ ID NO: 16193 - DNA, 122 bp, Homo sapiens
  misc_feature (61)..(62): /note="This region represents a CpG dinucleotide"
  misc_feature (61)..(61): /note="Nucleotide may be methylated to form 5-methylcytosine"
ggggatcactgaaagcatggtgggtaggaggtgggcagagggccgtggagagggggactgcgcctgcccctgagctgcctctgcaggtgctgcaccatggcccacagcttctgtactggcag

SEQ ID NO: 16194 - DNA, 122 bp, Homo sapiens
  misc_feature (61)..(62): /note="This region represents a CpG dinucleotide"
  misc_feature (61)..(61): /note="Nucleotide may be methylated to form 5-methylcytosine"
agggttgttgtgaggagtaaatgtatgtaaatatcccagcccacgacagactctcagtaacggtagctattgtgacatttctatatgtggtatatgtggctgagatcatgtgattgtggggg

SEQ ID NO: 16195 - DNA, 122 bp, Homo sapiens
  misc_feature (61)..(62): /note="This region represents a CpG dinucleotide"
  misc_feature (61)..(61): /note="Nucleotide may be methylated to form 5-methylcytosine"
tgtgaaaggatcataccataaccaaaaaccatcacctggggatgcactcttcctatggaacgtgagtaattcccaagaattcatgtagaacaagaggcatagattaaagtcttggcaagact

SEQ ID NO: 16196 - DNA, 122 bp, Homo sapiens
  misc_feature (61)..(62): /note="This region represents a CpG dinucleotide"
  misc_feature (61)..(61): /note="Nucleotide may be methylated to form 5-methylcytosine"
gttctcctacagccatggtaaggactttgacttttactctgagatgaaaagccagaggagcggcatgacctggaattatgttttaactaggatcacattgtctgctgtatggagaataggcc

SEQ ID NO: 16197 - DNA, 122 bp, Homo sapiens
  misc_feature (61)..(62): /note="This region represents a CpG dinucleotide"
  misc_feature (61)..(61): /note="Nucleotide may be methylated to form 5-methylcytosine"
ctctgtgtgtatttcaggcctggcctggacagcctaacactcctcccaggccaagatcagcggataaaatcagtccaatgagctgcttgtcagagaagcttctggccttgactttcagattc

SEQ ID NO: 16198 - DNA, 122 bp, Homo sapiens
  misc_feature (61)..(62): /note="This region represents a CpG dinucleotide"
  misc_feature (61)..(61): /note="Nucleotide may be methylated to form 5-methylcytosine"
catctcaattcagccagtcacattttaaggactgcacagccaagtgtggctaacaactgccgtattagacagtgcaggtctggcacattgtaaatgcttaaaaaacattaaatatcatgaaa

SEQ ID NO: 16199 - DNA, 122 bp, Homo sapiens
  misc_feature (61)..(62): /note="This region represents a CpG dinucleotide"
  misc_feature (61)..(61): /note="Nucleotide may be methylated to form 5-methylcytosine"
tttattctgcactcactataggctgggagctacactagggcctggggacatgaagacaggcgacacggtccctgggctcaagatgccagacagatgtgcaaacaagtgaaatctgatgtgat

SEQ ID NO: 16200 - DNA, 122 bp, Homo sapiens
  misc_feature (61)..(62): /note="This region represents a CpG dinucleotide"
  misc_feature (61)..(61): /note="Nucleotide may be methylated to form 5-methylcytosine"
ccactctaacccaaaggggtgttccctggtgaggccctgctgagaagctagggttggtctcgcttcatctctgtgtcctgaggtttcttgagaaaggttggttgtgggcccgcagagggctg

SEQ ID NO: 16201 - DNA, 122 bp, Homo sapiens
  misc_feature (61)..(62): /note="This region represents a CpG dinucleotide"
  misc_feature (61)..(61): /note="Nucleotide may be methylated to form 5-methylcytosine"
gagtatctagaaaattctaaagttctgtatggttgggatgtaggggtcacctagcagacccgtgagagatgagataggagaaatagacaggagccagggtacagaaggccttgcagttgagg

SEQ ID NO: 16202 - DNA, 122 bp, Homo sapiens
  misc_feature (61)..(62): /note="This region represents a CpG dinucleotide"
  misc_feature (61)..(61): /note="Nucleotide may be methylated to form 5-methylcytosine"
gtggaaaaggctgacaagtttcatttccctgaccttggacagccctcctgatgcagggagcgcccatccctggggagcactgcctctccaggagcctgaacttccttctttttggttcagga

SEQ ID NO: 16203 - DNA, 122 bp, Homo sapiens
  misc_feature (61)..(62): /note="This region represents a CpG dinucleotide"
  misc_feature (61)..(61): /note="Nucleotide may be methylated to form 5-methylcytosine"
ccaatgactcattgaagagatataataacaggctctgggtggtaagtcatcaattcatgacgaaatgtgcaggcatgagataactctttggcggtacttaaggtatctcctgtggctggaag

SEQ ID NO: 16204 - DNA, 122 bp, Homo sapiens
  misc_feature (61)..(62): /note="This region represents a CpG dinucleotide"
  misc_feature (61)..(61): /note="Nucleotide may be methylated to form 5-methylcytosine"
gagcaggaacttattcatcttatttaccacttcatgccttgtgcctaaaacagtgactaacggagtgggcagtccaaactaacagctgttcactgagtaagtgagcataatattgcattatt

SEQ ID NO: 16205 - DNA, 122 bp, Homo sapiens
  misc_feature (61)..(62): /note="This region represents a CpG dinucleotide"
  misc_feature (61)..(61): /note="Nucleotide may be methylated to form 5-methylcytosine"
gagggaccctactactgtaccgattcccagtacatcaaagccatcacttaggctggtgcacggtacctccaaaaagcaagcaaacaaacgcaggaagaacaagagtcagtgtctgtctgtct

SEQ ID NO: 16206 - DNA, 122 bp, Homo sapiens
  misc_feature (61)..(62): /note="This region represents a CpG dinucleotide"
  misc_feature (61)..(61): /note="Nucleotide may be methylated to form 5-methylcytosine"
cgcgctccgattggctgccgcttttgggcggattagaagctggattgtagcagagtgactcgcagaggccatgccccctcgtcttgtggcaggaccggaggggcgatcccggcatcccacgc

SEQ ID NO: 16207 - DNA, 122 bp, Homo sapiens
  misc_feature (61)..(62): /note="This region represents a CpG dinucleotide"
  misc_feature (61)..(61): /note="Nucleotide may be methylated to form 5-methylcytosine"
tagaatagtggccaagaacacagagtgcttcagttgagtcccacgttttctacttattagcgatgtcactggaggcaatttatttaacagttttgtgacttgcttgtctcatatttaaaatg

SEQ ID NO: 16208 - DNA, 122 bp, Homo sapiens
  misc_feature (61)..(62): /note="This region represents a CpG dinucleotide"
  misc_feature (61)..(61): /note="Nucleotide may be methylated to form 5-methylcytosine"
tcaaatcttgaagctctgaaactacttcccttacagtaacacacttctaccaatagatgccgccctttcacttcttgagtgcacaatctcctgtgtggcatttgcttaaggcagagcttgct

SEQ ID NO: 16209 - DNA, 122 bp, Homo sapiens
  misc_feature (61)..(62): /note="This region represents a CpG dinucleotide"
  misc_feature (61)..(61): /note="Nucleotide may be methylated to form 5-methylcytosine"
acacacatatccaggaacaatgtggtagtttataccacagcttctgattcttgaaacagccgctacttttaaccaccctccctcccctcccaacaaacataaattatggaggtcctgggtac

SEQ ID NO: 16210 - DNA, 122 bp, Homo sapiens
  misc_feature (61)..(62): /note="This region represents a CpG dinucleotide"
  misc_feature (61)..(61): /note="Nucleotide may be methylated to form 5-methylcytosine"
cctgtgcatacgtatgtccatccaggcatgcatgcgtgtttgtatacacacatatgcacacggaatagccatgtacattgaagcaccaaactaggcagctggataatgggagagtcggctgg

SEQ ID NO: 16211 - DNA, 122 bp, Homo sapiens
  misc_feature (61)..(62): /note="This region represents a CpG dinucleotide"
  misc_feature (61)..(61): /note="Nucleotide may be methylated to form 5-methylcytosine"
agcaattctcctgcctcagcctcctgaatagctgggattacaggcgcccgccaccacgcccggctaatttggactttcactcttgttggtcactcttgttgatcttttgtaacagacctctc

SEQ ID NO: 16212 - DNA, 122 bp, Homo sapiens
  misc_feature (61)..(62): /note="This region represents a CpG dinucleotide"
  misc_feature (61)..(61): /note="Nucleotide may be methylated to form 5-methylcytosine"
ttctcatctgtgtaggtttgcggtgtttcttgaggcgagagctgtctgtgtaggttttgccgctgcctatgtaatcccaagtgtgggtagtgatcttttttggcttgtgctcctccaagatg

SEQ ID NO: 16213 - DNA, 122 bp, Homo sapiens
  misc_feature (61)..(62): /note="This region represents a CpG dinucleotide"
  misc_feature (61)..(61): /note="Nucleotide may be methylated to form 5-methylcytosine"
cctgcactaaaactgtcatgacaaagcacaccattgaccttcccttcgcaaatctaggagcgtggtttttggtcctcatttgatgtctctgtaatagttggtgttattgagcatccgcttct

SEQ ID NO: 16214 - DNA, 122 bp, Homo sapiens
  misc_feature (61)..(62): /note="This region represents a CpG dinucleotide"
  misc_feature (61)..(61): /note="Nucleotide may be methylated to form 5-methylcytosine"
cagcctgctccctgggatcatggtgcagtggggccctctctgctctacctcccggtagagcgccaggcattaagagcacccacttgcctggaccagcagcctgagctgccccacccttcttg

SEQ ID NO: 16215 - DNA, 122 bp, Homo sapiens
  misc_feature (61)..(62): /note="This region represents a CpG dinucleotide"
  misc_feature (61)..(61): /note="Nucleotide may be methylated to form 5-methylcytosine"
caccgcttcctggtggtcacgccgcgggcaggacgcgggaggccaggtccgtgcatcccgcgtgtcctgagcttcggcccagggtccctccgtgccccggaaccccgccggctttcttcggc

SEQ ID NO: 16216 - DNA, 122 bp, Homo sapiens
  misc_feature (61)..(62): /note="This region represents a CpG dinucleotide"
  misc_feature (61)..(61): /note="Nucleotide may be methylated to form 5-methylcytosine"
gcaggtgctcactgggaacaaggctggtggactccttggcccttggaacagaagggcatacgtaagttcatgtggattcattttagaagtcatatagggacgacaggaaaagcactgtacca

SEQ ID NO: 16217 - DNA, 122 bp, Homo sapiens
  misc_feature (61)..(62): /note="This region represents a CpG dinucleotide"
  misc_feature (61)..(61): /note="Nucleotide may be methylated to form 5-methylcytosine"
gcctgaagacagagaggtaagaagccacaagagttttcgtggtggagggagttagttatgcggtaattgcaataatggcttatctgactgtgcaaccatggccaagggcttaacagcctttg

SEQ ID NO: 16218 - DNA, 122 bp, Homo sapiens
  misc_feature (61)..(62): /note="This region represents a CpG dinucleotide"
  misc_feature (61)..(61): /note="Nucleotide may be methylated to form 5-methylcytosine"
ctccaagggcagtggtgcattccttagcacaagtataaatttactgttgctaagagttctcggaacaggataatacaagaaggaaccactgcaagtgaaatccagccaccagtaatgccgag

SEQ ID NO: 16219 - DNA, 122 bp, Homo sapiens
  misc_feature (61)..(62): /note="This region represents a CpG dinucleotide"
  misc_feature (61)..(61): /note="Nucleotide may be methylated to form 5-methylcytosine"
atttgctaagagaagaaagcatattgtttcttaagtcacctgtagggcgaagtaaatatgcgaggaaatagtctccataattgtttaaaattcattgaagattgcttttctgtacaaaagag

SEQ ID NO: 16220 - DNA, 122 bp, Homo sapiens
  misc_feature (61)..(62): /note="This region represents a CpG dinucleotide"
  misc_feature (61)..(61): /note="Nucleotide may be methylated to form 5-methylcytosine"
ggtgaatcaatgaaccccttaatgaatggtccacccctagatcatcagcatcctttttaacgctaggcatatagtctgaactcaacacatgtttacagatggaatgctgcacagtcctgcca

SEQ ID NO: 16221 - DNA, 122 bp, Homo sapiens
  misc_feature (61)..(62): /note="This region represents a CpG dinucleotide"
  misc_feature (61)..(61): /note="Nucleotide may be methylated to form 5-methylcytosine"
tcttcttgtctttcttcccaactttcaaaaatggcgcttattactcaagaaaaaccacaacgctttgagctggcactagttagctcaattgaaggtcagattttgcatagaagattcagaga

SEQ ID NO: 16222 - DNA, 122 bp, Homo sapiens
  misc_feature (61)..(62): /note="This region represents a CpG dinucleotide"
  misc_feature (61)..(61): /note="Nucleotide may be methylated to form 5-methylcytosine"
aagcgtggcctgaggatgcctcagtgccaagtcacaccatgacctggacctgccttagtccgtgaatcaatgggtaacctcactgggaggagctggtctcagtcattcgcggcagccctctg

SEQ ID NO: 16223 - DNA, 122 bp, Homo sapiens
  misc_feature (61)..(62): /note="This region represents a CpG dinucleotide"
  misc_feature (61)..(61): /note="Nucleotide may be methylated to form 5-methylcytosine"
attttatgtgacatatcacacaacccagtgcatggtttacacaggtattattattattctcgagattcagagatgcagaaagatccaaaaacagcccaaggtcactgagccattgctgacag

SEQ ID NO: 16224 - DNA, 122 bp, Homo sapiens
  misc_feature (61)..(62): /note="This region represents a CpG dinucleotide"
  misc_feature (61)..(61): /note="Nucleotide may be methylated to form 5-methylcytosine"
gtggggttgagtgtttcaggctatctaatctgctgtattgctggaaactgaccacctttgcgctttttttagtttcttttctctaccccctagctctgaatattcagtttctgttctttcat

SEQ ID NO: 16225 - DNA, 122 bp, Homo sapiens
  misc_feature (61)..(62): /note="This region represents a CpG dinucleotide"
  misc_feature (61)..(61): /note="Nucleotide may be methylated to form 5-methylcytosine"
agctcagaggggaaagcacatccatgaggaaactgctccacgagtcattaaaggcagcatcggaaaggaggcttatgatcccagagttcaattcctgcaaactgaccatgccagctcagagg

SEQ ID NO: 16226 - DNA, 122 bp, Homo sapiens
  misc_feature (61)..(62): /note="This region represents a CpG dinucleotide"
  misc_feature (61)..(61): /note="Nucleotide may be methylated to form 5-methylcytosine"
taagctccgtgctgttttcaagtgcttgtggttttcttgcctaacctgcagcctctcggccgtgtcgttatgttatccatcccaccaccactggactgtaggaaggcggatatgttgtccag

SEQ ID NO: 16227 - DNA, 122 bp, Homo sapiens
  misc_feature (61)..(62): /note="This region represents a CpG dinucleotide"
  misc_feature (61)..(61): /note="Nucleotide may be methylated to form 5-methylcytosine"
ctccgacaagcagattctaaacatctatgacctgtgcaacaagttcatagcctatagcaccgtctttgaggatgtagtggatgtgcttgctgagtggggctccctgtacgtgctgacgcggg

SEQ ID NO: 16228 - DNA, 122 bp, Homo sapiens
  misc_feature (61)..(62): /note="This region represents a CpG dinucleotide"
  misc_feature (61)..(61): /note="Nucleotide may be methylated to form 5-methylcytosine"
gggctccacgcacctggagcagagccagacacgcacaggaaactctccctgaagtgctcacgaggtgaggtgcgtgagggcaccgcagagagcaggacggcctgactcacgggacttctgtg

SEQ ID NO: 16229 - DNA, 122 bp, Homo sapiens
  misc_feature (61)..(62): /note="This region represents a CpG dinucleotide"
  misc_feature (61)..(61): /note="Nucleotide may be methylated to form 5-methylcytosine"
aaaggatatctatgagtaattgtatttgataatcttagtgaaaggattattttaaacaaccgctgctaagaaggtgactgatttgagttcatctctgggcttcccctttggctaaaatgcta

SEQ ID NO: 16230 - DNA, 122 bp, Homo sapiens
  misc_feature (61)..(62): /note="This region represents a CpG dinucleotide"
  misc_feature (61)..(61): /note="Nucleotide may be methylated to form 5-methylcytosine"
tgaccacttcctcaaggtcagccttggcacaggccaggtggttcctgtcaggcatgcccccgagacccatcttggcccgcttgaggtcatgcaggtaggctctgatgtggatctgccaacag

SEQ ID NO: 16231 - DNA, 122 bp, Homo sapiens
  misc_feature (61)..(62): /note="This region represents a CpG dinucleotide"
  misc_feature (61)..(61): /note="Nucleotide may be methylated to form 5-methylcytosine"
tcaaatttggtgtaccagatttaaccctagaggatgaataacatctgagacatttggtctcgtccagggagcgttataaaaagctttcagcagagtgatgtcatgtgtccttacaagggaaa

SEQ ID NO: 16232 - DNA, 122 bp, Homo sapiens
  misc_feature (61)..(62): /note="This region represents a CpG dinucleotide"
  misc_feature (61)..(61): /note="Nucleotide may be methylated to form 5-methylcytosine"
gcttttcttctcccaggaagaatccagaatagttcagacaagcttcaggtccgccagaaccggggaaaacaacgtgtagggtttgttttaaagggcttttaaatggggtttgggagatccag

SEQ ID NO: 16233 - DNA, 122 bp, Homo sapiens
  misc_feature (61)..(62): /note="This region represents a CpG dinucleotide"
  misc_feature (61)..(61): /note="Nucleotide may be methylated to form 5-methylcytosine"
aaagaggaatcacccaacctagcaacattccagaatgttccaacatagatatggaggctccgaggcagagtgatctggtaaattgaacacgacctcagtcttagatcccagatgtaaggata

SEQ ID NO: 16234 - DNA, 122 bp, Homo sapiens
  misc_feature (61)..(62): /note="This region represents a CpG dinucleotide"
  misc_feature (61)..(61): /note="Nucleotide may be methylated to form 5-methylcytosine"
gagtgttagagaataaagacactgattcatcagggcccttatgtcccagcctctgaatggcgtggggcagatcttctcctctgacctgatggccggaaaagtctggaaagccttctctggaa

SEQ ID NO: 16235 - DNA, 122 bp, Homo sapiens
  misc_feature (61)..(62): /note="This region represents a CpG dinucleotide"
  misc_feature (61)..(61): /note="Nucleotide may be methylated to form 5-methylcytosine"
aaatggaaaacaggaaaacacatgtgtgactctggccggcagcggggaggggccaggggacgggctggagctgggactgcctggtcagacccagaggacctcagtgcctgcccgcctccagg

SEQ ID NO: 16236 - DNA, 122 bp, Homo sapiens
  misc_feature (61)..(62): /note="This region represents a CpG dinucleotide"
  misc_feature (61)..(61): /note="Nucleotide may be methylated to form 5-methylcytosine"
gctacggcagagggagctggctggtcagttaaagctcaggggagcctggcactgcaccgtcgctcccctgggcccttgccctgcacgttccttgacgtggggtgctcttctcaatagggtgg

SEQ ID NO: 16237 - DNA, 122 bp, Homo sapiens
  misc_feature (61)..(62): /note="This region represents a CpG dinucleotide"
  misc_feature (61)..(61): /note="Nucleotide may be methylated to form 5-methylcytosine"
aaaagcaacagagaagagacaaaagtcctgaactgaaacttggtagacaggaaatatccgcgggcggaaaacgcgcttcctgttccaagtcacagggaaatgcaaatccaaacactgagcgg

SEQ ID NO: 16238 - DNA, 122 bp, Homo sapiens
  misc_feature (61)..(62): /note="This region represents a CpG dinucleotide"
  misc_feature (61)..(61): /note="Nucleotide may be methylated to form 5-methylcytosine"
gggcgagcctggcagcctcctgagcggcaggactatgcaggcgccttattgagctgtcagcggctggcagctgctcccaggtagcaggaagaagggccgagctccacgtgggcatgaaaggc

SEQ ID NO: 16239 - DNA, 122 bp, Homo sapiens
  misc_feature (61)..(62): /note="This region represents a CpG dinucleotide"
  misc_feature (61)..(61): /note="Nucleotide may be methylated to form 5-methylcytosine"
catagtttttgaaactttcatgctgaagttcgagtcagtttaatcagattttatgaaggacgaaggtaacttaagtggaaattatgatcctgaataagtcataaaattgcaaaggaagaaaa

SEQ ID NO: 16240 - DNA, 122 bp, Homo sapiens
  misc_feature (61)..(62): /note="This region represents a CpG dinucleotide"
  misc_feature (61)..(61): /note="Nucleotide may be methylated to form 5-methylcytosine"
gtctgggtagctccagctcctcccgggctactgtaacagtagcagcagcagccacgcgcgcgtgtgagcagctcagcaccaggcatgacgtaagcactttgtgtagtcattcatttaatcct

SEQ ID NO: 16241 - DNA, 122 bp, Homo sapiens
  misc_feature (61)..(62): /note="This region represents a CpG dinucleotide"
  misc_feature (61)..(61): /note="Nucleotide may be methylated to form 5-methylcytosine"
gtattctccttctctttaaagaataacttgaagattgcacacattaaatttcgcttcccacgggtcacatctaatcatatggccatgaccacacctaaccacagaagaggctgagaaagcta

SEQ ID NO: 16242 - DNA, 122 bp, Homo sapiens
  misc_feature (61)..(62): /note="This region represents a CpG dinucleotide"
  misc_feature (61)..(61): /note="Nucleotide may be methylated to form 5-methylcytosine"
tgagccaccacgcccaggcccagagccattcttctgttgcttagaccagaaatcttgattcgtatttctcttacttctgtcaagaaattttgttcagaatgtatttgcaatctacaatctga

SEQ ID NO: 16243 - DNA, 122 bp, Homo sapiens
  misc_feature (61)..(62): /note="This region represents a CpG dinucleotide"
  misc_feature (61)..(61): /note="Nucleotide may be methylated to form 5-methylcytosine"
attctgaacacaacaatatttaactatcttttccccaaaatactccagggattactcaaacgcaagggtaaggcatagaaaactacttttctgtttggtgaatggcatttccttggtcaaaa

SEQ ID NO: 16244 - DNA, 122 bp, Homo sapiens
  misc_feature (61)..(62): /note="This region represents a CpG dinucleotide"
  misc_feature (61)..(61): /note="Nucleotide may be methylated to form 5-methylcytosine"
tcattcccattttacagatgagcaaactgaatctcagggtgagtaattttcccaaggccacgaagctagaaaatgacagaactcagaatgtgagcccaaatgtgtctgatttcaaaagctat

SEQ ID NO: 16245 - DNA, 122 bp, Homo sapiens
  misc_feature (61)..(62): /note="This region represents a CpG dinucleotide"
  misc_feature (61)..(61): /note="Nucleotide may be methylated to form 5-methylcytosine"
cagctttcattttgtttgcaaacacattcatgtacatgttctcatttggacccctccccccgctgctgccggcaacctgtgagtggaaaggacatacgtgtgtgtgtgtgtgtgtgtgtgtg

SEQ ID NO: 16246 - DNA, 122 bp, Homo sapiens
  misc_feature (61)..(62): /note="This region represents a CpG dinucleotide"
  misc_feature (61)..(61): /note="Nucleotide may be methylated to form 5-methylcytosine"
gagggactcagctgtgagtcagcagctgtggcaatatcagcacagtactgtgccccagtacggaagggagatctgaacaatgcatcatagcatcccataacacattacaggtgttaggggct

SEQ ID NO: 16247 - DNA, 122 bp, Homo sapiens
  misc_feature (61)..(62): /note="This region represents a CpG dinucleotide"
  misc_feature (61)..(61): /note="Nucleotide may be methylated to form 5-methylcytosine"
attgccttgaggcaggcatttttatccccattttatcaatgaggaaatagggaaattaagcgacttgcccagagtcacacagctagggaggagctagagctagaattcaaacccaggcagac

SEQ ID NO: 16248 - DNA, 122 bp, Homo sapiens
  misc_feature (61)..(62): /note="This region represents a CpG dinucleotide"
  misc_feature (61)..(61): /note="Nucleotide may be methylated to form 5-methylcytosine"
caacactcctgtcgcacgtccttccaggggggtcagggaactcttcctttttcaccaggacgagcacagatctgaagcagcaaagagccagttgtttattacattgaacaatgtttcacact

SEQ ID NO: 16249 - DNA, 122 bp, Homo sapiens
  misc_feature (61)..(62): /note="This region represents a CpG dinucleotide"
  misc_feature (61)..(61): /note="Nucleotide may be methylated to form 5-methylcytosine"
aggacctgccattatcttccccgggattcttgcacagttagtgaatttcctaaaggatcccggctctctgcctgcttctgctgttaggataggctgccccaagctgccctctgattcctctg

SEQ ID NO: 16250 - DNA, 122 bp, Homo sapiens
  misc_feature (61)..(62): /note="This region represents a CpG dinucleotide"
  misc_feature (61)..(61): /note="Nucleotide may be methylated to form 5-methylcytosine"
ccaggatttacatatttcaatatcccttccttgaaggctaagcatttcctcctacagtgacgtcacttctaagaattactcagggcttctgaaggggacttcccttcgtaaccgtatcccaa

SEQ ID NO: 16251 - DNA, 122 bp, Homo sapiens
  misc_feature (61)..(62): /note="This region represents a CpG dinucleotide"
  misc_feature (61)..(61): /note="Nucleotide may be methylated to form 5-methylcytosine"
cagtatttgccctgcctctgctgaatcagcttcacattcctgctccccagcaggcatgttcgacacaatggcgagtccctcccttccccagtgccacacatgggatgaaccagtgtcactta

SEQ ID NO: 16252 - DNA, 122 bp, Homo sapiens
  misc_feature (61)..(62): /note="This region represents a CpG dinucleotide"
  misc_feature (61)..(61): /note="Nucleotide may be methylated to form 5-methylcytosine"
cgagatgggaggcatgttaagtacacaggagctcacttacatactgaatgaagtccctaacgaagggggcctaggggccaaattgaaacaacttagctaacaaaattaagtatgatgggttt

SEQ ID NO: 16253 - DNA, 122 bp, Homo sapiens
  misc_feature (61)..(62): /note="This region represents a CpG dinucleotide"
  misc_feature (61)..(61): /note="Nucleotide may be methylated to form 5-methylcytosine"
gcggctggtctctgtccctatggtctgggctccggttcactgctcccctgccctccaggtcggtcactgactcggttactatccagcgacctccgtggctgttcagtggtggctgcaggtct

SEQ ID NO: 16254 - DNA, 122 bp, Homo sapiens
  misc_feature (61)..(62): /note="This region represents a CpG dinucleotide"
  misc_feature (61)..(61): /note="Nucleotide may be methylated to form 5-methylcytosine"
ttcctgaatgaacaggattccctgctgtagaatcttgttggctggtctacactggccttacgttatcttgaaaatcttccttttgagcaggattgtgggggctgcaggagttctgctgactg

SEQ ID NO: 16255 - DNA, 122 bp, Homo sapiens
  misc_feature (61)..(62): /note="This region represents a CpG dinucleotide"
  misc_feature (61)..(61): /note="Nucleotide may be methylated to form 5-methylcytosine"
cccttccgaagaccagacccgcccccaaaccttccccaggaccagacccacccccaaattcgacggggctccgaatcccatcccccacagaaaggtcaaccccggccccctcctcccagtgt

SEQ ID NO: 16256 - DNA, 122 bp, Homo sapiens
  misc_feature (61)..(62): /note="This region represents a CpG dinucleotide"
  misc_feature (61)..(61): /note="Nucleotide may be methylated to form 5-methylcytosine"
ggcccacccccaggaaggccacagtgctgggcggcatccctgcagaggaaagacaggacccggggcccgcctcacaccccagtggatttggagttgcttaaaatagactccggccttcacca

SEQ ID NO: 16257 - DNA, 122 bp, Homo sapiens
  misc_feature (61)..(62): /note="This region represents a CpG dinucleotide"
  misc_feature (61)..(61): /note="Nucleotide may be methylated to form 5-methylcytosine"
caagccttgggccccacccgcgctccacacaaaccccagatcccccagcccttccggggtcgccccctgggctcacctgggctcagtctcctgggctcagggttcagcagctccgggctctc

SEQ ID NO: 16258 - DNA, 122 bp, Homo sapiens
  misc_feature (61)..(62): /note="This region represents a CpG dinucleotide"
  misc_feature (61)..(61): /note="Nucleotide may be methylated to form 5-methylcytosine"
ttaaagaaactttttgtcaactcatgagataggtgatacataaacaactataaagagaaccgcaaagctgagtggaaatgtggtttccctgctgtcatcatctagatacagttatttctacc

SEQ ID NO: 16259 - DNA, 122 bp, Homo sapiens
  misc_feature (61)..(62): /note="This region represents a CpG dinucleotide"
  misc_feature (61)..(61): /note="Nucleotide may be methylated to form 5-methylcytosine"
gtgtcagaagttccagtttgtgctgactcaggaggacagaggctccgtgggctggaaccccggacaggagagggtgtgtgagccccgtcccctgcccagccaggaggaaatcccccgctccg

SEQ ID NO: 16260 - DNA, 122 bp, Homo sapiens
  misc_feature (61)..(62): /note="This region represents a CpG dinucleotide"
  misc_feature (61)..(61): /note="Nucleotide may be methylated to form 5-methylcytosine"
gctctttaattaactttaatcctccaaaaatccatgctgcaatctgttctgacaatcccacgctccttaggaggccctcggcacgacctggcacatcctgtgggctggaggtggccggaatg

SEQ ID NO: 16261 - DNA, 122 bp, Homo sapiens
  misc_feature (61)..(62): /note="This region represents a CpG dinucleotide"
  misc_feature (61)..(61): /note="Nucleotide may be methylated to form 5-methylcytosine"
ccaagctggatgaagatgagctgtaactggtgaaaaccatgggggtggtgctgactcagccgcctattccccaaggagcttcagggcagtccttctggcactgctccagaattcctccttct

SEQ ID NO: 16262 - DNA, 122 bp, Homo sapiens
  misc_feature (61)..(62): /note="This region represents a CpG dinucleotide"
  misc_feature (61)..(61): /note="Nucleotide may be methylated to form 5-methylcytosine"
tttgttatcattaccttaactcatacagaaagtagtgtctttgattgggctttgtgttgccggttctggaaaccccagctcttcattcatagacagaaaactggcagcaccaaatcacccat

SEQ ID NO: 16263 - DNA, 122 bp, Homo sapiens
  misc_feature (61)..(62): /note="This region represents a CpG dinucleotide"
  misc_feature (61)..(61): /note="Nucleotide may be methylated to form 5-methylcytosine"
gaaaggcttccaagaggaagtagactcactcttctccagctcttcagtgagaactattcccgtttgtgctttggcaaaatgacaaatgatgacaccccatagactcactttgtagactaact

SEQ ID NO: 16264 - DNA, 122 bp, Homo sapiens
  misc_feature (61)..(62): /note="This region represents a CpG dinucleotide"
  misc_feature (61)..(61): /note="Nucleotide may be methylated to form 5-methylcytosine"
tgtagcctatatgcaggttattgtcctgagctatgctgccctgcactaccacagtgtgtacgtcctgctaatgacaagagaagcagtgctgatattcagctggaatgcatcgacacacctct

SEQ ID NO: 16265 - DNA, 122 bp, Homo sapiens
  misc_feature (61)..(62): /note="This region represents a CpG dinucleotide"
  misc_feature (61)..(61): /note="Nucleotide may be methylated to form 5-methylcytosine"
ctagaaagatgatggattgaaggcacaatcctactcctatgaaactcatgaagatctcctcgagcaatggcaggaaacagagctgctgactagcagtttcgcgggaggttaaaagaagagaa

SEQ ID NO: 16266 - DNA, 122 bp, Homo sapiens
  misc_feature (61)..(62): /note="This region represents a CpG dinucleotide"
  misc_feature (61)..(61): /note="Nucleotide may be methylated to form 5-methylcytosine"
agtgggcagtgtccccattctacagtctagtgtgcaatttccttgctatttgtgatgcttcgtcatggcttggatggccttctgataagaggtcccctctgtagaaatcgtgatgagttaat

SEQ ID NO: 16267 - DNA, 122 bp, Homo sapiens
  misc_feature (61)..(62): /note="This region represents a CpG dinucleotide"
  misc_feature (61)..(61): /note="Nucleotide may be methylated to form 5-methylcytosine"
ggcttccatccaagtgtttcttgactgcctgtcatgggccaagtctctgggtgcaggtaacggaaacctaattcagactgcctcaggcagaagcaggcactgactggaaagatatggaggtg

SEQ ID NO: 16268 - DNA, 122 bp, Homo sapiens
  misc_feature (61)..(62): /note="This region represents a CpG dinucleotide"
  misc_feature (61)..(61): /note="Nucleotide may be methylated to form 5-methylcytosine"
tccaatcttcttgaaaaccagttcttaattgtaaggaatttttccacctgggaaccatgccgtaatttaaaaatataaaagacctttcatgaacaataactgcaaataacccatttgttagt

SEQ ID NO: 16269 - DNA, 122 bp, Homo sapiens
  misc_feature (61)..(62): /note="This region represents a CpG dinucleotide"
  misc_feature (61)..(61): /note="Nucleotide may be methylated to form 5-methylcytosine"
gacattagtttctgcccttaaaaaacttctgttcagtaaatatcctgctagagactttaacggaataacaagtaaaactctatggctaaaaaagaggaagtcagttgagtatcgtaatctaa

SEQ ID NO: 16270 - DNA, 122 bp, Homo sapiens
  misc_feature (61)..(62): /note="This region represents a CpG dinucleotide"
  misc_feature (61)..(61): /note="Nucleotide may be methylated to form 5-methylcytosine"
tcacacctgggacacatggtcatggtaccacccatatgttctgcccaggcacagctcttgcgtctcctgcattatttccttagactccataacctgctcagacctcaagaaaagagaacctt

SEQ ID NO: 16271 - DNA, 122 bp, Homo sapiens
  misc_feature (61)..(62): /note="This region represents a CpG dinucleotide"
  misc_feature (61)..(61): /note="Nucleotide may be methylated to form 5-methylcytosine"
caccatttgaccagatccagtcagtcccgcagcctgcagagtttgcagctgatgcaagaacgccactttcttccctgagggctgctggctgggtcacctcgcagctcagcccaaggaggggg

SEQ ID NO: 16272 - DNA, 122 bp, Homo sapiens
  misc_feature (61)..(62): /note="This region represents a CpG dinucleotide"
  misc_feature (61)..(61): /note="Nucleotide may be methylated to form 5-methylcytosine"
cagccacccttcaggaatgcagaagtccctgtaccatgtcctaagactttgtggtttccccgttatgacattttctcctaactggttgtctattttcccccttccaactcattccccctgct

SEQ ID NO: 16273 - DNA, 122 bp, Homo sapiens
  misc_feature (61)..(62): /note="This region represents a CpG dinucleotide"
  misc_feature (61)..(61): /note="Nucleotide may be methylated to form 5-methylcytosine"
tttgtaagaatctaaaattcaggctggatatgtcaacttaggctgcagcagaaggttttacggtggagcaggaggatatctcactccagctgctaggaaacagagaaacaagcctgatatta

SEQ ID NO: 16274 - DNA, 122 bp, Homo sapiens
  misc_feature (61)..(62): /note="This region represents a CpG dinucleotide"
  misc_feature (61)..(61): /note="Nucleotide may be methylated to form 5-methylcytosine"
gataaggagaaaatttcctttgcaaatcaacatcctccaccatatgactccactttttctcgggaactagattgctgacgttttgggagtatatgtctgtttcccaaactcattctcatggg

SEQ ID NO: 16275 - DNA, 122 bp, Homo sapiens
  misc_feature (61)..(62): /note="This region represents a CpG dinucleotide"
  misc_feature (61)..(61): /note="Nucleotide may be methylated to form 5-methylcytosine"
tctggtggatggttttcctgttcttttgtctttagtttttggtctttttgtgagtatctacgtacactcaattgtgagttcttgtcattttatattatgtggttcatttacttatttaattt

SEQ ID NO: 16276 - DNA, 122 bp, Homo sapiens
  misc_feature (61)..(62): /note="This region represents a CpG dinucleotide"
  misc_feature (61)..(61): /note="Nucleotide may be methylated to form 5-methylcytosine"
gcttcccaggttgctggaaaaatcaacgtaggatagcatcggtagaggacgctaccgcggcgcaggtgaaagatgtaaacagtgcaatctaaatcttcaatgggatgcaagtcagacttatt

SEQ ID NO: 16277 - DNA, 122 bp, Homo sapiens
  misc_feature (61)..(62): /note="This region represents a CpG dinucleotide"
  misc_feature (61)..(61): /note="Nucleotide may be methylated to form 5-methylcytosine"
accacattatgaattcacaacacattttgacattaaagaaaaacttccctgtgtccaaagcgcatacctatgtttatataaaatgtaaccaaatcaatttcactttccttttataaaagaac

SEQ ID NO: 16278 - DNA, 122 bp, Homo sapiens
  misc_feature (61)..(62): /note="This region represents a CpG dinucleotide"
  misc_feature (61)..(61): /note="Nucleotide may be methylated to form 5-methylcytosine"
aaaagtcagcatcaaacaccctaacttcagagtaaatggtaaaatatctctaataaaatacgacactttgacatgtagtgataaatgtgtcaaggctatgggccttcacctggtttgaggtt

SEQ ID NO: 16279 - DNA, 122 bp, Homo sapiens
  misc_feature (61)..(62): /note="This region represents a CpG dinucleotide"
  misc_feature (61)..(61): /note="Nucleotide may be methylated to form 5-methylcytosine"
aaactaaggactagaatgctggcctttgaatgtagctgactcatgtataatcataatgctcgagttaggtctccagaccaaaacagagctccacctcttatatttccagatgattgtgcgat

SEQ ID NO: 16280 - DNA, 122 bp, Homo sapiens
  misc_feature (61)..(62): /note="This region represents a CpG dinucleotide"
  misc_feature (61)..(61): /note="Nucleotide may be methylated to form 5-methylcytosine"
tgcaatcccccagcccttgggtggcaacacaaagcacctctcatactataatgctctgggcggccccaggctcagctctaatcgtgcagagcctgacctcgcctcgggggagccggctggac

SEQ ID NO: 16281 - DNA, 122 bp, Homo sapiens
  misc_feature (61)..(62): /note="This region represents a CpG dinucleotide"
  misc_feature (61)..(61): /note="Nucleotide may be methylated to form 5-methylcytosine"
tggggccctctgaaaccaaatgcacaaatactgattgaaagtccactgcatgtacctgcacgtacactgttgggtgatttctttgagatcaagatggctgtaataaacagcttaaaggctta

SEQ ID NO: 16282 - DNA, 122 bp, Homo sapiens
  misc_feature (61)..(62): /note="This region represents a CpG dinucleotide"
  misc_feature (61)..(61): /note="Nucleotide may be methylated to form 5-methylcytosine"
tgggacatatctcaaaataataagagctatgttataatatttcactagtactttaatttacgttatcctgacaaccagtaagtttgaatgtcttttcataaatgttacagctttctggattt

SEQ ID NO: 16283 - DNA, 122 bp, Homo sapiens
  misc_feature (61)..(62): /note="This region represents a CpG dinucleotide"
  misc_feature (61)..(61): /note="Nucleotide may be methylated to form 5-methylcytosine"
ccccgccggcgctcagaccacaattgtgggagccgccatcttgagaccgtcccgcttccccgcccagcgccttagtgcagccgccgctcccgaaacagcctcgacacacctaacgaatggag

SEQ ID NO: 16284 - DNA, 122 bp, Homo sapiens
  misc_feature (61)..(62): /note="This region represents a CpG dinucleotide"
  misc_feature (61)..(61): /note="Nucleotide may be methylated to form 5-methylcytosine"
gaaagtaaaggactcaacacagtacacagtcaaagggaattcccccaacaaaggtcaaggcgagtgaatctcagcacaacagccttgcaaaaggtcagaaagcgccagatctggtgtgaagc

SEQ ID NO: 16285 - DNA, 122 bp, Homo sapiens
  misc_feature (61)..(62): /note="This region represents a CpG dinucleotide"
  misc_feature (61)..(61): /note="Nucleotide may be methylated to form 5-methylcytosine"
aaatataacaattgaaaagcagttcatgatagaaatcttagcctctaaacagtatctagccgtagtcaggctatttctcttttccagattattgatgaaatatttaagtacaaataaacaat

SEQ ID NO: 16286 - DNA, 122 bp, Homo sapiens
  misc_feature (61)..(62): /note="This region represents a CpG dinucleotide"
  misc_feature (61)..(61): /note="Nucleotide may be methylated to form 5-methylcytosine"
actggtgcaggcttccccagggctgcccggttctggccagaactctgaagtgtagcagtacgtgccctggaggatctaaaatccatctcaagttctcaaagcaaacagaagatgtgtttggt

SEQ ID NO: 16287 - DNA, 122 bp, Homo sapiens
  misc_feature (61)..(62): /note="This region represents a CpG dinucleotide"
  misc_feature (61)..(61): /note="Nucleotide may be methylated to form 5-methylcytosine"
cttgtgactcaccggtaagtaacccaggctccctctgactccctaggagagtactgtctccgacctgggccccagctaggatggggcaaccctaccctgtccattgaaggtgtgatgttagc

SEQ ID NO: 16288 - DNA, 122 bp, Homo sapiens
  misc_feature (61)..(62): /note="This region represents a CpG dinucleotide"
  misc_feature (61)..(61): /note="Nucleotide may be methylated to form 5-methylcytosine"
ctgtgagttatgctgtcattgtgtctaataaatcctcctccaaagggcccagcctggcctcggtaatacaggtgtttctgtttctgtccactcacctctgagtcaaagcattaaatgcagag

SEQ ID NO: 16289 - DNA, 122 bp, Homo sapiens
  misc_feature (61)..(62): /note="This region represents a CpG dinucleotide"
  misc_feature (61)..(61): /note="Nucleotide may be methylated to form 5-methylcytosine"
atcaacaccattctggggcggtgaagtagttttcgattccgggtgatttttgtccctctgcgcttgcgcttgcgcttgcccccgctcaccttcccccagctccggcccctagccccagcatt

SEQ ID NO: 16290 - DNA, 122 bp, Homo sapiens
  misc_feature (61)..(62): /note="This region represents a CpG dinucleotide"
  misc_feature (61)..(61): /note="Nucleotide may be methylated to form 5-methylcytosine"
tagagcgtgtctgggagcaggttaaactttctcctaggtggtgatgtgcctccaggtgagcgcacaggctttgcagaaaccccagcatgacaagcaagtaggaaggtgacattgttgtttga

SEQ ID NO: 16291 - DNA, 122 bp, Homo sapiens
  misc_feature (61)..(62): /note="This region represents a CpG dinucleotide"
  misc_feature (61)..(61): /note="Nucleotide may be methylated to form 5-methylcytosine"
agaatacacatgtggctcacgttttatttcagaggattgcctcctttttaaactctcaatcggcctgctcaaaggaccagaattcagaaagggcataaaatctggaattttaaaataattgt

SEQ ID NO: 16292 - DNA, 122 bp, Homo sapiens
  misc_feature (61)..(62): /note="This region represents a CpG dinucleotide"
  misc_feature (61)..(61): /note="Nucleotide may be methylated to form 5-methylcytosine"
aaccagtgtaatgctacaaattagttcaactcattgttgcagtaaccgcaactcctagtacgccgatggtgcctacagttcgcacaaaaagaattactgcctacagtttgcacaaaaagaat

SEQ ID NO: 16293 - DNA, 122 bp, Homo sapiens
  misc_feature (61)..(62): /note="This region represents a CpG dinucleotide"
  misc_feature (61)..(61): /note="Nucleotide may be methylated to form 5-methylcytosine"
aaccacccaatctctggtattttgtaatggcagcctgaaatgactaatacaataatcttccgcaactgttaagaaggaaaaggtgaccacactttggttactcatttgatgagtatttgtta

SEQ ID NO: 16294 - DNA, 122 bp, Homo sapiens
  misc_feature (61)..(62): /note="This region represents a CpG dinucleotide"
  misc_feature (61)..(61): /note="Nucleotide may be methylated to form 5-methylcytosine"
acacagggcagaaagcatctgctttatgctgagtaattcagaaggatgttacccttcatacggtgctggtgagaaaggcacctgctgagtttccatatcaacttcctgctgagtttctctat

SEQ ID NO: 16295 - DNA, 122 bp, Homo sapiens
  misc_feature (61)..(62): /note="This region represents a CpG dinucleotide"
  misc_feature (61)..(61): /note="Nucleotide may be methylated to form 5-methylcytosine"
tttgtgtgctgcttttcacgcagagctgggcaccttgggttaacataggtgagagatgctcgggactttgggaatgtaaactggcagatattttgaggcattgttcggcctggtttgtgtac

SEQ ID NO: 16296 - DNA, 122 bp, Homo sapiens
  misc_feature (61)..(62): /note="This region represents a CpG dinucleotide"
  misc_feature (61)..(61): /note="Nucleotide may be methylated to form 5-methylcytosine"
ccactttgttatcttgcctaatatagacttggccagaacttctgtttagctagctagtgccgcagaacaaatcacctcacaatttagtgccttacagtttcgtaatctctcaggatttctgt

SEQ ID NO: 16297 - DNA, 122 bp, Homo sapiens
  misc_feature (61)..(62): /note="This region represents a CpG dinucleotide"
  misc_feature (61)..(61): /note="Nucleotide may be methylated to form 5-methylcytosine"
aggggctgtggtcgtattaagggtgtgagtggcaaggcccgcagcgggatgggcagtccccgccatgccagtgcagctctgtgtaaatccttagtcccgagtatcctcgtgtaactcagagc

SEQ ID NO: 16298 - DNA, 122 bp, Homo sapiens
  misc_feature (61)..(62): /note="This region represents a CpG dinucleotide"
  misc_feature (61)..(61): /note="Nucleotide may be methylated to form 5-methylcytosine"
attataggcgtgagccaccgtgcctggcctgtaattcctttttaatacctgcttcacatgcgatgatttgttcaggatctatttacaccaggaggctgtctgctcccagtggacagggtctg

SEQ ID NO: 16299 - DNA, 122 bp, Homo sapiens
  misc_feature (61)..(62): /note="This region represents a CpG dinucleotide"
  misc_feature (61)..(61): /note="Nucleotide may be methylated to form 5-methylcytosine"
cactcagtaatgttagctgttattatcatgttttaataactaattttctccccactccttcgtaatataacatagagtcatacctgtggcactttaatacactgcccattttgagtcaattt

SEQ ID NO: 16300 - DNA, 122 bp, Homo sapiens
  misc_feature (61)..(62): /note="This region represents a CpG dinucleotide"
  misc_feature (61)..(61): /note="Nucleotide may be methylated to form 5-methylcytosine"
ataaagatttcaaaagctcttaataccctttgtaaaatgtcttcctgttaatttacctagcgtaatctctagttgctgcactgaaccctgactgatataacttgttattaagaaacaggaag

SEQ ID NO: 16301 - DNA, 122 bp, Homo sapiens
  misc_feature (61)..(62): /note="This region represents a CpG dinucleotide"
  misc_feature (61)..(61): /note="Nucleotide may be methylated to form 5-methylcytosine"
agccagcttccagcaggcagggctgggaggttgaacttgagccggtttgggagccaggagcgagtgggtgacaggtcattcctgactgggaaggttgcttgacaagtcaggattgtgcctcc

SEQ ID NO: 16302 - DNA, 122 bp, Homo sapiens
  misc_feature (61)..(62): /note="This region represents a CpG dinucleotide"
  misc_feature (61)..(61): /note="Nucleotide may be methylated to form 5-methylcytosine"
ggagtccatatttagaatcagtatatatatattaagtctttcctttttcctgagccctaacgagggctttgagctctgcttcctgaactgaagggcttttgactctaaggttcgatttaggc

SEQ ID NO: 16303 - DNA, 122 bp, Homo sapiens
  misc_feature (61)..(62): /note="This region represents a CpG dinucleotide"
  misc_feature (61)..(61): /note="Nucleotide may be methylated to form 5-methylcytosine"
cgccatctctctctttccggcagctgcagggtgttaccggggcaacagacggctgtctgacgggatttggcagtttaactcttactccgcacaaaatacgaaagtgagaacgattgaacaga

SEQ ID NO: 16304 - DNA, 122 bp, Homo sapiens
  misc_feature (61)..(62): /note="This region represents a CpG dinucleotide"
  misc_feature (61)..(61): /note="Nucleotide may be methylated to form 5-methylcytosine"
cgcccgctgcgccgctccgacggcccggggactgcgggaaccctgcctcccacgcgggcccgaaccacccccgggagccacccgcccgctcacccatccgtgcccgcagctctctcaaggat

SEQ ID NO: 16305 - DNA, 122 bp, Homo sapiens
  misc_feature (61)..(62): /note="This region represents a CpG dinucleotide"
  misc_feature (61)..(61): /note="Nucleotide may be methylated to form 5-methylcytosine"
ggtcacaggtaatctgccttcctaaaacgagcgtggtaacttgtttgatctaactcctggcgctaataaggagtattgtagatttacctgtctgatatttcctgactgaggacaagagaact

SEQ ID NO: 16306 - DNA, 122 bp, Homo sapiens
  misc_feature (61)..(62): /note="This region represents a CpG dinucleotide"
  misc_feature (61)..(61): /note="Nucleotide may be methylated to form 5-methylcytosine"
aatttaattacctaaattaaatacacattgtaggtgctaaacagataatatccttgccttcgagaatgctatgttctgaaatttatggttaataatcctaaaacacatttggatcgttttat

SEQ ID NO: 16307 - DNA, 122 bp, Homo sapiens
  misc_feature (61)..(62): /note="This region represents a CpG dinucleotide"
  misc_feature (61)..(61): /note="Nucleotide may be methylated to form 5-methylcytosine"
cccagccatggtctggtttcttaaccaccgtgtcctgtggcctcttgtgcagtccaagcacgtatcacagcattttgtttccccattggtcagtacttgtcagggacatcacttatcttcct

SEQ ID NO: 16308 - DNA, 122 bp, Homo sapiens
  misc_feature (61)..(62): /note="This region represents a CpG dinucleotide"
  misc_feature (61)..(61): /note="Nucleotide may be methylated to form 5-methylcytosine"
caggacaagatgtctctgtgtagggcccctggctttggctgtgcaggagctcaggcagagcgtctcccaaggctgtggctatcagttgaacacaagtcctttggtgctgagctttaggtagt

SEQ ID NO: 16309 - DNA, 122 bp, Homo sapiens
  misc_feature (61)..(62): /note="This region represents a CpG dinucleotide"
  misc_feature (61)..(61): /note="Nucleotide may be methylated to form 5-methylcytosine"
cagtgaggctggttctctacttccaaaacattcagaatgactttgttcctctcatgggaacgggtggggaaggcaaggcctcaaaacaaaggctaacttgtggtaccaatgggagaagtgga

SEQ ID NO: 16310 - DNA, 122 bp, Homo sapiens
  misc_feature (61)..(62): /note="This region represents a CpG dinucleotide"
  misc_feature (61)..(61): /note="Nucleotide may be methylated to form 5-methylcytosine"
ccatcctggcctgtctgtgacctccttggaattcagtaacagagcagcgtgcttacttatcgttatctttctaatcttaatccccagagaggtaccagaatgacaggaaatgagcaggttaa

SEQ ID NO: 16311 - DNA, 122 bp, Homo sapiens
  misc_feature (61)..(62): /note="This region represents a CpG dinucleotide"
  misc_feature (61)..(61): /note="Nucleotide may be methylated to form 5-methylcytosine"
tgagattcaggttctgcagataaggaggctcaagaattgaaaaatacctgctgtgtcttacgcagtaaaagggtcatgtgaaagaataggttcacaatgctgataagactgcttgttttatg

SEQ ID NO: 16312 - DNA, 122 bp, Homo sapiens
  misc_feature (61)..(62): /note="This region represents a CpG dinucleotide"
  misc_feature (61)..(61): /note="Nucleotide may be methylated to form 5-methylcytosine"
tcaaagtgctgggattacaggcatgaaccaccacgcccggccccattcgttatttcttaacgctggatgaatattaggctgtttgaaggtagagactgtgtcttattttcttttttattgtc

SEQ ID NO: 16313 - DNA, 122 bp, Homo sapiens
  misc_feature (61)..(62): /note="This region represents a CpG dinucleotide"
  misc_feature (61)..(61): /note="Nucleotide may be methylated to form 5-methylcytosine"
tttgctccaaacaacaggctctgagaaggctcatccaccgataatgccacatgcaaggctcgtcccatcagcatttgccagtccagtccagggcgggctgccaggcctgccattgtctaggg

SEQ ID NO: 16314 - DNA, 122 bp, Homo sapiens
  misc_feature (61)..(62): /note="This region represents a CpG dinucleotide"
  misc_feature (61)..(61): /note="Nucleotide may be methylated to form 5-methylcytosine"
tcattttgtgtgttctgtgtgtcactctgggagacctgctttacctgataagaagcagaacgcagctgttgactgcaggatctggaatcatcctgcttgggttcaaatctgatcattacact

SEQ ID NO: 16315 - DNA, 122 bp, Homo sapiens
  misc_feature (61)..(62): /note="This region represents a CpG dinucleotide"
  misc_feature (61)..(61): /note="Nucleotide may be methylated to form 5-methylcytosine"
ccaataattatagagcagctttctttcatggctcacagttccttcttaggcctctataagcgtcacaaggaaaagagaccatgcctttctgtgggcacagcataccttcgttttattaccca

SEQ ID NO: 16316 - DNA, 122 bp, Homo sapiens
  misc_feature (61)..(62): /note="This region represents a CpG dinucleotide"
  misc_feature (61)..(61): /note="Nucleotide may be methylated to form 5-methylcytosine"
ggaggaaggggctcgaaacctccatcatcgcagagtctgaatagcagtggccccgccatgcgcccacgtagcggcgcctacgtagccacgcccccacaccccgtcctggccactctccctcc

SEQ ID NO: 16317 - DNA, 122 bp, Homo sapiens
  misc_feature (61)..(62): /note="This region represents a CpG dinucleotide"
  misc_feature (61)..(61): /note="Nucleotide may be methylated to form 5-methylcytosine"
atgcagataatacaggcatgatttctgcctcctgaaatgctcagatgatatgcacttctccgtccccctaaagatttaaggaagtacacatttatcatgggatgtaatgagtaggaaagagc

SEQ ID NO: 16318 - DNA, 122 bp, Homo sapiens
  misc_feature (61)..(62): /note="This region represents a CpG dinucleotide"
  misc_feature (61)..(61): /note="Nucleotide may be methylated to form 5-methylcytosine"
tcagttccattatagtcttatgcaaccaccattgtatgtgtggtttgttgacagaaacatcggttatgcagggcatgactgtacagtggtatacttttcagtgtggttgagaggatcaggtg

SEQ ID NO: 16319 - DNA, 122 bp, Homo sapiens
  misc_feature (61)..(62): /note="This region represents a CpG dinucleotide"
  misc_feature (61)..(61): /note="Nucleotide may be methylated to form 5-methylcytosine"
aaaaactgcggcgggaactgctgccatgcagctgggctcccaatgcagtggggatggtggcgctctgggctggcgggagctatcctgccggacgtgattcccagcacagccgtgagcggcag

SEQ ID NO: 16320 - DNA, 122 bp, Homo sapiens
  misc_feature (61)..(62): /note="This region represents a CpG dinucleotide"
  misc_feature (61)..(61): /note="Nucleotide may be methylated to form 5-methylcytosine"
tgacctatgaaattagccttttctacaatgcattcttagaagaggggcttggaactctctcgttagtggggctctcacaatttaattgtttgctcagcaactataaaaggaacaggtaaaca

SEQ ID NO: 16321 - DNA, 122 bp, Homo sapiens
  misc_feature (61)..(62): /note="This region represents a CpG dinucleotide"
  misc_feature (61)..(61): /note="Nucleotide may be methylated to form 5-methylcytosine"
acttttaaaagcgtgtgtgtgtgtgtgtgtgtgcatgtgtgtgtgttgggtaaaggattacggagattaacattcaaaagacagtcaacagagaatagtccagaagtggaaggaatttacga

SEQ ID NO: 16322 - DNA, 122 bp, Homo sapiens
  misc_feature (61)..(62): /note="This region represents a CpG dinucleotide"
  misc_feature (61)..(61): /note="Nucleotide may be methylated to form 5-methylcytosine"
ttctctacttcagtttcctcatctataaaacaggtagggtaatagtgcttatctcatctacggtttgtaagcattaagccagttcatgtaaaatgtattagcagtgcctggcatggagtgag

SEQ ID NO: 16323 - DNA, 122 bp, Homo sapiens
  misc_feature (61)..(62): /note="This region represents a CpG dinucleotide"
  misc_feature (61)..(61): /note="Nucleotide may be methylated to form 5-methylcytosine"
cgatcttgagggcaaatcccattaaatatctgtacccagtctagcatccagagttgtcagcgttcgtgagcaaacagatctcagaggcatcagtgttcgtgagcaaacagatctcagaggcg

SEQ ID NO: 16324 - DNA, 122 bp, Homo sapiens
  misc_feature (61)..(62): /note="This region represents a CpG dinucleotide"
  misc_feature (61)..(61): /note="Nucleotide may be methylated to form 5-methylcytosine"
aacaatttatatggaagaagaaaaaaacctcacaagaataaaaaatgtaaaataatatgacggaaaccattccaaaagtaataatgtaagaaatgtaaagtttaaagtgtttaattatacaa

SEQ ID NO: 16325 - DNA, 122 bp, Homo sapiens
  misc_feature (61)..(62): /note="This region represents a CpG dinucleotide"
  misc_feature (61)..(61): /note="Nucleotide may be methylated to form 5-methylcytosine"
ggtggaaatgcccaatctcaggctccaaccagactttctaactctgaatctgcattttaacggtgtccccagggattcacatgcacctagacgtttgaaaagcactgctctaaatatgctat

SEQ ID NO: 16326 - DNA, 122 bp, Homo sapiens
  misc_feature (61)..(62): /note="This region represents a CpG dinucleotide"
  misc_feature (61)..(61): /note="Nucleotide may be methylated to form 5-methylcytosine"
tgtgctgctgctggggctggatagcagccatggtactatgacagtgtcctccctcaaccccggccatcccttagccctccagtccctggctagacaattccttgcacataaactaaactact

SEQ ID NO: 16327 - DNA, 122 bp, Homo sapiens
  misc_feature (61)..(62): /note="This region represents a CpG dinucleotide"
  misc_feature (61)..(61): /note="Nucleotide may be methylated to form 5-methylcytosine"
cctgtagtttgccccccttaaaactgaactttgtccaaacctgttctaaatatgtgtgtgcgtgtgcatgcatctgggtgttggggaggagcggtcgtaaagttccttttaaatttcaccta

SEQ ID NO: 16328 - DNA, 122 bp, Homo sapiens
  misc_feature (61)..(62): /note="This region represents a CpG dinucleotide"
  misc_feature (61)..(61): /note="Nucleotide may be methylated to form 5-methylcytosine"
ctttgagctgagtaaggaatcagagagctctccttccacctcctgcctgcatcccctccacgaggtcacctgctcaggcctggctttagccagaacactgctcgtctgctttacacggctct

SEQ ID NO: 16329 - DNA, 122 bp, Homo sapiens
  misc_feature (61)..(62): /note="This region represents a CpG dinucleotide"
  misc_feature (61)..(61): /note="Nucleotide may be methylated to form 5-methylcytosine"
ggagggagtagagggtttgcggaagaagggggtggacttttcaatctgatagacctgaggcgaaatcagaaaccagtctctcttagccgtggaatgctggataagttacgtcacttttctgg

SEQ ID NO: 16330 - DNA, 122 bp, Homo sapiens
  misc_feature (61)..(62): /note="This region represents a CpG dinucleotide"
  misc_feature (61)..(61): /note="Nucleotide may be methylated to form 5-methylcytosine"
ttttcagccagccagtgccaaaaaatatcaggtggtgttcatcaaaaaagctgagccaaccggtgatgaggatggtagtgtgagtcatgtgtgacaggtgaggaatgaaaacagagtgcccg

SEQ ID NO: 16331 - DNA, 122 bp, Homo sapiens
  misc_feature (61)..(62): /note="This region represents a CpG dinucleotide"
  misc_feature (61)..(61): /note="Nucleotide may be methylated to form 5-methylcytosine"
gtgccacccaccagcattttgagagcaggatgagcaagtgctctcggttcctcaatgacacgtctctgcctcacagctgcttcaggatccagcattatgctggaaaggtatgggggagctgt

SEQ ID NO: 16332 - DNA, 122 bp, Homo sapiens
  misc_feature (61)..(62): /note="This region represents a CpG dinucleotide"
  misc_feature (61)..(61): /note="Nucleotide may be methylated to form 5-methylcytosine"
tttgtaattatgcttttctccctctttccagaacacatttctttccagaaagaaaatctccggaaagaaatgtgttcacagtggaatgtctctgatgtttacattaaaatcaatggagatat

SEQ ID NO: 16333 - DNA, 122 bp, Homo sapiens
  misc_feature (61)..(62): /note="This region represents a CpG dinucleotide"
  misc_feature (61)..(61): /note="Nucleotide may be methylated to form 5-methylcytosine"
atgtcaggtgctgttgtgggcctttgtcactcgagttgtcagtctaggtgtgtgtgtaaacggacatggaataaacaagggctccaagtggaacagcttgttttggccaaaagaagtgagtt

SEQ ID NO: 16334 - DNA, 122 bp, Homo sapiens
  misc_feature (61)..(62): /note="This region represents a CpG dinucleotide"
  misc_feature (61)..(61): /note="Nucleotide may be methylated to form 5-methylcytosine"
gtacctcaatcacggtggacatgctaagacatatcccaagatttcagatcggttcctccccgtagagattgggacaagaacttttccaccgtggggacgtactttgacccccagagttgaca

SEQ ID NO: 16335 - DNA, 122 bp, Homo sapiens
  misc_feature (61)..(62): /note="This region represents a CpG dinucleotide"
  misc_feature (61)..(61): /note="Nucleotide may be methylated to form 5-methylcytosine"
aaacagtgttgcatgaggaagtgatgccaggagctgtgaccatccttgcaaccacaaggacggaagccaatagaagaatagtgtgagaaggatagaaacagcctcagtccttagtgatgctg

SEQ ID NO: 16336 - DNA, 122 bp, Homo sapiens
  misc_feature (61)..(62): /note="This region represents a CpG dinucleotide"
  misc_feature (61)..(61): /note="Nucleotide may be methylated to form 5-methylcytosine"
tgagccaactgaattaccaagtaatgggggccccatggcatcccatgacaggtggagagccggctcttcaccctggatggacctgaaatgcctgctaaggccttgctccaccgagtagcaca

SEQ ID NO: 16337 - DNA, 122 bp, Homo sapiens
  misc_feature (61)..(62): /note="This region represents a CpG dinucleotide"
  misc_feature (61)..(61): /note="Nucleotide may be methylated to form 5-methylcytosine"
gcggaccatgagacactgtgagcccgggaaagcccttggcactttgcctcctaccccccacgcctacgccaaatgaaaaaccagtcgcagcccaagcacccgaggccgtggggagcccctcg

SEQ ID NO: 16338 - DNA, 122 bp, Homo sapiens
  misc_feature (61)..(62): /note="This region represents a CpG dinucleotide"
  misc_feature (61)..(61): /note="Nucleotide may be methylated to form 5-methylcytosine"
caaatcaatatcactctaaatcagtataatccgttcatcacaccatgagtaacaattacccgtttgaaagagcttcctgagtagcctgaaggctcaaatcaatgttttctacttagtacaat

SEQ ID NO: 16339 - DNA, 122 bp, Homo sapiens
  misc_feature (61)..(62): /note="This region represents a CpG dinucleotide"
  misc_feature (61)..(61): /note="Nucleotide may be methylated to form 5-methylcytosine"
ctgccttcagctctaaacaggtaactgtgcaacaggccatggctgtctttatctcctctgcgtccctttccagatgtgggcgcagcatctaggacattataggtgctatgtatttattgaac

SEQ ID NO: 16340 - DNA, 122 bp, Homo sapiens
  misc_feature (61)..(62): /note="This region represents a CpG dinucleotide"
  misc_feature (61)..(61): /note="Nucleotide may be methylated to form 5-methylcytosine"
catactttgggggccagtagaatttgctgcgggagagctcactctagaaggggttctcaacgtctggcttccagacgagcagcaacagcattcactgggaacttgcataagtggaaattagg

SEQ ID NO: 16341 - DNA, 122 bp, Homo sapiens
  misc_feature (61)..(62): /note="This region represents a CpG dinucleotide"
  misc_feature (61)..(61): /note="Nucleotide may be methylated to form 5-methylcytosine"
tgcctgtctccatcccaccttggacatgaatcattctgccctgtgtctccacactgtagacgctgcccgtcattgagtcactttggagctgtctcagttaccggattaactgtcgtagtatc

SEQ ID NO: 16342 - DNA, 122 bp, Homo sapiens
  misc_feature (61)..(62): /note="This region represents a CpG dinucleotide"
  misc_feature (61)..(61): /note="Nucleotide may be methylated to form 5-methylcytosine"
ttgtgcctttgttttattccttgtatatgttcttttccttatccctctttgttcttccctcgtactttaaaaagaaaaaaaaaagataaactatcaagtttctaagtatgtgaagaaaggca

SEQ ID NO: 16343 - DNA, 122 bp, Homo sapiens
  misc_feature (61)..(62): /note="This region represents a CpG dinucleotide"
  misc_feature (61)..(61): /note="Nucleotide may be methylated to form 5-methylcytosine"
ccatttgaggccaggtgcattggctcatgcttggaatcccagcactctgggaggctgaggcgagaggatcgcttcagtaaatgaaacaggaaatgagttcgagaccagcctgggcaacaaag

SEQ ID NO: 16344 - DNA, 122 bp, Homo sapiens
  misc_feature (61)..(62): /note="This region represents a CpG dinucleotide"
  misc_feature (61)..(61): /note="Nucleotide may be methylated to form 5-methylcytosine"
ctaactcaagatgaaaattcataaaaattctttggcaaaaacaccttagtattctcaatacggtaactgacttttttttttttgcgttatgaaataactagatactaccgtgcgttgctttt

SEQ ID NO: 16345 - DNA, 122 bp, Homo sapiens
  misc_feature (61)..(62): /note="This region represents a CpG dinucleotide"
  misc_feature (61)..(61): /note="Nucleotide may be methylated to form 5-methylcytosine"
ataactagcttagactagcgtaactgctagtcaaggctctttggaaggaagtaacacccacgcaaactactagaacttgaaatgggcagtttatgataagggagtgtgactgtctcagcata

SEQ ID NO: 16346 - DNA, 122 bp, Homo sapiens
  misc_feature (61)..(62): /note="This region represents a CpG dinucleotide"
  misc_feature (61)..(61): /note="Nucleotide may be methylated to form 5-methylcytosine"
ttttctagttgttgttagtgggagccttggtctactgcaagctgctccatcacacctgagcgtggacattcaatttcctgatggtctactacgtaaatgtaaaagtgaaactatctttgtta

SEQ ID NO: 16347 - DNA, 122 bp, Homo sapiens
  misc_feature (61)..(62): /note="This region represents a CpG dinucleotide"
  misc_feature (61)..(61): /note="Nucleotide may be methylated to form 5-methylcytosine"
tgccagtctcctacctcaataccagctgtggtttccctttgcctagtaggggagcagctgcgttttccttattagttggctcagcttctttccttcaatgagttgccatatgttacccatgg

SEQ ID NO: 16348 - DNA, 122 bp, Homo sapiens
  misc_feature (61)..(62): /note="This region represents a CpG dinucleotide"
  misc_feature (61)..(61): /note="Nucleotide may be methylated to form 5-methylcytosine"
cccctgggcctgtcctctggctgcaccttcaacaaacaatcaatgaatctttcactagtgcgcatccagggtttgaatgcggtatgcttggtccacatttctgttctaggactgggcatggc

SEQ ID NO: 16349 - DNA, 122 bp, Homo sapiens
  misc_feature (61)..(62): /note="This region represents a CpG dinucleotide"
  misc_feature (61)..(61): /note="Nucleotide may be methylated to form 5-methylcytosine"
gcagtcagcagaggggcactatccagtctagtcactcaaggatcaaggtgacaaagcctccgtcttgaaaaacctctcaccaacacagaaggaagggcacacaagctcttaatacttccctg

SEQ ID NO: 16350 - DNA, 122 bp, Homo sapiens
  misc_feature (61)..(62): /note="This region represents a CpG dinucleotide"
  misc_feature (61)..(61): /note="Nucleotide may be methylated to form 5-methylcytosine"
ctgtcctgtccagccttgccccaggtgactgtggtcactatattacatgctcatctgtgtcgtgtgtgtctgtcatgagcgtctcaggcccataagggcagggatgctgcgggctctgtccc

SEQ ID NO: 16351 - DNA, 122 bp, Homo sapiens
  misc_feature (61)..(62): /note="This region represents a CpG dinucleotide"
  misc_feature (61)..(61): /note="Nucleotide may be methylated to form 5-methylcytosine"
ccctgtctgcgagccccgaggcggagatggctccccaagcctgatgcagacaagagagcccgcccctcccctgtcccgcacctgctgaactttggggtcagcagaggaatgtcccccgctgt

SEQ ID NO: 16352 - DNA, 122 bp, Homo sapiens
  misc_feature (61)..(62): /note="This region represents a CpG dinucleotide"
  misc_feature (61)..(61): /note="Nucleotide may be methylated to form 5-methylcytosine"
atgcactatcctagttagcagggaaccagaacaacagcttcagaacaggctgtgctgcaacgcaacctgttggttgagttggcaaacattgatcttgggaaatggctcccagacttccattc

SEQ ID NO: 16353 - DNA, 122 bp, Homo sapiens
  misc_feature (61)..(62): /note="This region represents a CpG dinucleotide"
  misc_feature (61)..(61): /note="Nucleotide may be methylated to form 5-methylcytosine"
cagtggaggctttgagatgcaggtgtggctgttggggttacgagatgtgcaggtatgtcccgcttttacgtcccagctctgaagcatagttcctatggaaaactccagccatgcttcttttc

SEQ ID NO: 16354 - DNA, 122 bp, Homo sapiens
  misc_feature (61)..(62): /note="This region represents a CpG dinucleotide"
  misc_feature (61)..(61): /note="Nucleotide may be methylated to form 5-methylcytosine"
tcaactggttcactttctctcctgtctcatggaaacatgattctcctctctaaggtactccgcttcctgtgctcctgaaggaatccctactatgtcttcctaaacctgactttcctcatctc

SEQ ID NO: 16355 - DNA, 122 bp, Homo sapiens
  misc_feature (61)..(62): /note="This region represents a CpG dinucleotide"
  misc_feature (61)..(61): /note="Nucleotide may be methylated to form 5-methylcytosine"
aaagccagacagcttgactctacagcatgtgtccttaatcattcctttaaattgtctcgacgcttgcgcatgttcaggggtctttgggtggagtgcacagaggggcagaacctttttgccca

SEQ ID NO: 16356 - DNA, 122 bp, Homo sapiens
  misc_feature (61)..(62): /note="This region represents a CpG dinucleotide"
  misc_feature (61)..(61): /note="Nucleotide may be methylated to form 5-methylcytosine"
cacctctaggcaaagaagcaaaagcttttctgtgtgttgaatgcatcattaggtgaaaagcgggtaggctaaaaatcaatatgactacttaccttggttccagttttagacatttttggtgc

SEQ ID NO: 16357 - DNA, 122 bp, Homo sapiens
  misc_feature (61)..(62): /note="This region represents a CpG dinucleotide"
  misc_feature (61)..(61): /note="Nucleotide may be methylated to form 5-methylcytosine"
ctctgtatctcccctggaccaggagcatagaatttgactttcagttatccggtaacctaacgagaatgtatgtcaactatgttgacaactagtcaacatgatttataataaaactgaccctg

SEQ ID NO: 16358 - DNA, 122 bp, Homo sapiens
  misc_feature (61)..(62): /note="This region represents a CpG dinucleotide"
  misc_feature (61)..(61): /note="Nucleotide may be methylated to form 5-methylcytosine"
gtaggacttgtttctaaaattatcagggatctgtcttcctcctatttgcttgagcagacccgccctgagtctaattgacacaccaggtgggtttatgggcttctccttcctcccaagcatcc

SEQ ID NO: 16359 - DNA, 122 bp, Homo sapiens
  misc_feature (61)..(62): /note="This region represents a CpG dinucleotide"
  misc_feature (61)..(61): /note="Nucleotide may be methylated to form 5-methylcytosine"
gaggtcatcttgagggcaaggccggctcatggtgcatgataggagggaaggggtaacaggcggtcattgccacctacaggaaaacaatgccagtgttggtgcctcagcttccagcctcggga

SEQ ID NO: 16360 - DNA, 122 bp, Homo sapiens
  misc_feature (61)..(62): /note="This region represents a CpG dinucleotide"
  misc_feature (61)..(61): /note="Nucleotide may be methylated to form 5-methylcytosine"
aggccgttcgcgccatctttgttgagggcgagtgccagaccatgaggggctgggcggggccgggtgctgcccagtggagccaatggctgggaaccccggggaagagggacccacaccccctg

SEQ ID NO: 16361 - DNA, 122 bp, Homo sapiens
  misc_feature (61)..(62): /note="This region represents a CpG dinucleotide"
  misc_feature (61)..(61): /note="Nucleotide may be methylated to form 5-methylcytosine"
tgtggttgaaacttgtaaacaaactcagactggtttgtcttccttatcctaagttggtggcgcatctgtttcctttatgggtgatagcagctctttgtcaatcacgtgtcatctgccgtaca

SEQ ID NO: 16362 - DNA, 122 bp, Homo sapiens
  misc_feature (61)..(62): /note="This region represents a CpG dinucleotide"
  misc_feature (61)..(61): /note="Nucleotide may be methylated to form 5-methylcytosine"
cctacttcccagcccctgattggtggacagacccccttatttatgggcaatttttctgtacggacaagatagcacaagaagcccgtctggcagctgctcatggaaactcttgctgtgtcttc

SEQ ID NO: 16363 - DNA, 122 bp, Homo sapiens
  misc_feature (61)..(62): /note="This region represents a CpG dinucleotide"
  misc_feature (61)..(61): /note="Nucleotide may be methylated to form 5-methylcytosine"
gtcaaacacacatggtatacatattctcctgggtataaacaaatttacattaattaatagcgcaacagaacccaaaacattggtagaacaaattctaatgtgacaatttaaaagcagacagt

SEQ ID NO: 16364 - DNA, 122 bp, Homo sapiens
  misc_feature (61)..(62): /note="This region represents a CpG dinucleotide"
  misc_feature (61)..(61): /note="Nucleotide may be methylated to form 5-methylcytosine"
ttagcttccatgactatatccactatagcctggcacctctatgttgtaaactatgtggaacgcataattatagacagttgctagcactttgaacttcaaaaatgacctttactgggaagcag

SEQ ID NO: 16365 - DNA, 122 bp, Homo sapiens
  misc_feature (61)..(62): /note="This region represents a CpG dinucleotide"
  misc_feature (61)..(61): /note="Nucleotide may be methylated to form 5-methylcytosine"
ccagggtgtaattaactgctcttgccctgaggcagggcccttacaggtggcaagtaccagcgctgctgggaagagacttgctctgtcttgtgcagttgaacacacaactgctttctgaggcc

SEQ ID NO: 16366 - DNA, 122 bp, Homo sapiens
  misc_feature (61)..(62): /note="This region represents a CpG dinucleotide"
  misc_feature (61)..(61): /note="Nucleotide may be methylated to form 5-methylcytosine"
ttggtccatgggaggcaatgggtgggcctgggataagcaccataagttctcactccggtccgtggaactggcagcccagcctccaggcttcaggccatcccaggcttaaaggtagggtttca

SEQ ID NO: 16367 - DNA, 122 bp, Homo sapiens
  misc_feature (61)..(62): /note="This region represents a CpG dinucleotide"
  misc_feature (61)..(61): /note="Nucleotide may be methylated to form 5-methylcytosine"
tgcaggccaagcaaacggctctgggctggaatagccctacctgagtgccctgtttgactccgccactatctgccatgtgagttgggcaaattgttgaccacctctgagccttgaaaaagtag

SEQ ID NO: 16368 - DNA, 122 bp, Homo sapiens
  misc_feature (61)..(62): /note="This region represents a CpG dinucleotide"
  misc_feature (61)..(61): /note="Nucleotide may be methylated to form 5-methylcytosine"
cacagtcaatctgatgacccggtcggctactaagtgactaaccgcagggagtggtggagacgctggacaaagggatgattcacgtcctgggtgggaccgagcgggacggtgggagatttcat

SEQ ID NO: 16369 - DNA, 122 bp, Homo sapiens
  misc_feature (61)..(62): /note="This region represents a CpG dinucleotide"
  misc_feature (61)..(61): /note="Nucleotide may be methylated to form 5-methylcytosine"
aagcagaggcacagggaggtgaaatggtttgcccaacatcccacagtgtatcagcaaaagcgatgggcttggaaaccaccaggtttccatttcctgtctatgaccacactaagagtgagaat

SEQ ID NO: 16370 - DNA, 122 bp, Homo sapiens
  misc_feature (61)..(62): /note="This region represents a CpG dinucleotide"
  misc_feature (61)..(61): /note="Nucleotide may be methylated to form 5-methylcytosine"
cttctctcccttcccttctctcttcttccctgaggtcagcctcacattctgcaggtctagcgaaagggtgtctcacctcaatcatgagaaagaggagtcccagctccaggagaagcaggagc

SEQ ID NO: 16371 - DNA, 122 bp, Homo sapiens
  misc_feature (61)..(62): /note="This region represents a CpG dinucleotide"
  misc_feature (61)..(61): /note="Nucleotide may be methylated to form 5-methylcytosine"
gtggggacttttctaatgagaccttgactataaagtaccccctacaggcatttaatagggcgatggtgagtcttatatgagctaatgtccatgaatcacttagcatttgttcctggcacaag

SEQ ID NO: 16372 - DNA, 122 bp, Homo sapiens
  misc_feature (61)..(62): /note="This region represents a CpG dinucleotide"
  misc_feature (61)..(61): /note="Nucleotide may be methylated to form 5-methylcytosine"
aatgtggagagcggctctccactgtttctcagatcgagcaccaactcatcaatgtctccacgccctacattcaggagtttcattacgtcatatgtgttcccaactgaatggaaagttccttg

SEQ ID NO: 16373 - DNA, 122 bp, Homo sapiens
  misc_feature (61)..(62): /note="This region represents a CpG dinucleotide"
  misc_feature (61)..(61): /note="Nucleotide may be methylated to form 5-methylcytosine"
gccaagtgatggccctcccatgttatggctacatagctgtttatattacacatggagttgcgcgcctgcgctacagacttgctgagtcacccgggatgtttacctcagcccatcctgcctgg

SEQ ID NO: 16374 - DNA, 122 bp, Homo sapiens
  misc_feature (61)..(62): /note="This region represents a CpG dinucleotide"
  misc_feature (61)..(61): /note="Nucleotide may be methylated to form 5-methylcytosine"
gaagaagttacaaaagaaggaaagccctggagcaggtgagggagttggaaaggctgaactcgcacatgctgtgcagaagcagaagacaacagacctttgtggtttccaaatcagtattttct

SEQ ID NO: 16375 - DNA, 122 bp, Homo sapiens
  misc_feature (61)..(62): /note="This region represents a CpG dinucleotide"
  misc_feature (61)..(61): /note="Nucleotide may be methylated to form 5-methylcytosine"
gctgcttggtcaaaaaataataataactctcggtggcgctgctggtggtgcctgagaagtcgctgttgcagtgcttgcatcctccgcatgctaatgaagctgtgatgtcagcaagtcagtca

SEQ ID NO: 16376 - DNA, 122 bp, Homo sapiens
  misc_feature (61)..(62): /note="This region represents a CpG dinucleotide"
  misc_feature (61)..(61): /note="Nucleotide may be methylated to form 5-methylcytosine"
agtagggatttactttacatgggtacagtaggatatactgatatgattcctggttacttccgtgagtaggtaagttatgaataatggatcatcccttcacccaatgtgctgactcacttagc

SEQ ID NO: 16377 - DNA, 122 bp, Homo sapiens
  misc_feature (61)..(62): /note="This region represents a CpG dinucleotide"
  misc_feature (61)..(61): /note="Nucleotide may be methylated to form 5-methylcytosine"
cctacctgtgctgcctggtcacacaccatactcccccggcgactctcagttccccaacgacggcactgtgcttggtccatgcgctatggggcgctgcacattctgttgcctcccctacacac

SEQ ID NO: 16378 - DNA, 122 bp, Homo sapiens
  misc_feature (61)..(62): /note="This region represents a CpG dinucleotide"
  misc_feature (61)..(61): /note="Nucleotide may be methylated to form 5-methylcytosine"
caactccgctcagaagcctggggcagactccccgccccacccagcgaacgagcatgtggccgggacctgggtgaggatttcctcgccagccctccttggcacagagctgtgcatctcacgac

SEQ ID NO: 16379 - DNA, 122 bp, Homo sapiens
  misc_feature (61)..(62): /note="This region represents a CpG dinucleotide"
  misc_feature (61)..(61): /note="Nucleotide may be methylated to form 5-methylcytosine"
agctgaacggggtcatgcccatcgccatgagcatcaaggcaggcacggtggatgaggactcgtcaggctccgagtgagtgtggccgggtgggcgggacggggtgcagcccctcggaggcctc

SEQ ID NO: 16380 - DNA, 122 bp, Homo sapiens
  misc_feature (61)..(62): /note="This region represents a CpG dinucleotide"
  misc_feature (61)..(61): /note="Nucleotide may be methylated to form 5-methylcytosine"
caaatccaagaccagtacccagatctctttactctcattgtggagcttgtttctgcaaaccgcaactggattcactttagttttctaaaggaagtatctgaatgaatgactgtttagcacag

SEQ ID NO: 16381 - DNA, 122 bp, Homo sapiens
  misc_feature (61)..(62): /note="This region represents a CpG dinucleotide"
  misc_feature (61)..(61): /note="Nucleotide may be methylated to form 5-methylcytosine"
tgctcaacacatggtaagtgctcactaatttacatccatggttatcattagaattaaagacgtcatggtttaggtgctgtacatgagccccaaagtgagtcagatgatgacctgtcatgtca

SEQ ID NO: 16382 - DNA, 122 bp, Homo sapiens
  misc_feature (61)..(62): /note="This region represents a CpG dinucleotide"
  misc_feature (61)..(61): /note="Nucleotide may be methylated to form 5-methylcytosine"
ttccatcattcaactaacatttattgaagatctactctacaccagatactggatgtgcagcgatgagtcaaatacactcttgtttcaaggaatgcagggtccgttggatagaaaacagttac

SEQ ID NO: 16383 - DNA, 122 bp, Homo sapiens
  misc_feature (61)..(62): /note="This region represents a CpG dinucleotide"
  misc_feature (61)..(61): /note="Nucleotide may be methylated to form 5-methylcytosine"
gatttggtagggctctcacctgactatttctatttccctctcagaaattccacaaacatacgcattagtcaagttcagtgcagaataccagttatgccactctgataaaggatctacttttt

SEQ ID NO: 16384 - DNA, 122 bp, Homo sapiens
  misc_feature (61)..(62): /note="This region represents a CpG dinucleotide"
  misc_feature (61)..(61): /note="Nucleotide may be methylated to form 5-methylcytosine"
acagcacctttccatgtcatggaaacatgcccatgcctatataaagtgaagcacactttccgcatagccctgcaatcaccccacaggagaaaaccgtccctcttgccttgcccatcctatgg

SEQ ID NO: 16385 - DNA, 122 bp, Homo sapiens
  misc_feature (61)..(62): /note="This region represents a CpG dinucleotide"
  misc_feature (61)..(61): /note="Nucleotide may be methylated to form 5-methylcytosine"
gtgtatgaagtccatcgagtgccttctgcaaacagtttcactcagacacttatctgtgagcgtaggggcaacagcaagatctaacatttcctcatttgtttcggtgcttatcatgttcttag

SEQ ID NO: 16386 - DNA, 122 bp, Homo sapiens
  misc_feature (61)..(62): /note="This region represents a CpG dinucleotide"
  misc_feature (61)..(61): /note="Nucleotide may be methylated to form 5-methylcytosine"
tcattcattcattcagtcattcattcacccacttactgaaagctgcctaagtgccaggctcggtgctaggagattgaaagcaccattcacaattgccaaggcagtcttttttccttgcattt

SEQ ID NO: 16387 - DNA, 122 bp, Homo sapiens
  misc_feature (61)..(62): /note="This region represents a CpG dinucleotide"
  misc_feature (61)..(61): /note="Nucleotide may be methylated to form 5-methylcytosine"
tagtggagagagagcgagtcttcctcagctttaggcacagagcatgcaaacggggattagcgatgcacagcttgacctgctccaggcatgaaaaggcagccagtctggctagtattccaggg

SEQ ID NO: 16388 - DNA, 122 bp, Homo sapiens
  misc_feature (61)..(62): /note="This region represents a CpG dinucleotide"
  misc_feature (61)..(61): /note="Nucleotide may be methylated to form 5-methylcytosine"
cttgattgataggaccatatatctgggccataatgaaatatttgggtgtcctaggcagggcgccaaaaatctacatgctgtactgactcatttagtagaactgggtaaacacaattgttcaa

SEQ ID NO: 16389 - DNA, 122 bp, Homo sapiens
  misc_feature (61)..(62): /note="This region represents a CpG dinucleotide"
  misc_feature (61)..(61): /note="Nucleotide may be methylated to form 5-methylcytosine"
tggccccacattatgagtctcctgtcttggctacttttgagttaagcaatcctgggctcccgggactgattcctccatttcctgaggcaagctgctggggtttgggtggaatatgtgattaa

SEQ ID NO: 16390 - DNA, 122 bp, Homo sapiens
  misc_feature (61)..(62): /note="This region represents a CpG dinucleotide"
  misc_feature (61)..(61): /note="Nucleotide may be methylated to form 5-methylcytosine"
ggtttctgatggagcagacaacttgaggaaggccggccttgctgaacacagtggactgaccgggtctggacccctcccccacaggtgactgtgcactgcagcagagagaagaggaaggagtc

SEQ ID NO: 16391 - DNA, 122 bp, Homo sapiens
  misc_feature (61)..(62): /note="This region represents a CpG dinucleotide"
  misc_feature (61)..(61): /note="Nucleotide may be methylated to form 5-methylcytosine"
atttcctcatgcagattttgctgccacctcattgttggcaaacaggtgtatgggataaggcgggtgccatttcccagagtgtattacagtttagttgagcagctgtgatctgttttgctctg

SEQ ID NO: 16392 - DNA, 122 bp, Homo sapiens
  misc_feature (61)..(62): /note="This region represents a CpG dinucleotide"
  misc_feature (61)..(61): /note="Nucleotide may be methylated to form 5-methylcytosine"
ttctgcaatctttagaaataaatatttccttacaagttttcttttaggctgttgaatattcgttttgataagaataattgaagacatgggaaacccttcattacattgcagagtgacttaaa

SEQ ID NO: 16393 - DNA, 122 bp, Homo sapiens
  misc_feature (61)..(62): /note="This region represents a CpG dinucleotide"
  misc_feature (61)..(61): /note="Nucleotide may be methylated to form 5-methylcytosine"
caagaattctagcacaacgaaaaatctgaatgtaataacaccactaaaggatcacactaacggctccagcaattgtccgtaatgaatatggaaactaagaaatgacagaggaagaattcaaa

SEQ ID NO: 16394 - DNA, 122 bp, Homo sapiens
  misc_feature (61)..(62): /note="This region represents a CpG dinucleotide"
  misc_feature (61)..(61): /note="Nucleotide may be methylated to form 5-methylcytosine"
gaatagcttctacccggtaaatgaggtgatccactattactaataggtatttcaggcaaccgattggagacatttctgtgtgatcaacttgaacactttgaaatggtgttagtcctggattt

SEQ ID NO: 16395 - DNA, 122 bp, Homo sapiens
  misc_feature (61)..(62): /note="This region represents a CpG dinucleotide"
  misc_feature (61)..(61): /note="Nucleotide may be methylated to form 5-methylcytosine"
accagaaggctcaagttgccatgacgggaggctgaaagagcaagtggatctaggacgtgtcgagtctgagacgtctgatcgacatgaaagaggtgacattgagagggcaagtgcagccagcg

SEQ ID NO: 16396 - DNA, 122 bp, Homo sapiens
  misc_feature (61)..(62): /note="This region represents a CpG dinucleotide"
  misc_feature (61)..(61): /note="Nucleotide may be methylated to form 5-methylcytosine"
ggtttcttgtgaggatttaatgagataaagcagataaaatgcttagcagggtgcctgacacgtggcagaagctcaaaacaataagctatcattgtcattcgagaaaatttgggaagtttgga

SEQ ID NO: 16397 - DNA, 122 bp, Homo sapiens
  misc_feature (61)..(62): /note="This region represents a CpG dinucleotide"
  misc_feature (61)..(61): /note="Nucleotide may be methylated to form 5-methylcytosine"
aatgttatggccatgtcccctggttatattacccaggtcatttttatggcttcctacaaacgcgctttgtatttgactacatttggaaatactcagaaggttttcaaatgaagcctatatga

SEQ ID NO: 16398 - DNA, 122 bp, Homo sapiens
  misc_feature (61)..(62): /note="This region represents a CpG dinucleotide"
  misc_feature (61)..(61): /note="Nucleotide may be methylated to form 5-methylcytosine"
tttgagcaagcagatacaagaagacaaggaagctctccttagaaacccaactgtgggagtcgcagtactggttcacatacttgggaaacatgatctgaacatgaactctcaacagcaataac

SEQ ID NO: 16399 - DNA, 122 bp, Homo sapiens
  misc_feature (61)..(62): /note="This region represents a CpG dinucleotide"
  misc_feature (61)..(61): /note="Nucleotide may be methylated to form 5-methylcytosine"
cagctcttgacaaagcctctaaattataccttttataattccgttattctttttgtgctgcgaagtcttatgctgtgtgttaatgcaaggcaattagctttatcaggaagaaaagaaaaact

SEQ ID NO: 16400 - DNA, 122 bp, Homo sapiens
  misc_feature (61)..(62): /note="This region represents a CpG dinucleotide"
  misc_feature (61)..(61): /note="Nucleotide may be methylated to form 5-methylcytosine"
agtctgtggggaggccggggctggacaggctgtcggcgtggggcgggggcagggtcaacccgccgcccgtgctcacctaggctgatgacagcaatctcgccggatgaggagttgtgcggccc

SEQ ID NO: 16401 - DNA, 122 bp, Homo sapiens
  misc_feature (61)..(62): /note="This region represents a CpG dinucleotide"
  misc_feature (61)..(61): /note="Nucleotide may be methylated to form 5-methylcytosine"
acaacatattttaaattcccaagatttcaccacacttaaagcctcacctttttctttagacgtttgttctacagaaaaggacaggaaaacggtaattagaaatgagaaaggtaatacataat

SEQ ID NO: 16402 - DNA, 122 bp, Homo sapiens
  misc_feature (61)..(62): /note="This region represents a CpG dinucleotide"
  misc_feature (61)..(61): /note="Nucleotide may be methylated to form 5-methylcytosine"
aggggaggctttgcatgacgtcagattatgtgatggaatgagctctgcagagatctggagcggggagtgttttcagaagtgggaatagcaggcgaggtcttgaggcctgaagaagcaaaggt

SEQ ID NO: 16403 - DNA, 122 bp, Homo sapiens
  misc_feature (61)..(62): /note="This region represents a CpG dinucleotide"
  misc_feature (61)..(61): /note="Nucleotide may be methylated to form 5-methylcytosine"
tcagtgaagtctcttccagcaatgaaagactgatcaaatggctttcactctgtgaccctccgtttccttattttcaaaggattttaattgtactggccacatagtgctcttgtgtggatttg

SEQ ID NO: 16404 - DNA, 122 bp, Homo sapiens
  misc_feature (61)..(62): /note="This region represents a CpG dinucleotide"
  misc_feature (61)..(61): /note="Nucleotide may be methylated to form 5-methylcytosine"
ccatcacgtcaaagcggatcccgtaggctttcatcagggtgcggaactccaccccggctgcgtctcggtaatatctggcaaatctgagggagacagggcccaggggaggcctcagcctgcct

SEQ ID NO: 16405 - DNA, 122 bp, Homo sapiens
  misc_feature (61)..(62): /note="This region represents a CpG dinucleotide"
  misc_feature (61)..(61): /note="Nucleotide may be methylated to form 5-methylcytosine"
taaaaactgaaagtgctttgaacaataaacaatacaaaagtacttttcattaaaccattacgcttttttaaaaattacaaacctttgcttcttccatctgcattatgttggcctgacaatca

SEQ ID NO: 16406 - DNA, 122 bp, Homo sapiens
  misc_feature (61)..(62): /note="This region represents a CpG dinucleotide"
  misc_feature (61)..(61): /note="Nucleotide may be methylated to form 5-methylcytosine"
tgtggtcagggtgggcctctcatagaaagtgactaacaaagtagcccaacatggggtaggcgtgcatttcaggaggaggaaccaggtggttgcacatcaggctgttctgtgtgtcaagaact

SEQ ID NO: 16407 - DNA, 122 bp, Homo sapiens
  misc_feature (61)..(62): /note="This region represents a CpG dinucleotide"
  misc_feature (61)..(61): /note="Nucleotide may be methylated to form 5-methylcytosine"
aggtattcccagtttagggtatctatttatgaacctttcccgtagccgccattcctggagcgcctcctacaggtcagccaccaaacagagcacttaccatgtgtgtctgattgtattctcac

SEQ ID NO: 16408 - DNA, 122 bp, Homo sapiens
  misc_feature (61)..(62): /note="This region represents a CpG dinucleotide"
  misc_feature (61)..(61): /note="Nucleotide may be methylated to form 5-methylcytosine"
atatagttcagaccttggcagttctctaatctccttgacacttcagtgtttgattgcattcgtttgccctgcaaatagtcgacagtgtaagtgatctcaaagtgagaatatatctaaagtct

SEQ ID NO: 16409 - DNA, 122 bp, Homo sapiens
  misc_feature (61)..(62): /note="This region represents a CpG dinucleotide"
  misc_feature (61)..(61): /note="Nucleotide may be methylated to form 5-methylcytosine"
gggcccttgcagagtgaacagggctggggcttgtgtcctattgttgcaggtcagggaaagcgggatggttgtagcaccgactggcttcccagcaacagcttgtccactaagctgatttcctg

SEQ ID NO: 16410 - DNA, 122 bp, Homo sapiens
  misc_feature (61)..(62): /note="This region represents a CpG dinucleotide"
  misc_feature (61)..(61): /note="Nucleotide may be methylated to form 5-methylcytosine"
cgaggagagggcagtggcttctggcacggcagcagtgggcatacagaggcagtcgggacccgtctggaagagcctccgcccggggtaaggagccgggactgtgtctaggaggcagtggggag

SEQ ID NO: 16411 - DNA, 122 bp, Homo sapiens
  misc_feature (61)..(62): /note="This region represents a CpG dinucleotide"
  misc_feature (61)..(61): /note="Nucleotide may be methylated to form 5-methylcytosine"
ttttgccctcctgtcaaggccagttggaagctgaggcctccaccaacagccacatgagggcgccctcttgaaagcagctcctccagctccaatcgagccttcagatgatacagccccagcac

SEQ ID NO: 16412 - DNA, 122 bp, Homo sapiens
  misc_feature (61)..(62): /note="This region represents a CpG dinucleotide"
  misc_feature (61)..(61): /note="Nucleotide may be methylated to form 5-methylcytosine"
ggctctggggctgtccaggcaggaggggaggggttatggttcaatgactctgaaggccaacgtccaagttgacctagctttgccatgtgttagccatggggcctggaaaaaatgcatgtccc

SEQ ID NO: 16413 - DNA, 122 bp, Homo sapiens
  misc_feature (61)..(62): /note="This region represents a CpG dinucleotide"
  misc_feature (61)..(61): /note="Nucleotide may be methylated to form 5-methylcytosine"
accaggctgtcttcatttcaatttcacatcaacagttatacagatgagaaaatgacctgacgtgaggctaagtaatgtgctaaaggttatgcaaatattgtgtcacagccaagaaggaagga

SEQ ID NO: 16414 - DNA, 122 bp, Homo sapiens
  misc_feature (61)..(62): /note="This region represents a CpG dinucleotide"
  misc_feature (61)..(61): /note="Nucleotide may be methylated to form 5-methylcytosine"
tccttgcccagactggaaaacatgaagtccttgtaccttcttgcccctccctgagctcagcgtacagcccataccgaacagggtagaaggagtaccagcagcaaccccgatgctgggatgtt

SEQ ID NO: 16415 - DNA, 122 bp, Homo sapiens
  misc_feature (61)..(62): /note="This region represents a CpG dinucleotide"
  misc_feature (61)..(61): /note="Nucleotide may be methylated to form 5-methylcytosine"
cgccagttgtgcaatacagccagccataatacgaacccagcactattgcatcagtagaaacgggaatcagaccatgatccaaagcatgatgtaccacgggtgccagtttctgaaaacccata

SEQ ID NO: 16416 - DNA, 122 bp, Homo sapiens
  misc_feature (61)..(62): /note="This region represents a CpG dinucleotide"
  misc_feature (61)..(61): /note="Nucleotide may be methylated to form 5-methylcytosine"
aaatgtctttaaagggaagaagacacctaggaagagggagttaggaggtgagtttgtaatcgaacttctcagtgtgaaaaatctaacagactttagttttaggggttaggcttaggttacaa

SEQ ID NO: 16417 - DNA, 122 bp, Homo sapiens
  misc_feature (61)..(62): /note="This region represents a CpG dinucleotide"
  misc_feature (61)..(61): /note="Nucleotide may be methylated to form 5-methylcytosine"
gaccccttttcacctggctgcctcccctgtgccccaaggctcctggggaaatggcccagccggttcacctgtgtcctggcctctagtgagcagcttagccctgggtgttgctaaggagtatt

SEQ ID NO: 16418 - DNA, 122 bp, Homo sapiens
  misc_feature (61)..(62): /note="This region represents a CpG dinucleotide"
  misc_feature (61)..(61): /note="Nucleotide may be methylated to form 5-methylcytosine"
gaaaatcagctcaaagtatttttcttcagataagtgagcatgcttgtcatagcttacttacgcctgttaaatctttatatgaaatattttacagagaaatatgtaaatattttgactgcttg

SEQ ID NO: 16419 - DNA, 122 bp, Homo sapiens
  misc_feature (61)..(62): /note="This region represents a CpG dinucleotide"
  misc_feature (61)..(61): /note="Nucleotide may be methylated to form 5-methylcytosine"
caacatcgtgagaccccatttctaaatataaataaataagtaaaatataaacaaagccttcggcattgaggttggcacacaggaaatgctccataatgacaactgttatcattatagttttg

SEQ ID NO: 16420 - DNA, 122 bp, Homo sapiens
  misc_feature (61)..(62): /note="This region represents a CpG dinucleotide"
  misc_feature (61)..(61): /note="Nucleotide may be methylated to form 5-methylcytosine"
aaggggcgcgaaccccaagtaggagacgaggaagggtaggtgccagccgccgccgcccttcgcaacccgggccgtcagccccgcccccaccgccgcagcgactcccgcccccgcgcccgccg

SEQ ID NO: 16421 - DNA, 122 bp, Homo sapiens
  misc_feature (61)..(62): /note="This region represents a CpG dinucleotide"
  misc_feature (61)..(61): /note="Nucleotide may be methylated to form 5-methylcytosine"
ggttagtttaattcattctatccaggacattcatggacgcttaataggatgcagacagcacgtcaggcgttgtgggaagcacggccgctactgacagaagggccccacaagtcactcggcct

SEQ ID NO: 16422 - DNA, 122 bp, Homo sapiens
  misc_feature (61)..(62): /note="This region represents a CpG dinucleotide"
  misc_feature (61)..(61): /note="Nucleotide may be methylated to form 5-methylcytosine"
gttccctgtcccctagtctccaattccctcctccagggcctggcaccaagctgagcagagcgagaaacagtaaatatttaataacagatgggctgagagctcctaactgaagggagatgtgg

SEQ ID NO: 16423 - DNA, 122 bp, Homo sapiens
  misc_feature (61)..(62): /note="This region represents a CpG dinucleotide"
  misc_feature (61)..(61): /note="Nucleotide may be methylated to form 5-methylcytosine"
agaagggatgataaggcttagcacagttaagcaaattccttgagggtcaagtgtaagtctcgctgactcagaagtgagtatttatttttaagttgacgctatctcatctatactcttctact

SEQ ID NO: 16424 - DNA, 122 bp, Homo sapiens
  misc_feature (61)..(62): /note="This region represents a CpG dinucleotide"
  misc_feature (61)..(61): /note="Nucleotide may be methylated to form 5-methylcytosine"
agccacatccatttctcaggctggaggaaagctacactcccagggctctgtcacatttcccgtctttcaagattagaatacagggcattacagacattctcacacatagtaaagtcatagag

SEQ ID NO: 16425 - DNA, 122 bp, Homo sapiens
  misc_feature (61)..(62): /note="This region represents a CpG dinucleotide"
  misc_feature (61)..(61): /note="Nucleotide may be methylated to form 5-methylcytosine"
caggagcactcttctgtgcatttcacactggatgccacagattaggctgcggatatttcacggttggtgataaacatttgtttggagaagccttgagcagagcaacactcctaaggctgggg

SEQ ID NO: 16426 - DNA, 122 bp, Homo sapiens
  misc_feature (61)..(62): /note="This region represents a CpG dinucleotide"
  misc_feature (61)..(61): /note="Nucleotide may be methylated to form 5-methylcytosine"
agtgttagagttatgtttttcatacgcatgcaagacagcttacattctgcactctggtggcgtgcagatgtcctggagagtaaggctcctttggttccctcacttttccttttgctaataga

SEQ ID NO: 16427 - DNA, 122 bp, Homo sapiens
  misc_feature (61)..(62): /note="This region represents a CpG dinucleotide"
  misc_feature (61)..(61): /note="Nucleotide may be methylated to form 5-methylcytosine"
agcctcccattgcttcactacacggggcgtagcctgttgtcctacttttagtgctaagaccgatcagtgtgttaaggttttagtgctaagattgatcagtggtttcaggtggagctgccgac

SEQ ID NO: 16428 - DNA, 122 bp, Homo sapiens
  misc_feature (61)..(62): /note="This region represents a CpG dinucleotide"
  misc_feature (61)..(61): /note="Nucleotide may be methylated to form 5-methylcytosine"
gaaaaggaaggggatgttgagtgtgggagctgttcattctttccagcttctctcctttcccgccatcccaccccacctgtggacctgtgtttggcattagggcactcctctgtgctttgctg

SEQ ID NO: 16429 - DNA, 122 bp, Homo sapiens
  misc_feature (61)..(62): /note="This region represents a CpG dinucleotide"
  misc_feature (61)..(61): /note="Nucleotide may be methylated to form 5-methylcytosine"
gaaagcacggagcctgtagagaggcctcagcaaggcacccctgagagagtgacgcccagccgttgactcccagttgaggacagttatgcagattccaggctgcataagctccatggtggcct

SEQ ID NO: 16430 - DNA, 122 bp, Homo sapiens
  misc_feature (61)..(62): /note="This region represents a CpG dinucleotide"
  misc_feature (61)..(61): /note="Nucleotide may be methylated to form 5-methylcytosine"
acacggacagctcctctaaatctggacaaaccaagacccaacagaagcctggaattcaatcgggtcatatgtctcagctgcttggaagacagctcctgttcagggagagacaaacataaaga

SEQ ID NO: 16431 - DNA, 122 bp, Homo sapiens
  misc_feature (61)..(62): /note="This region represents a CpG dinucleotide"
  misc_feature (61)..(61): /note="Nucleotide may be methylated to form 5-methylcytosine"
gggttttgagtgaaaatatctggcttcagactcttctatcccagatatggtgagcaaagccggccagacaacctctccaatctacgatatctatcaaatggggctggagtgtcgtgctctat

SEQ ID NO: 16432 - DNA, 122 bp, Homo sapiens
  misc_feature (61)..(62): /note="This region represents a CpG dinucleotide"
  misc_feature (61)..(61): /note="Nucleotide may be methylated to form 5-methylcytosine"
aggaattttccccaggcatggagatgtacaatgtcccatattcatggcacttttgccaaacgcagaacctgtttagcaaggtttctgtttctacctcatgtgtagtggtgttgcaatagtgc

SEQ ID NO: 16433 - DNA, 122 bp, Homo sapiens
  misc_feature (61)..(62): /note="This region represents a CpG dinucleotide"
  misc_feature (61)..(61): /note="Nucleotide may be methylated to form 5-methylcytosine"
atggatggtggaaatatttgcagtgtgtctttctggagtatgggcttcatgcttagaacacgacctgcctacccctagagtgcattcctgaatataatgccaaccacatttgagttgtagtt

SEQ ID NO: 16434 - DNA, 122 bp, Homo sapiens
  misc_feature (61)..(62): /note="This region represents a CpG dinucleotide"
  misc_feature (61)..(61): /note="Nucleotide may be methylated to form 5-methylcytosine"
gcggcgttgaggagctgcggcgcgcccctctcaccgcgattgttcacttgccaggcgccacgtgtgggcgacgtcactgggctttatgctttcatcgccgctatctgcctacgtgagctgct

SEQ ID NO: 16435 - DNA, 122 bp, Homo sapiens
  misc_feature (61)..(62): /note="This region represents a CpG dinucleotide"
  misc_feature (61)..(61): /note="Nucleotide may be methylated to form 5-methylcytosine"
atcctggttctgatttttctcaaatcagagaagacaaggggacaaagacatttaatcccacggaacctcatgtcagtctcactaagtaaccagggcttcagaggatgccactagtccttgct

SEQ ID NO: 16436 - DNA, 122 bp, Homo sapiens
  misc_feature (61)..(62): /note="This region represents a CpG dinucleotide"
  misc_feature (61)..(61): /note="Nucleotide may be methylated to form 5-methylcytosine"
ggtccttatatgtgtacaacattaaaatgaaaggctttgtcttgcattgtgaggtacaggcggaagttggaatcaggttttaggattctgtctctcattagctgaataatgtgaggattaac

SEQ ID NO: 16437 - DNA, 122 bp, Homo sapiens
  misc_feature (61)..(62): /note="This region represents a CpG dinucleotide"
  misc_feature (61)..(61): /note="Nucleotide may be methylated to form 5-methylcytosine"
ctttcaatttattttcacgtggcactcaaaatgacctgtgaaactctccagtggccagctcgttccaaaaaaagaccaatcgctcagtgaggtgcacagtctggaccatcacctctctgact

SEQ ID NO: 16438 - DNA, 122 bp, Homo sapiens
  misc_feature (61)..(62): /note="This region represents a CpG dinucleotide"
  misc_feature (61)..(61): /note="Nucleotide may be methylated to form 5-methylcytosine"
attcctaagtgtcagccctattaactttgatgttcgtttggttattactacaaatccccacgtttatttcttttcaagagaaagttgttcgaaatgtgaacgttttccatctttacctgact

SEQ ID NO: 16439 - DNA, 122 bp, Homo sapiens
  misc_feature (61)..(62): /note="This region represents a CpG dinucleotide"
  misc_feature (61)..(61): /note="Nucleotide may be methylated to form 5-methylcytosine"
cttaactgaactgctgtgacttcattctgatcctctatcatttatgtgacttactgcattcgccacctaactggtctttgtgtttctgtctgtgtccgcctacaaccagttctcaaaaaact

SEQ ID NO: 16440 - DNA, 122 bp, Homo sapiens
  misc_feature (61)..(62): /note="This region represents a CpG dinucleotide"
  misc_feature (61)..(61): /note="Nucleotide may be methylated to form 5-methylcytosine"
atcttggctcactgcaacctccgcctcctgggttcaagcgattctcgtgcctcagcctcccgaaacatacttttaaataaagtagggagcacaacaatggagttttaaaaggtctcaagacg

SEQ ID NO: 16441 - DNA, 122 bp, Homo sapiens
  misc_feature (61)..(62): /note="This region represents a CpG dinucleotide"
  misc_feature (61)..(61): /note="Nucleotide may be methylated to form 5-methylcytosine"
aaaagcctttcatgttccaaaggaaagtgctgaacacatttcccagcacttctgaaagatcgaagagccaatctagaaacagaactctgtgtctagcatgatacatgcaatatgtgtgcaac

SEQ ID NO: 16442 - DNA, 122 bp, Homo sapiens
  misc_feature (61)..(62): /note="This region represents a CpG dinucleotide"
  misc_feature (61)..(61): /note="Nucleotide may be methylated to form 5-methylcytosine"
cctgagatctggtcagaggggcggctgggcctgcctgcaaagtggctctgctaagttagtcgtgtgtgtgtgtgtgtgtttctgtgtgtgtgtgtttctgtgtgtgtgtgtgtgtgtgtgtg

SEQ ID NO: 16443 - DNA, 122 bp, Homo sapiens
  misc_feature (61)..(62): /note="This region represents a CpG dinucleotide"
  misc_feature (61)..(61): /note="Nucleotide may be methylated to form 5-methylcytosine"
gtccactaagttctctgctgcatatatgcacagactaggatcaatcctggatatttggaccgtttatgaagctccctatggttgtcttacctcccagaacttgccccaaacaggtttggtga

SEQ ID NO: 16444 - DNA, 122 bp, Homo sapiens
  misc_feature (61)..(62): /note="This region represents a CpG dinucleotide"
  misc_feature (61)..(61): /note="Nucleotide may be methylated to form 5-methylcytosine"
taggtgtgtttatgtgactaatacttactggtggaacatgagtaaaagcgacatttcactcgcagtccagggcagtgcaaagtgggtggaatttctatatttttgctcttcctctttctccc

SEQ ID NO: 16445 - DNA, 122 bp, Homo sapiens
  misc_feature (61)..(62): /note="This region represents a CpG dinucleotide"
  misc_feature (61)..(61): /note="Nucleotide may be methylated to form 5-methylcytosine"
cgtaagccagagcttccttcatgccaaggaacagtgacatggcttgtcactttcaagttacgtctcttggctgaagggtgatcttttctattcattctggcttcgtgacagcaagtaaaagt

SEQ ID NO: 16446 - DNA, 122 bp, Homo sapiens
  misc_feature (61)..(62): /note="This region represents a CpG dinucleotide"
  misc_feature (61)..(61): /note="Nucleotide may be methylated to form 5-methylcytosine"
cgatcccagcttcattcattttatggcctaatgagtctgccatgtgtatgcaccacagtccgctcatccagtcatcagctgacgggtatgtgggctgctcccactttttggctattgtgaat

SEQ ID NO: 16447 - DNA, 122 bp, Homo sapiens
  misc_feature (61)..(62): /note="This region represents a CpG dinucleotide"
  misc_feature (61)..(61): /note="Nucleotide may be methylated to form 5-methylcytosine"
tgttccacccactcgcatatcctgttggcattttcttaatcatactcttgtaatggcaagcggaaagggaatttagcaggggctcaggaaggcacacagttacttcactcttactaactgaa

SEQ ID NO: 16448 - DNA, 122 bp, Homo sapiens
  misc_feature (61)..(62): /note="This region represents a CpG dinucleotide"
  misc_feature (61)..(61): /note="Nucleotide may be methylated to form 5-methylcytosine"
aatgtacattagtaatgacattattaaaactgttttgtttaaaatgaactttcacactagcgtgttgcaaagcggcacaaacaaatctatgtgatttcactagagatggtttaaaaagcttg

SEQ ID NO: 16449 - DNA, 122 bp, Homo sapiens
  misc_feature (61)..(62): /note="This region represents a CpG dinucleotide"
  misc_feature (61)..(61): /note="Nucleotide may be methylated to form 5-methylcytosine"
cacttaagaaaacaaatgagcagcaacagtacatccaaagccatgtaaataaatatgtcccgctcctccactgtccagctgcatggccttaattctctgagcctcagtttcctcatttgtgt

SEQ ID NO: 16450 - DNA, 122 bp, Homo sapiens
  misc_feature (61)..(62): /note="This region represents a CpG dinucleotide"
  misc_feature (61)..(61): /note="Nucleotide may be methylated to form 5-methylcytosine"
gggatcttatttacatgattctagtgttaaccattgggttctatcatgggcagcagctgtcgggtatgttgggttttttttttttttttttttttttttttttcagtgattaaaatgaggaa

SEQ ID NO: 16451 - DNA, 122 bp, Homo sapiens
  misc_feature (61)..(62): /note="This region represents a CpG dinucleotide"
  misc_feature (61)..(61): /note="Nucleotide may be methylated to form 5-methylcytosine"
tgccttggaaccaaccaccacccacgccgtttgccagctggtaaacatgcccatcaggtccgggggttggcattgcctggacatctttagtgttcatcttgctgacatctggtgccctcggg

SEQ ID NO: 16452 - DNA, 122 bp, Homo sapiens
  misc_feature (61)..(62): /note="This region represents a CpG dinucleotide"
  misc_feature (61)..(61): /note="Nucleotide may be methylated to form 5-methylcytosine"
aaaagcaattaaaatttgcattagttttacacaggtacctctggagaagtatgtataacacgataacaaaggaagacagaaaagtagaggatgaaaggtaaaatgaaaatgcctgagtgatt

SEQ ID NO: 16453 - DNA, 122 bp, Homo sapiens
  misc_feature (61)..(62): /note="This region represents a CpG dinucleotide"
  misc_feature (61)..(61): /note="Nucleotide may be methylated to form 5-methylcytosine"
acaacctcccttgtttgctaactattctcaggctaaaaagagagtgctgacaaaccacagcggaagtcaggagctgagaaaacatgttgtgtggagtaagaaagggtcaccctgttcaaaag

SEQ ID NO: 16454 - DNA, 122 bp, Homo sapiens
  misc_feature (61)..(62): /note="This region represents a CpG dinucleotide"
  misc_feature (61)..(61): /note="Nucleotide may be methylated to form 5-methylcytosine"
cgaatccaaaaaccatcaccacagcaccaatgggaagcatgacacaagacataatcttatcggagtgtgtccttggttcttcagacagtttcagataacaggctgatggaatgataaaaatg

SEQ ID NO: 16455 - DNA, 122 bp, Homo sapiens
  misc_feature (61)..(62): /note="This region represents a CpG dinucleotide"
  misc_feature (61)..(61): /note="Nucleotide may be methylated to form 5-methylcytosine"
aatgagaatggaagatttcatttggaaatggccctgtgagtacgtgcttattttcagaggcgttccccataactgacagcagtcaatgacttctgattgggcaatggcctggccagccacac

SEQ ID NO: 16456 - DNA, 122 bp, Homo sapiens
  misc_feature (61)..(62): /note="This region represents a CpG dinucleotide"
  misc_feature (61)..(61): /note="Nucleotide may be methylated to form 5-methylcytosine"
ctagggagcctaggaaatctacttcccagcaagagctataaaacctcacatcctaattgacggagacaaggaggaacagtgattcagaggcaactctaggggagcagccagctcaggcctga

SEQ ID NO: 16457 - DNA, 122 bp, Homo sapiens
  misc_feature (61)..(62): /note="This region represents a CpG dinucleotide"
  misc_feature (61)..(61): /note="Nucleotide may be methylated to form 5-methylcytosine"
gaaggggagggcagccgtggcgtggagggccttgcgcacccaggtggtgatgagggcgggcggggcgcggggaacgtgcagccagagaccgtgctaagaccccgaagtcgagccctgggcag

SEQ ID NO: 16458 - DNA, 122 bp, Homo sapiens
  misc_feature (61)..(62): /note="This region represents a CpG dinucleotide"
  misc_feature (61)..(61): /note="Nucleotide may be methylated to form 5-methylcytosine"
gccccattagctaggctggtgggaggcagccagtgcttttgagggctcagacaatccctgcgattcaagggctgctctttggagctgctgccaaactaatctcaggcctgcagtcttgggcc

SEQ ID NO: 16459 - DNA, 122 bp, Homo sapiens
  misc_feature (61)..(62): /note="This region represents a CpG dinucleotide"
  misc_feature (61)..(61): /note="Nucleotide may be methylated to form 5-methylcytosine"
ccgtggttagagacgctgttcccctccgcgcctgactccgcagttactttgttacttaaccgcccttctgctcatttgacaagccctgagcgcacatttgcagagcttccttccgggacttc

SEQ ID NO: 16460 - DNA, 122 bp, Homo sapiens
  misc_feature (61)..(62): /note="This region represents a CpG dinucleotide"
  misc_feature (61)..(61): /note="Nucleotide may be methylated to form 5-methylcytosine"
ccaggatgaaaaaaataatctattttggtgagccacttgagtcataggctatctaacttacgagcatgcctactctgttaggtccagtaaaggattcagaaagagacttcaggagctgccct

SEQ ID NO: 16461 - DNA, 122 bp, Homo sapiens
  misc_feature (61)..(62): /note="This region represents a CpG dinucleotide"
  misc_feature (61)..(61): /note="Nucleotide may be methylated to form 5-methylcytosine"
ccacgcctggcctaaaaataactcatttagtcttgtccttatccagctctttcacaactccgtaaaacagctttgatttttctctccttctactggctctatcttctctgccttcaaacgta

SEQ ID NO: 16462 - DNA, 122 bp, Homo sapiens
  misc_feature (61)..(62): /note="This region represents a CpG dinucleotide"
  misc_feature (61)..(61): /note="Nucleotide may be methylated to form 5-methylcytosine"
ctgattacatcactggggtgtagcatgtttttctgccctcttatatttcctgtgagttggcgtcaaaggcttaattagattcaggtgttttgttttggatccagcattcttggtgcgttttt

SEQ ID NO: 16463 - DNA, 122 bp, Homo sapiens
  misc_feature (61)..(62): /note="This region represents a CpG dinucleotide"
  misc_feature (61)..(61): /note="Nucleotide may be methylated to form 5-methylcytosine"
ttaggagggaccacagatggaacggtcatgaaagtctccaaggcatgacatcaaagctgacgacagaaggaagaactcgcaccttggccaggcacagtggctcaggcctataatctcagcac

SEQ ID NO: 16464 - DNA, 122 bp, Homo sapiens
  misc_feature (61)..(62): /note="This region represents a CpG dinucleotide"
  misc_feature (61)..(61): /note="Nucleotide may be methylated to form 5-methylcytosine"
agggttgctgcatttgggtgaggatgaggaagcattaattcccctgtacttctggcttgacggtgctgaggcagaatagaatccagtgactaaaggtcctaagacattaggagtcaggagtc

SEQ ID NO: 16465 - DNA, 122 bp, Homo sapiens
  misc_feature (61)..(62): /note="This region represents a CpG dinucleotide"
  misc_feature (61)..(61): /note="Nucleotide may be methylated to form 5-methylcytosine"
gaaatcacctaacaacacattactcagaatgtaaccacaatgttaagcaatgcatgacatcgcaaagaccctatttccaaataaggtcatagtctaaggttctagagaaaacatgaatttag

SEQ ID NO: 16466 - DNA, 122 bp, Homo sapiens
  misc_feature (61)..(62): /note="This region represents a CpG dinucleotide"
  misc_feature (61)..(61): /note="Nucleotide may be methylated to form 5-methylcytosine"
aaagtactgtcctccctttggatttcttctgtctgggtgttgccagggctcttctgttagcgacagagaaaataggaggtactagaattcggacttctaggaagggctgtattgtccttatc

SEQ ID NO: 16467 - DNA, 122 bp, Homo sapiens
  misc_feature (61)..(62): /note="This region represents a CpG dinucleotide"
  misc_feature (61)..(61): /note="Nucleotide may be methylated to form 5-methylcytosine"
cccaggatgaatccagagattagggacttagtttgcagtaggtccctttctccaaggcctcgccaccctctcccagttgactgcctgagagatttgtgcccacaggtcttgggctgaataaa

SEQ ID NO: 16468 - DNA, 122 bp, Homo sapiens
  misc_feature (61)..(62): /note="This region represents a CpG dinucleotide"
  misc_feature (61)..(61): /note="Nucleotide may be methylated to form 5-methylcytosine"
tgctgggtaataccttaggatgtgagagccgcttgcctttaaatatggaaccagctgctacgtgctcttgaccacggcaaagctggcaggacctcagatttccttatgcgcaaaatgtcccc

SEQ ID NO: 16469 - DNA, 122 bp, Homo sapiens
  misc_feature (61)..(62): /note="This region represents a CpG dinucleotide"
  misc_feature (61)..(61): /note="Nucleotide may be methylated to form 5-methylcytosine"
tttatcactctagttgctacattgggcacaatgccacaggacacaaatgggggtactgaacgtaagtctgagtgttggcccaatagtacctgtccagaagcagcctgggatccatgatccat

SEQ ID NO: 16470 - DNA, 122 bp, Homo sapiens
  misc_feature (61)..(62): /note="This region represents a CpG dinucleotide"
  misc_feature (61)..(61): /note="Nucleotide may be methylated to form 5-methylcytosine"
acgggctgcatgtgctccccgcccccgagaggcctgcgtcatgcggtctcgcccgctctgcgccaggcgtcctgctaacgtgtcctggagggactctcagttcctcccgcccgcatcctgcg

SEQ ID NO: 16471 - DNA, 122 bp, Homo sapiens
  misc_feature (61)..(62): /note="This region represents a CpG dinucleotide"
  misc_feature (61)..(61): /note="Nucleotide may be methylated to form 5-methylcytosine"
tcagtgccttgtgtactgcattaagtacttgctcagaggtcaagaggaggaactgactcacgcagcattagtggatgttcactaagccttctgttgattgtaacgttagtataggggaaggg

SEQ ID NO: 16472 - DNA, 122 bp, Homo sapiens
  misc_feature (61)..(62): /note="This region represents a CpG dinucleotide"
  misc_feature (61)..(61): /note="Nucleotide may be methylated to form 5-methylcytosine"
atgagtacggacagtttgccaaggtcactcagatggggtcattaactgtgaatcaaaagtcgtctgggccagggatgaggggaccggattcctagtgtcaacatcaccactaacccctaagt

SEQ ID NO: 16473 - DNA, 122 bp, Homo sapiens
  misc_feature (61)..(62): /note="This region represents a CpG dinucleotide"
  misc_feature (61)..(61): /note="Nucleotide may be methylated to form 5-methylcytosine"
ctactcacgtatgtcctcgggccaggccctgccctgtgaacctgtgagcacagccttccacgcctagcccagccctgaatgatatcccaccacagttgtgatgggccagcaactaaagcaac

SEQ ID NO: 16474 - DNA, 122 bp, Homo sapiens
  misc_feature (61)..(62): /note="This region represents a CpG dinucleotide"
  misc_feature (61)..(61): /note="Nucleotide may be methylated to form 5-methylcytosine"
accacttcttggacaggattaaagttcaactcaggaaatctcaaagtttggctactaattcgctttctatttttaaccacacttcatttcacagaataatattttcctctgtgtctgagtgg

SEQ ID NO: 16475 - DNA, 122 bp, Homo sapiens
  misc_feature (61)..(62): /note="This region represents a CpG dinucleotide"
  misc_feature (61)..(61): /note="Nucleotide may be methylated to form 5-methylcytosine"
atgtagaaatgactgtagttctcccctcatccaacataaaagcatagggattaaacaatacgactaatgtccagaattcacagatggcacagatggcaatgacacattccctcacctgtgtg

SEQ ID NO: 16476 - DNA, 122 bp, Homo sapiens
  misc_feature (61)..(62): /note="This region represents a CpG dinucleotide"
  misc_feature (61)..(61): /note="Nucleotide may be methylated to form 5-methylcytosine"
gatatgcacgttagttctgaactctgaaactttttttcttctgattgtaaaacatatttccgttacataagttatgaatacttacatgggctgatgagcacaggaagtaacataccctcaga

SEQ ID NO: 16477 - DNA, 122 bp, Homo sapiens
  misc_feature (61)..(62): /note="This region represents a CpG dinucleotide"
  misc_feature (61)..(61): /note="Nucleotide may be methylated to form 5-methylcytosine"
atgtggcccatggtaggatgaaggcctcctccaactcctgtgggatccaggctggactttcgccaattctcatgctgtcatcagggtcctctctaccagtttccaccagcccagctctgcct

SEQ ID NO: 16478 - DNA, 122 bp, Homo sapiens
  misc_feature (61)..(62): /note="This region represents a CpG dinucleotide"
  misc_feature (61)..(61): /note="Nucleotide may be methylated to form 5-methylcytosine"
tatgatgaacatttatttttgcttgtgggaaggggttctggtgtctgaatcacccagtgccgcatgcttatgtgagtgacatctaatagaactctagaaaccaaagcttggccgagtttccc

SEQ ID NO: 16479 - DNA, 122 bp, Homo sapiens
  misc_feature (61)..(62): /note="This region represents a CpG dinucleotide"
  misc_feature (61)..(61): /note="Nucleotide may be methylated to form 5-methylcytosine"
ggtgatatgcctgcctcagcctctcaaagtgctgggattacaggtgtgagccactgcacccggcctctaaaagcagaattgacttgctttgctaagaaagttcaggaagcccggataattgc

SEQ ID NO: 16480 - DNA, 122 bp, Homo sapiens
  misc_feature (61)..(62): /note="This region represents a CpG dinucleotide"
  misc_feature (61)..(61): /note="Nucleotide may be methylated to form 5-methylcytosine"
gcttactcccgggctggaccttggggttcgcatatttgaaagcgtaaacttgaggaatgacggcggggtgatgggtattttatagagtgggactcaatcgtgctcagcaacagatttctcca

SEQ ID NO: 16481 - DNA, 122 bp, Homo sapiens
  misc_feature (61)..(62): /note="This region represents a CpG dinucleotide"
  misc_feature (61)..(61): /note="Nucleotide may be methylated to form 5-methylcytosine"
agggttgaggtagccactgtgtttcaggccaagatagttgttaatgggatatcaggaacgcgactgggcttgacgggaagcaaggctggagttacaggctgggcttggcgggaaacaaagct

SEQ ID NO: 16482 - DNA, 122 bp, Homo sapiens
  misc_feature (61)..(62): /note="This region represents a CpG dinucleotide"
  misc_feature (61)..(61): /note="Nucleotide may be methylated to form 5-methylcytosine"
atcaaactccaataatttacctcaaaccacaacttatcattccagcttttactccatcaccgtaccatacttgttagcctcataaaaagttatattccagtgattgcttcattctcttccaa

SEQ ID NO: 16483 - DNA, 122 bp, Homo sapiens
  misc_feature (61)..(62): /note="This region represents a CpG dinucleotide"
  misc_feature (61)..(61): /note="Nucleotide may be methylated to form 5-methylcytosine"
tgtccggaaagcaccgctgatattgtcaggttacacactgaatggagggtgactaataagcgatgccagttgcctgtggactcgagagaatccagataccaagcgacgcctcacgttgcgcc

SEQ ID NO: 16484 - DNA, 122 bp, Homo sapiens
  misc_feature (61)..(62): /note="This region represents a CpG dinucleotide"
  misc_feature (61)..(61): /note="Nucleotide may be methylated to form 5-methylcytosine"
ctatttgtatgaactgtaagcttgtaagcttgtcatcatccttcatggtcctggggcaggcgcctggctagccactgtaacaggatgaggaaagagatacagcaagatccctgagacttcaa

SEQ ID NO: 16485 - DNA, 122 bp, Homo sapiens
  misc_feature (61)..(62): /note="This region represents a CpG dinucleotide"
  misc_feature (61)..(61): /note="Nucleotide may be methylated to form 5-methylcytosine"
acagatactgcctcgtttgcatattaacactggtgccagtctgagcccagctgtgtgcaacgtaaggtgaaatatagattcccccaacctggccacagtgtctccacgcggctaatggaaaa

SEQ ID NO: 16486 - DNA, 122 bp, Homo sapiens
  misc_feature (61)..(62): /note="This region represents a CpG dinucleotide"
  misc_feature (61)..(61): /note="Nucleotide may be methylated to form 5-methylcytosine"
atgcagtttcaggcccaggcaggcctctctctgggcttggggcaatgccagggctgggggcgagcctgcagtcagccttgtgagtggcagccgaggctgttattttgaaaccctaagtggaa

SEQ ID NO: 16487 - DNA, 122 bp, Homo sapiens
  misc_feature (61)..(62): /note="This region represents a CpG dinucleotide"
  misc_feature (61)..(61): /note="Nucleotide may be methylated to form 5-methylcytosine"
gtaaatataatttagtgtctgtgggctatatggtctctgtcacaactgtgcagactttgccgtctcatcacaaaggcagccgtagacaacacattaacgaatgagttcgaatgagttactgt

SEQ ID NO: 16488 - DNA, 122 bp, Homo sapiens
  misc_feature (61)..(62): /note="This region represents a CpG dinucleotide"
  misc_feature (61)..(61): /note="Nucleotide may be methylated to form 5-methylcytosine"
gaggatccccagctgatgagcagcagcgggccaccctgtcaccgagcgtgggtgcatgtccgatgtgacccagcaccctctcagaggagggagagcacacgttcacactcacacacactcgt

SEQ ID NO: 16489 - DNA, 122 bp, Homo sapiens
  misc_feature (61)..(62): /note="This region represents a CpG dinucleotide"
  misc_feature (61)..(61): /note="Nucleotide may be methylated to form 5-methylcytosine"
cccttgcagatcttgcagacattttcgtgggctccagggacgacacttctaaaggagaggcgaggttcactggacgttttgggaaactgtaaggcaaaaataaaattctaagcctcccaacc

SEQ ID NO: 16490 - DNA, 122 bp, Homo sapiens
  misc_feature (61)..(62): /note="This region represents a CpG dinucleotide"
  misc_feature (61)..(61): /note="Nucleotide may be methylated to form 5-methylcytosine"
agctctgaaatcgcagttcagttattttaaccttagccttgctgcttgaatggaatctgtcgcacatatgtatagtttggagatcaaagataaatacagagtttatacacagaatttagggc

SEQ ID NO: 16491 - DNA, 122 bp, Homo sapiens
  misc_feature (61)..(62): /note="This region represents a CpG dinucleotide"
  misc_feature (61)..(61): /note="Nucleotide may be methylated to form 5-methylcytosine"
agaatcactgtgctgctccacaagcagatatgaagagccagtccagtcacacaaagaaaacggacaggcatcccacacggcaggacgtctgtgactcatcaaagctggagtgcaggacagca

SEQ ID NO: 16492 - DNA, 122 bp, Homo sapiens
  misc_feature (61)..(62): /note="This region represents a CpG dinucleotide"
  misc_feature (61)..(61): /note="Nucleotide may be methylated to form 5-methylcytosine"
aatttacagtcatgctttcaaaacacagtgacttggtttgacactgtgaactagctgtatcgtgcaaattggtaaatagacagaatctagtatattatcctgcttttcctacaaaacctgaa

SEQ ID NO: 16493 - DNA, 122 bp, Homo sapiens
  misc_feature (61)..(62): /note="This region represents a CpG dinucleotide"
  misc_feature (61)..(61): /note="Nucleotide may be methylated to form 5-methylcytosine"
tttgaaaattttcagttggggctcttccaaataattgggactcccccaaaaagccagtcacgtttaccacaacagacactgagtggaagctctatcctctgcttccttgaagccggttgtca

SEQ ID NO: 16494 - DNA, 122 bp, Homo sapiens
  misc_feature (61)..(62): /note="This region represents a CpG dinucleotide"
  misc_feature (61)..(61): /note="Nucleotide may be methylated to form 5-methylcytosine"
cataatgcagcaggtcccaggtgtaacccggaggaaaaggcagacaaggtcctgcgatgccgcagctgaaaggaagctgacgccaacgggcttctcagaagaacaatgactcattagtcccg

SEQ ID NO: 16495 - DNA, 122 bp, Homo sapiens
  misc_feature (61)..(62): /note="This region represents a CpG dinucleotide"
  misc_feature (61)..(61): /note="Nucleotide may be methylated to form 5-methylcytosine"
attttgctaattaattttggggggacacattgagcaagtccgcccaggtgcatgttcccacggtcccattccagtgggcagttgaatgcacacgtatgcatgaagggcgtgggtagtgaact

SEQ ID NO: 16496 - DNA, 122 bp, Homo sapiens
  misc_feature (61)..(62): /note="This region represents a CpG dinucleotide"
  misc_feature (61)..(61): /note="Nucleotide may be methylated to form 5-methylcytosine"
ctctctctctctgcatttctttccttcagtgcaggctctcagtttacagttctgcactcacgcctgtcttccccatcaactaagctccttgagaacatgggctttgcatctgctcacatcgc

SEQ ID NO: 16497 - DNA, 122 bp, Homo sapiens
  misc_feature (61)..(62): /note="This region represents a CpG dinucleotide"
  misc_feature (61)..(61): /note="Nucleotide may be methylated to form 5-methylcytosine"
tctctttatgtttacctggaggaccagcttcctgactttttcttagaatttgttcgtttccgggattgaaggaaaagaaaaaaaaaatcccccttgtcagttcatctctgtttactcattct

SEQ ID NO: 16498 - DNA, 122 bp, Homo sapiens
  misc_feature (61)..(62): /note="This region represents a CpG dinucleotide"
  misc_feature (61)..(61): /note="Nucleotide may be methylated to form 5-methylcytosine"
ttccattcaatttaaaccacctactgggtgcttaatagtcttggccgggtgcgtggcacacgcctataatcccagcactttgggaggccgaggtgggtggatcacctgaggtcagtctgact

SEQ ID NO: 16499 - DNA, 122 bp, Homo sapiens
  misc_feature (61)..(62): /note="This region represents a CpG dinucleotide"
  misc_feature (61)..(61): /note="Nucleotide may be methylated to form 5-methylcytosine"
aaacaaacaaagaaacaaaaaactacatgaggtgggttcggtcccaaggctaccagcttacgatccttgggctataagccatctgacttcaactatcactgctgtgtttgctcagtctcaga

SEQ ID NO: 16500 - DNA, 122 bp, Homo sapiens
  misc_feature (61)..(62): /note="This region represents a CpG dinucleotide"
  misc_feature (61)..(61): /note="Nucleotide may be methylated to form 5-methylcytosine"
tctttccttccaggatgaagctgccgcataactctgtgattaacacacactgactctggacgtcaggggagattaaaggagggatcagatgcttttgaagagaaggtggccatctggaaggt

SEQ ID NO: 16501 - DNA, 122 bp, Homo sapiens
  misc_feature (61)..(62): /note="This region represents a CpG dinucleotide"
  misc_feature (61)..(61): /note="Nucleotide may be methylated to form 5-methylcytosine"
tggattcattcattcatgtcttggaaggcagcggtcattcatgaggtagtttcagtaccgcggacagcgctgagcatgtccctggtgttcaatgaattttcattaaaggcatcttgattcag

SEQ ID NO: 16502 - DNA, 122 bp, Homo sapiens
  misc_feature (61)..(62): /note="This region represents a CpG dinucleotide"
  misc_feature (61)..(61): /note="Nucleotide may be methylated to form 5-methylcytosine"
cctggcagggcccgccacctcacaggctggttctccatctgggggcctgcttgtctgcggcgactctttagttcacaggaggggacggccggcgctgacagcttcccctttgctttccccac

SEQ ID NO: 16503 - DNA, 122 bp, Homo sapiens
  misc_feature (61)..(62): /note="This region represents a CpG dinucleotide"
  misc_feature (61)..(61): /note="Nucleotide may be methylated to form 5-methylcytosine"
ctctacaacatttgcacaacaaaattgcctaatgatacattttgcagaacgtatcccagtcgttaattaacacatgatctcagtcttatatataatatgcatgaatgacatgtacaagtaaa

SEQ ID NO: 16504 - DNA, 122 bp, Homo sapiens
  misc_feature (61)..(62): /note="This region represents a CpG dinucleotide"
  misc_feature (61)..(61): /note="Nucleotide may be methylated to form 5-methylcytosine"
aaaaatctgcccccctccccccgccgtgattatttttcatattaaaaagacacccaccaccgagggccagtttaaattgtacaatcacagcccataggccaccaatggaaaagcctaagcaa

SEQ ID NO: 16505 - DNA, 122 bp, Homo sapiens
  misc_feature (61)..(62): /note="This region represents a CpG dinucleotide"
  misc_feature (61)..(61): /note="Nucleotide may be methylated to form 5-methylcytosine"
aatggtttttgcatttttcagtggttcaaaataaatcaagagaccagttgcaagggctcacgcttataatcccagcactttgagacgccgaggcaggcagatcacttgagcccaggagttca

SEQ ID NO: 16506 - DNA, 122 bp, Homo sapiens
  misc_feature (61)..(62): /note="This region represents a CpG dinucleotide"
  misc_feature (61)..(61): /note="Nucleotide may be methylated to form 5-methylcytosine"
tcgccgtcgttgttatttagtagtagtagtaacggctgacatttacagcgacgtcgatggcgccaggtgccaagctctttccttgtataatttcatggacactcacgcatcaactctaagcg

SEQ ID NO: 16507 - DNA, 122 bp, Homo sapiens
  misc_feature (61)..(62): /note="This region represents a CpG dinucleotide"
  misc_feature (61)..(61): /note="Nucleotide may be methylated to form 5-methylcytosine"
ggactggtcacatgctcttttctaagccagtgcctgggcaagggaaggggttggtcataacggatttagactacttaggatttacttctgggccaaggagagggagggggtgagggaggggg

SEQ ID NO: 16508 - DNA, 122 bp, Homo sapiens
  misc_feature (61)..(62): /note="This region represents a CpG dinucleotide"
  misc_feature (61)..(61): /note="Nucleotide may be methylated to form 5-methylcytosine"
aatagatcccccctccccgccgctgcagcaaatcaacatttctgctcacagggagagcagcgaatctaaagacatggccactgacgcgcatccccttaaaccgcagcggctagggtccagga

SEQ ID NO: 16509 - DNA, 122 bp, Homo sapiens
  misc_feature (61)..(62): /note="This region represents a CpG dinucleotide"
  misc_feature (61)..(61): /note="Nucleotide may be methylated to form 5-methylcytosine"
ggttcaagggattttcctgcctcagcctgctgagcagctgggattacaggcatgagccaccgcgcccagcctgcatgggctcattctcttatctgacatggagagagaaaagggtgcagaca

SEQ ID NO: 16510 - DNA, 122 bp, Homo sapiens
  misc_feature (61)..(62): /note="This region represents a CpG dinucleotide"
  misc_feature (61)..(61): /note="Nucleotide may be methylated to form 5-methylcytosine"
catatacccaactttctattatttatctcttcttcgaaatctcagagcctttaaactcaacgcagccgaagctaagcctatgagctcaccccagaacctagtcctcttcctgtgtttcctgt

SEQ ID NO: 16511 - DNA, 122 bp, Homo sapiens
  misc_feature (61)..(62): /note="This region represents a CpG dinucleotide"
  misc_feature (61)..(61): /note="Nucleotide may be methylated to form 5-methylcytosine"
gtaaaatgagtcaggacaccaaagatgagcccctaaatgttgttaaatgtcattttattacgatagagagtgctaacttacaacagagagtatacatttcggggttcacctggctcgttcta

SEQ ID NO: 16512 - DNA, 122 bp, Homo sapiens
  misc_feature (61)..(62): /note="This region represents a CpG dinucleotide"
  misc_feature (61)..(61): /note="Nucleotide may be methylated to form 5-methylcytosine"
tgcattccttcagctggtatctttcttcctctaacatggtgattctcaatttgtgggccacggaccctgagggagccttgaagttgttaaaaaggtttagtaaattcatgcacataccaagc

SEQ ID NO: 16513 - DNA, 122 bp, Homo sapiens
  misc_feature (61)..(62): /note="This region represents a CpG dinucleotide"
  misc_feature (61)..(61): /note="Nucleotide may be methylated to form 5-methylcytosine"
taaagaatcattgtttggaattttctgtttagcctgtattaaaagcaacttgacatctgtcgtcacaaaatatgaacatctaatataagccaccatttattatttgactctcttccacaata

SEQ ID NO: 16514 - DNA, 122 bp, Homo sapiens
  misc_feature (61)..(62): /note="This region represents a CpG dinucleotide"
  misc_feature (61)..(61): /note="Nucleotide may be methylated to form 5-methylcytosine"
tacagaaacccagagccaaaggtgctctcaggggatcccctgaaacattcaaagccattgcggccccagaaggtaaatggctttcgcaggaacacaggtctcctgactcacggcctaacctt

SEQ ID NO: 16515 - DNA, 122 bp, Homo sapiens
  misc_feature (61)..(62): /note="This region represents a CpG dinucleotide"
  misc_feature (61)..(61): /note="Nucleotide may be methylated to form 5-methylcytosine"
tgtagatagcagtatagaaccaaaaatctgtatgaggcctttccatttgtttttgttctacggctatgtcctggcagggcaattgccatattttttttcactttgagtgttttatcttttgc

SEQ ID NO: 16516 - DNA, 122 bp, Homo sapiens
  misc_feature (61)..(62): /note="This region represents a CpG dinucleotide"
  misc_feature (61)..(61): /note="Nucleotide may be methylated to form 5-methylcytosine"
gtttagatacacaagtactgaccattgtgtttcaacagcctgcagtattcaggacagccacgtgctgggcaggtttgtagccgaggagtaataggctatatcgtatagcctgggtgtatagt

SEQ ID NO: 16517 - DNA, 122 bp, Homo sapiens
  misc_feature (61)..(62): /note="This region represents a CpG dinucleotide"
  misc_feature (61)..(61): /note="Nucleotide may be methylated to form 5-methylcytosine"
agttgcacttcctgtgtggttgcacataacaaaaccccatgacaagaaggatccagcctccgagtgtccacaccctgtgcgtctctctgtcctgccagcactgagggctcatccatccgcag

SEQ ID NO: 16518 - DNA, 122 bp, Homo sapiens
  misc_feature (61)..(62): /note="This region represents a CpG dinucleotide"
  misc_feature (61)..(61): /note="Nucleotide may be methylated to form 5-methylcytosine"
ctagatttaagaggaggggacacagaggccatctctcaatgggaggagtccctgcaaccacgagccacacgtgctttttggctgatacttgaaagaatgagcaatgcaggctgggcgcagtg

SEQ ID NO: 16519 - DNA, 122 bp, Homo sapiens
  misc_feature (61)..(62): /note="This region represents a CpG dinucleotide"
  misc_feature (61)..(61): /note="Nucleotide may be methylated to form 5-methylcytosine"
ctgcctcggcctcccaaagtgctgggattacaggcaagaaccaccacacccagcctgatacgtacattttcaattttacaggcctgtgtcactgtgcccagcacttctactttcttttaaaa

SEQ ID NO: 16520 - DNA, 122 bp, Homo sapiens
  misc_feature (61)..(62): /note="This region represents a CpG dinucleotide"
  misc_feature (61)..(61): /note="Nucleotide may be methylated to form 5-methylcytosine"
gagattcagcctcctagaagctgctcagtcagaggcctgacagtataactgcagagaacacgtgtccagcccaataagctgttctacctcgtcatataatctaaacgtacaggtacaaaaag

SEQ ID NO: 16521 - DNA, 122 bp, Homo sapiens
  misc_feature (61)..(62): /note="This region represents a CpG dinucleotide"
  misc_feature (61)..(61): /note="Nucleotide may be methylated to form 5-methylcytosine"
tcctctttctgtgtcttgtgatctcacttaactcatcctgctagagtcaacagatctctccgtgcacaggaagccagactatcaaggcagcaaagagttttaaggcagctaagtgaacagtt

SEQ ID NO: 16522 - DNA, 122 bp, Homo sapiens
  misc_feature (61)..(62): /note="This region represents a CpG dinucleotide"
  misc_feature (61)..(61): /note="Nucleotide may be methylated to form 5-methylcytosine"
aaaaaaaaagtcactgcaaccagtacttatgtttattactgtacctaataaacagcccagcgtggtgattcctattcacttagtagcctccccatctagaatatactccgtgatctttcttg

SEQ ID NO: 16523 - DNA, 122 bp, Homo sapiens
  misc_feature (61)..(62): /note="This region represents a CpG dinucleotide"
  misc_feature (61)..(61): /note="Nucleotide may be methylated to form 5-methylcytosine"
ccctgctagggtgcgtctgcatctggaaaagcagctctgccccagcaaggcctggggcagcgggatcctgggggcctggggcaggatgggtggggctggtgctgagggcatcttcctgtctc

SEQ ID NO: 16524 - DNA, 122 bp, Homo sapiens
  misc_feature (61)..(62): /note="This region represents a CpG dinucleotide"
  misc_feature (61)..(61): /note="Nucleotide may be methylated to form 5-methylcytosine"
gagaaggtcccctacaaggtaaagagagggtactttgcaaattgaaggcaccttgaggaccgaggccaaagccttgagtccttgcatgctcttccccatgatgggcacacagcaggtgctca

SEQ ID NO: 16525 - DNA, 122 bp, Homo sapiens
  misc_feature (61)..(62): /note="This region represents a CpG dinucleotide"
  misc_feature (61)..(61): /note="Nucleotide may be methylated to form 5-methylcytosine"
ccgcaaggcaacctctaggctgctgatgctgctctctgcaggcttgtggaggtccagggccgtgtcatagcttggccgtctgggtgcgacagaaacgggagcacttctggcccagagcctcc

SEQ ID NO: 16526 - DNA, 122 bp, Homo sapiens
  misc_feature (61)..(62): /note="This region represents a CpG dinucleotide"
  misc_feature (61)..(61): /note="Nucleotide may be methylated to form 5-methylcytosine"
ctcctcttcctgtgtattctggattctagctagtcgtgcacagatgctcaagctgcagaacgtggttatctgctcctgcagtcctggttcaaggacagagctgaaacatacagattcttatg

SEQ ID NO: 16527 - DNA, 122 bp, Homo sapiens
  misc_feature (61)..(62): /note="This region represents a CpG dinucleotide"
  misc_feature (61)..(61): /note="Nucleotide may be methylated to form 5-methylcytosine"
tgatacaggctcaagagatcactggatagcctttcagtggaatattaggtgcaccttctgcgtgggttatctgattctatcagggtctgtccttttcattttctttaatgagctctttcaaa

SEQ ID NO: 16528 - DNA, 122 bp, Homo sapiens
  misc_feature (61)..(62): /note="This region represents a CpG dinucleotide"
  misc_feature (61)..(61): /note="Nucleotide may be methylated to form 5-methylcytosine"
cattgtcctcattgtcactgccattcactggggacttggccttgtgctaagaacttgacacgtgttgtcttattcagtcctcaccaaaactctacgagcaggaattaccgttatccccattt

SEQ ID NO: 16529 - DNA, 122 bp, Homo sapiens
  misc_feature (61)..(62): /note="This region represents a CpG dinucleotide"
  misc_feature (61)..(61): /note="Nucleotide may be methylated to form 5-methylcytosine"
tctttagctaagcctttgaaagtgtctctgtcttgttccagttcacatttcctactcattcgctgtggtcgccccgcctactcccgcctttccagcctgtggccagcccctgcaggggctcc

SEQ ID NO: 16530 - DNA, 122 bp, Homo sapiens
  misc_feature (61)..(62): /note="This region represents a CpG dinucleotide"
  misc_feature (61)..(61): /note="Nucleotide may be methylated to form 5-methylcytosine"
tccattcaatcttcttttcaggaaacttgatctgagcctctatccagacacccagttatacggtaccagttagtggaatatgtaggctatgaatcagactccactgtggaaactaatccttg

SEQ ID NO: 16531 - DNA, 122 bp, Homo sapiens
  misc_feature (61)..(62): /note="This region represents a CpG dinucleotide"
  misc_feature (61)..(61): /note="Nucleotide may be methylated to form 5-methylcytosine"
gaaagtctgagaaaccgtgacagccaagaagagcctaaggagtcgtgacaacgaatgttacgtgggatcccgggtgcgaccctggagtagggaaagatagaactaagtgtaaacagtaaagt

SEQ ID NO: 16532 - DNA, 122 bp, Homo sapiens
  misc_feature (61)..(62): /note="This region represents a CpG dinucleotide"
  misc_feature (61)..(61): /note="Nucleotide may be methylated to form 5-methylcytosine"
tacagcaaaaaatatgcattgcctatgccattaatttgccacttggtaaatactacctttcgttactaattatatctctataagaacctagggtaacaataaagtctgagttcactatcctt

SEQ ID NO: 16533 - DNA, 122 bp, Homo sapiens
  misc_feature (61)..(62): /note="This region represents a CpG dinucleotide"
  misc_feature (61)..(61): /note="Nucleotide may be methylated to form 5-methylcytosine"
aagatgtggcttaaagttcatgttactctcatctttgtcccaacatgagatctcatcaaacgtatgcagcacgttgggagatagatatttataatttgcaggaacatttggacaggaagtgt

SEQ ID NO: 16534 - DNA, 122 bp, Homo sapiens
  misc_feature (61)..(62): /note="This region represents a CpG dinucleotide"
  misc_feature (61)..(61): /note="Nucleotide may be methylated to form 5-methylcytosine"
ggtactgagtgcacaagttactaggtgccaggctgtctcctaagcactttccatatgcttcgtcactcagtctcacagggattaggaggagatagtgatgatccccgtctgcatttctcttt

SEQ ID NO: 16535 - DNA, 122 bp, Homo sapiens
  misc_feature (61)..(62): /note="This region represents a CpG dinucleotide"
  misc_feature (61)..(61): /note="Nucleotide may be methylated to form 5-methylcytosine"
caatattaaaaataatttaaagttccctaaactaatttataaatttgtgcaattcaaaaacgaaacagcagaaccaagagtgtttggcatgaaacttgacagagtgattctaaaattagccg

SEQ ID NO: 16536 - DNA, 122 bp, Homo sapiens
  misc_feature (61)..(62): /note="This region represents a CpG dinucleotide"
  misc_feature (61)..(61): /note="Nucleotide may be methylated to form 5-methylcytosine"
cttttctgtcagccaagaggtgccaggtaggtaaggagcatactgggtaactgtgtactccgtgcccaggcctactcatgcctctgtgggctgggcactgatgcaaacttctgccaggcatg

SEQ ID NO: 16537 - DNA, 122 bp, Homo sapiens
  misc_feature (61)..(62): /note="This region represents a CpG dinucleotide"
  misc_feature (61)..(61): /note="Nucleotide may be methylated to form 5-methylcytosine"
taaaaatcttttcagacctcaatcactatttagccttgagaatatttactataatcttaccgtatcacttgagacagtaatttcttggtgacttggatcatctaatcctatgactcttgagt

SEQ ID NO: 16538 - DNA, 122 bp, Homo sapiens
  misc_feature (61)..(62): /note="This region represents a CpG dinucleotide"
  misc_feature (61)..(61): /note="Nucleotide may be methylated to form 5-methylcytosine"
gactctgcactgctttcagcgttccaggacttaacaacacggatgatcggcagttctttgcgtttatttttggtcctacatgttgttcttcaaacccatttcctcttgttctttccccaaca

SEQ ID NO: 16539 - DNA, 122 bp, Homo sapiens
  misc_feature (61)..(62): /note="This region represents a CpG dinucleotide"
  misc_feature (61)..(61): /note="Nucleotide may be methylated to form 5-methylcytosine"
gctaatagagagatttctgttaatccttaagagagactagaaactctgatgaccactaagcgaggttggaaagatgtaaagcatttagtgcatttcatgtgcatatagacagcagcctactt

SEQ ID NO: 16540 - DNA, 122 bp, Homo sapiens
  misc_feature (61)..(62): /note="This region represents a CpG dinucleotide"
  misc_feature (61)..(61): /note="Nucleotide may be methylated to form 5-methylcytosine"
ttaaccaggatgttaaattttcacccacacctctggcttaaccaaatgttactgtgatagcgtggtatctgacacaattaatctaatacattatgagtaaagttgctatctggatgcacaat

SEQ ID NO: 16541 - DNA, 122 bp, Homo sapiens
  misc_feature (61)..(62): /note="This region represents a CpG dinucleotide"
  misc_feature (61)..(61): /note="Nucleotide may be methylated to form 5-methylcytosine"
gttagattttggataaaggcaggctgtgaggctgaagagagcctgaagtcaccctgaacccgtgccccctcctgcctttcacctctggcccctcaaacctttggactctgctccaatgtttg

SEQ ID NO: 16542 - DNA, 122 bp, Homo sapiens
  misc_feature (61)..(62): /note="This region represents a CpG dinucleotide"
  misc_feature (61)..(61): /note="Nucleotide may be methylated to form 5-methylcytosine"
atagccaataataataaaaaagagcaactcacattgatggtgcccttattgtgtgtgtgtcgtttcatggcatcctgaagacagctgagagacagatgtgatcatgcctgttttacagatgg

SEQ ID NO: 16543 - DNA, 122 bp, Homo sapiens
  misc_feature (61)..(62): /note="This region represents a CpG dinucleotide"
  misc_feature (61)..(61): /note="Nucleotide may be methylated to form 5-methylcytosine"
gaccaaggacaaatcatttaacctcctcttgccttgtttttactgtatgcaaaatagagccgataacaatacaagcctcctccttccctctgagggatattctgagaattggagagatgcta

SEQ ID NO: 16544 - DNA, 122 bp, Homo sapiens
  misc_feature (61)..(62): /note="This region represents a CpG dinucleotide"
  misc_feature (61)..(61): /note="Nucleotide may be methylated to form 5-methylcytosine"
tgcttacagtatgtgaaatactctcaccagaacaaaggtcccagcgtcaataagtcaaaccgcagactctgacagctgagtgaatagcagaggccagagtccacttgaagtgttcacactct

SEQ ID NO: 16545 - DNA, 122 bp, Homo sapiens
  misc_feature (61)..(62): /note="This region represents a CpG dinucleotide"
  misc_feature (61)..(61): /note="Nucleotide may be methylated to form 5-methylcytosine"
gtttcggagggaaaggcaggcaaggcaaggtttaggattggcaagtgtgagtaattttggcgggctccaaggtataggggatttctctagttgtctgacacttggccctggggtgactagga

SEQ ID NO: 16546 - DNA, 122 bp, Homo sapiens
  misc_feature (61)..(62): /note="This region represents a CpG dinucleotide"
  misc_feature (61)..(61): /note="Nucleotide may be methylated to form 5-methylcytosine"
ggaggcctgaccacacctttgaagtttaaggtcttgagtcagttacctaacttctctatgcgtcagtttccttgcctgtaaaatgaggaaaatacagtacctacctaggatactatgtgcag

SEQ ID NO: 16547 - DNA, 122 bp, Homo sapiens
  misc_feature (61)..(62): /note="This region represents a CpG dinucleotide"
  misc_feature (61)..(61): /note="Nucleotide may be methylated to form 5-methylcytosine"
tcaggtgatccacctacctcggcctgggattacagtgctgggattacaggcatgagccaccgctctcagccagggtgtaacattttaaggtacatgatttataaaaagcttttttaaatagc

SEQ ID NO: 16548 - DNA, 122 bp, Homo sapiens
  misc_feature (61)..(62): /note="This region represents a CpG dinucleotide"
  misc_feature (61)..(61): /note="Nucleotide may be methylated to form 5-methylcytosine"
ctgattcaaaaaaaaaaaagaaaaaatattaggcagtttatctatttaatctgtggtgtgcggagaccaggaactatcagatttatcattatttgagcaaatggttttattggatcacaatc

SEQ ID NO: 16549 - DNA, 122 bp, Homo sapiens
  misc_feature (61)..(62): /note="This region represents a CpG dinucleotide"
  misc_feature (61)..(61): /note="Nucleotide may be methylated to form 5-methylcytosine"
agtgaggctgactttacagaagtagcaactgaggccccgagagggggaacgattttacaccggcatgctgccactataattagaggcagggcaaaaccaggctaaacaaactacaattccca

SEQ ID NO: 16550 - DNA, 122 bp, Homo sapiens
  misc_feature (61)..(62): /note="This region represents a CpG dinucleotide"
  misc_feature (61)..(61): /note="Nucleotide may be methylated to form 5-methylcytosine"
cctcacacagaaacctcttatccagtttgagagaggtgtgtgcatgcatgtatgcacgtgcgtgtgcaggcttgtgtgcgtgcctaatgaaaagcagcttgttcagagttagtcaaaggctt

SEQ ID NO: 16551 - DNA, 122 bp, Homo sapiens
  misc_feature (61)..(62): /note="This region represents a CpG dinucleotide"
  misc_feature (61)..(61): /note="Nucleotide may be methylated to form 5-methylcytosine"
cagagtgccatgcaagaagcagacccaactgttgaggagtggcagtcataaagcccgatccgccagaaaaaaacctaccaggaaatgaattcaccttagacttctgatccctcaaataatac

SEQ ID NO: 16552 - DNA, 122 bp, Homo sapiens
  misc_feature (61)..(62): /note="This region represents a CpG dinucleotide"
  misc_feature (61)..(61): /note="Nucleotide may be methylated to form 5-methylcytosine"
aggctctgagctccagcctctcactccaccaccagacaagtttacaatggaactagctcacgccccaatgacatggaagggagaatgagcccttggtaaatatgaaaagccacctcctccct

SEQ ID NO: 16553 - DNA, 122 bp, Homo sapiens
  misc_feature (61)..(62): /note="This region represents a CpG dinucleotide"
  misc_feature (61)..(61): /note="Nucleotide may be methylated to form 5-methylcytosine"
tttcaaggtcttttactctgaggttggcgcagataaatccctgcaggagcagttgcacagcgtgcctctcagccgggacatcccgaccacggtgagtctttccatcctggcagcccactcaa

SEQ ID NO: 16554 - DNA, 122 bp, Homo sapiens
  misc_feature (61)..(62): /note="This region represents a CpG dinucleotide"
  misc_feature (61)..(61): /note="Nucleotide may be methylated to form 5-methylcytosine"
ccattatctcttttctccataccaatattacaagtacagcctagagtggtcacactgtcacggcaatttgctatagtccatatgtgtgctctccaacttcagctgaaccctcagtcctacat

SEQ ID NO: 16555 - DNA, 122 bp, Homo sapiens
  misc_feature (61)..(62): /note="This region represents a CpG dinucleotide"
  misc_feature (61)..(61): /note="Nucleotide may be methylated to form 5-methylcytosine"
ccatctaaagaaatacataaaaaatcaagcatttgtggcccatactcttcctgccatgcccgttggtctctacctcatggctcacatggcatgtaatagcgagtcagtgtttttgttttaca

SEQ ID NO: 16556 - DNA, 122 bp, Homo sapiens
  misc_feature (61)..(62): /note="This region represents a CpG dinucleotide"
  misc_feature (61)..(61): /note="Nucleotide may be methylated to form 5-methylcytosine"
caagtttacaaatttgtgttgggctgcatccgtcctgggctgcatgcagcccacgggtggcgggttggacaagcttgcagtagattctagcaatctcagcacacgatttttttttctttcct

SEQ ID NO: 16557 - DNA, 122 bp, Homo sapiens
  misc_feature (61)..(62): /note="This region represents a CpG dinucleotide"
  misc_feature (61)..(61): /note="Nucleotide may be methylated to form 5-methylcytosine"
aagagagggttatgggagttcagtacccttggatcatgtgtgcgttttgtgctgggaccccgtactctccaaccactcactgcatccctataaatcccgcattttataccaacagggtgaag

SEQ ID NO: 16558 - DNA, 122 bp, Homo sapiens
  misc_feature (61)..(62): /note="This region represents a CpG dinucleotide"
  misc_feature (61)..(61): /note="Nucleotide may be methylated to form 5-methylcytosine"
acaggataatgacctgtctctgtcttctaggagctgcctcctagggctctggggatgaaacgagatggttctacagcaccagctgagagcctgcacatagcaagtgcccagtacttgatgat

SEQ ID NO: 16559 - DNA, 122 bp, Homo sapiens
  misc_feature (61)..(62): /note="This region represents a CpG dinucleotide"
  misc_feature (61)..(61): /note="Nucleotide may be methylated to form 5-methylcytosine"
ttccctggcacttggaatagggcctgacacatagtagtagatatttgtcaaatgatggaacggcttcacagactgataaacaaagcacacctaatatgcaataataatagtagtaaacacca

SEQ ID NO: 16560 - DNA, 122 bp, Homo sapiens
  misc_feature (61)..(62): /note="This region represents a CpG dinucleotide"
  misc_feature (61)..(61): /note="Nucleotide may be methylated to form 5-methylcytosine"
caatacaaagagtcagaggtataataaaagaataaagaatgttggggagagatgtgaacccgttgagagtcctgagagaactggagaaaaacttcacacagtaggggtgacacttcagaagg

SEQ ID NO: 16561 - DNA, 122 bp, Homo sapiens
  misc_feature (61)..(62): /note="This region represents a CpG dinucleotide"
  misc_feature (61)..(61): /note="Nucleotide may be methylated to form 5-methylcytosine"
gtggatgaggcagcaaagggtaagcagcttcttgaacagcccaaacctgtgcaggccagacgttccagcacgatggggtcagcccatgtgtttgtgtgacaaagagtcttctagacctcagg

SEQ ID NO: 16562 - DNA, 122 bp, Homo sapiens
  misc_feature (61)..(62): /note="This region represents a CpG dinucleotide"
  misc_feature (61)..(61): /note="Nucleotide may be methylated to form 5-methylcytosine"
ggaaaatacccaggtctcattcacttccactctttggggacagacttgctgcaccattagcgtattaccagtcttctttaaagaaaactcccaaacttgtctttgtcctgggaaggtaggag

SEQ ID NO: 16563 - DNA, 122 bp, Homo sapiens
  misc_feature (61)..(62): /note="This region represents a CpG dinucleotide"
  misc_feature (61)..(61): /note="Nucleotide may be methylated to form 5-methylcytosine"
tccctctcctatgcctctttcctcccctttacccttcaggagttgagtagcatcagaaaacgctgcagctagccccaaggtactgcactctgtcttgtagtttgaaaatgctacctttgtta

SEQ ID NO: 16564 - DNA, 122 bp, Homo sapiens
  misc_feature (61)..(62): /note="This region represents a CpG dinucleotide"
  misc_feature (61)..(61): /note="Nucleotide may be methylated to form 5-methylcytosine"
ctccagcaaaaggcccaagattgactcttgttggctcagatggagttgcatgtcttcttccgcccgatcactgtgacctgccacgcctgggccacatgggtggagtccgccctccccacaca

SEQ ID NO: 16565 - DNA, 122 bp, Homo sapiens
  misc_feature (61)..(62): /note="This region represents a CpG dinucleotide"
  misc_feature (61)..(61): /note="Nucleotide may be methylated to form 5-methylcytosine"
ctttacgtcttcttcttggaaaaggaaatcaaaaagttaatgttttacttggtgtccagacgcaaagaacagttcccagatacaaagtcaagcaattattcaaagatactacatttaaagat

SEQ ID NO: 16566 - DNA, 122 bp, Homo sapiens
  misc_feature (61)..(62): /note="This region represents a CpG dinucleotide"
  misc_feature (61)..(61): /note="Nucleotide may be methylated to form 5-methylcytosine"
taatcgttgcgtctgtagctgccacagtatcgccggtcatacaccctccggtcggacgaacgatcatcataactgctgttggataacaaataccaatgaggtgtatctgttcagatcacatt

SEQ ID NO: 16567 - DNA, 122 bp, Homo sapiens
  misc_feature (61)..(62): /note="This region represents a CpG dinucleotide"
  misc_feature (61)..(61): /note="Nucleotide may be methylated to form 5-methylcytosine"
tagctaaaatctctgattctaattgagaaagactgatagagagaaggagtcagacactggcgagcaatcagagtagaatatagctcagcatagactcagagaaggatataggtcagaaaggc

SEQ ID NO: 16568 - DNA, 122 bp, Homo sapiens
  misc_feature (61)..(62): /note="This region represents a CpG dinucleotide"
  misc_feature (61)..(61): /note="Nucleotide may be methylated to form 5-methylcytosine"
tgattattaatatagttagattaatatctaccacatttgtaaatgtttcattgtacctatcgtttttatcttttcttccttttttcctgccttttctggtttaattgagcattttatgcttc

SEQ ID NO: 16569 - DNA, 122 bp, Homo sapiens
  misc_feature (61)..(62): /note="This region represents a CpG dinucleotide"
  misc_feature (61)..(61): /note="Nucleotide may be methylated to form 5-methylcytosine"
cagctgcggctgagacggaggtagccccccagaaccaagatctcctcggcagttgggtaccgcttcttcccagcccccgggactgcagcatcaactgtggctggagaggttggggtggctgg

SEQ ID NO: 16570 - DNA, 122 bp, Homo sapiens
  misc_feature (61)..(62): /note="This region represents a CpG dinucleotide"
  misc_feature (61)..(61): /note="Nucleotide may be methylated to form 5-methylcytosine"
cctccatgaaaaccccaaaggcccaggttcagagagcttcctggttgccgaacatgtagacgttccgtgctccttcccacgtgctttgccctatctcttcatccggttgttcatctgtattg

SEQ ID NO: 16571 - DNA, 122 bp, Homo sapiens
  misc_feature (61)..(62): /note="This region represents a CpG dinucleotide"
  misc_feature (61)..(61): /note="Nucleotide may be methylated to form 5-methylcytosine"
caaaggactgtaagcctcagtcaccaaactcccagcctgatgagcaggaggactgggagccgtgagcacacatccacttcctgacctttctgcattctgggcagcagaaaccgtcaccagcg

SEQ ID NO: 16572 - DNA, 122 bp, Homo sapiens
  misc_feature (61)..(62): /note="This region represents a CpG dinucleotide"
  misc_feature (61)..(61): /note="Nucleotide may be methylated to form 5-methylcytosine"
ggattagaaaattgaggattagagaagtcaccaaccagtgctccaggcaactgcaggtcacgaagctgtgacttgcctccaaagactgctgactaaaggctggaaagtctggcttaacctac

SEQ ID NO: 16573 - DNA, 122 bp, Homo sapiens
  misc_feature (61)..(62): /note="This region represents a CpG dinucleotide"
  misc_feature (61)..(61): /note="Nucleotide may be methylated to form 5-methylcytosine"
ggaagaccttctctgttctctgctccttttagtcttgctttatgtggtatcttcctctggcgtggagacaactgatttgttgttatttcaatgaggagcaaaggtctcatagaaaaactaat

SEQ ID NO: 16574 - DNA, 122 bp, Homo sapiens
  misc_feature (61)..(62): /note="This region represents a CpG dinucleotide"
  misc_feature (61)..(61): /note="Nucleotide may be methylated to form 5-methylcytosine"
ttaaatctctgtgaaggccctaatttatagataagcattgcactatctaatttatgccaccgggtggtagtattttattttcatttatgtaagctctagactagtagctttcagactttttg

SEQ ID NO: 16575 - DNA, 122 bp, Homo sapiens
  misc_feature (61)..(62): /note="This region represents a CpG dinucleotide"
  misc_feature (61)..(61): /note="Nucleotide may be methylated to form 5-methylcytosine"
gtactgtatattaaacatttaaagtgatgttgctactgcttccttatctggaccattaatcgggaagcttcccaagaacatggttttataagtgaataagaagaaaggagaatgaggaagag

SEQ ID NO: 16576 - DNA, 122 bp, Homo sapiens
  misc_feature (61)..(62): /note="This region represents a CpG dinucleotide"
  misc_feature (61)..(61): /note="Nucleotide may be methylated to form 5-methylcytosine"
ttgtcatcttcttataaggacaccagtcatactggattacgactcatcctaatgaactcacgttaacttgattatatatacagacttgatttccaaataaggccacatttacgtggactggg

SEQ ID NO: 16577 - DNA, 122 bp, Homo sapiens
  misc_feature (61)..(62): /note="This region represents a CpG dinucleotide"
  misc_feature (61)..(61): /note="Nucleotide may be methylated to form 5-methylcytosine"
atgctgagtctccttgtacccacatcacctttttatgaggtcagtgttaccaagaggacccgcacacaggggaggaagaggcaggagaccaaaggaactcagtgcttgcctccagtgatgag

SEQ ID NO: 16578 - DNA, 122 bp, Homo sapiens
  misc_feature (61)..(62): /note="This region represents a CpG dinucleotide"
  misc_feature (61)..(61): /note="Nucleotide may be methylated to form 5-methylcytosine"
aatgacttgggcctgaccctgtgactcaaagctcatgtttcaccaggtgactattgcacccgggagttctcagggccccaagcctaaaggagaaacctgaatcattacatctcctctcctcg

SEQ ID NO: 16579 - DNA, 122 bp, Homo sapiens
  misc_feature (61)..(62): /note="This region represents a CpG dinucleotide"
  misc_feature (61)..(61): /note="Nucleotide may be methylated to form 5-methylcytosine"
aagaatggggtaggtccttatgtactaatgtgaaacctctaagatagcactttaatgaaacgaaggtgtcttgcagtgtatactgtagtgtgctatgatatttataagagaaaaaaggcctg

SEQ ID NO: 16580 - DNA, 122 bp, Homo sapiens
  misc_feature (61)..(62): /note="This region represents a CpG dinucleotide"
  misc_feature (61)..(61): /note="Nucleotide may be methylated to form 5-methylcytosine"
gactaatccaatgcaacagcatcagctggcttctgggctaggccctgtgagtaaccgcaccgcaacctcacagtcaaagaatgttcacatatttgatcttcataacagtcctcctcctatga

SEQ ID NO: 16581 - DNA, 122 bp, Homo sapiens
  misc_feature (61)..(62): /note="This region represents a CpG dinucleotide"
  misc_feature (61)..(61): /note="Nucleotide may be methylated to form 5-methylcytosine"
gacccaaactttagtggcttaaaacaacatgtaattatgatctcacagtttccatgcttccgtgagttgtagaagtcatggaagcttgcttcttcaaagccagtaaaataatctctttcttc

SEQ ID NO: 16582 - DNA, 122 bp, Homo sapiens
  misc_feature (61)..(62): /note="This region represents a CpG dinucleotide"
  misc_feature (61)..(61): /note="Nucleotide may be methylated to form 5-methylcytosine"
tccatgggtcaagtcaaaactgtttgtttgtaagtctcttccttgggggtggggatgcaacgaagagcttgtggtcacagttgaccacaagctgaatatgactcaacctgctggagctcttg

SEQ ID NO: 16583 - DNA, 122 bp, Homo sapiens
  misc_feature (61)..(62): /note="This region represents a CpG dinucleotide"
  misc_feature (61)..(61): /note="Nucleotide may be methylated to form 5-methylcytosine"
aaagagaatgagagttaacatttgggtgcctcctgcatgctagccattttgtttacacaccgtgcatgagaataggtattaaagaaaaattcctgtggcaatacttgtgaataggtatacaa

SEQ ID NO: 16584 - DNA, 122 bp, Homo sapiens
  misc_feature (61)..(62): /note="This region represents a CpG dinucleotide"
  misc_feature (61)..(61): /note="Nucleotide may be methylated to form 5-methylcytosine"
ggaatcagacaattaaaaaggagtgactttagtaaggcatgaatgaggtcacaggtaatgcgggtcagatcatgtagggctttgttgtaagtcattaataggtcattgaaaggactttagct

SEQ ID NO: 16585 - DNA, 122 bp, Homo sapiens
  misc_feature (61)..(62): /note="This region represents a CpG dinucleotide"
  misc_feature (61)..(61): /note="Nucleotide may be methylated to form 5-methylcytosine"
aacagcctggaaacctcgcctcaagggtgccccaggctgccagagctctctgcccctgcccgccagctcctccctgtaagtggtaatttggagcacccttaatggcccagttcaggagctgc

SEQ ID NO: 16586 - DNA, 122 bp, Homo sapiens
  misc_feature (61)..(62): /note="This region represents a CpG dinucleotide"
  misc_feature (61)..(61): /note="Nucleotide may be methylated to form 5-methylcytosine"
ctaaataatcacactcttacctcacaagttatttctaaacatcacttgaacattttgtgccgtttcttcaggatcttaaggtgcatactgtcctatgtgatcggatctgaaaggtaataaaa

SEQ ID NO: 16587 - DNA, 122 bp, Homo sapiens
  misc_feature (61)..(62): /note="This region represents a CpG dinucleotide"
  misc_feature (61)..(61): /note="Nucleotide may be methylated to form 5-methylcytosine"
tatcagcctgacctaaagcgctctcgtgcattgggtcagaagtttggcaagcttaaacagcgtaagtagaaccggtttgggaatctttgaatgaggaagactgtttcttcctctcctacttg

SEQ ID NO: 16588 - DNA, 122 bp, Homo sapiens
  misc_feature (61)..(62): /note="This region represents a CpG dinucleotide"
  misc_feature (61)..(61): /note="Nucleotide may be methylated to form 5-methylcytosine"
cattccattgtcttgtttgtttgtgcaatcccaaacacccacagtctccaagtggagatgcggaagcaggcctgcagcatgggtgtcaggagggtgtaaaatgaaagggacactaggagcaa

SEQ ID NO: 16589 - DNA, 122 bp, Homo sapiens
  misc_feature (61)..(62): /note="This region represents a CpG dinucleotide"
  misc_feature (61)..(61): /note="Nucleotide may be methylated to form 5-methylcytosine"
tgctttcagccatttcttcattcattcaatcaacaaactggctgagctgcaaccctgagccggggaattcagccactccagacacagcccctgccctccgggaagtctcgggagacctggct

SEQ ID NO: 16590 - DNA, 122 bp, Homo sapiens
  misc_feature (61)..(62): /note="This region represents a CpG dinucleotide"
  misc_feature (61)..(61): /note="Nucleotide may be methylated to form 5-methylcytosine"
tgcaaagctttacttaactaagtaacactgtgtgaataaagttttcctgggacacagccacgcccattctctggcatccagtctgcatgttgttatgacagaggctgcattacctggccctt

SEQ ID NO: 16591 - DNA, 122 bp, Homo sapiens
  misc_feature (61)..(62): /note="This region represents a CpG dinucleotide"
  misc_feature (61)..(61): /note="Nucleotide may be methylated to form 5-methylcytosine"
gatcgacagcatcgaccgttctgtaactccttaaatttaagagctgcaggtaggattggccgtgttttgtaaagaaattaagacaaatgcaccctggtaaatagagtggcagcatgttgttg

SEQ ID NO: 16592 - DNA, 122 bp, Homo sapiens
  misc_feature (61)..(62): /note="This region represents a CpG dinucleotide"
  misc_feature (61)..(61): /note="Nucleotide may be methylated to form 5-methylcytosine"
gccaaggaaatataagaaatacatagcagaaggaaacaaagaaattgattgcaccatagacgactagtcatatgctttggagaatcattctgccttttgagatgttatgatcagttctttac

SEQ ID NO: 16593 - DNA, 122 bp, Homo sapiens
  misc_feature (61)..(62): /note="This region represents a CpG dinucleotide"
  misc_feature (61)..(61): /note="Nucleotide may be methylated to form 5-methylcytosine"
caggcttcctttcccctgccgtgaaccttcagaacctgtctgtgcgactcatgcggctgtcgagggcagtaatcctctaaatggttgaactacagtggacttccttgagtagtttttaaaaa

SEQ ID NO: 16594 - DNA, 122 bp, Homo sapiens
  misc_feature (61)..(62): /note="This region represents a CpG dinucleotide"
  misc_feature (61)..(61): /note="Nucleotide may be methylated to form 5-methylcytosine"
atttcttcatcttttaaatgaaaataatgatacatatctaaatcatactgcctagcacaccgctaatgctcaaccaaaatctttccttctctacttattaagtcattgtgggcgtatgggaa

SEQ ID NO: 16595 - DNA, 122 bp, Homo sapiens
  misc_feature (61)..(62): /note="This region represents a CpG dinucleotide"
  misc_feature (61)..(61): /note="Nucleotide may be methylated to form 5-methylcytosine"
cgggaactggagaagaagaagatcctggtgttcacaccatcacgacgcgtgggtggcaagcgggtggtgtgctatgacgacagattcattgtgaagctggcctacgagtctgacgggatcgt

SEQ ID NO: 16596 - DNA, 122 bp, Homo sapiens
  misc_feature (61)..(62): /note="This region represents a CpG dinucleotide"
  misc_feature (61)..(61): /note="Nucleotide may be methylated to form 5-methylcytosine"
acataaagtcccagggcgaggcactcagtctcaactgaataaatacttgctgacctgcagcgttggacaggaaatggaagatggatggctctgagcagctcctgccaaggaggatggacgga

SEQ ID NO: 16597 - DNA, 122 bp, Homo sapiens
  misc_feature (61)..(62): /note="This region represents a CpG dinucleotide"
  misc_feature (61)..(61): /note="Nucleotide may be methylated to form 5-methylcytosine"
ccgctgttccgtgggacgtgcaggagagcagcaaaaggcaggagtggccagtggcacccgcgcccccgccccttccccaggccggacactcgcggggacgcagagccgccggagcccaggat

SEQ ID NO: 16598 - DNA, 122 bp, Homo sapiens
  misc_feature (61)..(62): /note="This region represents a CpG dinucleotide"
  misc_feature (61)..(61): /note="Nucleotide may be methylated to form 5-methylcytosine"
gtgtaggaaaaacatatttgagcaatctttcaaatcacaacaaattaatcctaactgatacgattaccgtaactgggaggttcaggtttaggggagctataaaaacaccaatggtaacaaat

SEQ ID NO: 16599 - DNA, 122 bp, Homo sapiens
  misc_feature (61)..(62): /note="This region represents a CpG dinucleotide"
  misc_feature (61)..(61): /note="Nucleotide may be methylated to form 5-methylcytosine"
ataccttgaataccttctacctagacatttaacctcttcatttctagccatagttacaatcgcagtagattagccagggaggccaaagttttagaataaggatggccatttacagatgagta

SEQ ID NO: 16600 - DNA, 122 bp, Homo sapiens
  misc_feature (61)..(62): /note="This region represents a CpG dinucleotide"
  misc_feature (61)..(61): /note="Nucleotide may be methylated to form 5-methylcytosine"
aatgggaagcagactcagatgattaacactctgccttaattgggtgcttactcactctgccgtggcaaggcactgtgttctggactttggagatatctcatttaaaactctcaacagcctgt

SEQ ID NO: 16601 - DNA, 122 bp, Homo sapiens
  misc_feature (61)..(62): /note="This region represents a CpG dinucleotide"
  misc_feature (61)..(61): /note="Nucleotide may be methylated to form 5-methylcytosine"
cctactgtcctggccctcaatgtgcagtggcagcagctgaccgtgactcgcttgcccagacgtgacccccatcctaatggcatgactcagtgcaaatggctggatttccatagcagagaagt

SEQ ID NO: 16602 - DNA, 122 bp, Homo sapiens
  misc_feature (61)..(62): /note="This region represents a CpG dinucleotide"
  misc_feature (61)..(61): /note="Nucleotide may be methylated to form 5-methylcytosine"
ccagaatctgaagacgcaggtttgagtctcagctcccttgctgactagctgtgtgatcctcgcaattcaggtaacctctgtaagcttgtcttctcattcgtcaaatgggaatgctgctgata

SEQ ID NO: 16603 - DNA, 122 bp, Homo sapiens
  misc_feature (61)..(62): /note="This region represents a CpG dinucleotide"
  misc_feature (61)..(61): /note="Nucleotide may be methylated to form 5-methylcytosine"
tacataagataaagtaaacatgtgaaaagagggagtagaggaaacgaggctgtgatacagcgttgtggaattacagctatcagtttagaaacaaaaggaaggcagtagtattgactcagttc

SEQ ID NO: 16604 - DNA, 122 bp, Homo sapiens
  misc_feature (61)..(62): /note="This region represents a CpG dinucleotide"
  misc_feature (61)..(61): /note="Nucleotide may be methylated to form 5-methylcytosine"
gtggactcttggccactgtgtcacctcacatggctcctggaagccaggcggacagtgatacgtccacagccacaccatccccatggtggtgggacagggttacctgccagtgcccactcttc

SEQ ID NO: 16605 - DNA, 122 bp, Homo sapiens
  misc_feature (61)..(62): /note="This region represents a CpG dinucleotide"
  misc_feature (61)..(61): /note="Nucleotide may be methylated to form 5-methylcytosine"
ggtgggagcaacttattgtggaggccaaatggcattttttgtaggccctgagattttttacgaaaacactaactctgttcagaactctttcaaagggtgaagacaaacttaacaaccttata

SEQ ID NO: 16606 - DNA, 122 bp, Homo sapiens
  misc_feature (61)..(62): /note="This region represents a CpG dinucleotide"
  misc_feature (61)..(61): /note="Nucleotide may be methylated to form 5-methylcytosine"
tatgtgttacctttcttgctcctttggtctagtgattttgccttgtgcattctcaggccccgtgctgattccccttccccatttcctctcctcaccgtcgatggccccagtgctatgagcag

SEQ ID NO: 16607 - DNA, 122 bp, Homo sapiens
  misc_feature (61)..(62): /note="This region represents a CpG dinucleotide"
  misc_feature (61)..(61): /note="Nucleotide may be methylated to form 5-methylcytosine"
tgtgctgagaaaccgtttgagaattttccactcgtcttagggaaaaagctatccagagagcggagaaagggtattgacagagggcaggatcattgtcgtagcatttgtcagcttgtgggaga

SEQ ID NO: 16608 - DNA, 122 bp, Homo sapiens
  misc_feature (61)..(62): /note="This region represents a CpG dinucleotide"
  misc_feature (61)..(61): /note="Nucleotide may be methylated to form 5-methylcytosine"
caaaggctttggagctacacaggcaaggtttccagacccagttctgccacttcttaacttcgtgacactgggcaagacgcttctcttctctgaggctcagcttcatcttggggttactaaga

SEQ ID NO: 16609 - DNA, 122 bp, Homo sapiens
  misc_feature (61)..(62): /note="This region represents a CpG dinucleotide"
  misc_feature (61)..(61): /note="Nucleotide may be methylated to form 5-methylcytosine"
tctatgtgtctcattttcctaatctatcaagtggggataataatggcacagtttctatctcgtagagttgatgaagagatatgatggttataattcagagtctgtcagataaaaagcattta

SEQ ID NO: 16610 - DNA, 122 bp, Homo sapiens
  misc_feature (61)..(62): /note="This region represents a CpG dinucleotide"
  misc_feature (61)..(61): /note="Nucleotide may be methylated to form 5-methylcytosine"
gtctgaggctgggagagaaatcccaagcccggcccggttgggaggccgtgggcatccacacggggcatgtgctggcggccctgaagcgccgatgtccccggactcgccgcacgcggactggg

SEQ ID NO: 16611 - DNA, 122 bp, Homo sapiens
  misc_feature (61)..(62): /note="This region represents a CpG dinucleotide"
  misc_feature (61)..(61): /note="Nucleotide may be methylated to form 5-methylcytosine"
aaaataatgactcagatttcaagggtttctttttcttccttctacaaagaaatacagtcacgtactgcataacaaggttttggccaaggacatgctgcctacatgatggtaggcccataaga

SEQ ID NO: 16612 - DNA, 122 bp, Homo sapiens
  misc_feature (61)..(62): /note="This region represents a CpG dinucleotide"
  misc_feature (61)..(61): /note="Nucleotide may be methylated to form 5-methylcytosine"
tttgttagcttgtgatttccctgatttttaaggttaacagctgatgttctgtttttctgccgagcagcaaggaaaatactggatttttgttgctgttgcttttgtcattgcttatgtttggt

SEQ ID NO: 16613 - DNA, 122 bp, Homo sapiens
  misc_feature (61)..(62): /note="This region represents a CpG dinucleotide"
  misc_feature (61)..(61): /note="Nucleotide may be methylated to form 5-methylcytosine"
gcagacaattctaggaggtgttctgtgcacgtcttaggaggtcacggtgggactgcaccccgtgccccagcagcgacgtcaatcgcacagcctgctcctcctgacttgccactgaacccatg

SEQ ID NO: 16614 - DNA, 122 bp, Homo sapiens
  misc_feature (61)..(62): /note="This region represents a CpG dinucleotide"
  misc_feature (61)..(61): /note="Nucleotide may be methylated to form 5-methylcytosine"
tctgattcctgcaaaaagttcagcaggcagagttaatttctagtatctttcgtgttcaaacgccagacaaacagaatgactctagatgttcaggttgcatgtttgtcatagcactttaagta

SEQ ID NO: 16615 - DNA, 122 bp, Homo sapiens
  misc_feature (61)..(62): /note="This region represents a CpG dinucleotide"
  misc_feature (61)..(61): /note="Nucleotide may be methylated to form 5-methylcytosine"
tcgtgtaaaaaacacactattttgtcctagactcagtatcagtgggttgtatctcactgccgtcatttcatggaataactaggagttactcaacacagtctatagctggtttttttaacctt

SEQ ID NO: 16616 - DNA, 122 bp, Homo sapiens
  misc_feature (61)..(62): /note="This region represents a CpG dinucleotide"
  misc_feature (61)..(61): /note="Nucleotide may be methylated to form 5-methylcytosine"
acttttgtctttttgaaaatgtcacacagatggaatcatatagcatgtaagctttcgatacgggcttctttcactcataaatgtctttgagacttatcaagtgcttgcatgtgtcagtgctt

SEQ ID NO: 16617 - DNA, 122 bp, Homo sapiens
  misc_feature (61)..(62): /note="This region represents a CpG dinucleotide"
  misc_feature (61)..(61): /note="Nucleotide may be methylated to form 5-methylcytosine"
aagtcaaattttttgttttcctctgggacctggccagtcactgggtgtagaaatgtgttccgtctttcattgtggctgtagagggaaaaacagaagagttgtggtaaagatgaagaaggcag

SEQ ID NO: 16618 - DNA, 122 bp, Homo sapiens
  misc_feature (61)..(62): /note="This region represents a CpG dinucleotide"
  misc_feature (61)..(61): /note="Nucleotide may be methylated to form 5-methylcytosine"
tcagagccaccagggacctgggccacgtgtccctttccatgaccatggggtgtgtgactgcgggaggctgaaagtgtcagcactgtgacctggaaatatatgcctggattggggaggtggac

SEQ ID NO: 16619 - DNA, 122 bp, Homo sapiens
  misc_feature (61)..(62): /note="This region represents a CpG dinucleotide"
  misc_feature (61)..(61): /note="Nucleotide may be methylated to form 5-methylcytosine"
aatatgaatctctgccccctttcaaaagctttttgttaggcagatgagtaataacaattgcgtcttatgcaatgcactgaggtcttttaagtgttttggaatgtctctacctacagggagtc

SEQ ID NO: 16620 - DNA, 122 bp, Homo sapiens
  misc_feature (61)..(62): /note="This region represents a CpG dinucleotide"
  misc_feature (61)..(61): /note="Nucleotide may be methylated to form 5-methylcytosine"
ctgaacgcattcctgactgaaacacccactctcatgaaataacgtgagctagtttggaggcgtggccactaacaaactgacttccatcactgccagttcacacacacacacacacacacaca

SEQ ID NO: 16621 - DNA, 122 bp, Homo sapiens
  misc_feature (61)..(62): /note="This region represents a CpG dinucleotide"
  misc_feature (61)..(61): /note="Nucleotide may be methylated to form 5-methylcytosine"
aaaaatacaacataagcaagaatgatgtcaactcctcatccaatctgataaaaatatcctcgtcaggcagaagggcacttttatttatttaaccctgccatgtgacagataacacgccagat

SEQ ID NO: 16622 - DNA, 122 bp, Homo sapiens
  misc_feature (61)..(62): /note="This region represents a CpG dinucleotide"
  misc_feature (61)..(61): /note="Nucleotide may be methylated to form 5-methylcytosine"
tataaaattgctgtctgtctcctctacttttcttgaacctgctagatcaggaacaggaagcgaaagagcatacattgactatgcaggtaagactgcatctctatttgcataagaagagaaac

SEQ ID NO: 16623 - DNA, 122 bp, Homo sapiens
  misc_feature (61)..(62): /note="This region represents a CpG dinucleotide"
  misc_feature (61)..(61): /note="Nucleotide may be methylated to form 5-methylcytosine"
gagtaaccaggcagcagagatctgcaggatgggctcagagctcagctatgctccggggaccgtggccagcagctcttgggcaggcgcgccctgtccggtgggtgcccggggcctcctgacac

SEQ ID NO: 16624 - DNA, 122 bp, Homo sapiens
  misc_feature (61)..(62): /note="This region represents a CpG dinucleotide"
  misc_feature (61)..(61): /note="Nucleotide may be methylated to form 5-methylcytosine"
gaacccgccacaaagagtggaccctgaatcacaatgaatgcaaggggcaacggcacctgacgctgcacccagctaggatgtttgtcccccactccagcctcactccctcctccagcctcacc

SEQ ID NO: 16625 - DNA, 122 bp, Homo sapiens
  misc_feature (61)..(62): /note="This region represents a CpG dinucleotide"
  misc_feature (61)..(61): /note="Nucleotide may be methylated to form 5-methylcytosine"
ccgcactctaggaaactattgcaccagcttctactcctgcaccacttagcaacaggaaaacgatggggaaacactaccaaactaacgagtgggtcacctcagatttgatttaaccctaaact

SEQ ID NO: 16626 - DNA, 122 bp, Homo sapiens
  misc_feature (61)..(62): /note="This region represents a CpG dinucleotide"
  misc_feature (61)..(61): /note="Nucleotide may be methylated to form 5-methylcytosine"
gcaagcaggcttacagaagcagaacaaaggcagttaattaaattgcgacaggtctcgcaacgcaggcatagcttgtgatcatgcagctgcacagtagggaaaacaggaacttacaaaacttg

SEQ ID NO: 16627 - DNA, 122 bp, Homo sapiens
  misc_feature (61)..(62): /note="This region represents a CpG dinucleotide"
  misc_feature (61)..(61): /note="Nucleotide may be methylated to form 5-methylcytosine"
accaccccagagccccagctttggagctccccaacgccacagccaggcacagtgcgaccccggcagcagagggggcacttggaccatttgttcatagtctgggacctccggtcccacgagag

SEQ ID NO: 16628 - DNA, 122 bp, Homo sapiens
  misc_feature (61)..(62): /note="This region represents a CpG dinucleotide"
  misc_feature (61)..(61): /note="Nucleotide may be methylated to form 5-methylcytosine"
tacttccgatgcacacttcgcacctcagcttcaacacaaatctacaagaaaggtacaggacgtatattacctatcagcctcaaggagacccagtgacccaatgaggctgggtgactgcctcc

SEQ ID NO: 16629 - DNA, 122 bp, Homo sapiens
  misc_feature (61)..(62): /note="This region represents a CpG dinucleotide"
  misc_feature (61)..(61): /note="Nucleotide may be methylated to form 5-methylcytosine"
aactgtgactgttagcaatgaaaaaaatgtgacgatctgcagagagggaaagtgactaaacgtaatggcttgaggttcgaagggtaatggctacatatctacatggtgactaaatctacatg

SEQ ID NO: 16630 - DNA, 122 bp, Homo sapiens
  misc_feature (61)..(62): /note="This region represents a CpG dinucleotide"
  misc_feature (61)..(61): /note="Nucleotide may be methylated to form 5-methylcytosine"
ttttttttttttttgagacagggtctcactcgcccaggctggagtgtggtggggccatcacggctcactgcagcccaggctcccgaagagctggaactacaggcatgcaccaccatgctaat

SEQ ID NO: 16631 - DNA, 122 bp, Homo sapiens
  misc_feature (61)..(62): /note="This region represents a CpG dinucleotide"
  misc_feature (61)..(61): /note="Nucleotide may be methylated to form 5-methylcytosine"
ctgtactataaaataagattcatctataaaactcttgccatgctcaaagccagcttaatgcggttaagattagaaaaaggggcagataatcttcaagttaaaaggaagaagaagtaggccag

SEQ ID NO: 16632 - DNA, 122 bp, Homo sapiens
  misc_feature (61)..(62): /note="This region represents a CpG dinucleotide"
  misc_feature (61)..(61): /note="Nucleotide may be methylated to form 5-methylcytosine"
ttctaagtttctgaatttccagtcaaaccatctgctgctgaccacaaatcagtgtggattcgtatttatagccatcactcctttgacacaaaatgtgcagtcatgtacactgcttcgagtgt

SEQ ID NO: 16633 - DNA, 122 bp, Homo sapiens
  misc_feature (61)..(62): /note="This region represents a CpG dinucleotide"
  misc_feature (61)..(61): /note="Nucleotide may be methylated to form 5-methylcytosine"
tgatcacacagacattaaagaggatgatgtccaagctttaactagatttttctgactttacgcaccttcctgataacagccagcttgcataaataccacttatgaggaacaaacaggatttt

SEQ ID NO: 16634 - DNA, 122 bp, Homo sapiens
  misc_feature (61)..(62): /note="This region represents a CpG dinucleotide"
  misc_feature (61)..(61): /note="Nucleotide may be methylated to form 5-methylcytosine"
tcaaagctgacatgagtcagcaaagaggtccagttgaagaagataagaaaactgtctaaacgaaatactgagtttgtatgcagtgcttttaaaggcccagaatgtgatctgtggatgtgcct

SEQ ID NO: 16635 - DNA, 122 bp, Homo sapiens
  misc_feature (61)..(62): /note="This region represents a CpG dinucleotide"
  misc_feature (61)..(61): /note="Nucleotide may be methylated to form 5-methylcytosine"
gaatttcataggaatatctggcacactctagcattgtctccatgatatacttacataggtcgtactcagggcacacacagcatgaaatttaccaatgaagttctccagtatgttttcatatt

SEQ ID NO: 16636 - DNA, 122 bp, Homo sapiens
  misc_feature (61)..(62): /note="This region represents a CpG dinucleotide"
  misc_feature (61)..(61): /note="Nucleotide may be methylated to form 5-methylcytosine"
agagcttggtagtaagcatgacagtaggtaggtgcggcaggaagtgaatcagggaggtggcgatatgtcaccaagccctttgtgtatgctgctccctggacatactcacattgctgcaggaa

SEQ ID NO: 16637 - DNA, 122 bp, Homo sapiens
  misc_feature (61)..(62): /note="This region represents a CpG dinucleotide"
  misc_feature (61)..(61): /note="Nucleotide may be methylated to form 5-methylcytosine"
ctctgcttcctgcctgtgtgtctcacacagattcctcttgctggaaccttttgtttccttcggaacagcctcaatctttgaaaagcaactgagccttaactctagtatgatggctcttgagt

SEQ ID NO: 16638 - DNA, 122 bp, Homo sapiens
  misc_feature (61)..(62): /note="This region represents a CpG dinucleotide"
  misc_feature (61)..(61): /note="Nucleotide may be methylated to form 5-methylcytosine"
gcttgatatatgaacagtgttcacttgcccaacataaacatcaattataacatgaaaatgcgatggtccttcaacccttcattcactcatccaggttaaatgcagaatttggaaagaaacca

SEQ ID NO: 16639 - DNA, 122 bp, Homo sapiens
  misc_feature (61)..(62): /note="This region represents a CpG dinucleotide"
  misc_feature (61)..(61): /note="Nucleotide may be methylated to form 5-methylcytosine"
agagccgagggctgggcaggagtctgggaaggagcgggtggggtccactttccccaggtgcgctggactctgtccctccatggctcatggacaatgattgacctgaagccgctccaggaagt

SEQ ID NO: 16640 - DNA, 122 bp, Homo sapiens
  misc_feature (61)..(62): /note="This region represents a CpG dinucleotide"
  misc_feature (61)..(61): /note="Nucleotide may be methylated to form 5-methylcytosine"
gggataagcagtgaacaacaacaaaaagacaaacttcttccaccctgaggcgtatgttctcggtgagaaatgggcaataaacataatacctaagaaaattatacgggatgttagtgacaaat

SEQ ID NO: 16641 - DNA, 122 bp, Homo sapiens
  misc_feature (61)..(62): /note="This region represents a CpG dinucleotide"
  misc_feature (61)..(61): /note="Nucleotide may be methylated to form 5-methylcytosine"
tgttctgtttctattcctgtttccttcactgcttctactcttttcttcttttcttagaggcgggttcttgctttgttgcccaggctggtggtgcaatcatatagctcaccgcagcctcaaac

SEQ ID NO: 16642 - DNA, 122 bp, Homo sapiens
  misc_feature (61)..(62): /note="This region represents a CpG dinucleotide"
  misc_feature (61)..(61): /note="Nucleotide may be methylated to form 5-methylcytosine"
acaggactgaggaaaatgagccggagttcccatgctggcctgaccataataatcactcagcgggacttaattgtagcaatttctgggatctcccaaactttctaaatccaagtctccagata

SEQ ID NO: 16643 - DNA, 122 bp, Homo sapiens
  misc_feature (61)..(62): /note="This region represents a CpG dinucleotide"
  misc_feature (61)..(61): /note="Nucleotide may be methylated to form 5-methylcytosine"
acagggaggtgagaggagaggggaccacggaaacaaggaagtgaaaagagctggaacctacgacagttaagaatttacaatttcagagacaggcagtcttgggggaaaaggcctgtattaaa

SEQ ID NO: 16644 - DNA, 122 bp, Homo sapiens
  misc_feature (61)..(62): /note="This region represents a CpG dinucleotide"
  misc_feature (61)..(61): /note="Nucleotide may be methylated to form 5-methylcytosine"
cataaatggtgccttcattttgtgagtctgcgctgagtgaggccgtgaggcgggcggttccgccacctgctttccacgccagaggcctttcaagacggcgggagccctgcggttccagcgcg

SEQ ID NO: 16645 - DNA, 122 bp, Homo sapiens
  misc_feature (61)..(62): /note="This region represents a CpG dinucleotide"
  misc_feature (61)..(61): /note="Nucleotide may be methylated to form 5-methylcytosine"
gataagatgaatgatttcaacaaaaggaacatttacattttaagagctgaatcaagaactcgcttatgtcaaagaaagagactagtgagtatccctcaatgtcttgggcactggaaacaggc

SEQ ID NO: 16646 - DNA, 122 bp, Homo sapiens
  misc_feature (61)..(62): /note="This region represents a CpG dinucleotide"
  misc_feature (61)..(61): /note="Nucleotide may be methylated to form 5-methylcytosine"
aataataaggttacctcgtgactgtaataattctggtatgaccatttctgtgatgccaagcggcgttttcaagagtcctattagaaatgtatttggcatcttgaatagcttgaacctattac

SEQ ID NO: 16647 - DNA, 122 bp, Homo sapiens
  misc_feature (61)..(62): /note="This region represents a CpG dinucleotide"
  misc_feature (61)..(61): /note="Nucleotide may be methylated to form 5-methylcytosine"
cctgtggtcacccttaacatctatccaaaagctgatgaaagcagcagcctgaaggcatcacgtggtacaagaggagcaggtaggcctgaaagagcaccccaccccaacttcccctttctttc

SEQ ID NO: 16648 - DNA, 122 bp, Homo sapiens
  misc_feature (61)..(62): /note="This region represents a CpG dinucleotide"
  misc_feature (61)..(61): /note="Nucleotide may be methylated to form 5-methylcytosine"
tgtttcgtccaacattctcagtcctggctgcatattggcatcacctggggactcctttttcgaaacactaattccatggccccgagcccttagacattccattttatttaatttatttattt

SEQ ID NO: 16649 - DNA, 122 bp, Homo sapiens
  misc_feature (61)..(62): /note="This region represents a CpG dinucleotide"
  misc_feature (61)..(61): /note="Nucleotide may be methylated to form 5-methylcytosine"
tgtttcacagtgtgctcatcatgcccgttttagagatgaagaaaaccatggctcagagagcgcctgtcatttgttcgagtcacaacaaattaaatccaggtctgtctggttagttgtaaagg

SEQ ID NO: 16650 - DNA, 122 bp, Homo sapiens
  misc_feature (61)..(62): /note="This region represents a CpG dinucleotide"
  misc_feature (61)..(61): /note="Nucleotide may be methylated to form 5-methylcytosine"
gcatcctttaaatctttacagtggcttctcatttccttttgcatctactctggctgttcacgccacacatcagaatcgatcaccagcaggctctggagtctcatttccctcatctgctgcgt

SEQ ID NO: 16651 - DNA, 122 bp, Homo sapiens
  misc_feature (61)..(62): /note="This region represents a CpG dinucleotide"
  misc_feature (61)..(61): /note="Nucleotide may be methylated to form 5-methylcytosine"
gttttgttgtcgttccccctgcttaaagcacttgatgcataactctgtctaccttcattccgtagtaagacagagacgcttggcttcagacattttcctttgggtattaatgtgtaagttgt

SEQ ID NO: 16652 - DNA, 122 bp, Homo sapiens
  misc_feature (61)..(62): /note="This region represents a CpG dinucleotide"
  misc_feature (61)..(61): /note="Nucleotide may be methylated to form 5-methylcytosine"
aaaacagccttccacagaagtcagacgctgagctacaggaacggctatgcaattgttcgacgtccaacagttgggataggcggagaccggctccagttcaaccagctgtcccaggctgagct

SEQ ID NO: 16653 - DNA, 122 bp, Homo sapiens
  misc_feature (61)..(62): /note="This region represents a CpG dinucleotide"
  misc_feature (61)..(61): /note="Nucleotide may be methylated to form 5-methylcytosine"
ctcaggtgatctgcccaagttggcctcccaaagttctgggattacaggcaggagccactgcgcccgagtggaaagttctaaaattaattgtggctatggttgcacaattctgtgagtattaa

SEQ ID NO: 16654 - DNA, 122 bp, Homo sapiens
  misc_feature (61)..(62): /note="This region represents a CpG dinucleotide"
  misc_feature (61)..(61): /note="Nucleotide may be methylated to form 5-methylcytosine"
gaaaaggagtagtaattataaagagaatgcttcagaaagcctatgaaacaagagcactagcgggcattaatttagactgcaggcaggaaaacaaagtgcaaagcaatagaagcaattctctt

SEQ ID NO: 16655 - DNA, 122 bp, Homo sapiens
  misc_feature (61)..(62): /note="This region represents a CpG dinucleotide"
  misc_feature (61)..(61): /note="Nucleotide may be methylated to form 5-methylcytosine"
aagattgcaaatctccaaaaatacaacaaacaacatgggaaagtctcatcagattttcctcgcatttgttggcactaagcctgttttgtcagggaatacttacaacagggccactttcaaag

SEQ ID NO: 16656 - DNA, 122 bp, Homo sapiens
  misc_feature (61)..(62): /note="This region represents a CpG dinucleotide"
  misc_feature (61)..(61): /note="Nucleotide may be methylated to form 5-methylcytosine"
gaaaggggaaaatagatgtggaaaaatctgaggaaaatcaaaaagaactcaagtactcagcgacgtttaagaccagaacccaggactacacctccacccaaattccaggacaaaactgggtt

SEQ ID NO: 16657 - DNA, 122 bp, Homo sapiens
  misc_feature (61)..(62): /note="This region represents a CpG dinucleotide"
  misc_feature (61)..(61): /note="Nucleotide may be methylated to form 5-methylcytosine"
ggagatggaagttgcagtgagccgagattgtgccactgcactccagcctgggcaacagagcgagaatctgtctcaaaacagaaaagaaaagaaaagaaaaaagcagacagaaatgtatgggg

SEQ ID NO: 16658 - DNA, 122 bp, Homo sapiens
  misc_feature (61)..(62): /note="This region represents a CpG dinucleotide"
  misc_feature (61)..(61): /note="Nucleotide may be methylated to form 5-methylcytosine"
cctagaccctgcctgaggtacagctcctgggtcacctcatgcaaccaaaggtgggcgtctcggggaggttcccaccagcgcagggaggtggcttctgagcaacctcactaaagtctccacca

SEQ ID NO: 16659 - DNA, 122 bp, Homo sapiens
  misc_feature (61)..(62): /note="This region represents a CpG dinucleotide"
  misc_feature (61)..(61): /note="Nucleotide may be methylated to form 5-methylcytosine"
ttgggtttatgcagactactgcagggggcagaacatgggcacgaatacgtaagattcagccgggcagccctccagcgtcaacgaagacattcttagaaggaaagtactttgtttgggacgga

SEQ ID NO: 16660 - DNA, 122 bp, Homo sapiens
  misc_feature (61)..(62): /note="This region represents a CpG dinucleotide"
  misc_feature (61)..(61): /note="Nucleotide may be methylated to form 5-methylcytosine"
ccttggctaatatgagtaacagaacttttggaatggaagaaaattccattttccagtgagcgaacagaaacctagaaaaggcaaatttatggttcacagctctctaactgcttctgttagaa

SEQ ID NO: 16661 - DNA, 122 bp, Homo sapiens
  misc_feature (61)..(62): /note="This region represents a CpG dinucleotide"
  misc_feature (61)..(61): /note="Nucleotide may be methylated to form 5-methylcytosine"
gtttggtgagagctggaaacatgttggttttcccttcccaagtataacaaggcctgtttccgcctccgcggccgctgctgcagtgccacgcggtgaactgtccaggacatgacaaaagggct

SEQ ID NO: 16662 - DNA, 122 bp, Homo sapiens
  misc_feature (61)..(62): /note="This region represents a CpG dinucleotide"
  misc_feature (61)..(61): /note="Nucleotide may be methylated to form 5-methylcytosine"
cacaaactaggacctttacaccacattggaggcaatagccctgaggttaaagggccgttccgtgtctaaccactgaagctcttgcttgaaggaaggtttcccaaaatgaacccccaaagaaa

SEQ ID NO: 16663 - DNA, 122 bp, Homo sapiens
  misc_feature (61)..(62): /note="This region represents a CpG dinucleotide"
  misc_feature (61)..(61): /note="Nucleotide may be methylated to form 5-methylcytosine"
gtccccttctcaggcaggctgtgggggttggggttgggcttcgcgagcccaagcggacgccgcaaagagaatgagaacctcggagcgctcggggcgggcgggcccagcccaggctcttccta

SEQ ID NO: 16664 - DNA, 122 bp, Homo sapiens
  misc_feature (61)..(62): /note="This region represents a CpG dinucleotide"
  misc_feature (61)..(61): /note="Nucleotide may be methylated to form 5-methylcytosine"
tgtattatcctttgattcttcaaatgcatttagttcatggatgagaaactgtctgtccaacggaactacaggttgaccagattctgggagaaataaattcatgagaacactcagtctattaa

SEQ ID NO: 16665 - DNA, 122 bp, Homo sapiens
  misc_feature (61)..(62): /note="This region represents a CpG dinucleotide"
  misc_feature (61)..(61): /note="Nucleotide may be methylated to form 5-methylcytosine"
tgtcagatgtcgagggcagtcatatgcacggggatagcaatttgcctggactcatctccacgcctgaagaggcaggtatgagtcaggggtgagtgttgaagagtgtgatgaatgggtggaag

SEQ ID NO: 16666 - DNA, 122 bp, Homo sapiens
  misc_feature (61)..(62): /note="This region represents a CpG dinucleotide"
  misc_feature (61)..(61): /note="Nucleotide may be methylated to form 5-methylcytosine"
aagcttataaaaatgtggtgggtatttcagctgggactcaaatggacccccaggattctgcgaggtgaacatatttcatgcctaaaggctgaatactgccctgccagtggtgggggtagtga

SEQ ID NO: 16667 - DNA, 122 bp, Homo sapiens
  misc_feature (61)..(62): /note="This region represents a CpG dinucleotide"
  misc_feature (61)..(61): /note="Nucleotide may be methylated to form 5-methylcytosine"
gcaaaaatggtctctgttaaaacaggctgttacacaagatgttaccatatgttcatttcacgagacctcacacatgctttaaggaccatcattatttcaaatctaagtagtttatagttcat

SEQ ID NO: 16668 - DNA, 122 bp, Homo sapiens
  misc_feature (61)..(62): /note="This region represents a CpG dinucleotide"
  misc_feature (61)..(61): /note="Nucleotide may be methylated to form 5-methylcytosine"
aagttcagacactctgtaagagagagccatttgctgtttttctgtgattcaatcccgttccgaacagtggtcagcatggttagtagctaagctgctcatctgtttttttaaggcattgtaac

SEQ ID NO: 16669 - DNA, 122 bp, Homo sapiens
  misc_feature (61)..(62): /note="This region represents a CpG dinucleotide"
  misc_feature (61)..(61): /note="Nucleotide may be methylated to form 5-methylcytosine"
gcacttgaggaattcaggtaaaagtcatgaagctataattgaaaacaggattgtaggagccgagtaagactggggggagataattaaattttactatttgtcttatttttaatcatatattc

SEQ ID NO: 16670 - DNA, 122 bp, Homo sapiens
  misc_feature (61)..(62): /note="This region represents a CpG dinucleotide"
  misc_feature (61)..(61): /note="Nucleotide may be methylated to form 5-methylcytosine"
acaatctgctgtaaatgcctctacagagccagatgtcacccaattctggatgacatgtctcggcagcatttaggttcttccctatccagcctaagtgctactctcccagacaaacgaccctg

SEQ ID NO: 16671 - DNA, 122 bp, Homo sapiens
  misc_feature (61)..(62): /note="This region represents a CpG dinucleotide"
  misc_feature (61)..(61): /note="Nucleotide may be methylated to form 5-methylcytosine"
ggccctatcagcaaaggagagaaatgtgcaaacttcttgcagcattaatcaaacctgaaacgttatttttaaggtgtcacgaaatccacgttgactgactggtccttttaatcttaattttg

SEQ ID NO: 16672 - DNA, 122 bp, Homo sapiens
  misc_feature (61)..(62): /note="This region represents a CpG dinucleotide"
  misc_feature (61)..(61): /note="Nucleotide may be methylated to form 5-methylcytosine"
gttcttgaccagggtggagatcttcattatcaagtttcctgtaactaaaagggaacagatcgtctgagatcttgctccacttgtccttgagggttattaaggtttgtgtgtgactgggcgtt

SEQ ID NO: 16673 - DNA, 122 bp, Homo sapiens
  misc_feature (61)..(62): /note="This region represents a CpG dinucleotide"
  misc_feature (61)..(61): /note="Nucleotide may be methylated to form 5-methylcytosine"
tctggtggtgacttgcagtgacgtggtggatatcttctggctgcatgccagcaaatgacccgtccttctggggataagctcgtggcccagggagccttgggcatggttgtggtgcatagaga

SEQ ID NO: 16674 - DNA, 122 bp, Homo sapiens
  misc_feature (61)..(62): /note="This region represents a CpG dinucleotide"
  misc_feature (61)..(61): /note="Nucleotide may be methylated to form 5-methylcytosine"
agtcctcttctaaccggctctgtggccttaggcaagtaactcagtgtctctgagcctcagcgtgttcatctgccaaatggaaagaagaaaatcatgatgatgcatagggtacctggggggtt

SEQ ID NO: 16675 - DNA, 122 bp, Homo sapiens
  misc_feature (61)..(62): /note="This region represents a CpG dinucleotide"
  misc_feature (61)..(61): /note="Nucleotide may be methylated to form 5-methylcytosine"
cactctaatacagtgttgaatagaagtggtgagagtaagcacctctgtcgtgttcctgatcgtagaaggaattagttcagtcacttaccattaatcaagtatgatgttagctgtggggtttt

SEQ ID NO: 16676 - DNA, 122 bp, Homo sapiens
  misc_feature (61)..(62): /note="This region represents a CpG dinucleotide"
  misc_feature (61)..(61): /note="Nucleotide may be methylated to form 5-methylcytosine"
tttgtttcctgctctatccccagggaccagaacagtgtgtggcacagaggaggcacccaacgtatgttgaatgaataagtgactactccattaaaaggaacctgaggttggctgagtgtatg

SEQ ID NO: 16677 - DNA, 122 bp, Homo sapiens
  misc_feature (61)..(62): /note="This region represents a CpG dinucleotide"
  misc_feature (61)..(61): /note="Nucleotide may be methylated to form 5-methylcytosine"
gagagaatctggtaaagaccaggttcacctggctgggatcatcactttcgcaagagccttcgccagtcttttgctttatctaggagccagctgacctcatcttattttcctataacttggct

SEQ ID NO: 16678 - DNA, 122 bp, Homo sapiens
  misc_feature (61)..(62): /note="This region represents a CpG dinucleotide"
  misc_feature (61)..(61): /note="Nucleotide may be methylated to form 5-methylcytosine"
cagtctgatattgtttccttttctaaaatgtggtttaatttcgtaaagagccgagtaggacggcagagctgaatcataggaaatgtcagcatgcaagctctacacccatgattacaaaacgg

SEQ ID NO: 16679 - DNA, 122 bp, Homo sapiens
  misc_feature (61)..(62): /note="This region represents a CpG dinucleotide"
  misc_feature (61)..(61): /note="Nucleotide may be methylated to form 5-methylcytosine"
gtgattgtagtttagactgagagattttggttttctttttacaaaaaaaacccataaacacgaattttggtagctttctgagttttctatgatgagaattgcttttataagaatatggaatt

SEQ ID NO: 16680 - DNA, 122 bp, Homo sapiens
  misc_feature (61)..(62): /note="This region represents a CpG dinucleotide"
  misc_feature (61)..(61): /note="Nucleotide may be methylated to form 5-methylcytosine"
tcgtgtttgctgtgttttaaagatgacctactagttcatcagtgggtccagaccctgcaccgttgctggggaaaatgaggttagggctgtggtcacacggcagcaggggcggaaattggcac

SEQ ID NO: 16681 - DNA, 122 bp, Homo sapiens
  misc_feature (61)..(62): /note="This region represents a CpG dinucleotide"
  misc_feature (61)..(61): /note="Nucleotide may be methylated to form 5-methylcytosine"
taagccaatttgagctagtttgttggtgacctgggcccagcaaacgcatgctaagtaatacggaatgtgtgcctggaagtaggcatgctgcaattaacaggcttatacttgatggaattggc

SEQ ID NO: 16682 - DNA, 122 bp, Homo sapiens
  misc_feature (61)..(62): /note="This region represents a CpG dinucleotide"
  misc_feature (61)..(61): /note="Nucleotide may be methylated to form 5-methylcytosine"
actcaagaatgagccaccaccaaatgttctcaagctagttcatgattacttaagaacatacggtggagacagcttcttaaccttcagcagctccacagtcatattggtgtaggattgtataa

SEQ ID NO: 16683 - DNA, 122 bp, Homo sapiens
  misc_feature (61)..(62): /note="This region represents a CpG dinucleotide"
  misc_feature (61)..(61): /note="Nucleotide may be methylated to form 5-methylcytosine"
caaactctgtgcaggaggaagtggccagagagggaaatcagttgccaatggataaacagccggggcccagggaccaaagttcttatttacacagcctcccagtgtttacccaggaagtgagg

SEQ ID NO: 16684 - DNA, 122 bp, Homo sapiens
  misc_feature (61)..(62): /note="This region represents a CpG dinucleotide"
  misc_feature (61)..(61): /note="Nucleotide may be methylated to form 5-methylcytosine"
cactgaactggaagctatgctcctcaaagggtggttactcatacaggtgactatttgtaccgatttagacagctcacccttgaagctcatggaaatatgacaaacaaaaggccattttgttt

SEQ ID NO: 16685 - DNA, 122 bp, Homo sapiens
  misc_feature (61)..(62): /note="This region represents a CpG dinucleotide"
  misc_feature (61)..(61): /note="Nucleotide may be methylated to form 5-methylcytosine"
gaattaacaagaggatccttgaagttctttcgagctctgacatcctcatccattgcaaagcggctgtgaaactggattatgtaaggtcctgtggccccaccaattgtttggcacatcctgtc

SEQ ID NO: 16686 - DNA, 122 bp, Homo sapiens
  misc_feature (61)..(62): /note="This region represents a CpG dinucleotide"
  misc_feature (61)..(61): /note="Nucleotide may be methylated to form 5-methylcytosine"
ggtcacctggcaaattggatacagaacccacttactgaatcactatactaccttataacacgtaaacttaatctcatttaagcttttcaatctcatttagactgacaacaaccttgatatca

SEQ ID NO: 16687 - DNA, 122 bp, Homo sapiens
  misc_feature (61)..(62): /note="This region represents a CpG dinucleotide"
  misc_feature (61)..(61): /note="Nucleotide may be methylated to form 5-methylcytosine"
tccagatgccccagaccacacccaccctgacaaatcaagagaccaagaactcaatctctgcggcccaggccctaaggacagcagtccagcacagggatgacatcattccgaaggacaggcag

SEQ ID NO: 16688 - DNA, 122 bp, Homo sapiens
  misc_feature (61)..(62): /note="This region represents a CpG dinucleotide"
  misc_feature (61)..(61): /note="Nucleotide may be methylated to form 5-methylcytosine"
aaataataaagaaggtcctgtaaggtctagcatccttccagacggagtggtggccagctccgcagtgcactctcttgtgtgccctcccttctcctctgtctcactcccccttgtcctcactt

SEQ ID NO: 16689 - DNA, 122 bp, Homo sapiens
  misc_feature (61)..(62): /note="This region represents a CpG dinucleotide"
  misc_feature (61)..(61): /note="Nucleotide may be methylated to form 5-methylcytosine"
ggtaggagggcaggagagaacttctttggaattttgggatccaagaagagagataaatgacgccgagcttctttgaggtgatcctggaaatccagcaagcctcacaaagcagctttcatgca

SEQ ID NO: 16690 - DNA, 122 bp, Homo sapiens
  misc_feature (61)..(62): /note="This region represents a CpG dinucleotide"
  misc_feature (61)..(61): /note="Nucleotide may be methylated to form 5-methylcytosine"
ccatatgactctctctgcctcaagagggagctattttcagagttcagtccaggcaggaagcgagtccacccacgaaggcaccaccctgtcacctgagtacgtggaaggcaatcacgggcaag

SEQ ID NO: 16691 - DNA, 122 bp, Homo sapiens
  misc_feature (61)..(62): /note="This region represents a CpG dinucleotide"
  misc_feature (61)..(61): /note="Nucleotide may be methylated to form 5-methylcytosine"
acagagccctcagaagcttatggaagcactgcaaacagctgcagacacaactctagggggcgccatgcatctagaccaaaatctatgtgaatgtgaatacagcctggacaactctactgggt

SEQ ID NO: 16692 - DNA, 122 bp, Homo sapiens
  misc_feature (61)..(62): /note="This region represents a CpG dinucleotide"
  misc_feature (61)..(61): /note="Nucleotide may be methylated to form 5-methylcytosine"
aatgcagattaatagttgggattggccggatttcccttggtcacctgtcctaaccccttgcgcaaacacaggtctatatgtggaaaccctacaaatacctgcccatccctttttaacattta

SEQ ID NO: 16693 - DNA, 122 bp, Homo sapiens
  misc_feature (61)..(62): /note="This region represents a CpG dinucleotide"
  misc_feature (61)..(61): /note="Nucleotide may be methylated to form 5-methylcytosine"
tgctcccgaatcgtttctaaacaagctggaatctgccctttagagccctcaacagaaacacgcaaagtccaggggtaaggcccaggccccaagggtgaagaaagctgtgctcgccagtagcc

SEQ ID NO: 16694 - DNA, 122 bp, Homo sapiens
  misc_feature (61)..(62): /note="This region represents a CpG dinucleotide"
  misc_feature (61)..(61): /note="Nucleotide may be methylated to form 5-methylcytosine"
agtatgtgtgtgagtgtgcgtgtgtgcaaggtgtggttgcacggatgctcgttgcttctgcgtatctgcgggtgtgtgcctctttgtattgtagcctggagtcagtgctcgcttctgcgcct

SEQ ID NO: 16695 - DNA, 122 bp, Homo sapiens
  misc_feature (61)..(62): /note="This region represents a CpG dinucleotide"
  misc_feature (61)..(61): /note="Nucleotide may be methylated to form 5-methylcytosine"
ttgttaataggtcttctttcataatcattcaggggttgggcttaggctccctgagtcaaccgctattgtgaaatcctatctttttagggtgtctgcccaagcacagtgcatgaatgtataag

SEQ ID NO: 16696 - DNA, 122 bp, Homo sapiens
  misc_feature (61)..(62): /note="This region represents a CpG dinucleotide"
  misc_feature (61)..(61): /note="Nucleotide may be methylated to form 5-methylcytosine"
ttttttggttgagcccaccttaccagcctcttctaaacccaactcacctctctgtctgtacgcttttatatcttggaatttttttggttcctccgacttgtctggatctcttgtagctcagg

SEQ ID NO: 16697 - DNA, 122 bp, Homo sapiens
  misc_feature (61)..(62): /note="This region represents a CpG dinucleotide"
  misc_feature (61)..(61): /note="Nucleotide may be methylated to form 5-methylcytosine"
cgcagataattattattttcagtaaatgtctacaagttcaattatattattaatgaaaaacgttaggcctgtatattttggccctgcacaaagaccttgaaattcgcagattatattagtaa

SEQ ID NO: 16698 - DNA, 122 bp, Homo sapiens
  misc_feature (61)..(62): /note="This region represents a CpG dinucleotide"
  misc_feature (61)..(61): /note="Nucleotide may be methylated to form 5-methylcytosine"
tcacataattctcctcctcttcaaattccaagttattgtcaaagtcaggttctactgatacgggacacacctagaaataaaagacataggagtcaggcgcagtggcttatgcctgtaatccc

SEQ ID NO: 16699 - DNA, 122 bp, Homo sapiens
  misc_feature (61)..(62): /note="This region represents a CpG dinucleotide"
  misc_feature (61)..(61): /note="Nucleotide may be methylated to form 5-methylcytosine"
gcttgaagagagaaccagccctgcaggggctccatcaggtctgtttgtggcagagaaagccggacttatgaatagagagctggctagggaaagaaaaacaactcatttgagggctagtccat

SEQ ID NO: 16700 - DNA, 122 bp, Homo sapiens
  misc_feature (61)..(62): /note="This region represents a CpG dinucleotide"
  misc_feature (61)..(61): /note="Nucleotide may be methylated to form 5-methylcytosine"
attacactttctgtcttttgatgttatctgagtttcatggcattatctgtttttggcgaacgtccatatgactttagctggacaaggaaaccaggaaggaaataggaaaccaagatggaaag

SEQ ID NO: 16701 - DNA, 122 bp, Homo sapiens
  misc_feature (61)..(62): /note="This region represents a CpG dinucleotide"
  misc_feature (61)..(61): /note="Nucleotide may be methylated to form 5-methylcytosine"
cttctcagggtttcccgttggtgcattctcatcttgaaatttggtgacagctccccaaagcgttaagtgtttagaggtctgtgctctattcatgcacctgccctcgcgattcagtgtatttt

SEQ ID NO: 16702 - DNA, 122 bp, Homo sapiens
  misc_feature (61)..(62): /note="This region represents a CpG dinucleotide"
  misc_feature (61)..(61): /note="Nucleotide may be methylated to form 5-methylcytosine"
atcaaatccctggtcaatcatagacaacttagtataattgagagcttggtcttagtcctacgtaagccctccattatgcacacttgaaagtgtctcctcttccagtctcccatctcatcatt

SEQ ID NO: 16703 - DNA, 122 bp, Homo sapiens
  misc_feature (61)..(62): /note="This region represents a CpG dinucleotide"
  misc_feature (61)..(61): /note="Nucleotide may be methylated to form 5-methylcytosine"
ttggtttctcaataccttacccaggtaggggcaagccatctggccagggctatgctgtgtcggggtcccaggcctgggggtttggagagcctccaaagcattcacaggggacccctagccct

SEQ ID NO: 16704 - DNA, 122 bp, Homo sapiens
  misc_feature (61)..(62): /note="This region represents a CpG dinucleotide"
  misc_feature (61)..(61): /note="Nucleotide may be methylated to form 5-methylcytosine"
tttccaggcggtcagtaggcaccacagtaggtgtgggggaaatctggacagatacaaacacgagcaacattgagaaagacagtgaggcagttaattttgtgtgctaactaggatatgccaac

SEQ ID NO: 16705 - DNA, 122 bp, Homo sapiens
  misc_feature (61)..(62): /note="This region represents a CpG dinucleotide"
  misc_feature (61)..(61): /note="Nucleotide may be methylated to form 5-methylcytosine"
aaagaaacacagtcatttgccatggtggtcccttaagattacaatggctacaccatcaaccgtagtatgtagtgggctgtaccatctaggtttgtggaaatgcactccatgatggttgcaga

SEQ ID NO: 16706 - DNA, 122 bp, Homo sapiens
  misc_feature (61)..(62): /note="This region represents a CpG dinucleotide"
  misc_feature (61)..(61): /note="Nucleotide may be methylated to form 5-methylcytosine"
agttggagggaagctcagaaataataacacctgaactcctgctggatacaggaatctcctcgcattataaatcaaagagtgtagtggtttagagcataggatctggaaacagactttcctgg

SEQ ID NO: 16707 - DNA, 122 bp, Homo sapiens
  misc_feature (61)..(62): /note="This region represents a CpG dinucleotide"
  misc_feature (61)..(61): /note="Nucleotide may be methylated to form 5-methylcytosine"
agaatccccatgtgttgctctcaacagagctgagaatcgcattaccagaggcatgactggcgtagacctctcatgccacacaaatgcctcacttctccacctggggttagcaaaaaactttc

SEQ ID NO: 16708 - DNA, 122 bp, Homo sapiens
  misc_feature (61)..(62): /note="This region represents a CpG dinucleotide"
  misc_feature (61)..(61): /note="Nucleotide may be methylated to form 5-methylcytosine"
cattaaagtagccattgccgccggagcagagccggcttggctgcctgaggaggaggcacgcgccaaacccagcagagtgatgcctgggcaggagttacgcaccctcccccggccgcctggca

SEQ ID NO: 16709 - DNA, 122 bp, Homo sapiens
  misc_feature (61)..(62): /note="This region represents a CpG dinucleotide"
  misc_feature (61)..(61): /note="Nucleotide may be methylated to form 5-methylcytosine"
actatattaattctaacttctaacaggaacacaggaacagtggccctgccaagggaaatgcgaaactgaatctaaaatgaggtgccactgtcctgaaaaatgatggttgaggtacacagtgc

SEQ ID NO: 16710 - DNA, 122 bp, Homo sapiens
  misc_feature (61)..(62): /note="This region represents a CpG dinucleotide"
  misc_feature (61)..(61): /note="Nucleotide may be methylated to form 5-methylcytosine"
ttccctgttaatcattttcaatccaatcacatgatctccaaatctacttaatcctcctaacgtaagcattcttcattcattcacccaacaaatacttactgagcatctattgtccagcactg

SEQ ID NO: 16711 - DNA, 122 bp, Homo sapiens
  misc_feature (61)..(62): /note="This region represents a CpG dinucleotide"
  misc_feature (61)..(61): /note="Nucleotide may be methylated to form 5-methylcytosine"
aatatacacagcaacattacttgtagctgccaaaagtggaaacaatccaaatattcataacgaatggataaaatgtggtatatccatgatggaatattattcagcaataaataatgaagtgc

SEQ ID NO: 16712 - DNA, 122 bp, Homo sapiens
  misc_feature (61)..(62): /note="This region represents a CpG dinucleotide"
  misc_feature (61)..(61): /note="Nucleotide may be methylated to form 5-methylcytosine"
gcttgagcaacagagtgggaccctgtctcaaaaatttaaaaatagcataaatattccaaacgcaattatatggaataagttggaatggaagataaaaagcagaagccagagaaaaaaagtaa

SEQ ID NO: 16713 - DNA, 122 bp, Homo sapiens
  misc_feature (61)..(62): /note="This region represents a CpG dinucleotide"
  misc_feature (61)..(61): /note="Nucleotide may be methylated to form 5-methylcytosine"
accccctgacaggtcttggtggagtgatggcacaggtaggtggctctccacttcatcccccgcgtgtttccgtcgctgcactctctgcttctgtggctcagcatcctggagggaatcctgcc

SEQ ID NO: 16714 - DNA, 122 bp, Homo sapiens
  misc_feature (61)..(62): /note="This region represents a CpG dinucleotide"
  misc_feature (61)..(61): /note="Nucleotide may be methylated to form 5-methylcytosine"
gcactgccacttacctgctagctatgtgaccttaggcaagttgcttaacatctctatgtccgttcttcacttgccaaatggataagaatagtgcctcccccttagggctgttctgagagcta

SEQ ID NO: 16715 - DNA, 122 bp, Homo sapiens
  misc_feature (61)..(62): /note="This region represents a CpG dinucleotide"
  misc_feature (61)..(61): /note="Nucleotide may be methylated to form 5-methylcytosine"
aaagaaattgccatatttattgctttagtgggataaaatgcatggttgtctaaaatgaaacggtagcaccaagtccatggcccatgaaagtgactctgctgccatctatgcccaaagcctct

SEQ ID NO: 16716 - DNA, 122 bp, Homo sapiens
  misc_feature (61)..(62): /note="This region represents a CpG dinucleotide"
  misc_feature (61)..(61): /note="Nucleotide may be methylated to form 5-methylcytosine"
ttttgtatccttttgcaatgtttttcacagctttcttcctgacactttcacctgcagttgcgtcatcaggattacattatcttggcttgctttctgcccctcttaattatcttattctgtgt

SEQ ID NO: 16717 - DNA, 122 bp, Homo sapiens
  misc_feature (61)..(62): /note="This region represents a CpG dinucleotide"
  misc_feature (61)..(61): /note="Nucleotide may be methylated to form 5-methylcytosine"
agcagtgtagcctcttcaggaagtggtgggagtgaacacttagaagatcagaccactgctcgtaacacattccaagaagaaggtagtgggatgaaaggtgagtgactaaatgagaaaccact

SEQ ID NO: 16718 - DNA, 122 bp, Homo sapiens
  misc_feature (61)..(62): /note="This region represents a CpG dinucleotide"
  misc_feature (61)..(61): /note="Nucleotide may be methylated to form 5-methylcytosine"
agctgcctaaatgtatggtgatgcctgttcttgatgttgtttggtagatgactggctcgacgtatgcccttctcagtgctgtaggctgcatgttaaagctgcctttctttatcaggttctaa

SEQ ID NO: 16719 - DNA, 122 bp, Homo sapiens
  misc_feature (61)..(62): /note="This region represents a CpG dinucleotide"
  misc_feature (61)..(61): /note="Nucleotide may be methylated to form 5-methylcytosine"
ccttcttgcttttcacaaggtatttgtactttggattttgcttaatccaattcttcagagcgtcacaggcatcctgctgatggccagtgttagtataactcacagccaaggccatcaaagct

SEQ ID NO: 16720 - DNA, 122 bp, Homo sapiens
  misc_feature (61)..(62): /note="This region represents a CpG dinucleotide"
  misc_feature (61)..(61): /note="Nucleotide may be methylated to form 5-methylcytosine"
tctacttcctgaagatcttctttcttccttttgcttcctttattctttagcttgcctttccgtttcatatcactctccaaaagagaagaatcttttgaatcctggaaagaaaataaatttaa

SEQ ID NO: 16721 - DNA, 122 bp, Homo sapiens
  misc_feature (61)..(62): /note="This region represents a CpG dinucleotide"
  misc_feature (61)..(61): /note="Nucleotide may be methylated to form 5-methylcytosine"
tttatgtttaatttgataaactgaaaattcagactttttgtcctgtgcatgatttaatcacgaacactgattgtcctggcacaggtttgggtagtagtgactcattgaactatacatttgag

SEQ ID NO: 16722 - DNA, 122 bp, Homo sapiens
  misc_feature (61)..(62): /note="This region represents a CpG dinucleotide"
  misc_feature (61)..(61): /note="Nucleotide may be methylated to form 5-methylcytosine"
ttgcaattccagttttgtacacgtatcagtggcctgcagcttcccacaggcatctctttacgtgacaccagggaagctccaaagcaggcaaggcaaggtgctgtcagattacacttacttaa

SEQ ID NO: 16723 - DNA, 122 bp, Homo sapiens
  misc_feature (61)..(62): /note="This region represents a CpG dinucleotide"
  misc_feature (61)..(61): /note="Nucleotide may be methylated to form 5-methylcytosine"
taagtaaatgacatttattgatgaaaaaagattaaaatttgattatcccccttgaaactgcgaagggacaaaaatcttggcacatgttgccctctagtggaactttaaagataggcagttga

SEQ ID NO: 16724 - DNA, 122 bp, Homo sapiens
  misc_feature (61)..(62): /note="This region represents a CpG dinucleotide"
  misc_feature (61)..(61): /note="Nucleotide may be methylated to form 5-methylcytosine"
tgacactcaagcaggagtacctcaacccaagagtaatccagctgttgaccttgacaaaatcgtgttggcttgacagagagagagaaagctgtgtctgtgcctttgctgggaagctggtgata

SEQ ID NO: 16725 - DNA, 122 bp, Homo sapiens
  misc_feature (61)..(62): /note="This region represents a CpG dinucleotide"
  misc_feature (61)..(61): /note="Nucleotide may be methylated to form 5-methylcytosine"
ccaagatagtctttctcttctcatcatgcaccttcagtattaactatcttccagatacctcgtattttcctacctaacctttgctgatccttccaacgcctgaaataccctccatccttgcc

SEQ ID NO: 16726 - DNA, 122 bp, Homo sapiens
  misc_feature (61)..(62): /note="This region represents a CpG dinucleotide"
  misc_feature (61)..(61): /note="Nucleotide may be methylated to form 5-methylcytosine"
ggtcacgaggaaacctgctggccaagtgacctggcagggtgtggccagtgtggccagggccgccgagcctgctttccttccctgcagcaggaacccttctggggctgtgatcctgcgatggt

SEQ ID NO: 16727 - DNA, 122 bp, Homo sapiens
  misc_feature (61)..(62): /note="This region represents a CpG dinucleotide"
  misc_feature (61)..(61): /note="Nucleotide may be methylated to form 5-methylcytosine"
tgagattcaaggctgtcatcttgattggacttatccagggacctagctcaatcttttactcgcttccttacctggttcctcccttaacataccttataccccaggaaaaaggcaatgtatta

SEQ ID NO: 16728 - DNA, 122 bp, Homo sapiens
  misc_feature (61)..(62): /note="This region represents a CpG dinucleotide"
  misc_feature (61)..(61): /note="Nucleotide may be methylated to form 5-methylcytosine"
ggggtaggggcccggcctgccgggagtgctctgtctgctttctgaaggcccgagttggtgcgtggggtgaggggctggcatgagcagtctcggggagcgggagtgcaggggagcggagtgtg

SEQ ID NO: 16729 - DNA, 122 bp, Homo sapiens
  misc_feature (61)..(62): /note="This region represents a CpG dinucleotide"
  misc_feature (61)..(61): /note="Nucleotide may be methylated to form 5-methylcytosine"
acagctgctgctccaaaaccacaatacctttaaaatgacattttaaggaaacagatacggcgtggctttagccatagttagatgtagctaacactgaattaaaggggcttttctttttatac

SEQ ID NO: 16730 - DNA, 122 bp, Homo sapiens
  misc_feature (61)..(62): /note="This region represents a CpG dinucleotide"
  misc_feature (61)..(61): /note="Nucleotide may be methylated to form 5-methylcytosine"
ttgaaagcccaagagatcagcagcctatgccaggaatgaggctctctctggaggcaaggccgagagcagtggccggtcactggctgcacagcccagagcagataccacagagccagggctca

SEQ ID NO: 16731 - DNA, 122 bp, Homo sapiens
  misc_feature (61)..(62): /note="This region represents a CpG dinucleotide"
  misc_feature (61)..(61): /note="Nucleotide may be methylated to form 5-methylcytosine"
accaccagcacaaggaccatgtctgtggccggggatgcctggtatcactcctggcttgtacgtcttcacctgagacccagggcagtgagggactcagaagagcacagcgcccccagcttctt

SEQ ID NO: 16732 - DNA, 122 bp, Homo sapiens
  misc_feature (61)..(62): /note="This region represents a CpG dinucleotide"
  misc_feature (61)..(61): /note="Nucleotide may be methylated to form 5-methylcytosine"
gtggccacagactgctccagctttgtaaacccattatctatatattaatccagagaagagcgctgattggccctgcttgtctcatatacttagccatgggccaatttctgttgccagggaga

SEQ ID NO: 16733 - DNA, 122 bp, Homo sapiens
  misc_feature (61)..(62): /note="This region represents a CpG dinucleotide"
  misc_feature (61)..(61): /note="Nucleotide may be methylated to form 5-methylcytosine"
tgtcttctgcttcacttattgacatcagagggccaaaaactctaccttcagatcaaacaccgccatttttttgacatgggacccttgaaggggcatgcggctcagctgcacatgtgcacagt

SEQ ID NO: 16734 - DNA, 122 bp, Homo sapiens
  misc_feature (61)..(62): /note="This region represents a CpG dinucleotide"
  misc_feature (61)..(61): /note="Nucleotide may be methylated to form 5-methylcytosine"
cagatctggccccaccattcaccagtgaccttgtgacagtgaggacagtgacagtgacctcgtcagcccagtgaggacacagttcttctttttttttttttttttcctgagacaaggtctca

SEQ ID NO: 16735 - DNA, 122 bp, Homo sapiens
  misc_feature (61)..(62): /note="This region represents a CpG dinucleotide"
  misc_feature (61)..(61): /note="Nucleotide may be methylated to form 5-methylcytosine"
aatcagaggaggaaggagagagtgcagaagctgtcagaggcgagagatcttggctggagccgccaaaaaactggcaacatgagttagcgtaactgagtaaacagcaaacaatctccaaatga

SEQ ID NO: 16736 - DNA, 122 bp, Homo sapiens
  misc_feature (61)..(62): /note="This region represents a CpG dinucleotide"
  misc_feature (61)..(61): /note="Nucleotide may be methylated to form 5-methylcytosine"
ttttaaagagagcagggttacgagccagagtggtgggatgagcagttctggtgggaaagacggttacagaacaaatgactaaatgtgactcaggtcagaacaggtgaccaagggtgactcag

SEQ ID NO: 16737 - DNA, 122 bp, Homo sapiens
  misc_feature (61)..(62): /note="This region represents a CpG dinucleotide"
  misc_feature (61)..(61): /note="Nucleotide may be methylated to form 5-methylcytosine"
tgaactgaaactggccactggaaagacttgtttatagatgttcattttgactcaatagtacgctggagtcctactctttatttaatgatatggtcaagtcatgcaggctgatgtggatgtga

SEQ ID NO: 16738 - DNA, 122 bp, Homo sapiens
  misc_feature (61)..(62): /note="This region represents a CpG dinucleotide"
  misc_feature (61)..(61): /note="Nucleotide may be methylated to form 5-methylcytosine"
tgacccgttggggaagtgactggaaggccggcagctgtttccagtctataaggactgacccgtcagggaagtgactggaaggcagacagcgtgtttcttagctcttgtttccatccacactt

SEQ ID NO: 16739 - DNA, 122 bp, Homo sapiens
  misc_feature (61)..(62): /note="This region represents a CpG dinucleotide"
  misc_feature (61)..(61): /note="Nucleotide may be methylated to form 5-methylcytosine"
atatttttcaaatgagtgaatggtgactaagacacgcatttggaaccagacagacccaggcgtgaatactgttatgccaaccatgaccatgcagcctctctgtgactaatttcctcactggg

SEQ ID NO: 16740 - DNA, 122 bp, Homo sapiens
  misc_feature (61)..(62): /note="This region represents a CpG dinucleotide"
  misc_feature (61)..(61): /note="Nucleotide may be methylated to form 5-methylcytosine"
atcttacttaccgtgggatctttaacatgcattgcatttagattgagctaaaagggcagacggtggttttttgtttagagtgaaatggaagtaccaagtatataagtgataaaagggtagta

SEQ ID NO: 16741 - DNA, 122 bp, Homo sapiens
  misc_feature (61)..(62): /note="This region represents a CpG dinucleotide"
  misc_feature (61)..(61): /note="Nucleotide may be methylated to form 5-methylcytosine"
ccacacccacatcctctcttttccacacacaactatctgtttattttttgtagcagtggccgaaagtcctgcaaggtcataaatctttcagagtgacatcaccaactgtactgcatcttact

SEQ ID NO: 16742 - DNA, 122 bp, Homo sapiens
  misc_feature (61)..(62): /note="This region represents a CpG dinucleotide"
  misc_feature (61)..(61): /note="Nucleotide may be methylated to form 5-methylcytosine"
caagttgcgtgagacaattttatcaatcaatctaccaatctctctctgcatgtacatacacgtgggccctatcagttctgcttctctggagaactctgactaatacagacggttttctaaat

SEQ ID NO: 16743 - DNA, 122 bp, Homo sapiens
  misc_feature (61)..(62): /note="This region represents a CpG dinucleotide"
  misc_feature (61)..(61): /note="Nucleotide may be methylated to form 5-methylcytosine"
caggcggctgccaggcaggaaggggccactctggcagcttaaaaggagctagcagaaacgcgaactttggaggatttgaggaaggaacacaaccagaatattggagctgcaactgctgtggg

SEQ ID NO: 16744 - DNA, 122 bp, Homo sapiens
  misc_feature (61)..(62): /note="This region represents a CpG dinucleotide"
  misc_feature (61)..(61): /note="Nucleotide may be methylated to form 5-methylcytosine"
aggcagttgcagtctgattgtgacatctgccgagagctgagtctggacaggttcctctgccgctcttggccaggggtgtagcccccgtgccaccttagtgattccttcaggccatcatttgt

SEQ ID NO: 16745 - DNA, 122 bp, Homo sapiens
  misc_feature (61)..(62): /note="This region represents a CpG dinucleotide"
  misc_feature (61)..(61): /note="Nucleotide may be methylated to form 5-methylcytosine"
gggcttggaaatgctgcagcagggagcaggccccaggctggacctgccctgtcctcacgacgagtgtgtgcaaaagtgaacaataaatcatttcaaagatgcaaggaagaaaaaccaaaaca

SEQ ID NO: 16746 - DNA, 122 bp, Homo sapiens
  misc_feature (61)..(62): /note="This region represents a CpG dinucleotide"
  misc_feature (61)..(61): /note="Nucleotide may be methylated to form 5-methylcytosine"
tctctaatccttatagcaactctataagttgctataagaaagtgatattattcttgaaaccgacacttcagaaggttgagtcacctacctaagaccacacagctaatagggccaaaccagga

SEQ ID NO: 16747 - DNA, 122 bp, Homo sapiens
  misc_feature (61)..(62): /note="This region represents a CpG dinucleotide"
  misc_feature (61)..(61): /note="Nucleotide may be methylated to form 5-methylcytosine"
gcatctgcggcacctgcagctgttgctgggggctcatttttatatttaattttttagagacgaggtttctcttgcccagaccagagtgcagtactgcaatcatgactcactacagccttgaa

SEQ ID NO: 16748 - DNA, 122 bp, Homo sapiens
  misc_feature (61)..(62): /note="This region represents a CpG dinucleotide"
  misc_feature (61)..(61): /note="Nucleotide may be methylated to form 5-methylcytosine"
aatgtgaagaaaatatcctagagatttatgcttccttcccaatgcactattttaggaatccgaactcaggctctttaagcaatcttaaaccttgctacaaagttctttaaaattcaacggaa

SEQ ID NO: 16749 - DNA, 122 bp, Homo sapiens
  misc_feature (61)..(62): /note="This region represents a CpG dinucleotide"
  misc_feature (61)..(61): /note="Nucleotide may be methylated to form 5-methylcytosine"
gtgacattcatgggagactctccacaagtatttactagatgacattgaagattccagattcgtcatgtgtcatctctgaagtcaatgtccactgagtaggatgttggaggaggggcgagagg

SEQ ID NO: 16750 - DNA, 122 bp, Homo sapiens
  misc_feature (61)..(62): /note="This region represents a CpG dinucleotide"
  misc_feature (61)..(61): /note="Nucleotide may be methylated to form 5-methylcytosine"
aaagataagtaagatagactgagttagtgcacttaataaccttggtgaaagagatagacacgtaacaagtaatgacaaagagatacaggcatgaagaaatacagtgtgctcagggtgcctgg

SEQ ID NO: 16751 - DNA, 122 bp, Homo sapiens
  misc_feature (61)..(62): /note="This region represents a CpG dinucleotide"
  misc_feature (61)..(61): /note="Nucleotide may be methylated to form 5-methylcytosine"
aacatatcattgctagggagtatgatggagggaaaaagacaggttatggagggccttaaacggtatctaaggattatagatttgattatttacagatgggggagctgttgaaggctttctcg

SEQ ID NO: 16752 - DNA, 122 bp, Homo sapiens
  misc_feature (61)..(62): /note="This region represents a CpG dinucleotide"
  misc_feature (61)..(61): /note="Nucleotide may be methylated to form 5-methylcytosine"
caaaatcgcactttcaaacgtaaaacgcaattccaagaagactgggatgtagggagtatgcgatgcctctgttcaataggtcactgtcaggaacttcagtttctggtgttcagatatttgta

SEQ ID NO: 16753 - DNA, 122 bp, Homo sapiens
  misc_feature (61)..(62): /note="This region represents a CpG dinucleotide"
  misc_feature (61)..(61): /note="Nucleotide may be methylated to form 5-methylcytosine"
tctttcccaaatgttcacgatgccatcatgtttcagcaaacacgagtcatgtctcctgcccgataatccaaccaggccagcctggccaggcctattcagaaactcagaattacggccatttc

SEQ ID NO: 16754 - DNA, 122 bp, Homo sapiens
  misc_feature (61)..(62): /note="This region represents a CpG dinucleotide"
  misc_feature (61)..(61): /note="Nucleotide may be methylated to form 5-methylcytosine"
gatattttattagtcgcaacactgaattgggatctctagctcttgtctgttgccgttaatcgtaggagctgtaagagtttgttgaactctttgtgctctcggcaaaattctgttgtctctgt

SEQ ID NO: 16755 - DNA, 122 bp, Homo sapiens
  misc_feature (61)..(62): /note="This region represents a CpG dinucleotide"
  misc_feature (61)..(61): /note="Nucleotide may be methylated to form 5-methylcytosine"
cctgttcagatcccagctctgctgttcagggctgactgtgaccaagtcctgaactccctgcgccccagcaaggctgtgccttcagcacttgcttgcgcctggcttgtgccagctgagcgtga

SEQ ID NO: 16756 - DNA, 122 bp, Homo sapiens
  misc_feature (61)..(62): /note="This region represents a CpG dinucleotide"
  misc_feature (61)..(61): /note="Nucleotide may be methylated to form 5-methylcytosine"
acatgtcccttttgtagtgaggcacatatttcaggcattgtcctatcagtgagtcagctgcggacatcacagggctcctggcttatgatctgtgatgctagattttgcaattgattgcaaaa

SEQ ID NO: 16757 - DNA, 122 bp, Homo sapiens
  misc_feature (61)..(62): /note="This region represents a CpG dinucleotide"
  misc_feature (61)..(61): /note="Nucleotide may be methylated to form 5-methylcytosine"
atcatcctgctcacaaatgtgacacagaacagagtgtcacagacacctcaatgcactggacgcttaagtcaaatggaaagttaaaaacaccttctgcaagcagccactggcattacttcata

SEQ ID NO: 16758 - DNA, 122 bp, Homo sapiens
  misc_feature (61)..(62): /note="This region represents a CpG dinucleotide"
  misc_feature (61)..(61): /note="Nucleotide may be methylated to form 5-methylcytosine"
ttaccatgaagataactcaggccgtcggagaaagtggcctgcccaacgcaggtgctagagcgcgaaccaagagaagtcgatcctcctggtctccccggctgcctggtgagtggcagaccaca

SEQ ID NO: 16759 - DNA, 122 bp, Homo sapiens
  misc_feature (61)..(62): /note="This region represents a CpG dinucleotide"
  misc_feature (61)..(61): /note="Nucleotide may be methylated to form 5-methylcytosine"
ctcaagaaatgctctgcttctgcaccaatcaggggccactccatcccttaccaatttgctcgttgccgagacaacaggcagcttcctgttaccatagccacaagtgctacccagtaaccatg

SEQ ID NO: 16760 - DNA, 122 bp, Homo sapiens
  misc_feature (61)..(62): /note="This region represents a CpG dinucleotide"
  misc_feature (61)..(61): /note="Nucleotide may be methylated to form 5-methylcytosine"
atttcccaccccaacactctcgcttggctaattctcaagtctgaagaggaagatactttacgtaagcaggtcagctcaaggcctcttgatgtgtgtctgtttctgatttgtttttgtgttgt

SEQ ID NO: 16761 - DNA, 122 bp, Homo sapiens
  misc_feature (61)..(62): /note="This region represents a CpG dinucleotide"
  misc_feature (61)..(61): /note="Nucleotide may be methylated to form 5-methylcytosine"
tctgagattaaactgtgtgaagattagaggcgtgtaggtcaggagcaggaggaagcccaacgctggactgtaccagatcatctaaaactggcaattccaggcacagaaaaccagttcttcag

SEQ ID NO: 16762 - DNA, 122 bp, Homo sapiens
  misc_feature (61)..(62): /note="This region represents a CpG dinucleotide"
  misc_feature (61)..(61): /note="Nucleotide may be methylated to form 5-methylcytosine"
attactcctgagggagggccagtgcagggcagtgactttggtgttggttagaactggattcgagtcttggctctgccattataaatactgtgaccttaggcaagtcacctgattgttctctt

SEQ ID NO: 16763 - DNA, 122 bp, Homo sapiens
  misc_feature (61)..(62): /note="This region represents a CpG dinucleotide"
  misc_feature (61)..(61): /note="Nucleotide may be methylated to form 5-methylcytosine"
cttgggatgaatctgataagcaaatcatgaaatgattatttagacacaagatgtgttgctcgacagtatgcctaaagtatatcatgactaaggaatgaatgctacttaatgttgaaatcaga

SEQ ID NO: 16764 - DNA, 122 bp, Homo sapiens
  misc_feature (61)..(62): /note="This region represents a CpG dinucleotide"
  misc_feature (61)..(61): /note="Nucleotide may be methylated to form 5-methylcytosine"
aggtcgaccttgtttgcctaccccaaatcagtgacatctcttcccatcatcctcccccatcgacctgagaaactaaaagtcattctggtggcaatgagttgtaagaaattcattttttcatc

SEQ ID NO: 16765 - DNA, 122 bp, Homo sapiens
  misc_feature (61)..(62): /note="This region represents a CpG dinucleotide"
  misc_feature (61)..(61): /note="Nucleotide may be methylated to form 5-methylcytosine"
agggacttcttcagatgtcttctgtttgggagccgtgtctataacctcctgaaggtcttccgtcaaaggagctctaaggacaggggagatccttagggggcccactgggggaatgagacatg

SEQ ID NO: 16766 - DNA, 122 bp, Homo sapiens
  misc_feature (61)..(62): /note="This region represents a CpG dinucleotide"
  misc_feature (61)..(61): /note="Nucleotide may be methylated to form 5-methylcytosine"
gaatatatttaccttggattttatccctcatatcatgggcttgctctaccagctgacttgcgtggttaatggtgtccatgctttccttctgaacaagttgtccttttctggaggcttgattt

SEQ ID NO: 16767 - DNA, 122 bp, Homo sapiens
  misc_feature (61)..(62): /note="This region represents a CpG dinucleotide"
  misc_feature (61)..(61): /note="Nucleotide may be methylated to form 5-methylcytosine"
agggagaacttcttatggtgccacccccttgtgccacactctgactcctagggcagggcacgagaatttcgtggtggagctgagtcatggctttgccctagcaatcagggaggccaaggaaa

SEQ ID NO: 16768 - DNA, 122 bp, Homo sapiens
  misc_feature (61)..(62): /note="This region represents a CpG dinucleotide"
  misc_feature (61)..(61): /note="Nucleotide may be methylated to form 5-methylcytosine"
attgggaaagaggtcagcagaccaatttagggatttccccatattctgcaacactagctacgtgattttggactcatcatttaccccttgctactgcttcctcatttcccaatagggagttg

SEQ ID NO: 16769 - DNA, 122 bp, Homo sapiens
  misc_feature (61)..(62): /note="This region represents a CpG dinucleotide"
  misc_feature (61)..(61): /note="Nucleotide may be methylated to form 5-methylcytosine"
aagagcctatttaaggacaagcactgtgaacaaacaactatacgtctttcatgccctcatcgctgagtagctttaacattgagcctaatgactcaaaatgacctaatgaggcccttttctca

SEQ ID NO: 16770 - DNA, 122 bp, Homo sapiens
  misc_feature (61)..(62): /note="This region represents a CpG dinucleotide"
  misc_feature (61)..(61): /note="Nucleotide may be methylated to form 5-methylcytosine"
acaggaccaggcctaatcagggacttccagagtcaaatgaccactcataggctcaaaagtcgcaacagtgaaacagaaacaataaacaaaaactagcagccccagggcacatatgtgcctat

SEQ ID NO: 16771 - DNA, 122 bp, Homo sapiens
  misc_feature (61)..(62): /note="This region represents a CpG dinucleotide"
  misc_feature (61)..(61): /note="Nucleotide may be methylated to form 5-methylcytosine"
ccagggacacaaggcaaatcggtggaatcgtcgaggggtggaggatcagccacagccccccgcctcccacgccacctcttggaaaccagatacccgcctcgcggccaagacccaccagctcc

SEQ ID NO: 16772 - DNA, 122 bp, Homo sapiens
  misc_feature (61)..(62): /note="This region represents a CpG dinucleotide"
  misc_feature (61)..(61): /note="Nucleotide may be methylated to form 5-methylcytosine"
tttcaagcacattttcaaaaacagaaaatgagacagttgtcttaagatcacttaataaaacgtaatgaaactgttaaaggtaagattcagtgaggaagattaagactaattgttaaaattag

SEQ ID NO: 16773 - DNA, 122 bp, Homo sapiens
  misc_feature (61)..(62): /note="This region represents a CpG dinucleotide"
  misc_feature (61)..(61): /note="Nucleotide may be methylated to form 5-methylcytosine"
tcttgctcttgcgggtactgtgcaggtctctgtgtgtgccaggttctgttgctgttttaacgtcctacgtaaataaacaaaacaccctagaatgaaaagtaacaagtcacctccttccctgt

SEQ ID NO: 16774 - DNA, 122 bp, Homo sapiens
  misc_feature (61)..(62): /note="This region represents a CpG dinucleotide"
  misc_feature (61)..(61): /note="Nucleotide may be methylated to form 5-methylcytosine"
agtgtgctgttgcagtcacttctatacaatgtggagcagccagtcctctggcaaggatgtcgctttggtccaatggtgaaatcagacctagctcatgtcatgctgatgtagaaggccttctc

SEQ ID NO: 16775 - DNA, 122 bp, Homo sapiens
  misc_feature (61)..(62): /note="This region represents a CpG dinucleotide"
  misc_feature (61)..(61): /note="Nucleotide may be methylated to form 5-methylcytosine"
ccaggctcatccatactatagcatgaatgaacactcatccatttttatggcttagggctgcgtggtgttccattgtgtggacataccaccttttgtttgttcatttatcagttgatgaacat

SEQ ID NO: 16776 - DNA, 122 bp, Homo sapiens
  misc_feature (61)..(62): /note="This region represents a CpG dinucleotide"
  misc_feature (61)..(61): /note="Nucleotide may be methylated to form 5-methylcytosine"
cgcccatgcagaccaacataactcccatgtaagataaagtgcggaaaggagaccattacacgtgataaagcatgactccacaacagctggatgcaagccctgggcaagttccttaatcttct

SEQ ID NO: 16777 - DNA, 122 bp, Homo sapiens
  misc_feature (61)..(62): /note="This region represents a CpG dinucleotide"
  misc_feature (61)..(61): /note="Nucleotide may be methylated to form 5-methylcytosine"
aaatgtgctcaattccattagtcatcacgaaaacgtaaattaaaaccacaatgagatatccgtgcacactcatcagaatgattacaatgaaaaagataaataacaccaaatcttggtgagga

SEQ ID NO: 16778 - DNA, 122 bp, Homo sapiens
  misc_feature (61)..(62): /note="This region represents a CpG dinucleotide"
  misc_feature (61)..(61): /note="Nucleotide may be methylated to form 5-methylcytosine"
cgggggtggtttccctaaaggaaaaccagggtgttatgttactggtaaggagtacctggacgctgggcagcaaagacattatatgccttagttctagtgagctgtttaggaaacagcttttg

SEQ ID NO: 16779 - DNA, 122 bp, Homo sapiens
  misc_feature (61)..(62): /note="This region represents a CpG dinucleotide"
  misc_feature (61)..(61): /note="Nucleotide may be methylated to form 5-methylcytosine"
gtcttatctttttcaggctgaatttttcctgtatgccccacctctgcctgttttttttgacgctttctgtatagtatggttgcaggtcatcctactggtctggtcagtggtctctgacacag

SEQ ID NO: 16780 - DNA, 122 bp, Homo sapiens
  misc_feature (61)..(62): /note="This region represents a CpG dinucleotide"
  misc_feature (61)..(61): /note="Nucleotide may be methylated to form 5-methylcytosine"
agcatctggctgtcctggtggggacatatgagcgctgccacaggccgggaatatcccaggcgagtaagaatagcccacaataagagatgactgctgcttgctctgctggtcactgcagttgt

SEQ ID NO: 16781 - DNA, 122 bp, Homo sapiens
  misc_feature (61)..(62): /note="This region represents a CpG dinucleotide"
  misc_feature (61)..(61): /note="Nucleotide may be methylated to form 5-methylcytosine"
aagaagttcttgtttatttactttgatacaagaatgagcagcactgtttgcccatgcttgcgtgcactctctctctctctctctctctctctctctcacacacacacacacacacacacaca

SEQ ID NO: 16782 - DNA, 122 bp, Homo sapiens
  misc_feature (61)..(62): /note="This region represents a CpG dinucleotide"
  misc_feature (61)..(61): /note="Nucleotide may be methylated to form 5-methylcytosine"
acgtcaccatcgtaagaccacaggacccttcccagccgctcctgtatatgacgtcaccgccgtaagaccacaagtcaccgccccagccgctcctgtagatgacgtcaccacagtaagaccac

SEQ ID NO: 16783 - DNA, 122 bp, Homo sapiens
  misc_feature (61)..(62): /note="This region represents a CpG dinucleotide"
  misc_feature (61)..(61): /note="Nucleotide may be methylated to form 5-methylcytosine"
ggtggagggaaacagcaatactcatttatggagtctgcagtctgccaaacacagttcatgcgttatctcaatgcatgagaatccttgcaactaccctatgagtgcgttgttctccccatttc

SEQ ID NO: 16784 - DNA, 122 bp, Homo sapiens
  misc_feature (61)..(62): /note="This region represents a CpG dinucleotide"
  misc_feature (61)..(61): /note="Nucleotide may be methylated to form 5-methylcytosine"
gctggccgcgctctcattaagatttgccgctagcagtggcggtgttcagcatgtatgtgacgtgcattctgttattgtatgcttggcttgtcagcctgcagctttctgacactcacttatgt

SEQ ID NO: 16785 - DNA, 122 bp, Homo sapiens
  misc_feature (61)..(62): /note="This region represents a CpG dinucleotide"
  misc_feature (61)..(61): /note="Nucleotide may be methylated to form 5-methylcytosine"
acccctgcaccatccttggaaggtcacacctagagttcttcattttgcaccctgaacaaacgtaacctaggagatggtcattcattttttcatactgacctgcttgtcctatttggtttgga

SEQ ID NO: 16786 - DNA, 122 bp, Homo sapiens
  misc_feature (61)..(62): /note="This region represents a CpG dinucleotide"
  misc_feature (61)..(61): /note="Nucleotide may be methylated to form 5-methylcytosine"
ttgaacatatgttacaactccaccaagatattgttagagaccctggggatttcaggtctgcgttcttgacaattatgaatagggaacttggttatgagccagccttcaggggctctatatac

SEQ ID NO: 16787 - DNA, 122 bp, Homo sapiens
  misc_feature (61)..(62): /note="This region represents a CpG dinucleotide"
  misc_feature (61)..(61): /note="Nucleotide may be methylated to form 5-methylcytosine"
ccttctgtctggttgcacctgggtgtgcaactgagcatgcctatgactgcctgtttcttgcgggggtcatggtagccctcctgtctggctcattgtctgcctgtgtcatggtgcctgccacc

SEQ ID NO: 16788 - DNA, 122 bp, Homo sapiens
  misc_feature (61)..(62): /note="This region represents a CpG dinucleotide"
  misc_feature (61)..(61): /note="Nucleotide may be methylated to form 5-methylcytosine"
aagtgtctgggcatgtttcacaatggttgctattcctcatcctctgccagaggcacaaaacgcacattctctgattttcagcatgacaacctggtaggatttttggagggaatgcccaggaa

SEQ ID NO: 16789 - DNA, 122 bp, Homo sapiens
  misc_feature (61)..(62): /note="This region represents a CpG dinucleotide"
  misc_feature (61)..(61): /note="Nucleotide may be methylated to form 5-methylcytosine"
catcaggatgtgttgccagttttagaatatcagccacagagaagagagtggctgtgacaacgaaggagcttacaaaatgtggacactgcagctatgtgtgtcctggaacctaactttctaaa

SEQ ID NO: 16790 - DNA, 122 bp, Homo sapiens
  misc_feature (61)..(62): /note="This region represents a CpG dinucleotide"
  misc_feature (61)..(61): /note="Nucleotide may be methylated to form 5-methylcytosine"
acgcacaatattgtgagaattcaggagcacgagctttaactaacagcacaaggcatatcacgtgagagtcattcagtggctggtattcactgatctctatcagagcagaaaacaggtgcttt

SEQ ID NO: 16791 - DNA, 122 bp, Homo sapiens
  misc_feature (61)..(62): /note="This region represents a CpG dinucleotide"
  misc_feature (61)..(61): /note="Nucleotide may be methylated to form 5-methylcytosine"
tacggtggtggtcttggaggggtggtggtcttggggggcgcggccccagccccatcttttcgcggggctgcttctgtccgcccgcacgggggaggggaggaggaggcggaggcggaggcaga

SEQ ID NO: 16792 - DNA, 122 bp, Homo sapiens
  misc_feature (61)..(62): /note="This region represents a CpG dinucleotide"
  misc_feature (61)..(61): /note="Nucleotide may be methylated to form 5-methylcytosine"
ggacgagaaatcattagcgagcacagaagtcttagcagccctggctgatgggctccaagccgctggcacatggggagccggcagaagccacccattttccacgttccgggagcgggaggttg

SEQ ID NO: 16793 - DNA, 122 bp, Homo sapiens
  misc_feature (61)..(62): /note="This region represents a CpG dinucleotide"
  misc_feature (61)..(61): /note="Nucleotide may be methylated to form 5-methylcytosine"
gtttttgcttggctctgcttgccagctgttcccctctgcactgtcagggagggctcctgtcggggtcaggcgggctttctgtttgtccagttagaggacctgtctctccaggacgcaggtcc

SEQ ID NO: 16794 - DNA, 122 bp, Homo sapiens
  misc_feature (61)..(62): /note="This region represents a CpG dinucleotide"
  misc_feature (61)..(61): /note="Nucleotide may be methylated to form 5-methylcytosine"
cacacacacaggcacacacaagcacatgcacgcacatgcacacacacgcacacacatgcacgcacgtactcccacaagcacaggcagcacaccctgcaagtggcctcggagcatccccaccc

SEQ ID NO: 16795 - DNA, 122 bp, Homo sapiens
  misc_feature (61)..(62): /note="This region represents a CpG dinucleotide"
  misc_feature (61)..(61): /note="Nucleotide may be methylated to form 5-methylcytosine"
cccttcatccctcctgtaaccctgtaacacgaggtctcatcatagcactcatcaccatcacgccactatggcctctgtcatagcattcgctgcagagggtccctgctccagcacccagcagg

SEQ ID NO: 16796 - DNA, 122 bp, Homo sapiens
  misc_feature (61)..(62): /note="This region represents a CpG dinucleotide"
  misc_feature (61)..(61): /note="Nucleotide may be methylated to form 5-methylcytosine"
tcaccttcccccacgtgagttgagtccctgcccaggtggaaatcactgatgtgctccaggcgctggagagcccaaaaaagagtgggagtttcctagaagccaggggaggggaggtgcgtggt

SEQ ID NO: 16797 - DNA, 122 bp, Homo sapiens
  misc_feature (61)..(62): /note="This region represents a CpG dinucleotide"
  misc_feature (61)..(61): /note="Nucleotide may be methylated to form 5-methylcytosine"
cgaggatgtcctgagtcacccaagatgccatctggaaatgtggtggagaaatggttgggacggcctttgccagcactcaggccacagtgcctcttcctagaagattaacctttcattatttt

SEQ ID NO: 16798 - DNA, 122 bp, Homo sapiens
  misc_feature (61)..(62): /note="This region represents a CpG dinucleotide"
  misc_feature (61)..(61): /note="Nucleotide may be methylated to form 5-methylcytosine"
tttggggtgagccccgccttgctgaggtgtcctcagccatggacctgtggctgtcggaggcgtccgcggttcaggatgacgcccttggcgggagcgagaggggtttccacagcccccttcac

SEQ ID NO: 16799 - DNA, 122 bp, Homo sapiens
  misc_feature (61)..(62): /note="This region represents a CpG dinucleotide"
  misc_feature (61)..(61): /note="Nucleotide may be methylated to form 5-methylcytosine"
tgtgtgtgaatgtatgtgtgtgtgtgtgtgtgtgtctctgtgtgtgagagagcgagcgagcgtgtatgttctcattaggggacgatctatgatttgacagcctcactgctgctgctcctgct

SEQ ID NO: 16800 - DNA, 122 bp, Homo sapiens
  misc_feature (61)..(62): /note="This region represents a CpG dinucleotide"
  misc_feature (61)..(61): /note="Nucleotide may be methylated to form 5-methylcytosine"
gtgtgaggcaaaaggtccagctttattcttctgcaaattaatgtcctgttttcccaacaccgcttgtcaaaaagactattattttccccactggacggtctcagcaccttgtcaaagattat

SEQ ID NO: 16801 - DNA, 122 bp, Homo sapiens
  misc_feature (61)..(62): /note="This region represents a CpG dinucleotide"
  misc_feature (61)..(61): /note="Nucleotide may be methylated to form 5-methylcytosine"
ccaaactacaggccctacatgtcagccacactatatgccttacatactggttgttgttgtcgttgttgttgtcgttttttgagacagagtcttgctctgtcgcccaggctggagtgcaatag

SEQ ID NO: 16802 - DNA, 122 bp, Homo sapiens
  misc_feature (61)..(62): /note="This region represents a CpG dinucleotide"
  misc_feature (61)..(61): /note="Nucleotide may be methylated to form 5-methylcytosine"
cacagtgtggcaagctggaaagcccctggcacttccagttttcagcagcttccagcttttcgtctgcttatcccacagagcactgggaaatgtggtgaacaacctataggaaaaactggtaa

SEQ ID NO: 16803 - DNA, 122 bp, Homo sapiens
  misc_feature (61)..(62): /note="This region represents a CpG dinucleotide"
  misc_feature (61)..(61): /note="Nucleotide may be methylated to form 5-methylcytosine"
tattaacaagcaccagagctatgtcaaaggagaatcatccaaaacattgctgagccttgacgaagatgaacagcactcaggggaagaattctaggtggatctttgggtaataggaaccctga

SEQ ID NO: 16804 - DNA, 122 bp, Homo sapiens
  misc_feature (61)..(62): /note="This region represents a CpG dinucleotide"
  misc_feature (61)..(61): /note="Nucleotide may be methylated to form 5-methylcytosine"
agaaagatctagcggattcgaggcaggaaacacaaaaggccaggctaatcacacgaacagcgcccactacaatggctgcaatgggccacgcatctctggaaaagacagttccccaaaagagt

SEQ ID NO: 16805 - DNA, 122 bp, Homo sapiens
  misc_feature (61)..(62): /note="This region represents a CpG dinucleotide"
  misc_feature (61)..(61): /note="Nucleotide may be methylated to form 5-methylcytosine"
acgacaccacttcctctcacccagtgtgtccaagctgatcaaactgggtgtgtcattgttcgcacacttgctgggccatggggcaggcaaggagcggctccttaaaccacaccaaaggtttg

SEQ ID NO: 16806 - DNA, 122 bp, Homo sapiens
  misc_feature (61)..(62): /note="This region represents a CpG dinucleotide"
  misc_feature (61)..(61): /note="Nucleotide may be methylated to form 5-methylcytosine"
cgttcataattctcatctcatcctttaaaaattcttgtttaaggacattataaggagagccgtgtgcatatacaggttaggggcatgctaggcacacattccagtttctgtttgaatgactg

SEQ ID NO: 16807 - DNA, 122 bp, Homo sapiens
  misc_feature (61)..(62): /note="This region represents a CpG dinucleotide"
  misc_feature (61)..(61): /note="Nucleotide may be methylated to form 5-methylcytosine"
agtgggttgctgctcctggctcagctggccagcttttactcccttatttggccccacccacgtcctgttgattggcccatcatgcatttacaaacctttagctagacacagagcgctgattg

SEQ ID NO: 16808 - DNA, 122 bp, Homo sapiens
  misc_feature (61)..(62): /note="This region represents a CpG dinucleotide"
  misc_feature (61)..(61): /note="Nucleotide may be methylated to form 5-methylcytosine"
gctaaagagatggaggtggagagtactggattttcccacctgcctgggagggtactgggacgaggggatccagatgagagggatggcctgtggtgacaggaatagagtggcagacgacctca

SEQ ID NO: 16809 - DNA, 122 bp, Homo sapiens
  misc_feature (61)..(62): /note="This region represents a CpG dinucleotide"
  misc_feature (61)..(61): /note="Nucleotide may be methylated to form 5-methylcytosine"
tgataattgggtgctcacgcatgcgtgtgtgagatgtgtcaccctcaaaccttgttatgacgtcagcacattacccgtctaacatgaacttagaagaagcaaaaccaaaaacaaatccagcc

SEQ ID NO: 16810 - DNA, 122 bp, Homo sapiens
  misc_feature (61)..(62): /note="This region represents a CpG dinucleotide"
  misc_feature (61)..(61): /note="Nucleotide may be methylated to form 5-methylcytosine"
taggttttatgtttatgtccctttttcttgctgagtttatgacagtgttacttctattaacgaagagtagttgtgtgaattgctgcccccttggggcttatattccactttagatctttaat

SEQ ID NO: 16811 - DNA, 122 bp, Homo sapiens
  misc_feature (61)..(62): /note="This region represents a CpG dinucleotide"
  misc_feature (61)..(61): /note="Nucleotide may be methylated to form 5-methylcytosine"
tctgtcatcacttcatagaaggcacgatgactcaggacaggatagacgcaatttgatggacgagagattctggtgaagtctagtgcatacaatgccctgaagatggcaaacctgagtcagat

SEQ ID NO: 16812 - DNA, 122 bp, Homo sapiens
  misc_feature (61)..(62): /note="This region represents a CpG dinucleotide"
  misc_feature (61)..(61): /note="Nucleotide may be methylated to form 5-methylcytosine"
caccaacccctatactgttctacttttttccctagccattatcactttgagcaaagtatacgtatttttttttactgtctttctccaatggaatgtaagctctacaaaggcagggacttttg

SEQ ID NO: 16813 - DNA, 122 bp, Homo sapiens
  misc_feature (61)..(62): /note="This region represents a CpG dinucleotide"
  misc_feature (61)..(61): /note="Nucleotide may be methylated to form 5-methylcytosine"
aatgaagttcttccctttctggtttgtgtgttttctgtttcttgggtttggagtccggcacgtgactgctcactgtggttacttggagttagaaatccggaggagactcagccggaaaggtc

SEQ ID NO: 16814 - DNA, 122 bp, Homo sapiens
  misc_feature (61)..(62): /note="This region represents a CpG dinucleotide"
  misc_feature (61)..(61): /note="Nucleotide may be methylated to form 5-methylcytosine"
ggcccacgccttcttccgcgaggagcgcggtgtgcacgtggaactagcggaggaggacgacggcgagaagccgggcctcaagctctggctgcgcatggaggacgcgcggcgcggggggcgcc

SEQ ID NO: 16815 - DNA, 122 bp, Homo sapiens
  misc_feature (61)..(62): /note="This region represents a CpG dinucleotide"
  misc_feature (61)..(61): /note="Nucleotide may be methylated to form 5-methylcytosine"
tggggggataacacataatccattgtgtaataacttcttaggtcaccaatcatgtaccagcgcaagctctgtgccaggccctgttaggtgcccacagcatgagacttaataagccaagagct

SEQ ID NO: 16816 - DNA, 122 bp, Homo sapiens
  misc_feature (61)..(62): /note="This region represents a CpG dinucleotide"
  misc_feature (61)..(61): /note="Nucleotide may be methylated to form 5-methylcytosine"
ggtccaacattatttcctgaaatgagcttttctttttctttcttttgtcagacaggatctcgctctctggcccaggcaggagggcagtggtgcaatctcggctcactgcaacttccgcctct

SEQ ID NO: 16817 - DNA, 122 bp, Homo sapiens
  misc_feature (61)..(62): /note="This region represents a CpG dinucleotide"
  misc_feature (61)..(61): /note="Nucleotide may be methylated to form 5-methylcytosine"
ttattttcattatgagaaacagctccattaatagtaacagatctctttgtttactttatccggaacaagtcccacccacaaagaagagagactgttcaaagaacctaacaaggaaagttggt

SEQ ID NO: 16818 - DNA, 122 bp, Homo sapiens
  misc_feature (61)..(62): /note="This region represents a CpG dinucleotide"
  misc_feature (61)..(61): /note="Nucleotide may be methylated to form 5-methylcytosine"
aggatcattcatcatgaccaagtgagatttatccctgggatgcaaggataattcaacatacgcaaataaatcaatgtgatacattggatcaacagaatgaaggataaaagctacaagatcat

SEQ ID NO: 16819 - DNA, 122 bp, Homo sapiens
  misc_feature (61)..(62): /note="This region represents a CpG dinucleotide"
  misc_feature (61)..(61): /note="Nucleotide may be methylated to form 5-methylcytosine"
actcctgaatagtaaaagtggattatagctgacagggctgcaaggcttagattctatttacgaaggagtttctaaggaaactcaaagacaacagaggaggcaaacacaaggactttagaaga

SEQ ID NO: 16820 - DNA, 122 bp, Homo sapiens
  misc_feature (61)..(62): /note="This region represents a CpG dinucleotide"
  misc_feature (61)..(61): /note="Nucleotide may be methylated to form 5-methylcytosine"
aaactaggaagaggtgcgttcaacccagggaagggtcatgggaggctgcctagaggaagtcgcaggcaagctgaggaggcagagagagcagcctgaatcaaagtccagagatgataaagagc

SEQ ID NO: 16821 - DNA, 122 bp, Homo sapiens
  misc_feature (61)..(62): /note="This region represents a CpG dinucleotide"
  misc_feature (61)..(61): /note="Nucleotide may be methylated to form 5-methylcytosine"
ggggaggtgtagggaggtggtggcagtttcctttgccctcagcctagtcctgaaacatcccgaggtggaagggtccgcttcaccagcatggcttctcttgcagcctttaaacggcactcgcc

SEQ ID NO: 16822 - DNA, 122 bp, Homo sapiens
  misc_feature (61)..(62): /note="This region represents a CpG dinucleotide"
  misc_feature (61)..(61): /note="Nucleotide may be methylated to form 5-methylcytosine"
acttgggaagcttaacaaataacgtgggtttgtggtagctccttgacaggtgtgcttatccgtgtcgcctgtcttggcttccgatgcaaagccagcttgggaacccctggcctcatctcctt

SEQ ID NO: 16823 - DNA, 122 bp, Homo sapiens
  misc_feature (61)..(62): /note="This region represents a CpG dinucleotide"
  misc_feature (61)..(61): /note="Nucleotide may be methylated to form 5-methylcytosine"
ttctgacttcattaactgcttttaaacaaaacatctgcgttcacaaatatttcacttaatcgcctgaaaatttcagctcatgtgaaaagatatttacagatctttggcatatgggggataaa

SEQ ID NO: 16824 - DNA, 122 bp, Homo sapiens
  misc_feature (61)..(62): /note="This region represents a CpG dinucleotide"
  misc_feature (61)..(61): /note="Nucleotide may be methylated to form 5-methylcytosine"
agcctcagtgtgtcaccttctgttgatcttaccatggtatgtacaaaagtataatatggccgggcgtgatggctcacacctgtaatcccagcactttgggaggccgaggcgggcgggtcacc

SEQ ID NO: 16825 - DNA, 122 bp, Homo sapiens
  misc_feature (61)..(62): /note="This region represents a CpG dinucleotide"
  misc_feature (61)..(61): /note="Nucleotide may be methylated to form 5-methylcytosine"
caccgcaccaagccagctgaggccaagcctgataacaatcagtcaatactgagatcaggccgctgattgcttttctcaacttaatgctgtttgtttaactaacaccagtgagagtccttatt

SEQ ID NO: 16826 - DNA, 122 bp, Homo sapiens
  misc_feature (61)..(62): /note="This region represents a CpG dinucleotide"
  misc_feature (61)..(61): /note="Nucleotide may be methylated to form 5-methylcytosine"
gggttatgagaactttgtagggtaactgaccaactttgttggtcaaactgagtcctgaatcgtttattctttctatagacatttacttagcaccttctatgtgttaggttccaatcaacccc

SEQ ID NO: 16827 - DNA, 122 bp, Homo sapiens
  misc_feature (61)..(62): /note="This region represents a CpG dinucleotide"
  misc_feature (61)..(61): /note="Nucleotide may be methylated to form 5-methylcytosine"
tcacatgtagaaacaagcctagagaatactgtaacacaaagttagaagggttgaggagggcgagggaagggtcaacaccttaccgctgatcgctttgctttactcctgcattttttgttcag

SEQ ID NO: 16828 - DNA, 122 bp, Homo sapiens
  misc_feature (61)..(62): /note="This region represents a CpG dinucleotide"
  misc_feature (61)..(61): /note="Nucleotide may be methylated to form 5-methylcytosine"
ctaaacacttcttttctaatgagctgctctgtgtgaggccctggtcagggaaaacgtggtcgataaggcatcacatttttgacatggagcttctgacaaataatctcaaatttatcactgac

SEQ ID NO: 16829 - DNA, 122 bp, Homo sapiens
  misc_feature (61)..(62): /note="This region represents a CpG dinucleotide"
  misc_feature (61)..(61): /note="Nucleotide may be methylated to form 5-methylcytosine"
ctccctgggatatttaaagtcattgccttttctaactcttccattattgataacacgctacgtgaagaaagcccggcacagccagggtgatctcattcttactaaaattccctgaagcatgc

SEQ ID NO: 16830 - DNA, 122 bp, Homo sapiens
  misc_feature (61)..(62): /note="This region represents a CpG dinucleotide"
  misc_feature (61)..(61): /note="Nucleotide may be methylated to form 5-methylcytosine"
gtctgtggccagaagcttcactaatttcataattttccctccctgctgccagttgacctccggatttttgcctctgttcaagttggtactcaaaatattgcctctaaaaatggagtaccagc

SEQ ID NO: 16831 - DNA, 122 bp, Homo sapiens
  misc_feature (61)..(62): /note="This region represents a CpG dinucleotide"
  misc_feature (61)..(61): /note="Nucleotide may be methylated to form 5-methylcytosine"
atcaattacatatgtgacttctatttatcagaactggattgttaatctatgattatgatccgagaggaaggaagaatgccaatatttacagaatgctgactgtaagcaggcccatgaataat

SEQ ID NO: 16832 - DNA, 122 bp, Homo sapiens
  misc_feature (61)..(62): /note="This region represents a CpG dinucleotide"
  misc_feature (61)..(61): /note="Nucleotide may be methylated to form 5-methylcytosine"
gattacaggcgtgagccaccacgcccggccaaaccaacttttttttaaaaaggaagatttcgtttaaaagaaaccaccctgaagggtggagtgtggaactgagcttccgtgacggtcttgag

SEQ ID NO: 16833 - DNA, 122 bp, Homo sapiens
  misc_feature (61)..(62): /note="This region represents a CpG dinucleotide"
  misc_feature (61)..(61): /note="Nucleotide may be methylated to form 5-methylcytosine"
aagcagcagaagtctttatggtcccaatcctggaatgaatacttgataaatgtcctcaaacgtgagtgctcctcagaggttcaggaaggaattcttccagggcacttcatttccttatgtct

SEQ ID NO: 16834 - DNA, 122 bp, Homo sapiens
  misc_feature (61)..(62): /note="This region represents a CpG dinucleotide"
  misc_feature (61)..(61): /note="Nucleotide may be methylated to form 5-methylcytosine"
actccccgctgccgcagtcctgttgacattattccttgtcagaatggctcatttccagttcgttccatctaccctccctttggtagacctccatgacccacctggatccagtccccagtcac

SEQ ID NO: 16835 - DNA, 122 bp, Homo sapiens
  misc_feature (61)..(62): /note="This region represents a CpG dinucleotide"
  misc_feature (61)..(61): /note="Nucleotide may be methylated to form 5-methylcytosine"
gaaaatgttgatatgtttaaaaaattactcataaagccataggtaagtggtgcaacaacacgagtaacatttctatgtatgtgtctctatgtgtggatttaaatagaattacagtgtacact

SEQ ID NO: 16836 - DNA, 122 bp, Homo sapiens
  misc_feature (61)..(62): /note="This region represents a CpG dinucleotide"
  misc_feature (61)..(61): /note="Nucleotide may be methylated to form 5-methylcytosine"
ctggccaggaggggacagggctgtgtcgccccatgtgggtggggctgggctgtgcccttccgtggccgtggccctgggactgcatctctactcccattagtatgcactccctcactctgggc

SEQ ID NO: 16837 - DNA, 122 bp, Homo sapiens
  misc_feature (61)..(62): /note="This region represents a CpG dinucleotide"
  misc_feature (61)..(61): /note="Nucleotide may be methylated to form 5-methylcytosine"
caccacagggactgaggttctccagatttcaaaagcctgtgatctgcggttgtgttgccccgttccccccgcggcagacaagcccagacacacacggcccagacaccccagaggcaaaggaa

SEQ ID NO: 16838 - DNA, 122 bp, Homo sapiens
  misc_feature (61)..(62): /note="This region represents a CpG dinucleotide"
  misc_feature (61)..(61): /note="Nucleotide may be methylated to form 5-methylcytosine"
atcaggcctcaaactccttatccgcagttcgttctcaaaaaacagccaacgcggcagctccgggtgaccaggattgcaacaccaaatgtgtttgttccccatgtttgtgaaatacctcagag

SEQ ID NO: 16839 - DNA, 122 bp, Homo sapiens
  misc_feature (61)..(62): /note="This region represents a CpG dinucleotide"
  misc_feature (61)..(61): /note="Nucleotide may be methylated to form 5-methylcytosine"
ggatgtgctgagtagcaccctgcatttcaggcagctgcgagtgattgacaagggagggaacggagcaggccttcttagctttagacagtaagaagtctagaaacttcaagaggctcccttat

SEQ ID NO: 16840 - DNA, 122 bp, Homo sapiens
  misc_feature (61)..(62): /note="This region represents a CpG dinucleotide"
  misc_feature (61)..(61): /note="Nucleotide may be methylated to form 5-methylcytosine"
gaacagggagaacaagctctacctctccaaggagttctacacggagatccttgagagtgacggtgccatccatctgttcctccttctccaaaagcagcatgaagagccggccttccatgtct

SEQ ID NO: 16841 - DNA, 122 bp, Homo sapiens
  misc_feature (61)..(62): /note="This region represents a CpG dinucleotide"
  misc_feature (61)..(61): /note="Nucleotide may be methylated to form 5-methylcytosine"
gattctctctgattggaggttttttgaaaaaacaggttagggattggcctgggtggtttgcgtgtcctagcacaaaggcaggggctgatgaccttggggtgtcaattagactatggcaaata

SEQ ID NO: 16842 - DNA, 122 bp, Homo sapiens
  misc_feature (61)..(62): /note="This region represents a CpG dinucleotide"
  misc_feature (61)..(61): /note="Nucleotide may be methylated to form 5-methylcytosine"
atatgctgcaggctcagtgacgggtggaactctggaagaagtggggagggaggcagagaccggagccaggagacccaggttcagaggtacatatccaccagaagaaaaaaaggagctggcct

SEQ ID NO: 16843 - DNA, 122 bp, Homo sapiens
  misc_feature (61)..(62): /note="This region represents a CpG dinucleotide"
  misc_feature (61)..(61): /note="Nucleotide may be methylated to form 5-methylcytosine"
ccacttttcagattggggaggatgtgaacgtctaagaacagcccccggtgtgagagagtacgtgggaactcctgccgcgcaggcacggggatgggtcccagcaaacgcacggtgtatttcca

SEQ ID NO: 16844 - DNA, 122 bp, Homo sapiens
  misc_feature (61)..(62): /note="This region represents a CpG dinucleotide"
  misc_feature (61)..(61): /note="Nucleotide may be methylated to form 5-methylcytosine"
aaacccgccgcggaggaagaggaggaggaatccatcccagggcgaccaagcttgcagagacgaactccgcaccgaccttcacgtgtctccgcgacggaaccggaaccacagctagctgcctc

SEQ ID NO: 16845 - DNA, 122 bp, Homo sapiens
  misc_feature (61)..(62): /note="This region represents a CpG dinucleotide"
  misc_feature (61)..(61): /note="Nucleotide may be methylated to form 5-methylcytosine"
gctaacactctccggctcgcagaagcggcagcagccggcgggttttgagcttccgagtcccgggtgcgcaagagtgtggacgccacccctccagggctgccaagcctccagggctgccaagc

SEQ ID NO: 16846 - DNA, 122 bp, Homo sapiens
  misc_feature (61)..(62): /note="This region represents a CpG dinucleotide"
  misc_feature (61)..(61): /note="Nucleotide may be methylated to form 5-methylcytosine"
ttttctgaacattgacagttcctctcacatggcttggccctttagcaatgttcttgtaaccgcatttctcctgctaatcaacccggcaggccttggaggttattaacactggcctactttca

SEQ ID NO: 16847 - DNA, 122 bp, Homo sapiens
  misc_feature (61)..(62): /note="This region represents a CpG dinucleotide"
  misc_feature (61)..(61): /note="Nucleotide may be methylated to form 5-methylcytosine"
tggccacagcaatgaacgttctttccttctcaagtcagtataggccatatgctaatggggcgttaggcaattagctagcgcttcctctactaagagcaggcataagtgcctttcatttgagt

SEQ ID NO: 16848 - DNA, 122 bp, Homo sapiens
  misc_feature (61)..(62): /note="This region represents a CpG dinucleotide"
  misc_feature (61)..(61): /note="Nucleotide may be methylated to form 5-methylcytosine"
tatatttagctggggacgaagaaggaacaaggaaggaacaggcagatggcatagcacgaacgccgggtggaaagtggaactgctcgctcctgtcgtgtgtgtctcttctccatcaaaaaaga

SEQ ID NO: 16849 - DNA, 122 bp, Homo sapiens
  misc_feature (61)..(62): /note="This region represents a CpG dinucleotide"
  misc_feature (61)..(61): /note="Nucleotide may be methylated to form 5-methylcytosine"
cctgaagaggccaagtatgctgagtttcatttcaggaccaagtagctatgatgggtgtaacggcctggtccactccagtggagaaagaaactgagaactcaaatgggtcaagagagttactt

SEQ ID NO: 16850 - DNA, 122 bp, Homo sapiens
  misc_feature (61)..(62): /note="This region represents a CpG dinucleotide"
  misc_feature (61)..(61): /note="Nucleotide may be methylated to form 5-methylcytosine"
tgacttcaggagtgataccgcagactttcaccgttagtgttacagctcttaaaggtggcgcgtccggagttgtttcttcctcccggtgggttcgtggtctcgctggcttcaagagtgaatag

SEQ ID NO: 16851 - DNA, 122 bp, Homo sapiens
  misc_feature (61)..(62): /note="This region represents a CpG dinucleotide"
  misc_feature (61)..(61): /note="Nucleotide may be methylated to form 5-methylcytosine"
gatggttctggatgtcccaggtgtaaccacagcgggcaggataaggacaaagggtccacacgtggaggacgggcggggagatggtcggagtgagcaacgggagacgaactcggccccgaagc

SEQ ID NO: 16852 - DNA, 122 bp, Homo sapiens
  misc_feature (61)..(62): /note="This region represents a CpG dinucleotide"
  misc_feature (61)..(61): /note="Nucleotide may be methylated to form 5-methylcytosine"
tccagtttcgcaatacaatacttgagctttcgaacacctcagacactagaatgtgtaatgcgagtcaaaaaagctgacatacaaaacaattcccatttggctcagggttcctaaatgtcaca

SEQ ID NO: 16853 - DNA, 122 bp, Homo sapiens
  misc_feature (61)..(62): /note="This region represents a CpG dinucleotide"
  misc_feature (61)..(61): /note="Nucleotide may be methylated to form 5-methylcytosine"
ctcttcctcctccctctatgacatttcttcctggttgtcttcctggttcctttttccccacgcaccccttcaataagggggctccccagggcttggccctggatccactctctacctgcagt

SEQ ID NO: 16854 - DNA, 122 bp, Homo sapiens
  misc_feature (61)..(62): /note="This region represents a CpG dinucleotide"
  misc_feature (61)..(61): /note="Nucleotide may be methylated to form 5-methylcytosine"
cccagctcccatgcagttggtgaggctggtcttgctcctgccatgccccactaacagagccgagtttatatccaggcagcctgtgtgcaggactaaaacctagccccaggctataagttttc

SEQ ID NO: 16855 - DNA, 122 bp, Homo sapiens
  misc_feature (61)..(62): /note="This region represents a CpG dinucleotide"
  misc_feature (61)..(61): /note="Nucleotide may be methylated to form 5-methylcytosine"
ttcatgacagatgacagggagtgtgaaatgcagtattttttaaacttttttgttacaatccgtagtaagagatctttttatagcaagactccattgatggctgagtatggttgtgtgcacct

SEQ ID NO: 16856 - DNA, 122 bp, Homo sapiens
  misc_feature (61)..(62): /note="This region represents a CpG dinucleotide"
  misc_feature (61)..(61): /note="Nucleotide may be methylated to form 5-methylcytosine"
cttgaggccattgcagcccagctttggaagcctggatgaatgtgtcagtccagaagctgccgccagaagtcacacccagaggggcagcttagaacaacacatggcaagaaaagctgctttta

SEQ ID NO: 16857 - DNA, 122 bp, Homo sapiens
  misc_feature (61)..(62): /note="This region represents a CpG dinucleotide"
  misc_feature (61)..(61): /note="Nucleotide may be methylated to form 5-methylcytosine"
cattcctcctcctaacaggataaaaatcttgactctctcctttgcatcagctccccaccccgcccctgcccaaggaaataaatgctctgacttttccaagagtgcgaaaaaactaaaattag

SEQ ID NO: 16858 - DNA, 122 bp, Homo sapiens
  misc_feature (61)..(62): /note="This region represents a CpG dinucleotide"
  misc_feature (61)..(61): /note="Nucleotide may be methylated to form 5-methylcytosine"
ccacacagtgatgatgcagagtctgctccaatgattcccaagacccatacgggttaattccggcaaaggaacgattccttgggttttagctcctggcctgggagtcacgcccagcttgtggt

SEQ ID NO: 16859 - DNA, 122 bp, Homo sapiens
  misc_feature (61)..(62): /note="This region represents a CpG dinucleotide"
  misc_feature (61)..(61): /note="Nucleotide may be methylated to form 5-methylcytosine"
gtaaaacatctgttcccctgtgctgcaattcccttcatttacctccacaccctttgatggcgtcattgtcagccaagcacctaggcaaatgcctatcatagtaaagacagttaatacatatt

SEQ ID NO: 16860 - DNA, 122 bp, Homo sapiens
  misc_feature (61)..(62): /note="This region represents a CpG dinucleotide"
  misc_feature (61)..(61): /note="Nucleotide may be methylated to form 5-methylcytosine"
tctcatcactttgggatcttgtttggcaccccctgtcttcatagctctgaactccaatttcggtctcccagccccttgggactatagatctctactctgttttctggcctcttttgtgcttc

SEQ ID NO: 16861 - DNA, 122 bp, Homo sapiens
  misc_feature (61)..(62): /note="This region represents a CpG dinucleotide"
  misc_feature (61)..(61): /note="Nucleotide may be methylated to form 5-methylcytosine"
tcctgtcctcagtgtccagcctcttggtgcccgcttgtgttgtcaaagtgaggctggcatcgtttgccccagggaggccatgggcaggccccctgaggcaaacggtgcccccgcctgtgcac

SEQ ID NO: 16862 - DNA, 122 bp, Homo sapiens
  misc_feature (61)..(62): /note="This region represents a CpG dinucleotide"
  misc_feature (61)..(61): /note="Nucleotide may be methylated to form 5-methylcytosine"
acaaataataatcctggaactacacagtggttcagagactctgcttactaagcattttcacgtcctttcatctgagttttgtaacaaccccatgtgaaaggctggtaagtatttttagcttt

SEQ ID NO: 16863 - DNA, 122 bp, Homo sapiens
  misc_feature (61)..(62): /note="This region represents a CpG dinucleotide"
  misc_feature (61)..(61): /note="Nucleotide may be methylated to form 5-methylcytosine"
atcagcctcagtttcaacagatgagacaaattattcagcagaatccttccttgcttccagcgttactacagcagataggtcgagagaatcctcaattacttcaggtgactaatcagtgtcag

SEQ ID NO: 16864 - DNA, 122 bp, Homo sapiens
  misc_feature (61)..(62): /note="This region represents a CpG dinucleotide"
  misc_feature (61)..(61): /note="Nucleotide may be methylated to form 5-methylcytosine"
agtcattatacttacctcacagggtttcaaagttcaaatcaggcaatacgtccaccaaagcgttatgtaaactacaaagcaatgtatgcacgagaagaactgttattcttctcactgaggct

SEQ ID NO: 16865 - DNA, 122 bp, Homo sapiens
  misc_feature (61)..(62): /note="This region represents a CpG dinucleotide"
  misc_feature (61)..(61): /note="Nucleotide may be methylated to form 5-methylcytosine"
ttgagaaagtcatctgaagcatttttggggattaaggtgataccctaaaaccccggagggcgcacgtaggatcaggtgcacccttcctgcagcgccttggtgtctgcagccgtggcggcctc

SEQ ID NO: 16866 - DNA, 122 bp, Homo sapiens
  misc_feature (61)..(62): /note="This region represents a CpG dinucleotide"
  misc_feature (61)..(61): /note="Nucleotide may be methylated to form 5-methylcytosine"
tgttcctcctcactccttcccatccaagtttaggggagcaaagactatcctatgtgcacacgacagttctgaacacagcaaaagttctgaataaggcaaaggacagctgcagcctgctgttc

SEQ ID NO: 16867 - DNA, 122 bp, Homo sapiens
  misc_feature (61)..(62): /note="This region represents a CpG dinucleotide"
  misc_feature (61)..(61): /note="Nucleotide may be methylated to form 5-methylcytosine"
aactccatcacttactagctgtgtgatttggggcaagttggtcaatctctctgtgctgcacgtgcatctcagagtcattgggaagattcagtgacatgaatcatgacatattcaacacatag

SEQ ID NO: 16868 - DNA, 122 bp, Homo sapiens
  misc_feature (61)..(62): /note="This region represents a CpG dinucleotide"
  misc_feature (61)..(61): /note="Nucleotide may be methylated to form 5-methylcytosine"
ttcaaagctcagggcctatctgtctgggctcctcccagcgccacccccagccctgcctggcgagcctggagactccagcagcaaggcttcatgctcccagacgctgcaggtccccctactcc

SEQ ID NO: 16869 - DNA, 122 bp, Homo sapiens
  misc_feature (61)..(62): /note="This region represents a CpG dinucleotide"
  misc_feature (61)..(61): /note="Nucleotide may be methylated to form 5-methylcytosine"
agaggtagaatgaattccgaagagtgatgagcccctttaaggagagatagttcgaacaaacggtttcaccttcagcagaatccaaaagctgccatcataaaagtggatgagaagaaagcaga

SEQ ID NO: 16870 - DNA, 122 bp, Homo sapiens
  misc_feature (61)..(62): /note="This region represents a CpG dinucleotide"
  misc_feature (61)..(61): /note="Nucleotide may be methylated to form 5-methylcytosine"
atcggggtgcagcagtgctccttggcctaatagcagcagggcaccagtgaaggtttccaacgcgaggcctgaagatcagattcctattttacaacatcagcctggaaacagcatgaaggaag

SEQ ID NO: 16871 - DNA, 122 bp, Homo sapiens
  misc_feature (61)..(62): /note="This region represents a CpG dinucleotide"
  misc_feature (61)..(61): /note="Nucleotide may be methylated to form 5-methylcytosine"
tgtgtgttcaggacaggaggactaaggaccaaacaggtttgggaatgacagatcccttgacggaactggctgacaactttgctcaccagtcacagcagggcagcccagggagtgaacagggg

SEQ ID NO: 16872 - DNA, 122 bp, Homo sapiens
  misc_feature (61)..(62): /note="This region represents a CpG dinucleotide"
  misc_feature (61)..(61): /note="Nucleotide may be methylated to form 5-methylcytosine"
atgggccccagggaaatgccagtaccccgggccggagagtagccgagccccagactgagtcgttgctccatgggccacaaaagctggttcccgcacagcagccgccctgggccccggcagac

SEQ ID NO: 16873 - DNA, 122 bp, Homo sapiens
  misc_feature (61)..(62): /note="This region represents a CpG dinucleotide"
  misc_feature (61)..(61): /note="Nucleotide may be methylated to form 5-methylcytosine"
ctggataaagtttggttgtttgctcttggtgtgtgtgtcttctgtcctggtcctctgtagcgtccctccatgtgaggtcctcccattctatctcattgtgcctcacgccctgctgctggcct

SEQ ID NO: 16874 - DNA, 122 bp, Homo sapiens
  misc_feature (61)..(62): /note="This region represents a CpG dinucleotide"
  misc_feature (61)..(61): /note="Nucleotide may be methylated to form 5-methylcytosine"
catgacacaccaaccttccaggaagttacagggtccaggaaagaacagtctcagcattgacgctgggcagatccaagaagaacatgaagaaaaattaaaagtagccagatatggtggctcat

SEQ ID NO: 16875 - DNA, 122 bp, Homo sapiens
  misc_feature (61)..(62): /note="This region represents a CpG dinucleotide"
  misc_feature (61)..(61): /note="Nucleotide may be methylated to form 5-methylcytosine"
cgtcctggccataacaggatctgctatgactcagggtttgaagaagaccttcttgtaacacggtctctcctgacctgggcctgagatgcaaggctcatggatgacttttgcagccaggtttc

SEQ ID NO: 16876 - DNA, 122 bp, Homo sapiens
  misc_feature (61)..(62): /note="This region represents a CpG dinucleotide"
  misc_feature (61)..(61): /note="Nucleotide may be methylated to form 5-methylcytosine"
gcggggatggtgccgcctcctaggggacatttggaaatgtgtctacggaggtgttttcatcgccactatgtctggtgtttgtgggagtgggggagtgtggggcaaggggaggggtcttggca

SEQ ID NO: 16877 - DNA, 122 bp, Homo sapiens
  misc_feature (61)..(62): /note="This region represents a CpG dinucleotide"
  misc_feature (61)..(61): /note="Nucleotide may be methylated to form 5-methylcytosine"
ctcacatctctccagaagaggcaagcccaatgatttgatccaaatcagggcatattctagcgccactctacatagagatagaggggtttttgtgtgtttgtttgtttttttgtgatggagtt

SEQ ID NO: 16878 - DNA, 122 bp, Homo sapiens
  misc_feature (61)..(62): /note="This region represents a CpG dinucleotide"
  misc_feature (61)..(61): /note="Nucleotide may be methylated to form 5-methylcytosine"
ccaccacagagcacatggctgtgtctaggcgcaagcactttagcagtatctgtttacatgcgcaaggatcaagccgactacctgtgctgtctactgggacagcagtctccgagctactccgt

SEQ ID NO: 16879 - DNA, 122 bp, Homo sapiens
  misc_feature (61)..(62): /note="This region represents a CpG dinucleotide"
  misc_feature (61)..(61): /note="Nucleotide may be methylated to form 5-methylcytosine"
gagggtggaggagaagccgcctaaccctatggagggcatgacagaggagcagaaggagcacgaggccatgaagctggtgaccatgtttgacaagctctccaggtgtgtggcatgaggaggag

SEQ ID NO: 16880 - DNA, 122 bp, Homo sapiens
  misc_feature (61)..(62): /note="This region represents a CpG dinucleotide"
  misc_feature (61)..(61): /note="Nucleotide may be methylated to form 5-methylcytosine"
agtctccatatctggtcagctcctgccagagccaacccttctgcagacagcagctgtccacgctggagaaattacaaaaaataactgcctgatgccagcggagagtgaataagatgaaacca

SEQ ID NO: 16881 - DNA, 122 bp, Homo sapiens
  misc_feature (61)..(62): /note="This region represents a CpG dinucleotide"
  misc_feature (61)..(61): /note="Nucleotide may be methylated to form 5-methylcytosine"
gtgtttgctcccagctctgccctgggtttggtagctgctccatagaactgctttgttctgcgtggagcccgtgtaccgccccaccattgtggacaagtcacaaaagcacagccctgagtcac

SEQ ID NO: 16882 - DNA, 122 bp, Homo sapiens
  misc_feature (61)..(62): /note="This region represents a CpG dinucleotide"
  misc_feature (61)..(61): /note="Nucleotide may be methylated to form 5-methylcytosine"
aattgtgtgaatttctacttgggtggtgaagtcacgatgggcatcttcaggcaggagaaccgggaggagcaggtgcctgatgcctcatacaggtggaaggcttagagtaacagcaggcagga

SEQ ID NO: 16883 - DNA, 122 bp, Homo sapiens
  misc_feature (61)..(62): /note="This region represents a CpG dinucleotide"
  misc_feature (61)..(61): /note="Nucleotide may be methylated to form 5-methylcytosine"
ccccaggaaacttacagtcatgacagaaggcaaaggggaagcaaggcacatcttacatagcggcaggagagagagccagagatcagccaaacacttttaaaccatcagaccttgtgagaact

SEQ ID NO: 16884 - DNA, 122 bp, Homo sapiens
  misc_feature (61)..(62): /note="This region represents a CpG dinucleotide"
  misc_feature (61)..(61): /note="Nucleotide may be methylated to form 5-methylcytosine"
aaaaagttgcttgaaatccttcaacatgatcctgattctatcttagacacgttaacttctcggaggctgatttctgaggaagagtatgagactctggagaatgttacagatctcctgaagaa

SEQ ID NO: 16885 - DNA, 122 bp, Homo sapiens
  misc_feature (61)..(62): /note="This region represents a CpG dinucleotide"
  misc_feature (61)..(61): /note="Nucleotide may be methylated to form 5-methylcytosine"
aaagaaaaagccgattgcttctagaacctgaagaaaatataaatatagtatgataccttgcgattttcaagaggaaaacaggttgaacttgcaattaactggaattccaattcagacaactc

SEQ ID NO: 16886 - DNA, 122 bp, Homo sapiens
  misc_feature (61)..(62): /note="This region represents a CpG dinucleotide"
  misc_feature (61)..(61): /note="Nucleotide may be methylated to form 5-methylcytosine"
tttacatttatgggctagctaatttttcccttcgtcttagtaaagtttatattacagaagcgcccagccaagaaccttatcccacatccagatctgtaaaatgatgttcagattttataatc

SEQ ID NO: 16887 - DNA, 122 bp, Homo sapiens
  misc_feature (61)..(62): /note="This region represents a CpG dinucleotide"
  misc_feature (61)..(61): /note="Nucleotide may be methylated to form 5-methylcytosine"
gttttctttccagaggaacatagcaattttatagcaaaacaccctattggcagttagcatcgcagttaggagcccagggacggagctggtggcatgtgtccagatgttggatctgtctattc

SEQ ID NO: 16888 - DNA, 122 bp, Homo sapiens
  misc_feature (61)..(62): /note="This region represents a CpG dinucleotide"
  misc_feature (61)..(61): /note="Nucleotide may be methylated to form 5-methylcytosine"
ctcaatgtggggtgacaaagaccccggtgaaggaacgctagagcgtgtgaaagcagaggacgcatcatcagaggacacctgaggatgtctaaaagaagctcagcaggaaagctgagtgctgg

SEQ ID NO: 16889 - DNA, 122 bp, Homo sapiens
  misc_feature (61)..(62): /note="This region represents a CpG dinucleotide"
  misc_feature (61)..(61): /note="Nucleotide may be methylated to form 5-methylcytosine"
cagaaacagaaggagggacgcttctcactctgaccccggaaagaaggaagaaactgcgtgcgagttcagacaagtccgttggcgggggctgggatgcctgcatcttccttgttaaaaaagga

SEQ ID NO: 16890 - DNA, 122 bp, Homo sapiens
  misc_feature (61)..(62): /note="This region represents a CpG dinucleotide"
  misc_feature (61)..(61): /note="Nucleotide may be methylated to form 5-methylcytosine"
gtctcttcatgacctttgctctaggcccatcccaggctggacagctctttctcagggttacgtcaacatcagccaaagagggggtttcctacatttgcagctaatttgggaaaaaaatattt

SEQ ID NO: 16891 - DNA, 122 bp, Homo sapiens
  misc_feature (61)..(62): /note="This region represents a CpG dinucleotide"
  misc_feature (61)..(61): /note="Nucleotide may be methylated to form 5-methylcytosine"
tgcttctcatcactgcacccttctggccaactccagctcaccattctttgctgagcaatacgggcacttctgggaaattatctttgctccctccccccatctcttgcccctcccatggaatt

SEQ ID NO: 16892 - DNA, 122 bp, Homo sapiens
  misc_feature (61)..(62): /note="This region represents a CpG dinucleotide"
  misc_feature (61)..(61): /note="Nucleotide may be methylated to form 5-methylcytosine"
attcttttgctgaattagaaggcatacataactgcctattataaaaatgaaagaaccaagcggcaagataaaagtggcatcttgctcaattctcagctcatggatttgagcacactaggact

SEQ ID NO: 16893 - DNA, 122 bp, Homo sapiens
  misc_feature (61)..(62): /note="This region represents a CpG dinucleotide"
  misc_feature (61)..(61): /note="Nucleotide may be methylated to form 5-methylcytosine"
tgggttggaagatgggaagtcaatgcagaagcaccgttgaaagtattccactgggcagggcgcggtggctcacgcttgtaatcccagtacttcgggaggccgaagcgggaggatcgcttgag

SEQ ID NO: 16894 - DNA, 122 bp, Homo sapiens
  misc_feature (61)..(62): /note="This region represents a CpG dinucleotide"
  misc_feature (61)..(61): /note="Nucleotide may be methylated to form 5-methylcytosine"
cagggctgactagctccagggtccatgcactgaacctcagccagtcccagccagtccccgcggaaaaggaatttattgatgtgagacctgaacaatcaggaggagataaccaggcagaccag

SEQ ID NO: 16895 - DNA, 122 bp, Homo sapiens
  misc_feature (61)..(62): /note="This region represents a CpG dinucleotide"
  misc_feature (61)..(61): /note="Nucleotide may be methylated to form 5-methylcytosine"
gactgaggggaacagaatctgattgcagaatgtttttcagtgctctaaaagtcatgcatacgtaccatccctctgttttatgaccacatttgtcaaaagaactgatttgaaggagcctgttc

SEQ ID NO: 16896 - DNA, 122 bp, Homo sapiens
  misc_feature (61)..(62): /note="This region represents a CpG dinucleotide"
  misc_feature (61)..(61): /note="Nucleotide may be methylated to form 5-methylcytosine"
atatggaagaaagccttgaaaggcatcatcataagctctacgtcaatatccagaaaatatcgtcttgttttagaattctagcctgttttgtttggtagatgagtcagtctactgtaaataaa

SEQ ID NO: 16897 - DNA, 122 bp, Homo sapiens
  misc_feature (61)..(62): /note="This region represents a CpG dinucleotide"
  misc_feature (61)..(61): /note="Nucleotide may be methylated to form 5-methylcytosine"
ctgaaaaacaaggctggcttttatgaaaaacaaacaaaaactcaggtgaccagagtttcacgcatgctcagaaagcagtggcaagttaggattataataataatgttataacaataataatg

SEQ ID NO: 16898 - DNA, 122 bp, Homo sapiens
  misc_feature (61)..(62): /note="This region represents a CpG dinucleotide"
  misc_feature (61)..(61): /note="Nucleotide may be methylated to form 5-methylcytosine"
cacacccactcacatccacacacctgtacacatacacactcacatgcacactcagactcacgcacacagagaactgttttggcaggacaaacattgcttatcatggagaggatttcaattcc

SEQ ID NO: 16899 - DNA, 122 bp, Homo sapiens
  misc_feature (61)..(62): /note="This region represents a CpG dinucleotide"
  misc_feature (61)..(61): /note="Nucleotide may be methylated to form 5-methylcytosine"
ctatggctgcagcgatgaggtcatagaagcaggccagttagctctgcctttcagcagaagcggttccccaagagagttgccagcagagacctgtcagtgaagagccttcctaagagctgggg

SEQ ID NO: 16900 - DNA, 122 bp, Homo sapiens
  misc_feature (61)..(62): /note="This region represents a CpG dinucleotide"
  misc_feature (61)..(61): /note="Nucleotide may be methylated to form 5-methylcytosine"
accccagccgcgtcctctagcctcacaggacccgcctgcacctcttctggtttcttccctcgtggctcgggctcacccctggctcgtcaaacctcgcccgttgtccccgagaccccttcctg

SEQ ID NO: 16901 - DNA, 122 bp, Homo sapiens
  misc_feature (61)..(62): /note="This region represents a CpG dinucleotide"
  misc_feature (61)..(61): /note="Nucleotide may be methylated to form 5-methylcytosine"
tcactgaaggctctgtaattctctgcagtcaggcctgcctcagcccctcctctgaaattgcgctccctgaggttgataatgacttcttcagtgtatgatcctgtggacaggattcagaactt

SEQ ID NO: 16902 - DNA, 122 bp, Homo sapiens
  misc_feature (61)..(62): /note="This region represents a CpG dinucleotide"
  misc_feature (61)..(61): /note="Nucleotide may be methylated to form 5-methylcytosine"
tcattatcgttatcggatctgattgttgcaataggctagtgcggagtcacctgaactatccgagcaaaataagaataccgcagatgccccaccatcagccagaagcgggtagagccgtcacg

SEQ ID NO: 16903 - DNA, 122 bp, Homo sapiens
  misc_feature (61)..(62): /note="This region represents a CpG dinucleotide"
  misc_feature (61)..(61): /note="Nucleotide may be methylated to form 5-methylcytosine"
ctaagacctgcatgtcacttacctccagcagctcaagacactgtggctccagaggcagcccgagtatcccgggaagagtgctcccacatgtttgaccactctgccatcatcaagccctgact

SEQ ID NO: 16904 - DNA, 122 bp, Homo sapiens
  misc_feature (61)..(62): /note="This region represents a CpG dinucleotide"
  misc_feature (61)..(61): /note="Nucleotide may be methylated to form 5-methylcytosine"
tgaaagatcagccatcattacagcaaatattatcattattacctccctgttgcagttctgcgctgtcacaaacgactctgctggtgtggctgtccctccgtctgctgtgggggcttcttgca

SEQ ID NO: 16905 - DNA, 122 bp, Homo sapiens
  misc_feature (61)..(62): /note="This region represents a CpG dinucleotide"
  misc_feature (61)..(61): /note="Nucleotide may be methylated to form 5-methylcytosine"
gagggtgatagttattcaccttctacaagaaaattgccttcactttgattccaactagaacgcctggttgcaatggctcattaagaatgttgcaacttctttccgcccaagtagactctcaa

SEQ ID NO: 16906 - DNA, 122 bp, Homo sapiens
  misc_feature (61)..(62): /note="This region represents a CpG dinucleotide"
  misc_feature (61)..(61): /note="Nucleotide may be methylated to form 5-methylcytosine"
agaaaccaaactttgtgaaacaggaagggtaataaagattcccgtgtatctgggcggccacgaagcatcatggagtttttgttttgtgtctccgtggagttaactggttttagcagttctac

SEQ ID NO: 16907 - DNA, 122 bp, Homo sapiens
  misc_feature (61)..(62): /note="This region represents a CpG dinucleotide"
  misc_feature (61)..(61): /note="Nucleotide may be methylated to form 5-methylcytosine"
tagcttttcaggaacaatgtgaagatacattagaattgccacatccatatcttcaaaacacgcaacctctgcaccctaataactgcttacggtataatcagtatgatgatgagattgagggg

SEQ ID NO: 16908 - DNA, 122 bp, Homo sapiens
  misc_feature (61)..(62): /note="This region represents a CpG dinucleotide"
  misc_feature (61)..(61): /note="Nucleotide may be methylated to form 5-methylcytosine"
gaactgaatagaaggtgaactggtaactccctggaaagaaaggccttatcatttatgggacgaatgctgtcaaccttcatggtgtggcataatgtgataagttatggacactaccaagcgtg

SEQ ID NO: 16909 - DNA, 122 bp, Homo sapiens
  misc_feature (61)..(62): /note="This region represents a CpG dinucleotide"
  misc_feature (61)..(61): /note="Nucleotide may be methylated to form 5-methylcytosine"
gggatggttagaaaaggtgcttatgtacttccactctttctcttatatccctgccactatcgtgggaacatacccaggctagcctactgggagaataagagaattacatgagagacagctga

SEQ ID NO: 16910 - DNA, 122 bp, Homo sapiens
  misc_feature (61)..(62): /note="This region represents a CpG dinucleotide"
  misc_feature (61)..(61): /note="Nucleotide may be methylated to form 5-methylcytosine"
tccccgctgcagctgaggctggagtttggagtttgacccgcttggaggctctctcagcagcgggcatataggaggaagggtcactgctgtctccggaagctcttggctgcaaagagagagga

SEQ ID NO: 16911 - DNA, 122 bp, Homo sapiens
  misc_feature (61)..(62): /note="This region represents a CpG dinucleotide"
  misc_feature (61)..(61): /note="Nucleotide may be methylated to form 5-methylcytosine"
ctccccacgacagataatgagcagcaagtgcttctggcgacttagggtgatgtgaaatcacgctgggaatcctgctcctcctcaggtcctggcagtttcagggcccctccctaggccttact

SEQ ID NO: 16912 - DNA, 122 bp, Homo sapiens
  misc_feature (61)..(62): /note="This region represents a CpG dinucleotide"
  misc_feature (61)..(61): /note="Nucleotide may be methylated to form 5-methylcytosine"
gacctcaggtgatccacccatctcagcctcccaaagggctgggattacaggtgtgagccacggtgcctggcctctggatgttttcagtagtaatgatgatgcactatttatgctagcccttg

SEQ ID NO: 16913 - DNA, 122 bp, Homo sapiens
  misc_feature (61)..(62): /note="This region represents a CpG dinucleotide"
  misc_feature (61)..(61): /note="Nucleotide may be methylated to form 5-methylcytosine"
ctgctctccctggggcccacaggggctgctttggcagcatccaggcaggaggctgcatgacgttaccaggccagtgtttggtccaggttcctcagaaatcacacctggttacacgtgaacca

SEQ ID NO: 16914 - DNA, 122 bp, Homo sapiens
  misc_feature (61)..(62): /note="This region represents a CpG dinucleotide"
  misc_feature (61)..(61): /note="Nucleotide may be methylated to form 5-methylcytosine"
atttgcagtcaaagaccctgccactgctctgccattaggagagaaatcccgacaaggaatcgtgatggtaaattaaacaacatagtccccagaatgcgattaatgcatgtcataaaaccagg

SEQ ID NO: 16915 - DNA, 122 bp, Homo sapiens
  misc_feature (61)..(62): /note="This region represents a CpG dinucleotide"
  misc_feature (61)..(61): /note="Nucleotide may be methylated to form 5-methylcytosine"
tgtcatagtcggcttccggccaccgtcggtcagatgactctaagcacacaaggccagggtcgccttgccaaatggcagcaaagcatggccaaaagcagagtctcgaaatacccccagggccc

SEQ ID NO: 16916 - DNA, 122 bp, Homo sapiens
  misc_feature (61)..(62): /note="This region represents a CpG dinucleotide"
  misc_feature (61)..(61): /note="Nucleotide may be methylated to form 5-methylcytosine"
aaagaaacccacagttatacaaacaagagaaagggtgctttgtgcatgcctagagacatacgcacaactacacagataagggagagttatgcagacagcttttcagataagagaagttactc

SEQ ID NO: 16917 - DNA, 122 bp, Homo sapiens
  misc_feature (61)..(62): /note="This region represents a CpG dinucleotide"
  misc_feature (61)..(61): /note="Nucleotide may be methylated to form 5-methylcytosine"
ctcattgttggctggtgagtcagagtcaatacacagtttcccacttcctaggtcaaactgcgggttataagtaataatcaatgtggaaaactagaattccatgggatgactaaataacatag

SEQ ID NO: 16918 - DNA, 122 bp, Homo sapiens
  misc_feature (61)..(62): /note="This region represents a CpG dinucleotide"
  misc_feature (61)..(61): /note="Nucleotide may be methylated to form 5-methylcytosine"
tgactcctcaaatctcatactgtcattgccagaacagtccagaatatctggaggcctacacgtgaaatgacagtcatccgtctttgagtatatcgggcacaccctcccctacatccccgccc

SEQ ID NO: 16919 - DNA, 122 bp, Homo sapiens
  misc_feature (61)..(62): /note="This region represents a CpG dinucleotide"
  misc_feature (61)..(61): /note="Nucleotide may be methylated to form 5-methylcytosine"
ttttggttctgtttacattcttgtcagaaagcccgctattttaagtcagcgcctctcaaacgtgaatgcgcataaggatcacccagggatcttgccacagcctaagtcctgatttgggagtt

SEQ ID NO: 16920 - DNA, 122 bp, Homo sapiens
  misc_feature (61)..(62): /note="This region represents a CpG dinucleotide"
  misc_feature (61)..(61): /note="Nucleotide may be methylated to form 5-methylcytosine"
aaagagaaggaagcggaggtcccgatccttcgaggtcaccgggcaaggggtgaggcgaggcgcaggggtgggtgtctaggcactcccatagcagctggaggcctgagggctggatttctcca

SEQ ID NO: 16921 - DNA, 122 bp, Homo sapiens
  misc_feature (61)..(62): /note="This region represents a CpG dinucleotide"
  misc_feature (61)..(61): /note="Nucleotide may be methylated to form 5-methylcytosine"
taataaatgctctagctctaccatacaacccttttccttctttctttttatcaacaccatcgccatgagaagagcaaaaacaagtgtgcctgtattttgagggttctcatagtcatcaacat

SEQ ID NO: 16922 - DNA, 122 bp, Homo sapiens
  misc_feature (61)..(62): /note="This region represents a CpG dinucleotide"
  misc_feature (61)..(61): /note="Nucleotide may be methylated to form 5-methylcytosine"
atagggaattataacacagtgtcatcaagttcgtggtagaagtacaggatgcagcagggccgcatcagctaccttatgcagcgctgttgggtcatggatgacttcttagagaaagtgacagc

SEQ ID NO: 16923 - DNA, 122 bp, Homo sapiens
  misc_feature (61)..(62): /note="This region represents a CpG dinucleotide"
  misc_feature (61)..(61): /note="Nucleotide may be methylated to form 5-methylcytosine"
ccccaggaggggactccagggcaagttcagattgggagcagataccgtccgacgggcgggcgcttggagtttctggacctgcgggtcaccagggatgcggggtccggggatcccttgtcccc

SEQ ID NO: 16924 - DNA, 122 bp, Homo sapiens
  misc_feature (61)..(62): /note="This region represents a CpG dinucleotide"
  misc_feature (61)..(61): /note="Nucleotide may be methylated to form 5-methylcytosine"
ggttttatttctaagcaccacagctgcccaggaaagacatctggctctggcaactgacctcgtagagaactgggcctggctatctgcatttcaagcttgattccagaactcccccatcatgc

SEQ ID NO: 16925 - DNA, 122 bp, Homo sapiens
  misc_feature (61)..(62): /note="This region represents a CpG dinucleotide"
  misc_feature (61)..(61): /note="Nucleotide may be methylated to form 5-methylcytosine"
tgaaattgcagcacgctaagcaataaggaaacaaaaattaaaaagcaaaacttccaggagcgccctataaagcttaagaataaaagaatgaaaaaataatgtatgttatttactggctggag

SEQ ID NO: 16926 - DNA, 122 bp, Homo sapiens
  misc_feature (61)..(62): /note="This region represents a CpG dinucleotide"
  misc_feature (61)..(61): /note="Nucleotide may be methylated to form 5-methylcytosine"
catttttagtagagatggggtttctgcattttggtcaggctggtctggaacttccgacttcggatgatcctctcgccttggcctcccaaagtgctgggattacaggcgtgagccaccgcacc

SEQ ID NO: 16927 - DNA, 122 bp, Homo sapiens
  misc_feature (61)..(62): /note="This region represents a CpG dinucleotide"
  misc_feature (61)..(61): /note="Nucleotide may be methylated to form 5-methylcytosine"
cctcatgagccaggaccttcctcagccacatctggatcctcagcccctcacagcacacagcggtagtcagaaagtatgctgagtaagtggagaacaagttaacattgattttcacaaccacg

SEQ ID NO: 16928 - DNA, 122 bp, Homo sapiens
  misc_feature (61)..(62): /note="This region represents a CpG dinucleotide"
  misc_feature (61)..(61): /note="Nucleotide may be methylated to form 5-methylcytosine"
gaagaggcagtcgggctgattttacatgcacctctgcacttagagggatcagggcgttctcgcatgaaatcccatttttcatgaagctcctggatacctcagagataaagttatccacataa

SEQ ID NO: 16929 - DNA, 122 bp, Homo sapiens
  misc_feature (61)..(62): /note="This region represents a CpG dinucleotide"
  misc_feature (61)..(61): /note="Nucleotide may be methylated to form 5-methylcytosine"
aggttaagcacagaactggactgtttgtatcaaggaaattcgtggagcttgttctcctgccgctatagcagctggtattgcctggtctaatgtcccttctttgatttcattgttaagccctc

SEQ ID NO: 16930 - DNA, 122 bp, Homo sapiens
  misc_feature (61)..(62): /note="This region represents a CpG dinucleotide"
  misc_feature (61)..(61): /note="Nucleotide may be methylated to form 5-methylcytosine"
gagatggtttcaaaaaggaggtcatggacagcagaggcaaatgctgctgagaggttaatacgagaacctaaaaatgtctcctggatttcacaacatgtagatcatcagtgagctcagtggaa

SEQ ID NO: 16931 - DNA, 122 bp, Homo sapiens
  misc_feature (61)..(62): /note="This region represents a CpG dinucleotide"
  misc_feature (61)..(61): /note="Nucleotide may be methylated to form 5-methylcytosine"
tataaatgctttccatgagaactgaaggaagaaggaaataggagttgcctccattgtgcacgttgcaaaacctgtctggaaggagcataggaaatggctttagctaagtgccagtagcttct

SEQ ID NO: 16932 - DNA, 122 bp, Homo sapiens
  misc_feature (61)..(62): /note="This region represents a CpG dinucleotide"
  misc_feature (61)..(61): /note="Nucleotide may be methylated to form 5-methylcytosine"
ccacccacaggcagcatcggcacagaaggtcacaaagaagacaccaggaaaccccataagcgagaaactggaaaccgcgcactctggtcacgatgaaaagataatgagaatttatcaacagt

SEQ ID NO: 16933 - DNA, 122 bp, Homo sapiens
  misc_feature (61)..(62): /note="This region represents a CpG dinucleotide"
  misc_feature (61)..(61): /note="Nucleotide may be methylated to form 5-methylcytosine"
tcttgccatcatttcccctaaaaggtgacacatggcctaaggagagtcataaaacaagcacgcacacacacaaagtctggctctggaagaaataaaaggaggaggttggggcagggtagtgt

SEQ ID NO: 16934 - DNA, 122 bp, Homo sapiens
  misc_feature (61)..(62): /note="This region represents a CpG dinucleotide"
  misc_feature (61)..(61): /note="Nucleotide may be methylated to form 5-methylcytosine"
caaatatgcagtgagaccttgatcctgtcttaacatttgatctcagacagacaaatgacacgtaaaaacacaaggtcagagtgaattagaggcaggagaatgaaacacactgatacagaatg

SEQ ID NO: 16935 - DNA, 122 bp, Homo sapiens
  misc_feature (61)..(62): /note="This region represents a CpG dinucleotide"
  misc_feature (61)..(61): /note="Nucleotide may be methylated to form 5-methylcytosine"
ttttcaaacctgtgaccttgtgcaagttcctcaaccttgccaagtctcaagagttttattcgtaaaggacaatggtatctaccacattaaggttactgtaaataataaattgtattttagtt

SEQ ID NO: 16936 - DNA, 122 bp, Homo sapiens
  misc_feature (61)..(62): /note="This region represents a CpG dinucleotide"
  misc_feature (61)..(61): /note="Nucleotide may be methylated to form 5-methylcytosine"
gacactttattggaagcttttcttgtttaccaattaaactatgacttcatgttatcacaacgctgacaaggtgtacaaactatgtaacattttgcaactacaggacagtctgcctttcacat

SEQ ID NO: 16937 - DNA, 122 bp, Homo sapiens
  misc_feature (61)..(62): /note="This region represents a CpG dinucleotide"
  misc_feature (61)..(61): /note="Nucleotide may be methylated to form 5-methylcytosine"
tggatttataaatatgagaactcggaggcaggcagaagtcatgagcaaagcatgtgacaacgaggactgctgagcagagggctgtcctcactcatgagttttcattataccagtcccgtagt

SEQ ID NO: 16938 - DNA, 122 bp, Homo sapiens
  misc_feature (61)..(62): /note="This region represents a CpG dinucleotide"
  misc_feature (61)..(61): /note="Nucleotide may be methylated to form 5-methylcytosine"
gttgtcaaagcggtcgggcctggaggggttcccagatgtccttcccgcctggtcagtgaccgcccagcggggtcaccatgcactcctccaggagggacacgcttgtcatgttggcgcttgtc

SEQ ID NO: 16939 - DNA, 122 bp, Homo sapiens
  misc_feature (61)..(62): /note="This region represents a CpG dinucleotide"
  misc_feature (61)..(61): /note="Nucleotide may be methylated to form 5-methylcytosine"
gaaccctgggaactttgctggagactttcactaataccctgacctgtattttcttcaatgcgcaactcttacctcactcaagttggttaacctctatgtgctttgatagccacggcaataaa

SEQ ID NO: 16940 - DNA, 122 bp, Homo sapiens
  misc_feature (61)..(62): /note="This region represents a CpG dinucleotide"
  misc_feature (61)..(61): /note="Nucleotide may be methylated to form 5-methylcytosine"
cataaataataggatttacctcctgtgcactgctttgaaacgtgctttggtgtctcatttcgctgtaacatttcactctgcttgcttcgcttcatcttgcctggcctgttagaccgctgtgc

SEQ ID NO: 16941 - DNA, 122 bp, Homo sapiens
  misc_feature (61)..(62): /note="This region represents a CpG dinucleotide"
  misc_feature (61)..(61): /note="Nucleotide may be methylated to form 5-methylcytosine"
ccctgaataacgaatctcagtttttcttaaggtcctcctcctctgagctacactgtgggtcgaaaagggcaggattatcataaatggaaagaagctagagacattttagttaaataaaaaga

SEQ ID NO: 16942 - DNA, 122 bp, Homo sapiens
  misc_feature (61)..(62): /note="This region represents a CpG dinucleotide"
  misc_feature (61)..(61): /note="Nucleotide may be methylated to form 5-methylcytosine"
agctggttaggtcccattgccataatggttcatatttcctagttaattaatattgctaaccgtctcatctgaggtcaagcagtccatattaagcttagggagctgtatgagacatcagaacc

SEQ ID NO: 16943 - DNA, 122 bp, Homo sapiens
  misc_feature (61)..(62): /note="This region represents a CpG dinucleotide"
  misc_feature (61)..(61): /note="Nucleotide may be methylated to form 5-methylcytosine"
tttatagtattttcttatagcagcccaaatggactaagacatgactaacacaagatattacgaaatccattcagtgctttaggcagaccagtggatttcagtgtaaaggtagaaaaagttta

SEQ ID NO: 16944 - DNA, 122 bp, Homo sapiens
  misc_feature (61)..(62): /note="This region represents a CpG dinucleotide"
  misc_feature (61)..(61): /note="Nucleotide may be methylated to form 5-methylcytosine"
tgacttagagatgagtaaatcaccggttattacaagaagtttccaaaagctgtgttgctgcggtgaaacctgctaaaaacaaggtgactcatgctgttgtttagaagctggatgacagaaac

SEQ ID NO: 16945 - DNA, 122 bp, Homo sapiens
  misc_feature (61)..(62): /note="This region represents a CpG dinucleotide"
  misc_feature (61)..(61): /note="Nucleotide may be methylated to form 5-methylcytosine"
gtcacacactccagggacctgctggtacataaagtcggggcagcctggtggggtccgggccgcctggagagtaggtgtcctgagcgctgggcccagcccatcgtgatacatctaatgataaa

SEQ ID NO: 16946 - DNA, 122 bp, Homo sapiens
  misc_feature (61)..(62): /note="This region represents a CpG dinucleotide"
  misc_feature (61)..(61): /note="Nucleotide may be methylated to form 5-methylcytosine"
aggagtaagggaaataggtggtgagggaaggtgatgacaatgaagtaaattagcaaagaacgagaggcttgaagaccacaatttatggcttctgtttatagttttggcatcttcagtctggc

SEQ ID NO: 16947 - DNA, 122 bp, Homo sapiens
  misc_feature (61)..(62): /note="This region represents a CpG dinucleotide"
  misc_feature (61)..(61): /note="Nucleotide may be methylated to form 5-methylcytosine"
gagaaaacaggcatgttaaagcggttaagcaacgtcctcgaggtcactcagccagtaagacgttaactgagcctaggttcaatctaggtctatcaggcagcaaagtgttttattacttggga

SEQ ID NO: 16948 - DNA, 122 bp, Homo sapiens
  misc_feature (61)..(62): /note="This region represents a CpG dinucleotide"
  misc_feature (61)..(61): /note="Nucleotide may be methylated to form 5-methylcytosine"
ggaaaagacaaagttcttgggaactggccacgtaggccaggtccctaagcaattccatcccgcaccctaacaccccgactggtgttcctgggtccctaacattgtctgtacccgcttcggag

SEQ ID NO: 16949 - DNA, 122 bp, Homo sapiens
  misc_feature (61)..(62): /note="This region represents a CpG dinucleotide"
  misc_feature (61)..(61): /note="Nucleotide may be methylated to form 5-methylcytosine"
ctgtccaattgtcctttctttttcatgcaatatagattatttaaacagccactctcactgcgagtcaaataaaatgggttggtgacacagagaatggactccgacgaatgttttatttcctt

SEQ ID NO: 16950 - DNA, 122 bp, Homo sapiens
  misc_feature (61)..(62): /note="This region represents a CpG dinucleotide"
  misc_feature (61)..(61): /note="Nucleotide may be methylated to form 5-methylcytosine"
ttgcgggtagaactattgaggtaggtcagaggggacagcagggaaactcagctgaaatcacggccatcctgggctagccctggggtccccaggatcttgttcaaccccacaccccagaaaga

SEQ ID NO: 16951 - DNA, 122 bp, Homo sapiens
  misc_feature (61)..(62): /note="This region represents a CpG dinucleotide"
  misc_feature (61)..(61): /note="Nucleotide may be methylated to form 5-methylcytosine"
gaggaaaccacagacacagagaaaaattcttcttaattaaaaataaaacgaaaactaagacggaggcatgatgctgggtcaaggtaccaccacactgctaaaaccagatgaaagaatggtgt

SEQ ID NO: 16952 - DNA, 122 bp, Homo sapiens
  misc_feature (61)..(62): /note="This region represents a CpG dinucleotide"
  misc_feature (61)..(61): /note="Nucleotide may be methylated to form 5-methylcytosine"
ttgaagtgtccgatccagtccttcaactcagagcactcctatctgtgacacctctgcccacgcatccagtatgtgcagcacacctgctctgtgactgacactcttgcagaagtggggccact

SEQ ID NO: 16953 - DNA, 122 bp, Homo sapiens
  misc_feature (61)..(62): /note="This region represents a CpG dinucleotide"
  misc_feature (61)..(61): /note="Nucleotide may be methylated to form 5-methylcytosine"
gtttcctagcaacaggcaagtgcagcttatcacagtttgagatctctaccaaccctgaagcgtgtttctcacccaccactgactggggtgggttgggggtggacactgggaaatggggtgat

SEQ ID NO: 16954 - DNA, 122 bp, Homo sapiens
  misc_feature (61)..(62): /note="This region represents a CpG dinucleotide"
  misc_feature (61)..(61): /note="Nucleotide may be methylated to form 5-methylcytosine"
tgcagaggcgggactggggatgtcaccatgggacagagccagggagtgccacaagaagggcgggcagctcccagagctagtggggcctactaaggccagagcacaagcaccagacagcccag

SEQ ID NO: 16955 - DNA, 122 bp, Homo sapiens
  misc_feature (61)..(62): /note="This region represents a CpG dinucleotide"
  misc_feature (61)..(61): /note="Nucleotide may be methylated to form 5-methylcytosine"
atatgagactcagtaaccccagctgaatcactgaatccctcttgctatgaactctacagccggctgcatagagctctttgtgtgaaaataagcttattatcaaaacattccacacctgaaat

SEQ ID NO: 16956 - DNA, 122 bp, Homo sapiens
  misc_feature (61)..(62): /note="This region represents a CpG dinucleotide"
  misc_feature (61)..(61): /note="Nucleotide may be methylated to form 5-methylcytosine"
tcaggaaggtgttttgagatttgtagagtctgtgaacagataagaatcgaattctcacttcgtcactctagaaactgctgaccttagagagacttttctgtggccaggcttatgtctgagga

SEQ ID NO: 16957 - DNA, 122 bp, Homo sapiens
  misc_feature (61)..(62): /note="This region represents a CpG dinucleotide"
  misc_feature (61)..(61): /note="Nucleotide may be methylated to form 5-methylcytosine"
ataattcgtttttatattcccccatgagaaattttgtgtgcttttctgcctcctacctgccgccctcactacttatatttgtccacttaatcaggacgacagacctaacttttgtttacact

SEQ ID NO: 16958 - DNA, 122 bp, Homo sapiens
  misc_feature (61)..(62): /note="This region represents a CpG dinucleotide"
  misc_feature (61)..(61): /note="Nucleotide may be methylated to form 5-methylcytosine"
accctggcgcccttgaagaccaggttctgcataaacaggaggtcctgtcacaggcctttccgctcagctcagcatgaggaggagaatcaacctgttcctcccctggccacgcccaagacgag

SEQ ID NO: 16959 - DNA, 122 bp, Homo sapiens
  misc_feature (61)..(62): /note="This region represents a CpG dinucleotide"
  misc_feature (61)..(61): /note="Nucleotide may be methylated to form 5-methylcytosine"
tagctcactgtaacatattctactactagagtttcatattcattgcttgtcttcctaatacgtagatataaactcaggcgagcaggctatttctgttcttgttgttcgctgctgtctccctg

SEQ ID NO: 16960 - DNA, 122 bp, Homo sapiens
  misc_feature (61)..(62): /note="This region represents a CpG dinucleotide"
  misc_feature (61)..(61): /note="Nucleotide may be methylated to form 5-methylcytosine"
cctcctcagtattctgcttggttctatttttctgaagttgattaattggtgactgcctcacgaagactagccacatatttcatctccatcaagaagaaagatttattccaatgactttgctg

SEQ ID NO: 16961 - DNA, 122 bp, Homo sapiens
  misc_feature (61)..(62): /note="This region represents a CpG dinucleotide"
  misc_feature (61)..(61): /note="Nucleotide may be methylated to form 5-methylcytosine"
tatgtagtctattttctaatctggctaaaaccggtttggttctcatgactctgtaatacacgggtagtacagaaaacctcagtgcttaaaggggaaacaaaactaaaataacttactggtct

SEQ ID NO: 16962 - DNA, 122 bp, Homo sapiens
  misc_feature (61)..(62): /note="This region represents a CpG dinucleotide"
  misc_feature (61)..(61): /note="Nucleotide may be methylated to form 5-methylcytosine"
gggagaagcctgcgagggcatgagctttaggcattggacagagggagggtgggtgggaggcggggacttgggggatctcaggattggggtactttgttgtccctcccactgctgtatgaaaa

SEQ ID NO: 16963 - DNA, 122 bp, Homo sapiens
  misc_feature (61)..(62): /note="This region represents a CpG dinucleotide"
  misc_feature (61)..(61): /note="Nucleotide may be methylated to form 5-methylcytosine"
ggcctgtgaggatcatctggggcctggtatgggtgaagtcaggggcaaggttggggctgacgtggattctctcttcctctctcgggcacaggagccaagccgccatggcctaccacagcttc

SEQ ID NO: 16964 - DNA, 122 bp, Homo sapiens
  misc_feature (61)..(62): /note="This region represents a CpG dinucleotide"
  misc_feature (61)..(61): /note="Nucleotide may be methylated to form 5-methylcytosine"
ggtcacacgttaaagagcgtccactacccaaagaacaggcctctctgagcactcagaggacgcggttcccacacgcacacaacagtcggccccggggaaatgctctgcaaagtgagctttaa

SEQ ID NO: 16965 - DNA, 122 bp, Homo sapiens
  misc_feature (61)..(62): /note="This region represents a CpG dinucleotide"
  misc_feature (61)..(61): /note="Nucleotide may be methylated to form 5-methylcytosine"
agatctgtttgaggttctcctgcttctgagagtgatctcctgtgtgggctgtcagcttgacgtaccatagaacataaggctaaaaatgcgaggtctattgttgtataaagtttatgtggttt

SEQ ID NO: 16966 - DNA, 122 bp, Homo sapiens
  misc_feature (61)..(62): /note="This region represents a CpG dinucleotide"
  misc_feature (61)..(61): /note="Nucleotide may be methylated to form 5-methylcytosine"
ctttccaaaatgcagtgcacttctctggagttaattcaactatcagtaactgagaactttcggattcttcttgagagttgaaaggtgacaagtaaccttctgttcagttagctcgcaaaaga

SEQ ID NO: 16967 - DNA, 122 bp, Homo sapiens
  misc_feature (61)..(62): /note="This region represents a CpG dinucleotide"
  misc_feature (61)..(61): /note="Nucleotide may be methylated to form 5-methylcytosine"
atcttgtcaccctcagacatggccctagtcagtttcgaaagtctcataaaatctcagaagcgatggaactgggcttgagggttttttagactctgaaaaacagcttttcaaaaaaacaccct

SEQ ID NO: 16968 - DNA, 122 bp, Homo sapiens
  misc_feature (61)..(62): /note="This region represents a CpG dinucleotide"
  misc_feature (61)..(61): /note="Nucleotide may be methylated to form 5-methylcytosine"
tcttgctacacgctctgtcaaataggtggccagaggcccgggtgcagatgcagtggctcacgtcagtaatcccagcactctgggaggctggtgggcggatcacttgaggccaggagtttaaa

SEQ ID NO: 16969 - DNA, 122 bp, Homo sapiens
  misc_feature (61)..(62): /note="This region represents a CpG dinucleotide"
  misc_feature (61)..(61): /note="Nucleotide may be methylated to form 5-methylcytosine"
gccttggccacccaaagtcctgggattacaggtgtgagccaccgcacccagccaggattacggtctctggctgactgagcctgggtcatgccaaagcagcccttgcacatctcccatgcctc

SEQ ID NO: 16970 - DNA, 122 bp, Homo sapiens
  misc_feature (61)..(62): /note="This region represents a CpG dinucleotide"
  misc_feature (61)..(61): /note="Nucleotide may be methylated to form 5-methylcytosine"
ctgggaaccgcctgaggatttctgggcgaccaggagccagggccgccaccgttcccgggacggggaagaggaggttcacatttcactcctggaaggagaaaatggaaaatgttctaccggga

SEQ ID NO: 16971 - DNA, 122 bp, Homo sapiens
  misc_feature (61)..(62): /note="This region represents a CpG dinucleotide"
  misc_feature (61)..(61): /note="Nucleotide may be methylated to form 5-methylcytosine"
gtgtgagtcaggcaggcctggtccaacatcccatcagccagtgctccccagctgcttccccggaatgcctggctgaaccccaacaaggccagcccctgcaggcagatggctctgagactctt

SEQ ID NO: 16972 - DNA, 122 bp, Homo sapiens
  misc_feature (61)..(62): /note="This region represents a CpG dinucleotide"
  misc_feature (61)..(61): /note="Nucleotide may be methylated to form 5-methylcytosine"
ggactgtccagcctcctcgctaccacttagcccctgtaaaggaggaagtccctttgtcaacggacatgagaatgctgtttggccaatgaccatagtctgccctccagggcccgtgaagatgg

SEQ ID NO: 16973 - DNA, 122 bp, Homo sapiens
  misc_feature (61)..(62): /note="This region represents a CpG dinucleotide"
  misc_feature (61)..(61): /note="Nucleotide may be methylated to form 5-methylcytosine"
tctctggaaccctgtctagcagcaggaatggcgcagtgactcctggaaggcctattcaaccgcaaatctacaattgattgatgactcctttaggttttgcaggaagtcacagcaataatcca

SEQ ID NO: 16974 - DNA, 122 bp, Homo sapiens
  misc_feature (61)..(62): /note="This region represents a CpG dinucleotide"
  misc_feature (61)..(61): /note="Nucleotide may be methylated to form 5-methylcytosine"
attggaatactcctgcacttttctccctttgaatcccaccacggaaagaaaattctgtgacgtgtacccagtatttattggagggtatttcctagcaagaaaatgagggcgattgaccaggc

SEQ ID NO: 16975 - DNA, 122 bp, Homo sapiens
  misc_feature (61)..(62): /note="This region represents a CpG dinucleotide"
  misc_feature (61)..(61): /note="Nucleotide may be methylated to form 5-methylcytosine"
gttgggagaggaaggctaagatggcctgaggtttcctggaatttgcgtgacctccagtggcgttcagtattttgtgtcttacctgttggtttctgcagactgtgtggcctcagcaacagagg

SEQ ID NO: 16976 - DNA, 122 bp, Homo sapiens
  misc_feature (61)..(62): /note="This region represents a CpG dinucleotide"
  misc_feature (61)..(61): /note="Nucleotide may be methylated to form 5-methylcytosine"
acttctgtttatgcatttcagatgcgtgtgcatgtcactacacgttcttataagcactgacgtaatactttctccttctgaatattgatatgtttttgtttggcattacacaggcagaatct

SEQ ID NO: 16977 - DNA, 122 bp, Homo sapiens
  misc_feature (61)..(62): /note="This region represents a CpG dinucleotide"
  misc_feature (61)..(61): /note="Nucleotide may be methylated to form 5-methylcytosine"
taaataacttgcctaggctcatactcctgctaaatcttacagccaggattaaaaccaaggcggtctgacttcagagcctgtgccctgaaccacaaaaccatgctgcctctctgagtatgaag

SEQ ID NO: 16978 - DNA, 122 bp, Homo sapiens
  misc_feature (61)..(62): /note="This region represents a CpG dinucleotide"
  misc_feature (61)..(61): /note="Nucleotide may be methylated to form 5-methylcytosine"
gcatattatctaaaagtgtcatgaaaccctgggcagcggacctcaaaggacagtccctggcgtccgaatgagtggcatcaccagagagcttgttagaaatgcaaaccttccggcctcaccag

SEQ ID NO: 16979 - DNA, 122 bp, Homo sapiens
  misc_feature (61)..(62): /note="This region represents a CpG dinucleotide"
  misc_feature (61)..(61): /note="Nucleotide may be methylated to form 5-methylcytosine"
ggtatggcaataacaagaaagctttcaaatccttgataactccagcaatcctggactgttcgttagggaaaagatcgatcttataaagggaatagagagaaaacaagaaaataattttttaa

SEQ ID NO: 16980 - DNA, 122 bp, Homo sapiens
  misc_feature (61)..(62): /note="This region represents a CpG dinucleotide"
  misc_feature (61)..(61): /note="Nucleotide may be methylated to form 5-methylcytosine"
gctgcggtgagctgtgatagcaccattgcacaatctaaactgggccacagagcaagacctcgtctccaaaggaaaaaaaaaaaaaagaccaccatgattgttctagtattgtttattgttgt

SEQ ID NO: 16981 - DNA, 122 bp, Homo sapiens
  misc_feature (61)..(62): /note="This region represents a CpG dinucleotide"
  misc_feature (61)..(61): /note="Nucleotide may be methylated to form 5-methylcytosine"
ttctgagctttaatcctctgtgccagataatttcagactcaaaccttttctagtcctctgcgattcttctcagccatcaggcactgcctacaatacgtaagaggcagcaaaagatacttgga

SEQ ID NO: 16982 - DNA, 122 bp, Homo sapiens
  misc_feature (61)..(62): /note="This region represents a CpG dinucleotide"
  misc_feature (61)..(61): /note="Nucleotide may be methylated to form 5-methylcytosine"
tgcttgaggcggtgctacaaatgaagtccttctccaaatgcattgagccccaagaaaaatcgctgattctgaggaaccttccaactttaacaatttcaggacgtccctaagctgagctagga

SEQ ID NO: 16983 - DNA, 122 bp, Homo sapiens
  misc_feature (61)..(62): /note="This region represents a CpG dinucleotide"
  misc_feature (61)..(61): /note="Nucleotide may be methylated to form 5-methylcytosine"
cagagcagcaggcacaacgctgcatccctgagtttcctcttcaagtcacgtgaacacaaccgttgctcttatttatgaaccaggaacacaggtgtcagggagggtcaatgcacggtcaattg

SEQ ID NO: 16984 - DNA, 122 bp, Homo sapiens
  misc_feature (61)..(62): /note="This region represents a CpG dinucleotide"
  misc_feature (61)..(61): /note="Nucleotide may be methylated to form 5-methylcytosine"
ccttaaatgacccagcaggcagtacatgctacatgtgtgaaccatcatcattgtcatcatcgtcatcattacccagtgtaaaaagcctctttaccagtgaaatggggcacctgacaatgcat

SEQ ID NO: 16985 - DNA, 122 bp, Homo sapiens
  misc_feature (61)..(62): /note="This region represents a CpG dinucleotide"
  misc_feature (61)..(61): /note="Nucleotide may be methylated to form 5-methylcytosine"
tttttgaaccagtttcccaggagattcatgtgcggtgcgtttaggatccaaggggctggacggctttcacagtccagcttagagtgatctggttctgacaggacagagctgtctgaacaatg

SEQ ID NO: 16986 - DNA, 122 bp, Homo sapiens
  misc_feature (61)..(62): /note="This region represents a CpG dinucleotide"
  misc_feature (61)..(61): /note="Nucleotide may be methylated to form 5-methylcytosine"
tgttcagcctggcttccttgagcaagcaacttattcacaggtaagtccaaattaatacagcgcacaccggctacataaatattgtgctttgattgtcttctgtaatcaaaggcaaggctgct

SEQ ID NO: 16987 - DNA, 122 bp, Homo sapiens
  misc_feature (61)..(62): /note="This region represents a CpG dinucleotide"
  misc_feature (61)..(61): /note="Nucleotide may be methylated to form 5-methylcytosine"
gagccagattgcagggtgtgaatcccatttactagctctgtgatttggggcaggttaactcgctgtgcctctttcttcatttgggctgttgtgaggatttagtgaattcatatatataagcc

SEQ ID NO: 16988 - DNA, 122 bp, Homo sapiens
  misc_feature (61)..(62): /note="This region represents a CpG dinucleotide"
  misc_feature (61)..(61): /note="Nucleotide may be methylated to form 5-methylcytosine"
agacttcagaaaagaactacatgaactgacctctataccttctttatgctctttcacaatcgtttaatttttatcttgagaaatagttgagaaggtgaaaatgaatatgagaaaatactctt

SEQ ID NO: 16989 - DNA, 122 bp, Homo sapiens
  misc_feature (61)..(62): /note="This region represents a CpG dinucleotide"
  misc_feature (61)..(61): /note="Nucleotide may be methylated to form 5-methylcytosine"
tcatccaaacaggcaagtgttggcctttattttgatggtgttcttgtctcaggttcgcctcgagcctattcgttattctgtgttggaggaaacagagagcggctcctttgtagcccatctgg

SEQ ID NO: 16990 - DNA, 122 bp, Homo sapiens
  misc_feature (61)..(62): /note="This region represents a CpG dinucleotide"
  misc_feature (61)..(61): /note="Nucleotide may be methylated to form 5-methylcytosine"
atctgcctctgccatgttgggcaactcaggccgagcatttacatgagagggcaatggcctcgttacctcactcttgctccatccctctctccagctgacaatggcatacaccagggccacac

SEQ ID NO: 16991 - DNA, 122 bp, Homo sapiens
  misc_feature (61)..(62): /note="This region represents a CpG dinucleotide"
  misc_feature (61)..(61): /note="Nucleotide may be methylated to form 5-methylcytosine"
ccaatctgctgtggggcggttcctgataaggaaactgggtgagtacctggtggcctttttcgtgtgtgtgtgtgtgtgtgtgtgtgtgtgtgtgtgtgtgttggtgataattgtgttgcatc

SEQ ID NO: 16992 - DNA, 122 bp, Homo sapiens
  misc_feature (61)..(62): /note="This region represents a CpG dinucleotide"
  misc_feature (61)..(61): /note="Nucleotide may be methylated to form 5-methylcytosine"
tttcctgatttataattaagtttcattatcttcagttcccagtagaggaacagagatgcacgaagcttatttgttcactgataagagttaagttgtttaacagacttcgcagaacagtatca

SEQ ID NO: 16993 - DNA, 122 bp, Homo sapiens
  misc_feature (61)..(62): /note="This region represents a CpG dinucleotide"
  misc_feature (61)..(61): /note="Nucleotide may be methylated to form 5-methylcytosine"
gtgaaacacggtgctgcattaggtgcatacaggacggtgcatacaggagctagacagacccgcattataaccctgaatcatctacttgttgactgtgtcatttcaggaaaatttttcatagg

SEQ ID NO: 16994 - DNA, 122 bp, Homo sapiens
  misc_feature (61)..(62): /note="This region represents a CpG dinucleotide"
  misc_feature (61)..(61): /note="Nucleotide may be methylated to form 5-methylcytosine"
ccttgttagcttgcaagtaagtttcagacccttcacagttcttgacagtcatccataactcgctttgtatgctataatatctaaggtgtctaactccaaggtgtctagaacagagtaggtga

SEQ ID NO: 16995 - DNA, 122 bp, Homo sapiens
  misc_feature (61)..(62): /note="This region represents a CpG dinucleotide"
  misc_feature (61)..(61): /note="Nucleotide may be methylated to form 5-methylcytosine"
aaccagactctatcttgggaatgtgaattgagaaatatagacttgagatcagtttgttcacgagacacaataaaggaaattagctttggagaaagttctttgtcaggaactctcctgtcgca

SEQ ID NO: 16996 - DNA, 122 bp, Homo sapiens
  misc_feature (61)..(62): /note="This region represents a CpG dinucleotide"
  misc_feature (61)..(61): /note="Nucleotide may be methylated to form 5-methylcytosine"
gctgtgacagggtgaggatgcatgagaagacacggagacagctgattctgcccacgtggccggcagggctccagagtggagtcgggctttggagatgctcagagtggccatggctggttaga

SEQ ID NO: 16997 - DNA, 122 bp, Homo sapiens
  misc_feature (61)..(62): /note="This region represents a CpG dinucleotide"
  misc_feature (61)..(61): /note="Nucleotide may be methylated to form 5-methylcytosine"
gcggggctctgcagtggagcctgagccgtgccggccgaggcgtggtgtgggggaggctgccggccctctcgcgcgcggggtgttcacgcctagagcgctggggctgggggcctaccacccgg

SEQ ID NO: 16998 - DNA, 122 bp, Homo sapiens
  misc_feature (61)..(62): /note="This region represents a CpG dinucleotide"
  misc_feature (61)..(61): /note="Nucleotide may be methylated to form 5-methylcytosine"
cgagggggcggagggggagcccgggaggcttcggattgctgggacggcccgtgactgctgcgtccacatctgcagactggccctgtggatgaggagaccttcctgaaagctgcggtggaggg

SEQ ID NO: 16999 - DNA, 122 bp, Homo sapiens
  misc_feature (61)..(62): /note="This region represents a CpG dinucleotide"
  misc_feature (61)..(61): /note="Nucleotide may be methylated to form 5-methylcytosine"
aagcattgcctcctttgtgaggcctttcttcttcctgctaagaactggccactccctcctcgatcctccccatggaagcagaggtagactctcatcgcagtgcccaccatacttctttgctc

SEQ ID NO: 17000 - DNA, 122 bp, Homo sapiens
  misc_feature (61)..(62): /note="This region represents a CpG dinucleotide"
  misc_feature (61)..(61): /note="Nucleotide may be methylated to form 5-methylcytosine"
ctttacacttgagagaactgaggcacagagaagttaagtaacttacccagagtcacacagcgaggaaataccaagcccaagattgggacccaggtagtctggcttcagagtctctgcttcat

SEQ ID NO: 17001 - DNA, 122 bp, Homo sapiens
  misc_feature (61)..(62): /note="This region represents a CpG dinucleotide"
  misc_feature (61)..(61): /note="Nucleotide may be methylated to form 5-methylcytosine"
tttggatgaaaagtagataaaccctttctcaatcagcatttcctatcagccactggcagacgtctgcaagtcttataaaaatgagacaactggggtagcttttactgcagagtccacaggaa

SEQ ID NO: 17002 - DNA, 122 bp, Homo sapiens
  misc_feature (61)..(62): /note="This region represents a CpG dinucleotide"
  misc_feature (61)..(61): /note="Nucleotide may be methylated to form 5-methylcytosine"
ggtgggcgctgagtgagggagtccccatgtctggtttcctctgtttgtccctcacctggtcgagtcccagaccctactgatcttggcctgtccagccaccaacagtaggctgccttccagtg

SEQ ID NO: 17003 - DNA, 122 bp, Homo sapiens
  misc_feature (61)..(62): /note="This region represents a CpG dinucleotide"
  misc_feature (61)..(61): /note="Nucleotide may be methylated to form 5-methylcytosine"
ccccagcagactcctttgagtgctagttggagcaggagctgtggccacgttgaccaagaccgtcctcgagaggaacctctgccctccttggcgaggctggtctgggtgtggacactgctttt

SEQ ID NO: 17004 - DNA, 122 bp, Homo sapiens
  misc_feature (61)..(62): /note="This region represents a CpG dinucleotide"
  misc_feature (61)..(61): /note="Nucleotide may be methylated to form 5-methylcytosine"
tacgaggccactgtagttcaatggtgataggctggttgaagtggagtgacatttaggatacgatattgtaagaaaatgacacaaaagggcaaagaacagaagaatggggaatgagtccatat

SEQ ID NO: 17005 - DNA, 122 bp, Homo sapiens
  misc_feature (61)..(62): /note="This region represents a CpG dinucleotide"
  misc_feature (61)..(61): /note="Nucleotide may be methylated to form 5-methylcytosine"
gctcctgaccagctaagtatcttggacaagtacgctggcctgtctctgtctgttgcatcacgtgtctcaaggaatcataacagtacctatctcataggctcattggaagtactttgaattca

SEQ ID NO: 17006 - DNA, 122 bp, Homo sapiens
  misc_feature (61)..(62): /note="This region represents a CpG dinucleotide"
  misc_feature (61)..(61): /note="Nucleotide may be methylated to form 5-methylcytosine"
agtctggtgggcagtggcgcaatcattggcttactgcagcttccaactcctcggctcaagcgatcctccagcctcagcctcccaagtagcaaggagtataggcacgtgctaatttttttaat

SEQ ID NO: 17007 - DNA, 122 bp, Homo sapiens
  misc_feature (61)..(62): /note="This region represents a CpG dinucleotide"
  misc_feature (61)..(61): /note="Nucleotide may be methylated to form 5-methylcytosine"
aagcctaggtttcagaactcagtgtcacttccttcacattatttttatcaaggcaagtcacgtggcatgaggaactagaacccacttttgataagagtaacttgtaaagtattgtggctgtg

SEQ ID NO: 17008 - DNA, 122 bp, Homo sapiens
  misc_feature (61)..(62): /note="This region represents a CpG dinucleotide"
  misc_feature (61)..(61): /note="Nucleotide may be methylated to form 5-methylcytosine"
aatagatggagagagatggatcagggcagggcaggggtggagaagtgagctagtgcagtccgggcggatgctttagaaataccctggaagtggtaataaaggcctaagttagtatgactgca

SEQ ID NO: 17009 - DNA, 122 bp, Homo sapiens
  misc_feature (61)..(62): /note="This region represents a CpG dinucleotide"
  misc_feature (61)..(61): /note="Nucleotide may be methylated to form 5-methylcytosine"
aaaccctctgcacaaggtttccgtgtttgtaaagggcagggggaagggaaatgaataaaacgtaaagcatcaggctcatccacgcccactcagtgataacacaggaatgtgactaatcacaa

SEQ ID NO: 17010 - DNA, 122 bp, Homo sapiens
  misc_feature (61)..(62): /note="This region represents a CpG dinucleotide"
  misc_feature (61)..(61): /note="Nucleotide may be methylated to form 5-methylcytosine"
tcggagttagctggctgagtccgcgctggagcggattgctggcatgtgacttctgacagccggaaatttgtaggtgtcccgcgagtttaaaacaagccatatggaagcacaagtgcttaaaa

SEQ ID NO: 17011 - DNA, 122 bp, Homo sapiens
  misc_feature (61)..(62): /note="This region represents a CpG dinucleotide"
  misc_feature (61)..(61): /note="Nucleotide may be methylated to form 5-methylcytosine"
ccatcagcccagcagagcagggtgagctgggcgggcgggcggcaggattagctcaggagacgtgagtcaccccatccccagcagccccgagaggccctgcggcctggcagttagagtgcaca

SEQ ID NO: 17012 - DNA, 122 bp, Homo sapiens
  misc_feature (61)..(62): /note="This region represents a CpG dinucleotide"
  misc_feature (61)..(61): /note="Nucleotide may be methylated to form 5-methylcytosine"
tgacctcaagtcatccacccgcctcggcttcccaaagtgctgggattacaggcccgcgcccggccggagttgaatttcttactgtggattgctggcaaagttgacaaaccactgctctaaga

SEQ ID NO: 17013 - DNA, 122 bp, Homo sapiens
  misc_feature (61)..(62): /note="This region represents a CpG dinucleotide"
  misc_feature (61)..(61): /note="Nucleotide may be methylated to form 5-methylcytosine"
gaagaaatccgtttgtttagagtgacaagaagcacaaacagggcaggtacggaatacagacgttgacatattcacactagcctttttcagaaagcagagctccattatctcaaaaagctaaa

SEQ ID NO: 17014 - DNA, 122 bp, Homo sapiens
  misc_feature (61)..(62): /note="This region represents a CpG dinucleotide"
  misc_feature (61)..(61): /note="Nucleotide may be methylated to form 5-methylcytosine"
ctcgagaattcgggaatcagagtttttaaggataatttggttggggcaggggcagtgaatcgggagtgctgattggttgactcacagatgaaatcatagagagttgaaactgtcctcttata

SEQ ID NO: 17015 - DNA, 122 bp, Homo sapiens
  misc_feature (61)..(62): /note="This region represents a CpG dinucleotide"
  misc_feature (61)..(61): /note="Nucleotide may be methylated to form 5-methylcytosine"
tcacaagtttggggtgcaggtgcagattgcctactgttgtgtttctgaacacttccctcgcgaggctcctaaccccaccccagtaaactcatcaacatgactccttccagcttctacagctc

SEQ ID NO: 17016 - DNA, 122 bp, Homo sapiens
  misc_feature (61)..(62): /note="This region represents a CpG dinucleotide"
  misc_feature (61)..(61): /note="Nucleotide may be methylated to form 5-methylcytosine"
tagtggtcaggtattttatagaatgttccccaattttggtttgtctgatatttttctcatcgttaagctggggtcataatttgggaacaccacagaggtgaagtgctctcatcacacagtat

SEQ ID NO: 17017 - DNA, 122 bp, Homo sapiens
  misc_feature (61)..(62): /note="This region represents a CpG dinucleotide"
  misc_feature (61)..(61): /note="Nucleotide may be methylated to form 5-methylcytosine"
atggggcagtgccacacgatccagattcgtgaacaccgtttgtgaaaattgcttcaacatcgttctgtgtttcaaacggaaaaccaccccttcctccctccacccatgaatcagtcaagaac

SEQ ID NO: 17018 - DNA, 122 bp, Homo sapiens
  misc_feature (61)..(62): /note="This region represents a CpG dinucleotide"
  misc_feature (61)..(61): /note="Nucleotide may be methylated to form 5-methylcytosine"
tgtgttaaagccatgactatcttctcaggcatccaagcttgaatcttcagaactgtctggcgttctcttttcaaagtccacatgatcatcagctgagaaggagcatgactttcaccttattt

SEQ ID NO: 17019 - DNA, 122 bp, Homo sapiens
  misc_feature (61)..(62): /note="This region represents a CpG dinucleotide"
  misc_feature (61)..(61): /note="Nucleotide may be methylated to form 5-methylcytosine"
tttatcatatgtgattttacttgtttaattttcatcttccttattagtctataaactccacgaaagcaggtccatgtctgctttgtttaccttgatatacacagccaagcacagagcttggc

SEQ ID NO: 17020 - DNA, 122 bp, Homo sapiens
  misc_feature (61)..(62): /note="This region represents a CpG dinucleotide"
  misc_feature (61)..(61): /note="Nucleotide may be methylated to form 5-methylcytosine"
atttgaaggggtgttggcaagaacatcagatggacgacaggggagaggggcccagctgcacggggagaagccgatgagggatgggtctttgctgtcatcaacattcataaatttatcattct

SEQ ID NO: 17021 - DNA, 122 bp, Homo sapiens
  misc_feature (61)..(62): /note="This region represents a CpG dinucleotide"
  misc_feature (61)..(61): /note="Nucleotide may be methylated to form 5-methylcytosine"
ttctagcagctcagctctccacttcctcctctgtgcagtgggaaaatgaagcccagtttacgtgttgttattatagagaccaaatgagataaaaggtgtgaaagtgttttttactttttaat

SEQ ID NO: 17022 - DNA, 122 bp, Homo sapiens
  misc_feature (61)..(62): /note="This region represents a CpG dinucleotide"
  misc_feature (61)..(61): /note="Nucleotide may be methylated to form 5-methylcytosine"
agaaaaaaaaatcagaagcctgcaattgtgtaacatgaaaatcttttctggaccagggcccgtcactgtgatttggcaacacaactggcacatctcttttctcatctcttgaaaaaaaccaa

SEQ ID NO: 17023 - DNA, 122 bp, Homo sapiens
  misc_feature (61)..(62): /note="This region represents a CpG dinucleotide"
  misc_feature (61)..(61): /note="Nucleotide may be methylated to form 5-methylcytosine"
tgccaggcaggtgtttactcactcatctgctatggccctgggctcactgccgccgccccccgccctgtgggtttgtcagcagtttgatgtgtatttttccataaaaattcattgttatacat

SEQ ID NO: 17024 - DNA, 122 bp, Homo sapiens
  misc_feature (61)..(62): /note="This region represents a CpG dinucleotide"
  misc_feature (61)..(61): /note="Nucleotide may be methylated to form 5-methylcytosine"
ttttttttttactggaaatttcatgcgttaaatgttgggtaggattaagtgatgagacgacgggtccaaatgtattaatcactgggaagtgttgaagtattaccgaccatcttactcatttc

SEQ ID NO: 17025 - DNA, 122 bp, Homo sapiens
  misc_feature (61)..(62): /note="This region represents a CpG dinucleotide"
  misc_feature (61)..(61): /note="Nucleotide may be methylated to form 5-methylcytosine"
aatggctgcaggatcaggctctcagcagatctacatctgaatagaaatcaaagactctggcgcaaaggccaaagggaggaattgtccgcaaaggacctttggggaagacacctaaaaccacg

SEQ ID NO: 17026 - DNA, 122 bp, Homo sapiens
  misc_feature (61)..(62): /note="This region represents a CpG dinucleotide"
  misc_feature (61)..(61): /note="Nucleotide may be methylated to form 5-methylcytosine"
tctgtcttgcttgttgaatctcttttataaattattggccacttaacagaaggaacttatcgtctcagaaacttataccaggttgtcttgtaaagtacctgtttatgctcattaaatcatgt

SEQ ID NO: 17027 - DNA, 122 bp, Homo sapiens
  misc_feature (61)..(62): /note="This region represents a CpG dinucleotide"
  misc_feature (61)..(61): /note="Nucleotide may be methylated to form 5-methylcytosine"
tgggggcacgtttctcagccttgctcctagcagcctggcttccagccatgccaggcctgccgccccacagggcttctgtctgctgtgagcactgttgtccctttggctccctctcagggctt

SEQ ID NO: 17028 - DNA, 122 bp, Homo sapiens
  misc_feature (61)..(62): /note="This region represents a CpG dinucleotide"
  misc_feature (61)..(61): /note="Nucleotide may be methylated to form 5-methylcytosine"
attcaccagtgaatctatagaggcatgggccattctaggaagtttctccatttagtaattcgatctctttacttctatttgtattgagactttctatttcttcttgagtcagttttcagcag

SEQ ID NO: 17029 - DNA, 122 bp, Homo sapiens
  misc_feature (61)..(62): /note="This region represents a CpG dinucleotide"
  misc_feature (61)..(61): /note="Nucleotide may be methylated to form 5-methylcytosine"
ccttatttagctgtctgcagcaaaggtctctgcaagagctgctttaagcaggcaaaaggacgacatgaagttgttggctgcttgctcagcttacctctgagatagacttgacaaagcggatc

SEQ ID NO: 17030 - DNA, 122 bp, Homo sapiens
  misc_feature (61)..(62): /note="This region represents a CpG dinucleotide"
  misc_feature (61)..(61): /note="Nucleotide may be methylated to form 5-methylcytosine"
cgcccaaagcgaccctctgcgcaaactacccccggggacgacgtcacccgtgaggtcccgcggcgcctcctcctaaagctcggctgggaaaccgtccgcttccccaagacttgggggcttgt

SEQ ID NO: 17031 - DNA, 122 bp, Homo sapiens
  misc_feature (61)..(62): /note="This region represents a CpG dinucleotide"
  misc_feature (61)..(61): /note="Nucleotide may be methylated to form 5-methylcytosine"
attttagtttgtgtatggaacccatgggcttattgagtgaatttgttatgcatctcaggccgcccaggcctttgtgtggcctgcctctgaaggaaggtggagaaagacagcagcaaatcccc

SEQ ID NO: 17032 - DNA, 122 bp, Homo sapiens
  misc_feature (61)..(62): /note="This region represents a CpG dinucleotide"
  misc_feature (61)..(61): /note="Nucleotide may be methylated to form 5-methylcytosine"
aatttctatacttgggtcttgcctcaaccccatttactaaaacaagtcttgttttataaacgatatgcatgttcactgcagacagtttagaaaatcaggaaataaacaaaatcaactcatga

SEQ ID NO: 17033 - DNA, 122 bp, Homo sapiens
  misc_feature (61)..(62): /note="This region represents a CpG dinucleotide"
  misc_feature (61)..(61): /note="Nucleotide may be methylated to form 5-methylcytosine"
gcattgctgttttgataaacaataaatacttccctccttctcccataatctattcatgttcgttctatttgcattggtgtgcgaattagtctcttccccttcaaacaagtcagtttagctag

SEQ ID NO: 17034 - DNA, 122 bp, Homo sapiens
  misc_feature (61)..(62): /note="This region represents a CpG dinucleotide"
  misc_feature (61)..(61): /note="Nucleotide may be methylated to form 5-methylcytosine"
atgaagttgtttcattcaaatcagtcagccaggatttgctgagctttaagctcctgtctgcgaggaacttaccatctgtttggggagacaagatttatgcccaaggaaccacttgaaggagc

SEQ ID NO: 17035 - DNA, 122 bp, Homo sapiens
  misc_feature (61)..(62): /note="This region represents a CpG dinucleotide"
  misc_feature (61)..(61): /note="Nucleotide may be methylated to form 5-methylcytosine"
agaggagaatgatgctgagattaaagcctctcccctggagtgattctatgtggcctgttgcgttggtgcagagaggcaaggcaataaggccttctggggttcagcagagagacaggtcaaac

SEQ ID NO: 17036 - DNA, 122 bp, Homo sapiens
  misc_feature (61)..(62): /note="This region represents a CpG dinucleotide"
  misc_feature (61)..(61): /note="Nucleotide may be methylated to form 5-methylcytosine"
agaaatagaaaaacatatttaccaacctgctagcgtgggtctattttctcacaagcaatgcgaggcctctgcaagctgaagagggacctcacgtctctataacaatgtggattctattgtta

SEQ ID NO: 17037 - DNA, 122 bp, Homo sapiens
  misc_feature (61)..(62): /note="This region represents a CpG dinucleotide"
  misc_feature (61)..(61): /note="Nucleotide may be methylated to form 5-methylcytosine"
taataaatgttatcttagaagccagactgccaggttcccataaccatttcagccgttcaccggctggctgttgtcatcttggtcaaattatccctctgcgcctcagtttcctcatctgtgca

SEQ ID NO: 17038 - DNA, 122 bp, Homo sapiens
  misc_feature (61)..(62): /note="This region represents a CpG dinucleotide"
  misc_feature (61)..(61): /note="Nucleotide may be methylated to form 5-methylcytosine"
ccaaaaatgaaactctggggagagaggaagaagtttaaacaggaagtttagaaacatcaccgtgaatttaatgatggcatatgatcgactaccactgttatgttgattttttttattactat

SEQ ID NO: 17039 - DNA, 122 bp, Homo sapiens
  misc_feature (61)..(62): /note="This region represents a CpG dinucleotide"
  misc_feature (61)..(61): /note="Nucleotide may be methylated to form 5-methylcytosine"
ccccagtggtactagacgttcaccctttagtggctgcattataagagccttcagcacagacgtcctgtggtagggaggagggggcatgtgggcaacatcccattattgaccgtcacgacaac

SEQ ID NO: 17040 - DNA, 122 bp, Homo sapiens
  misc_feature (61)..(62): /note="This region represents a CpG dinucleotide"
  misc_feature (61)..(61): /note="Nucleotide may be methylated to form 5-methylcytosine"
ttgggcctggtttcccttgctctgtggtcctgcttctgagctgagtagctgtggacctatcgtggggaggaggaactcagaatatgcccagctcagagtctgggtcttagaagagagaaact

SEQ ID NO: 17041 - DNA, 122 bp, Homo sapiens
  misc_feature (61)..(62): /note="This region represents a CpG dinucleotide"
  misc_feature (61)..(61): /note="Nucleotide may be methylated to form 5-methylcytosine"
tataatcactacaaattacagacctctttcctgtgtaatgatttttgccatttgcccttccgtgatctctaataggccaactacaaggacaattttttgatcagtaagaaccttggtctgtt

SEQ ID NO: 17042 - DNA, 122 bp, Homo sapiens
  misc_feature (61)..(62): /note="This region represents a CpG dinucleotide"
  misc_feature (61)..(61): /note="Nucleotide may be methylated to form 5-methylcytosine"
gtgttatttttatcgaatattctacatagctagaatttttttatataccccaaatgccatcgcagagcactgattatgctttttgcttctgttcagaatgatgcagctggcacagtggcttt

SEQ ID NO: 17043 - DNA, 122 bp, Homo sapiens
  misc_feature (61)..(62): /note="This region represents a CpG dinucleotide"
  misc_feature (61)..(61): /note="Nucleotide may be methylated to form 5-methylcytosine"
gcagcggagaatgaatatcacctaggtaacaactcacaagcacagtgtctggcttcggggcgtaggggcggggacacatgtaatcaatacaagccgcctgcctgggtggcttcccccttccc

SEQ ID NO: 17044 - DNA, 122 bp, Homo sapiens
  misc_feature (61)..(62): /note="This region represents a CpG dinucleotide"
  misc_feature (61)..(61): /note="Nucleotide may be methylated to form 5-methylcytosine"
tgtgtcacctgccactcccctgccagtgtgcgaggcagcgtgaagctggggcctgctccccgcagcctctggagcgcatctcagaccttctgagacctatgttgctggccccccagaacccg

SEQ ID NO: 17045 - DNA, 122 bp, Homo sapiens
  misc_feature (61)..(62): /note="This region represents a CpG dinucleotide"
  misc_feature (61)..(61): /note="Nucleotide may be methylated to form 5-methylcytosine"
ggggtatgggctttggaatcacactgtctggattcaagcctgattctgctgagtgacctgcgacaggttacctaaacacccagattccctagctgtgcagtggaggaagtggtagtatctac

SEQ ID NO: 17046 - DNA, 122 bp, Homo sapiens
  misc_feature (61)..(62): /note="This region represents a CpG dinucleotide"
  misc_feature (61)..(61): /note="Nucleotide may be methylated to form 5-methylcytosine"
ttggtaggtggtgctttgcttcctcttgtgtctcggtgcagatgctgttgctaaggtaaccgggtaagcataaaacagaaacagcccatagggtcttgctgcctccacctgtgtgtccagac

SEQ ID NO: 17047 - DNA, 122 bp, Homo sapiens
  misc_feature (61)..(62): /note="This region represents a CpG dinucleotide"
  misc_feature (61)..(61): /note="Nucleotide may be methylated to form 5-methylcytosine"
cggctttaatgggtattagtggatcttctgttttcactcaggttggatatatatcccctgcgtcatacccatatggccccaatctcacaggggaggaatgtgtccctcccccaggcagtgac

SEQ ID NO: 17048 - DNA, 122 bp, Homo sapiens
  misc_feature (61)..(62): /note="This region represents a CpG dinucleotide"
  misc_feature (61)..(61): /note="Nucleotide may be methylated to form 5-methylcytosine"
ttaagaacagcctgggtaatatggccaaaccctgtttctacaaaacaaacaaacaatgtgcgcctgtagttccagctactggtgggggagggggtacagctgagatggggggatcacttgag

SEQ ID NO: 17049 - DNA, 122 bp, Homo sapiens
  misc_feature (61)..(62): /note="This region represents a CpG dinucleotide"
  misc_feature (61)..(61): /note="Nucleotide may be methylated to form 5-methylcytosine"
ctctcccttgtcagactgccaagatgctgattctattgaataaactccttcctgctggcccgtgagaaggaccccctagcgagtcccttgccctctaactctagagctcaatggggaggaaa

SEQ ID NO: 17050 - DNA, 122 bp, Homo sapiens
  misc_feature (61)..(62): /note="This region represents a CpG dinucleotide"
  misc_feature (61)..(61): /note="Nucleotide may be methylated to form 5-methylcytosine"
attagccacatttctagtgctcagcagctgtatgttgctattggtgactgtaatggagaacgcagttacagtacgtttacattatatgcaaagtcctgttagacagctctttaatgagggag

SEQ ID NO: 17051 - DNA, 122 bp, Homo sapiens
  misc_feature (61)..(62): /note="This region represents a CpG dinucleotide"
  misc_feature (61)..(61): /note="Nucleotide may be methylated to form 5-methylcytosine"
atttcaaaatatattttttgagaagttctaagttaaacagctcttaaaatgtattatgtacgtggttgtggagggaagggagatgtttcattatgagatcccaggcaaatggcaatatgttt

SEQ ID NO: 17052 - DNA, 122 bp, Homo sapiens
  misc_feature (61)..(62): /note="This region represents a CpG dinucleotide"
  misc_feature (61)..(61): /note="Nucleotide may be methylated to form 5-methylcytosine"
ctgaccccacaaggaaaacacatacagctatctgtacaaggagggaagaatccacagagacgcaggagagccatcgatctagaacaaagtcatagcttttgatattagggaagcagaacaga

SEQ ID NO: 17053 - DNA, 122 bp, Homo sapiens
  misc_feature (61)..(62): /note="This region represents a CpG dinucleotide"
  misc_feature (61)..(61): /note="Nucleotide may be methylated to form 5-methylcytosine"
ggaactctcttttgtttctttgtccccagtgccaagctggggcctggcaggcagtaggtgcgcagtgagaagttggctgagtggggaaggatgagtggcttactttgtgaaaggtggaggag

SEQ ID NO: 17054 - DNA, 122 bp, Homo sapiens
  misc_feature (61)..(62): /note="This region represents a CpG dinucleotide"
  misc_feature (61)..(61): /note="Nucleotide may be methylated to form 5-methylcytosine"
tacatacatatatgcaccaaatagcagagttctaatgtattattcaccctgctccccagacgttattccatgagagcaagaactggatctggcttgcttactgctttgttctcataccaggc

SEQ ID NO: 17055 - DNA, 122 bp, Homo sapiens
  misc_feature (61)..(62): /note="This region represents a CpG dinucleotide"
  misc_feature (61)..(61): /note="Nucleotide may be methylated to form 5-methylcytosine"
ttctttcatccagcaaacatctactacggcatcttctaagtgagggcatgccctagagggcgtcgtaggtgcctcagggatccagagttgctgagagcctcctagacctggtgaggttattt

SEQ ID NO: 17056 - DNA, 122 bp, Homo sapiens
  misc_feature (61)..(62): /note="This region represents a CpG dinucleotide"
  misc_feature (61)..(61): /note="Nucleotide may be methylated to form 5-methylcytosine"
ccagcctgtcttgcaggttgagtagggttgtgcgcttgggatctctgatcagaccggcaccgcagtgtgggagagaagctgtgtgaagagtctgtcgtctgactttggcaagggttcctctg

SEQ ID NO: 17057 - DNA, 122 bp, Homo sapiens
  misc_feature (61)..(62): /note="This region represents a CpG dinucleotide"
  misc_feature (61)..(61): /note="Nucleotide may be methylated to form 5-methylcytosine"
gagttaacaatgcttcaaggatagtcagccagctaagccggacagacactgatggattggcgtccttctctgaactgccttcgagagtctggaggcctttgcagctgaataccaaagagact

SEQ ID NO: 17058 - DNA, 122 bp, Homo sapiens
  misc_feature (61)..(62): /note="This region represents a CpG dinucleotide"
  misc_feature (61)..(61): /note="Nucleotide may be methylated to form 5-methylcytosine"
gactccagctttattatcaaacctccaatcgagtgcaagatgctaagctggggtagatgccggtaatagcgtgggccttgccctgggagctcacggccagcctggctacaactgtgtggagt

SEQ ID NO: 17059 - DNA, 122 bp, Homo sapiens
  misc_feature (61)..(62): /note="This region represents a CpG dinucleotide"
  misc_feature (61)..(61): /note="Nucleotide may be methylated to form 5-methylcytosine"
gataatttggcatctgccactgaaggctctgccacctcagactcttctttgcaagaccaacgggtagccaggcccagaccaggactcctttggtcttcttagatcctcatcaacaggcttat

SEQ ID NO: 17060 - DNA, 122 bp, Homo sapiens
  misc_feature (61)..(62): /note="This region represents a CpG dinucleotide"
  misc_feature (61)..(61): /note="Nucleotide may be methylated to form 5-methylcytosine"
gtttcaggtaaattactttctatcagatgcattatgcgatcttaaagtcaactttaatagcgtacatttaaggggatgcttgaagcattattaaaatggattctagagaaaaaaaaatccca

SEQ ID NO: 17061 - DNA, 122 bp, Homo sapiens
  misc_feature (61)..(62): /note="This region represents a CpG dinucleotide"
  misc_feature (61)..(61): /note="Nucleotide may be methylated to form 5-methylcytosine"
cacacaaacagttcggaaagttaagactagcatttaagcgcacacacacaaagaagtacacgcatgaacaggaagtatctaaaggacacttggaattgtttcaggtgcatacttgtaaatat

SEQ ID NO: 17062 - DNA, 122 bp, Homo sapiens
  misc_feature (61)..(62): /note="This region represents a CpG dinucleotide"
  misc_feature (61)..(61): /note="Nucleotide may be methylated to form 5-methylcytosine"
aggtgacagtgagccaagatcaagccactgcactccagcctgggcaacagagcaagattacgttcacacagcttataagcagtcacacagcttgtaagtagtggagcttgtaagtagtagct

SEQ ID NO: 17063 - DNA, 122 bp, Homo sapiens
  misc_feature (61)..(62): /note="This region represents a CpG dinucleotide"
  misc_feature (61)..(61): /note="Nucleotide may be methylated to form 5-methylcytosine"
aaagttatctgtgaagagtattagttgtttaataaagcgtgcctgccctcccgatgaacccgccagtgactctgcagctggggtcattccaagttcacgcagtggacttttgactgccttct

SEQ ID NO: 17064 - DNA, 122 bp, Homo sapiens
  misc_feature (61)..(62): /note="This region represents a CpG dinucleotide"
  misc_feature (61)..(61): /note="Nucleotide may be methylated to form 5-methylcytosine"
aaataaaaggaaacatgagtggaaatttcacctatatcattgacaagttaattccaaacacgaactactgtgtatctgtttatttagagcacagtgatgagcaagcagtaataaagtctccc

SEQ ID NO: 17065 - DNA, 122 bp, Homo sapiens
  misc_feature (61)..(62): /note="This region represents a CpG dinucleotide"
  misc_feature (61)..(61): /note="Nucleotide may be methylated to form 5-methylcytosine"
caagccaatgcagaatgccatctggaggatgcatgcccaagtcatgcaacagcctcctgtcgggatgtatcaggaactttgcaacagaacaactaataacatcttaagctccatttgtctag

SEQ ID NO: 17066 - DNA, 122 bp, Homo sapiens
  misc_feature (61)..(62): /note="This region represents a CpG dinucleotide"
  misc_feature (61)..(61): /note="Nucleotide may be methylated to form 5-methylcytosine"
aaaagtggggaagacactaaattatacagatagattggaaataacattaggtaagaatcgcgccggttttacccacactggaaagagctgagaggtatgcatagctcttttattgctctgag

SEQ ID NO: 17067 - DNA, 122 bp, Homo sapiens
  misc_feature (61)..(62): /note="This region represents a CpG dinucleotide"
  misc_feature (61)..(61): /note="Nucleotide may be methylated to form 5-methylcytosine"
gacacactcactctgctctgctcctatgggaaactctttcctctttcctttttagcttggcgccagcccaaagggatgggttgaacatcaggaagctcttagccccagctctgccactcact

SEQ ID NO: 17068 - DNA, 122 bp, Homo sapiens
  misc_feature (61)..(62): /note="This region represents a CpG dinucleotide"
  misc_feature (61)..(61): /note="Nucleotide may be methylated to form 5-methylcytosine"
tccatccttccacttcccatccccagtgaagtgtatcacctaaaatcatctcccacaccacgagaggtgtgcaatacatagtttgggaaacactgatctgactaccttcttcacagagaccc

SEQ ID NO: 17069 - DNA, 122 bp, Homo sapiens
  misc_feature (61)..(62): /note="This region represents a CpG dinucleotide"
  misc_feature (61)..(61): /note="Nucleotide may be methylated to form 5-methylcytosine"
agtagtccgtgttcccctgacagcagtccagaatgtggcggtgtcacttccttctgctgtcggccattctcttctgcacacaagtcttcttagacagaatttataggacactggaaatcaag

SEQ ID NO: 17070 - DNA, 122 bp, Homo sapiens
  misc_feature (61)..(62): /note="This region represents a CpG dinucleotide"
  misc_feature (61)..(61): /note="Nucleotide may be methylated to form 5-methylcytosine"
tattgacttcagccaaagatcattggtatttcctgagaccggaaagatttgggccttgtgcgtaaacaacatcttggatcaggcacggaaatttcaacagtacttggcaatttcctagcagc

SEQ ID NO: 17071 - DNA, 122 bp, Homo sapiens
  misc_feature (61)..(62): /note="This region represents a CpG dinucleotide"
  misc_feature (61)..(61): /note="Nucleotide may be methylated to form 5-methylcytosine"
gaaggatcaggggcagagccggcttcatggacaggaaacctgggccctgtgttttcatcccgggccctgtaaactctgcagccagccgggatgagtagctttctctgtaaagtacccatgcc

SEQ ID NO: 17072 - DNA, 122 bp, Homo sapiens
  misc_feature (61)..(62): /note="This region represents a CpG dinucleotide"
  misc_feature (61)..(61): /note="Nucleotide may be methylated to form 5-methylcytosine"
ctcagtttttgggaggagggaacagtggtacagtgtacacaaaggcaaacaatatccagacgtcctgcttttagtaatgctaaaattgatcccatgagttccgacggtgaaagtctgatccc

SEQ ID NO: 17073 - DNA, 122 bp, Homo sapiens
  misc_feature (61)..(62): /note="This region represents a CpG dinucleotide"
  misc_feature (61)..(61): /note="Nucleotide may be methylated to form 5-methylcytosine"
ccaaggcagaattattttcagcaggcaacatgctacgcacaaggatttcagccagcataacgtgtgtgctgcggtaaaaatactactgaagaggattcttgaataaaggcacccaccatggc

SEQ ID NO: 17074 - DNA, 122 bp, Homo sapiens
  misc_feature (61)..(62): /note="This region represents a CpG dinucleotide"
  misc_feature (61)..(61): /note="Nucleotide may be methylated to form 5-methylcytosine"
ttgtacaaactgaaaatttatgcattaactgtttgcattctgagcgtgtgttccagattacgtcttacagcattcttctggtatgctgcagaatgcgtgtgtgcaaaaagcacttctttcac

SEQ ID NO: 17075 - DNA, 122 bp, Homo sapiens
  misc_feature (61)..(62): /note="This region represents a CpG dinucleotide"
  misc_feature (61)..(61): /note="Nucleotide may be methylated to form 5-methylcytosine"
agagttttacaagggctgcctttgcctgtttgtccgatgactacttgcttacagtctgaacgtgagtgctctcaggttgtggtgtttatgagaaagcaggggccagcccctgacctggccag

SEQ ID NO: 17076 - DNA, 122 bp, Homo sapiens
  misc_feature (61)..(62): /note="This region represents a CpG dinucleotide"
  misc_feature (61)..(61): /note="Nucleotide may be methylated to form 5-methylcytosine"
cttgcccaggccagcaagaccccaccctgacccaaggaaggtcttcaaggatctagctttcgtgccttccactccatttcatgggagcctaactcctcttaaaggatcagtgaagttgtggt

SEQ ID NO: 17077 - DNA, 122 bp, Homo sapiens
  misc_feature (61)..(62): /note="This region represents a CpG dinucleotide"
  misc_feature (61)..(61): /note="Nucleotide may be methylated to form 5-methylcytosine"
aagatgtatggtatcaaattttagccatctttctcccattggtaatttctatgtgcctttcgtttcaacttgctatttacttctgtttttattcttctaaaatatgaatcgtaattaaaaac

SEQ ID NO: 17078 - DNA, 122 bp, Homo sapiens
  misc_feature (61)..(62): /note="This region represents a CpG dinucleotide"
  misc_feature (61)..(61): /note="Nucleotide may be methylated to form 5-methylcytosine"
gattgcacccatcttagatgctaacgaaatggcctttgagtgcagggatagttaatgttacgtatgtgttcagagttacctaaggaagagcaactccctcccctagtctcaaaccagctaca

SEQ ID NO: 17079 - DNA, 122 bp, Homo sapiens
  misc_feature (61)..(62): /note="This region represents a CpG dinucleotide"
  misc_feature (61)..(61): /note="Nucleotide may be methylated to form 5-methylcytosine"
ttttctagttaccactccttttttttctgaaatgaaaagtcaaggcatgtgaaaacctgacgttcacagtaatctaagcacatccttgctctgtcagggagagattctgcctccagatggtg

SEQ ID NO: 17080 - DNA, 122 bp, Homo sapiens
  misc_feature (61)..(62): /note="This region represents a CpG dinucleotide"
  misc_feature (61)..(61): /note="Nucleotide may be methylated to form 5-methylcytosine"
ggcctagagaagtgaagtaacttaccccagggctaagtgggaagtggctcaaaagcaagccggtgttctaatccaaggtgatgagaagacctgccccagatagctgtgtttgtttttgatct

SEQ ID NO: 17081 - DNA, 122 bp, Homo sapiens
  misc_feature (61)..(62): /note="This region represents a CpG dinucleotide"
  misc_feature (61)..(61): /note="Nucleotide may be methylated to form 5-methylcytosine"
tctacatgtccttcctctctatttgtgtatgatagtgtctgaaatcattggatggatcaccggtgaaccatattgacagctgctatatggtcagggagattggttcccatgtagtattccga

SEQ ID NO: 17082 - DNA, 122 bp, Homo sapiens
  misc_feature (61)..(62): /note="This region represents a CpG dinucleotide"
  misc_feature (61)..(61): /note="Nucleotide may be methylated to form 5-methylcytosine"
ggaaggatctgagccaagtctcgtgactgggacatttttccattgcacagtttagtctctcgctgatgggtcttgaataaacgagagaggtcaaagatgttctgctggtaaactgggtgtgg

SEQ ID NO: 17083 - DNA, 122 bp, Homo sapiens
  misc_feature (61)..(62): /note="This region represents a CpG dinucleotide"
  misc_feature (61)..(61): /note="Nucleotide may be methylated to form 5-methylcytosine"
ggcattttttaatctatttacctggagtatatgttgcattgtcccccagtgggatcatttcgttcaagtcagacacctttggactctacagcattgcatttctcgagttgcacttgtcaggg

SEQ ID NO: 17084 - DNA, 122 bp, Homo sapiens
  misc_feature (61)..(62): /note="This region represents a CpG dinucleotide"
  misc_feature (61)..(61): /note="Nucleotide may be methylated to form 5-methylcytosine"
aaacaaaatgtagtgtgtccatacaatgaaaatttcagccataagaaggtagcactaatacgtgtgataacctggataagccttgaagacatgctaagtgagagaagccagacacaaaagta

SEQ ID NO: 17085 - DNA, 122 bp, Homo sapiens
  misc_feature (61)..(62): /note="This region represents a CpG dinucleotide"
  misc_feature (61)..(61): /note="Nucleotide may be methylated to form 5-methylcytosine"
attggggttaaggcataatcaatatcatatatggagtgtctggcctattctgcataaacacgggcacttcatattattaaggagtctataatgccgaggaagcatatggcaggacactgcag

SEQ ID NO: 17086 - DNA, 122 bp, Homo sapiens
  misc_feature (61)..(62): /note="This region represents a CpG dinucleotide"
  misc_feature (61)..(61): /note="Nucleotide may be methylated to form 5-methylcytosine"
catgaagacctggttctggttcatagattaactaactagccagttcactaatcccactcacgagggcagaatcctcatgacctaagtacctcccaaaagcccagcctcctaactacatcaca

SEQ ID NO: 17087 - DNA, 122 bp, Homo sapiens
  misc_feature (61)..(62): /note="This region represents a CpG dinucleotide"
  misc_feature (61)..(61): /note="Nucleotide may be methylated to form 5-methylcytosine"
gggggatcttgactgacattttagatcctgtctgctgctcactgattatgactgtggacgcgtctccctgcttctctgggtctgtttcttcatctctaaaataggtatgctaacattccaat

SEQ ID NO: 17088 - DNA, 122 bp, Homo sapiens
  misc_feature (61)..(62): /note="This region represents a CpG dinucleotide"
  misc_feature (61)..(61): /note="Nucleotide may be methylated to form 5-methylcytosine"
ggttgttatctgctgaatcttacagtcattgccatttctacactctgcaatgtctatgagcgtttattcaaaaggtgccaaacattagactggccagtgtgttgctgttgcacagtgtagtg

SEQ ID NO: 17089 - DNA, 122 bp, Homo sapiens
  misc_feature (61)..(62): /note="This region represents a CpG dinucleotide"
  misc_feature (61)..(61): /note="Nucleotide may be methylated to form 5-methylcytosine"
gtaaggggaagaaggtttgtagtaggatataaggctgtcaaggaggtaaaaaccaaacttcgtgaggctctgaatatcaggcaaaataggtggaatgtttaaaaaaatctaagaaaggtagt

SEQ ID NO: 17090 - DNA, 122 bp, Homo sapiens
  misc_feature (61)..(62): /note="This region represents a CpG dinucleotide"
  misc_feature (61)..(61): /note="Nucleotide may be methylated to form 5-methylcytosine"
tggggacattgaaagctccctctagaacacctggacaccgagtgcccgtcactggaaggacgaagaggtaataagtgtggatccacacaataacgtggagagatcttaaaaacacagccctt

SEQ ID NO: 17091 - DNA, 122 bp, Homo sapiens
  misc_feature (61)..(62): /note="This region represents a CpG dinucleotide"
  misc_feature (61)..(61): /note="Nucleotide may be methylated to form 5-methylcytosine"
cgtgattcaccctccttggcctcttaaagtgctgggattacaagtgtgagccatcgcgcccggccggtttatttttttaaaaatggctgggcacagtgacttgtggctgtagttctagctac

SEQ ID NO: 17092 - DNA, 122 bp, Homo sapiens
  misc_feature (61)..(62): /note="This region represents a CpG dinucleotide"
  misc_feature (61)..(61): /note="Nucleotide may be methylated to form 5-methylcytosine"
gcacacgaacacactccacacacatgcactccacaccacgccccccaccacacatgaacacgtgtgcacactacacacatgcaccccacatgcacacacgtgcaggaaaggcctgcaccctc

SEQ ID NO: 17093 - DNA, 122 bp, Homo sapiens
  misc_feature (61)..(62): /note="This region represents a CpG dinucleotide"
  misc_feature (61)..(61): /note="Nucleotide may be methylated to form 5-methylcytosine"
accagtatgactaaggaagggaatttatcttaattaagttaaatagccacatgtggctgacggctgagattttattgtgcaatactgctctagaaagttctctgagatttccataaattcta

SEQ ID NO: 17094 - DNA, 122 bp, Homo sapiens
  misc_feature (61)..(62): /note="This region represents a CpG dinucleotide"
  misc_feature (61)..(61): /note="Nucleotide may be methylated to form 5-methylcytosine"
ggtagaagagaaaggctataagggattgtctacacaacaatgcgattttatttcctaaaacgttttgttgcaaatgatgatgaacctgtgacaagctggctgtggtcagggtggaaacagga

SEQ ID NO: 17095 - DNA, 122 bp, Homo sapiens
  misc_feature (61)..(62): /note="This region represents a CpG dinucleotide"
  misc_feature (61)..(61): /note="Nucleotide may be methylated to form 5-methylcytosine"
gcctgggcttggccccagtagacatatgagaacaggtgactgccagaaccacccagagggcgggaagcctgctgttgccaggtccaccatgtgaatcacaatgactgcatgaggtcacagaa

SEQ ID NO: 17096 - DNA, 122 bp, Homo sapiens
  misc_feature (61)..(62): /note="This region represents a CpG dinucleotide"
  misc_feature (61)..(61): /note="Nucleotide may be methylated to form 5-methylcytosine"
aatgtcacttcctttgtgtaaatattcccaggcgaagtcaggccctctgtcttctgtgatcgtagtctatcctgctcacatcttcttggtagtgtggtgtttaggtgatagaagctgagact

SEQ ID NO: 17097 - DNA, 122 bp, Homo sapiens
  misc_feature (61)..(62): /note="This region represents a CpG dinucleotide"
  misc_feature (61)..(61): /note="Nucleotide may be methylated to form 5-methylcytosine"
ggagggcatccactgtccggggccattcccacagctcccggatgctgggtctggaggctgcgcccttcccctgcaggagctcagcccagtggtaagtcatctgtgtgtcatctatgtattta

SEQ ID NO: 17098 - DNA, 122 bp, Homo sapiens
  misc_feature (61)..(62): /note="This region represents a CpG dinucleotide"
  misc_feature (61)..(61): /note="Nucleotide may be methylated to form 5-methylcytosine"
gcctagattttatttcaatttctacattgctcagacttctatcagctgcccaactcttttcgtatctccaggattagatgcaggtgaggcagcatgcagtctatgcttagtttactatgtga

SEQ ID NO: 17099 - DNA, 122 bp, Homo sapiens
  misc_feature (61)..(62): /note="This region represents a CpG dinucleotide"
  misc_feature (61)..(61): /note="Nucleotide may be methylated to form 5-methylcytosine"
gttttctcatgtgggacctgaccttacatgctccttggatgggccacactggtgaccacgcgaggctttgatgctctcatcacagggacctgttctgagttttatgttgtctttgttggttt

SEQ ID NO: 17100 - DNA, 122 bp, Homo sapiens
  misc_feature (61)..(62): /note="This region represents a CpG dinucleotide"
  misc_feature (61)..(61): /note="Nucleotide may be methylated to form 5-methylcytosine"
ctccactttctttgctggtcttctccaaggcagctgctgcagctttgcaaacttcctgagcgccaagcctcaggactccctgtgagaagggcatgataaagatgccttctactgtttacaca

SEQ ID NO: 17101 - DNA, 122 bp, Homo sapiens
  misc_feature (61)..(62): /note="This region represents a CpG dinucleotide"
  misc_feature (61)..(61): /note="Nucleotide may be methylated to form 5-methylcytosine"
gcaagaatgtgggaatattttagcattagaatcagctaatcttctacttgaattagacaacggcattttccattaagtggtagatggattaaatggaatccttggcctgagggcttcttcaa

SEQ ID NO: 17102 - DNA, 122 bp, Homo sapiens
  misc_feature (61)..(62): /note="This region represents a CpG dinucleotide"
  misc_feature (61)..(61): /note="Nucleotide may be methylated to form 5-methylcytosine"
ccaagcagtccctgccccattactgaccctgcaactctgtagacaatcagaaccttccagcgtgcaggaatgtttactatttctggccattgtgtactggttactaagctactgccactgag

SEQ ID NO: 17103 - DNA, 122 bp, Homo sapiens
  misc_feature (61)..(62): /note="This region represents a CpG dinucleotide"
  misc_feature (61)..(61): /note="Nucleotide may be methylated to form 5-methylcytosine"
gcatcaccatggagtgagattggaaagagctgggcccctgaaaccaaagcacagaatgtgcggctgtgccattatctaacaaatcccaggggatcaacaaagctccctgaaaaaagcatctg

SEQ ID NO: 17104 - DNA, 122 bp, Homo sapiens
  misc_feature (61)..(62): /note="This region represents a CpG dinucleotide"
  misc_feature (61)..(61): /note="Nucleotide may be methylated to form 5-methylcytosine"
gtgggagtcccagggaactgagttcttcccccatcacccccaaagccagctgcctgctcccgcctcagccattagtaacccagagacgcgcacctgcgtgggggctcttctccagcccttgc

SEQ ID NO: 17105 - DNA, 122 bp, Homo sapiens
  misc_feature (61)..(62): /note="This region represents a CpG dinucleotide"
  misc_feature (61)..(61): /note="Nucleotide may be methylated to form 5-methylcytosine"
taagttgttggttttcctctagaacttcccatacataattcttggccagggcatttatgacgtatgttgtgttttattttgcaatggtcttaagttgttgttgttgttgttttctagaactt

SEQ ID NO: 17106 - DNA, 122 bp, Homo sapiens
  misc_feature (61)..(62): /note="This region represents a CpG dinucleotide"
  misc_feature (61)..(61): /note="Nucleotide may be methylated to form 5-methylcytosine"
gctccttggttctcctccacttagtctttccacatggctaaactggactttctcacagcacggtagtttcagggttgtcagactcttcacaacttggccaacttctataagagaggaagttg

SEQ ID NO: 17107 - DNA, 122 bp, Homo sapiens
  misc_feature (61)..(62): /note="This region represents a CpG dinucleotide"
  misc_feature (61)..(61): /note="Nucleotide may be methylated to form 5-methylcytosine"
gcactggggaagttttaggtaaatacaacattccacactgatgctttcacagtttaatagcggattcacttataaacattctgataaagatcagaaactaaaatgcattcctgtttaaaaca

SEQ ID NO: 17108 - DNA, 122 bp, Homo sapiens
  misc_feature (61)..(62): /note="This region represents a CpG dinucleotide"
  misc_feature (61)..(61): /note="Nucleotide may be methylated to form 5-methylcytosine"
tggtcactctcccttacaggggtcaatagcttcactctctctgggtgctagtgcacaccacgtggagccatgcccatccgagcccaagaacatctgtacagcgtcagcagggcagttatacc

SEQ ID NO: 17109 - DNA, 122 bp, Homo sapiens
  misc_feature (61)..(62): /note="This region represents a CpG dinucleotide"
  misc_feature (61)..(61): /note="Nucleotide may be methylated to form 5-methylcytosine"
atatcattttattaattcatttttttctctataccttaaaatctatggcatctcatggttcgacattaggaaatccatcactatgattcagtaagtaaacaaattcaaggtgtcacatcata

SEQ ID NO: 17110 - DNA, 122 bp, Homo sapiens
  misc_feature (61)..(62): /note="This region represents a CpG dinucleotide"
  misc_feature (61)..(61): /note="Nucleotide may be methylated to form 5-methylcytosine"
aatttaatccatgatgaataaaagcaagattattgagcaatttctgcttaaaaaaatcttcgggagctaagtttctatcctgagtctggttctttagcttccgtttgatcttatatccttca

SEQ ID NO: 17111 - DNA, 122 bp, Homo sapiens
  misc_feature (61)..(62): /note="This region represents a CpG dinucleotide"
  misc_feature (61)..(61): /note="Nucleotide may be methylated to form 5-methylcytosine"
gttaacactgccctggagctcattgagcatttcctgggttcggcaggcaggaagcaccagcgtgttctggatgaaaatagttcctgcctgctggctctccacagctaactcgcctttccaca

SEQ ID NO: 17112 - DNA, 122 bp, Homo sapiens
  misc_feature (61)..(62): /note="This region represents a CpG dinucleotide"
  misc_feature (61)..(61): /note="Nucleotide may be methylated to form 5-methylcytosine"
gaagttggtgtatttgcctgctgtggtgatcgaaatgctgggtgtgtatggagtcagcaacgtcactgcagacctgaagcaacacaccccacacttacagtctgtggcagtacttgcctccc

SEQ ID NO: 17113 - DNA, 122 bp, Homo sapiens
  misc_feature (61)..(62): /note="This region represents a CpG dinucleotide"
  misc_feature (61)..(61): /note="Nucleotide may be methylated to form 5-methylcytosine"
aaagataaatgagagggcttttcacaccaggctaattgttagctgcccagaacaaccttgcggtttgcagctgcggtttgcaaccttgcagtacttgacctccagactgtcaaagtgcatga

SEQ ID NO: 17114 - DNA, 122 bp, Homo sapiens
  misc_feature (61)..(62): /note="This region represents a CpG dinucleotide"
  misc_feature (61)..(61): /note="Nucleotide may be methylated to form 5-methylcytosine"
aatttttggaagcacgaggttgccaaaagtcttccaaaaatggaacaaaagaaatccctgcggaggggctatcagctgtcaaagacgcaataactacacagaagaggacaaaaaaggggaag

SEQ ID NO: 17115 - DNA, 122 bp, Homo sapiens
  misc_feature (61)..(62): /note="This region represents a CpG dinucleotide"
  misc_feature (61)..(61): /note="Nucleotide may be methylated to form 5-methylcytosine"
aagaagctgtgggtggatagcaggaggccctgagggtgagtcacccggtttgctgccttgcggtcacagacctttggctattgtcactgcccctgggatgagtcacactgagccttagtgcc

SEQ ID NO: 17116 - DNA, 122 bp, Homo sapiens
  misc_feature (61)..(62): /note="This region represents a CpG dinucleotide"
  misc_feature (61)..(61): /note="Nucleotide may be methylated to form 5-methylcytosine"
ctgttcttttacctacaaatgactcagtgcagcaggcctgcctacagtaggcagttattacgtggcagacatgattacaggcgtggatactttccctgataacccctcagagcctgccggcc

SEQ ID NO: 17117 - DNA, 122 bp, Homo sapiens
  misc_feature (61)..(62): /note="This region represents a CpG dinucleotide"
  misc_feature (61)..(61): /note="Nucleotide may be methylated to form 5-methylcytosine"
aggcttttgtctgacctaatttatttctctttcaggttagaataaagcactctttcctgtcgcagggtaacctcttctgctcatatattgaactctagcataagactcagggtgcagtctgc

SEQ ID NO: 17118 - DNA, 122 bp, Homo sapiens
  misc_feature (61)..(62): /note="This region represents a CpG dinucleotide"
  misc_feature (61)..(61): /note="Nucleotide may be methylated to form 5-methylcytosine"
gggtaggaagtgggtgtggaaggaatggtaggttctatttaaagcctccctactgactcacggaggcatctagggaaatggcttaacttttctgagacttgggttccctcttgttaaaaaaa

SEQ ID NO: 17119 - DNA, 122 bp, Homo sapiens
  misc_feature (61)..(62): /note="This region represents a CpG dinucleotide"
  misc_feature (61)..(61): /note="Nucleotide may be methylated to form 5-methylcytosine"
gttcatttaaaggttggtctgaacagtgaggcactcccatacaaaggaactccatcataccggatgccaccgtttaaggatcctttgaaacttcttaagaattcaacgagatttttaacctg

SEQ ID NO: 17120 - DNA, 122 bp, Homo sapiens
  misc_feature (61)..(62): /note="This region represents a CpG dinucleotide"
  misc_feature (61)..(61): /note="Nucleotide may be methylated to form 5-methylcytosine"
ctgaagttactagaggagtttacctgggggatgaacagtgctggtaccctgatgctgaagcgggacgtgagactcactgcagcaaacacagccccaccctgtgacttgccccgaggcccaaa

SEQ ID NO: 17121 - DNA, 122 bp, Homo sapiens
  misc_feature (61)..(62): /note="This region represents a CpG dinucleotide"
  misc_feature (61)..(61): /note="Nucleotide may be methylated to form 5-methylcytosine"
ctcgggcctggctcttgtgctcctggagagctccgagccgagaagtgtgcataaaccctgcgagtccagtcagtttttgctgctggtttcatcactgtgggagttaccaccgtagtcacaca

SEQ ID NO: 17122 - DNA, 122 bp, Homo sapiens
  misc_feature (61)..(62): /note="This region represents a CpG dinucleotide"
  misc_feature (61)..(61): /note="Nucleotide may be methylated to form 5-methylcytosine"
ggacatcgtcagaaatattgggctggagagggagatcaggaagggatcagtacatgttgtcgagaaataagtgacatgatgtgcaattatgtatgtgctcaccactctatactcaacgccca

SEQ ID NO: 17123 - DNA, 122 bp, Homo sapiens
  misc_feature (61)..(62): /note="This region represents a CpG dinucleotide"
  misc_feature (61)..(61): /note="Nucleotide may be methylated to form 5-methylcytosine"
cctccccagtttcttagcagcagcagaaagcaattggctcccaaagtcgagacccagacacgagtaaaatcaaattaactattggcttgaggaaatggggaatggagaaagggtgtagtgag

SEQ ID NO: 17124 - DNA, 122 bp, Homo sapiens
  misc_feature (61)..(62): /note="This region represents a CpG dinucleotide"
  misc_feature (61)..(61): /note="Nucleotide may be methylated to form 5-methylcytosine"
tagcctgccccaggagaagctggttcatttgttgattcaaaaatatttgccaccaagaagcgtgttctgaacatatactccagttaacatttcagaggttcactcaggactagtccaaggtt

SEQ ID NO: 17125 - DNA, 122 bp, Homo sapiens
  misc_feature (61)..(62): /note="This region represents a CpG dinucleotide"
  misc_feature (61)..(61): /note="Nucleotide may be methylated to form 5-methylcytosine"
tgctttattaatcatatgggtaaagcaccaggcacatagtagctgctgaataagtcattccgtatcctttagtatacattgcactgaagttagtgttatttatgtctctccacttgactttg

SEQ ID NO: 17126 - DNA, 122 bp, Homo sapiens
  misc_feature (61)..(62): /note="This region represents a CpG dinucleotide"
  misc_feature (61)..(61): /note="Nucleotide may be methylated to form 5-methylcytosine"
tgagagtactaacatagcaaaagataaatgaattccaaatctgttactgccatctatttacgtaagttttttcttgaaataaacagcttttactgggtgggaaataatgtgtattttgtgct

SEQ ID NO: 17127 - DNA, 122 bp, Homo sapiens
  misc_feature (61)..(62): /note="This region represents a CpG dinucleotide"
  misc_feature (61)..(61): /note="Nucleotide may be methylated to form 5-methylcytosine"
gaggcaggtcacttcccccttctgtatcctcaaaaccttttgttccttcttttattagagcgtttatgttccgatattttatttgactgcttaaataataaataacaaatacataataaaat

SEQ ID NO: 17128 - DNA, 122 bp, Homo sapiens
  misc_feature (61)..(62): /note="This region represents a CpG dinucleotide"
  misc_feature (61)..(61): /note="Nucleotide may be methylated to form 5-methylcytosine"
gcagacatccagtggaatgtgccccagccaccagcttagaacatgattccattgagacctcgttgcatcctagacgtatcaataacctttcttcagtcctctagacatggaaaccagaaccc

SEQ ID NO: 17129 - DNA, 122 bp, Homo sapiens
  misc_feature (61)..(62): /note="This region represents a CpG dinucleotide"
  misc_feature (61)..(61): /note="Nucleotide may be methylated to form 5-methylcytosine"
aataaattctggcttcctttcctgaactactttgttttacatatcttttcatctgtgaaccgttaaatagtttaagagttacactttttagcatgatgaagccatttctaacgggataggtg

SEQ ID NO: 17130 - DNA, 122 bp, Homo sapiens
  misc_feature (61)..(62): /note="This region represents a CpG dinucleotide"
  misc_feature (61)..(61): /note="Nucleotide may be methylated to form 5-methylcytosine"
gatctgaaattgcacatcccaacgatgatttcccctggaagctgacattagccctagcagcgtatgtgactgatggtgcctctgaaagagggactctcaggatcaaatactaagagcttatt

SEQ ID NO: 17131 - DNA, 122 bp, Homo sapiens
  misc_feature (61)..(62): /note="This region represents a CpG dinucleotide"
  misc_feature (61)..(61): /note="Nucleotide may be methylated to form 5-methylcytosine"
aaggcaccaggaaaggaactgttcgttcacttgcccctaagatgttccgggtttctcttgcggtaccttggaaagttgattgtggacctagaaatatgtccaaggtctatcattacacggaa

SEQ ID NO: 17132 - DNA, 122 bp, Homo sapiens
  misc_feature (61)..(62): /note="This region represents a CpG dinucleotide"
  misc_feature (61)..(61): /note="Nucleotide may be methylated to form 5-methylcytosine"
aagctgaacttatcaccagagggactatgcaggctgaagtttctgtttctgtttcggttacgtatagaagcagttgctttctaagaattgaaggacacctagtcatatccttttggtcagtg

SEQ ID NO: 17133 - DNA, 122 bp, Homo sapiens
  misc_feature (61)..(62): /note="This region represents a CpG dinucleotide"
  misc_feature (61)..(61): /note="Nucleotide may be methylated to form 5-methylcytosine"
tgctaaactgttgcaacaagggcctaaactgttgcaacaaggacagagccaggtgcctcacgcctgtaatcccaacgctttgggaggccaaggcgggtggatcacataagaccaggagttcg

SEQ ID NO: 17134 - DNA, 122 bp, Homo sapiens
  misc_feature (61)..(62): /note="This region represents a CpG dinucleotide"
  misc_feature (61)..(61): /note="Nucleotide may be methylated to form 5-methylcytosine"
ttatgaatgtgggttcaaagtgctttgatttgtttaaataccttgcataatgttaaagggcgaagggaggtgctccagtggattatttttcaatttaggagttcaaattctttgtaaatttg

SEQ ID NO: 17135 - DNA, 122 bp, Homo sapiens
  misc_feature (61)..(62): /note="This region represents a CpG dinucleotide"
  misc_feature (61)..(61): /note="Nucleotide may be methylated to form 5-methylcytosine"
tttctgtccccccaccccatcggaattgtgtagtagtaaggtgtcggcatttttccttatcgctaagctcagctgctgcctctttagatgcaggcttgacttcggcagacttttagatttta

SEQ ID NO: 17136 - DNA, 122 bp, Homo sapiens
  misc_feature (61)..(62): /note="This region represents a CpG dinucleotide"
  misc_feature (61)..(61): /note="Nucleotide may be methylated to form 5-methylcytosine"
tggattacaaagagaattttatgacactggcaggcacataactttctccagcattctaagcgtcttcctgtctttcttgttcccacacgttaaatcagcagtgcatgacttacaatttgact

SEQ ID NO: 17137 - DNA, 122 bp, Homo sapiens
  misc_feature (61)..(62): /note="This region represents a CpG dinucleotide"
  misc_feature (61)..(61): /note="Nucleotide may be methylated to form 5-methylcytosine"
tatatgtagcttgcttcgttaattctgaaggtcatcaaagattctgcccagaagacgcatcgtaatcggactgtaatcagatatttatgctatttcctgatctcagtcactacacacggccc

SEQ ID NO: 17138 - DNA, 122 bp, Homo sapiens
  misc_feature (61)..(62): /note="This region represents a CpG dinucleotide"
  misc_feature (61)..(61): /note="Nucleotide may be methylated to form 5-methylcytosine"
tttgactcatgcgttacagaaggtccagccggtggctcactcttgctttgctgaggtcatcgtgccagaaaaaaagaacagcggcagtggcggcggcttatctggcatgggccacacacctg

SEQ ID NO: 17139 - DNA, 122 bp, Homo sapiens
  misc_feature (61)..(62): /note="This region represents a CpG dinucleotide"
  misc_feature (61)..(61): /note="Nucleotide may be methylated to form 5-methylcytosine"
gtggagcaatcagagcacacccaacatttatcgactaagtttgctgtcttctatgtgcatcgttcatggctccctaaagcagttataacaggaacatcaaagatcaccagtcaaagaccact

SEQ ID NO: 17140 - DNA, 122 bp, Homo sapiens
  misc_feature (61)..(62): /note="This region represents a CpG dinucleotide"
  misc_feature (61)..(61): /note="Nucleotide may be methylated to form 5-methylcytosine"
caccagaagtcaggtagctgataggccatcctgtgggagaaggtcgtgatgggagaaggtcgtttgacccttatagcaaacaccatgtgaaggaggtatccacctttagtccttttgtgact

SEQ ID NO: 17141 - DNA, 122 bp, Homo sapiens
  misc_feature (61)..(62): /note="This region represents a CpG dinucleotide"
  misc_feature (61)..(61): /note="Nucleotide may be methylated to form 5-methylcytosine"
ctagtagggcaggaaggttccaagagccggcacatgacctcatcccttcagctgctggtacggagtgtttccatgagggtgggtgggggtagggcctgggatgtctcactgggccctcaccc

SEQ ID NO: 17142 - DNA, 122 bp, Homo sapiens
  misc_feature (61)..(62): /note="This region represents a CpG dinucleotide"
  misc_feature (61)..(61): /note="Nucleotide may be methylated to form 5-methylcytosine"
gtcccctgggaatggagtccctgtccacccatgtgagtatggttagagtgacgggcactgcggctgggtggctctcgggctggcactgcggctgggtggctctcgggctggcactgcggctg

SEQ ID NO: 17143 - DNA, 122 bp, Homo sapiens
  misc_feature (61)..(62): /note="This region represents a CpG dinucleotide"
  misc_feature (61)..(61): /note="Nucleotide may be methylated to form 5-methylcytosine"
agtggaggaagcactgtggggagggttaggggttgaggactaagcattaaagcctccaagcgcttagagaggaagcaagtgggaaggggaaatcaagactcaaggaagcgttgatcccgcag

SEQ ID NO: 17144 - DNA, 122 bp, Homo sapiens
  misc_feature (61)..(62): /note="This region represents a CpG dinucleotide"
  misc_feature (61)..(61): /note="Nucleotide may be methylated to form 5-methylcytosine"
tcacgtctggtcatcactctagcttcagactcaaaagtgaacgattggctggctgtgagccgcaggaccctgcggggagaccagggtggtctctacactgttgggtagctagctggaggcaa

SEQ ID NO: 17145 - DNA, 122 bp, Homo sapiens
  misc_feature (61)..(62): /note="This region represents a CpG dinucleotide"
  misc_feature (61)..(61): /note="Nucleotide may be methylated to form 5-methylcytosine"
acagttcaccaattgtgcatgttatttcctgcagtgggcccaagatcactgacaggatgccgtcggggttgggctgaaggtggaaacagcacactagcttgctgtttgtggcctctttacaa

SEQ ID NO: 17146 - DNA, 122 bp, Homo sapiens
  misc_feature (61)..(62): /note="This region represents a CpG dinucleotide"
  misc_feature (61)..(61): /note="Nucleotide may be methylated to form 5-methylcytosine"
atatttaaatagttgtgtcaaatgtacttaaagtggggatcataaagctgatttcccagacgctgtgaaaaatgcatttctacgagtcaaattacaatgagtaactgttggagcaggaagta

SEQ ID NO: 17147 - DNA, 122 bp, Homo sapiens
  misc_feature (61)..(62): /note="This region represents a CpG dinucleotide"
  misc_feature (61)..(61): /note="Nucleotide may be methylated to form 5-methylcytosine"
gaagtaaccagtagattcaggagttagctgggtttgggttcagagttgcctcgctcctgccgctgttatttactaatgtgtgggcagaacagcctggggggttgagagagagagagagagag

SEQ ID NO: 17148 - DNA, 122 bp, Homo sapiens
  misc_feature (61)..(62): /note="This region represents a CpG dinucleotide"
  misc_feature (61)..(61): /note="Nucleotide may be methylated to form 5-methylcytosine"
acaaatgtcagaggattctagaactggtatttttcctttaattcaagcagaatgtataaccgtatgtaatcaagattaatcatacttgaacttcagagacatgattactgtatcacattcac

SEQ ID NO: 17149 - DNA, 122 bp, Homo sapiens
  misc_feature (61)..(62): /note="This region represents a CpG dinucleotide"
  misc_feature (61)..(61): /note="Nucleotide may be methylated to form 5-methylcytosine"
tcttccttaaatatctgccattaacctgcagggtagaatgagagggggaaaaacaaaagacgtgagaatcaaactaaagacacaaacagccactcagaggcacagcatgcactgtctaattt

SEQ ID NO: 17150 - DNA, 122 bp, Homo sapiens
  misc_feature (61)..(62): /note="This region represents a CpG dinucleotide"
  misc_feature (61)..(61): /note="Nucleotide may be methylated to form 5-methylcytosine"
taaggaatctcttaagcagcaagcaaaaaatatgattcataaacaagtgaaaatgagtcacgtagcagtaaacagaactggggccagaaaggcagctttggagttgtccccattcatttcaa

SEQ ID NO: 17151 - DNA, 122 bp, Homo sapiens
  misc_feature (61)..(62): /note="This region represents a CpG dinucleotide"
  misc_feature (61)..(61): /note="Nucleotide may be methylated to form 5-methylcytosine"
gcatttttcctttcacctatctgatgctgctcaaatgccagagtgctttaatgtgtctttcgcagtatagacggcccaggccctagcctgagattcagaccctgcccagttgagcaaaagga

SEQ ID NO: 17152 - DNA, 122 bp, Homo sapiens
  misc_feature (61)..(62): /note="This region represents a CpG dinucleotide"
  misc_feature (61)..(61): /note="Nucleotide may be methylated to form 5-methylcytosine"
tctagcgacaaaagattgaatttggccgttactcactcctcctccaacaaagttgtcaaacggggctgctacagacaagtagaatcacagattggagatcagctgtcattatgtaacagctg

SEQ ID NO: 17153 - DNA, 122 bp, Homo sapiens
  misc_feature (61)..(62): /note="This region represents a CpG dinucleotide"
  misc_feature (61)..(61): /note="Nucleotide may be methylated to form 5-methylcytosine"
ctcctcgttctactcagtttggacctgcattttggatcacaaatcccagagtctagtcaacgtactgtttagcccaagggttaagagaatggattctggagtcactgtgctggctttgcatc

SEQ ID NO: 17154 - DNA, 122 bp, Homo sapiens
  misc_feature (61)..(62): /note="This region represents a CpG dinucleotide"
  misc_feature (61)..(61): /note="Nucleotide may be methylated to form 5-methylcytosine"
tatgattcataaccaaatgcagtcagcgttacttgatttgcataaaccagcagaaaaggacgtttgcgactattagagaagtttgaagtttttagatgatgttgaaaatgtactattaatta

SEQ ID NO: 17155 - DNA, 122 bp, Homo sapiens
  misc_feature (61)..(62): /note="This region represents a CpG dinucleotide"
  misc_feature (61)..(61): /note="Nucleotide may be methylated to form 5-methylcytosine"
agtctagtttcctccccataggaaatgtggtattacatacagtacaaagggctgcactcacgtggaagggttaatccaaggctgtcagagctgagaatgaccttggagactacccatttcta

SEQ ID NO: 17156 - DNA, 122 bp, Homo sapiens
  misc_feature (61)..(62): /note="This region represents a CpG dinucleotide"
  misc_feature (61)..(61): /note="Nucleotide may be methylated to form 5-methylcytosine"
ttcgaaggcagccccagacaggggctgggggctggaggctcctcatgcagctgctggccgcgggatccatctgctgtccgctgcacgcctcggtcctttcaaagatttgattctttatactt

SEQ ID NO: 17157 - DNA, 122 bp, Homo sapiens
  misc_feature (61)..(62): /note="This region represents a CpG dinucleotide"
  misc_feature (61)..(61): /note="Nucleotide may be methylated to form 5-methylcytosine"
acttggaaaaaccacaatgaacaaaacacaaaagtccctgcatcatgaaggctatgatcgcggagtgtttcagactgccatgctcctccagagagaaagaacaccttatcatgtgcctgtca

SEQ ID NO: 17158 - DNA, 122 bp, Homo sapiens
  misc_feature (61)..(62): /note="This region represents a CpG dinucleotide"
  misc_feature (61)..(61): /note="Nucleotide may be methylated to form 5-methylcytosine"
acagactcagccctcttagaagcatgtcaatggaggcatgtcaacactcaatgaacaggacggccaaaagccaggaaggtgaactcacctttggaactgataagagtcattgtttagctttc

SEQ ID NO: 17159 - DNA, 122 bp, Homo sapiens
  misc_feature (61)..(62): /note="This region represents a CpG dinucleotide"
  misc_feature (61)..(61): /note="Nucleotide may be methylated to form 5-methylcytosine"
gcccttggtgttgcaaagggaatcgggctggcatgtcttcaggggaagttgcgtgaggtccgggaggcccagggcagggaccgcatctgcaggattaggcaccggggcaaggtcttttggga

SEQ ID NO: 17160 - DNA, 122 bp, Homo sapiens
  misc_feature (61)..(62): /note="This region represents a CpG dinucleotide"
  misc_feature (61)..(61): /note="Nucleotide may be methylated to form 5-methylcytosine"
tccaaaatcccttgcaacatcctgagtgacaggagtgccttttcttctaatgaagtgactcgctgggctcctggacagcatcaggatgagggctggtcaccaggaagaccaagccaggattt

SEQ ID NO: 17161 - DNA, 122 bp, Homo sapiens
  misc_feature (61)..(62): /note="This region represents a CpG dinucleotide"
  misc_feature (61)..(61): /note="Nucleotide may be methylated to form 5-methylcytosine"
caaatatctaaacaaaatgctgtggtctcttaccagcacttaaaaagttaacaacagcaccgaatagaattgctcaaggcagtgaaggttaaaccagcatttggaaatgctgtgagaacaca

SEQ ID NO: 17162 - DNA, 122 bp, Homo sapiens
  misc_feature (61)..(62): /note="This region represents a CpG dinucleotide"
  misc_feature (61)..(61): /note="Nucleotide may be methylated to form 5-methylcytosine"
aacaaagctcaacatttttggattaataaatactgttttgagacatcagtatctgacaatcgctttcataaacaaaagacttgtgcaaactccacaattttgcttcagactaagccaaactg

SEQ ID NO: 17163 - DNA, 122 bp, Homo sapiens
  misc_feature (61)..(62): /note="This region represents a CpG dinucleotide"
  misc_feature (61)..(61): /note="Nucleotide may be methylated to form 5-methylcytosine"
atttagattgcttccaaactcattctaaacaatgctgcaatgaatattcttgtacactctcgttatgcatgtgaatacggtaccattttaacctggaatttctgttctttaaatagctattg

SEQ ID NO: 17164 - DNA, 122 bp, Homo sapiens
  misc_feature (61)..(62): /note="This region represents a CpG dinucleotide"
  misc_feature (61)..(61): /note="Nucleotide may be methylated to form 5-methylcytosine"
tgaacgaagtgaggtgacaggctctgtaatcatctgggaaaagggcccaggcagaagaaacggaaactgcaaaggcccagaggccaatacaaacttggcgtgttcaagaacaacaaaaaggc

SEQ ID NO: 17165 - DNA, 122 bp, Homo sapiens
  misc_feature (61)..(62): /note="This region represents a CpG dinucleotide"
  misc_feature (61)..(61): /note="Nucleotide may be methylated to form 5-methylcytosine"
aaagtgcaactggcaatgctctagagaaatagatacaattgcaactctctcattcaaccacgaaagcttttctccacgaacaggactttaacatgtcccacctaagggaagaagacagtagg

SEQ ID NO: 17166 - DNA, 122 bp, Homo sapiens
  misc_feature (61)..(62): /note="This region represents a CpG dinucleotide"
  misc_feature (61)..(61): /note="Nucleotide may be methylated to form 5-methylcytosine"
tagaggaaacacaattcaaacacagaaatacaatctgaaatgaacttcctgatactagggcgaggaaaatataaatgtttggaaaggaaaccatctggtctctcaactttatggatcttaaa

SEQ ID NO: 17167 - DNA, 122 bp, Homo sapiens
  misc_feature (61)..(62): /note="This region represents a CpG dinucleotide"
  misc_feature (61)..(61): /note="Nucleotide may be methylated to form 5-methylcytosine"
ttgagacagatttcgatgcttcctcaaggttactcagcaaggaagaatggagacagcactcggtgccagctctgtctgaaaacacagccagattccaggttacagggttattctgcttccga

SEQ ID NO: 17168 - DNA, 122 bp, Homo sapiens
  misc_feature (61)..(62): /note="This region represents a CpG dinucleotide"
  misc_feature (61)..(61): /note="Nucleotide may be methylated to form 5-methylcytosine"
cccgcttcggcctcctaaaatgctgggattacagtcgtgagccaccatgcccagccaatacgtttctttttgataacttgaaatgagatttgcataaggtgaaaagtgagtggaaattgtag

SEQ ID NO: 17169 - DNA, 122 bp, Homo sapiens
  misc_feature (61)..(62): /note="This region represents a CpG dinucleotide"
  misc_feature (61)..(61): /note="Nucleotide may be methylated to form 5-methylcytosine"
caggactatgtggccacggtggccgacgccctcaagatgaacaagaatgtggtgctggcccgggccagcggggccttgccccctgagcggctgagccgggggtctgggggcacctctcagct

SEQ ID NO: 17170 - DNA, 122 bp, Homo sapiens
  misc_feature (61)..(62): /note="This region represents a CpG dinucleotide"
  misc_feature (61)..(61): /note="Nucleotide may be methylated to form 5-methylcytosine"
aaattctcatagtaggaaagagttacaggagttatatagtaaacctacaccaagaaatttcgtaggaattatatgccaatgaaagaaaatgtaggtaggcaggtcttagtaatgtatatctg

SEQ ID NO: 17171 - DNA, 122 bp, Homo sapiens
  misc_feature (61)..(62): /note="This region represents a CpG dinucleotide"
  misc_feature (61)..(61): /note="Nucleotide may be methylated to form 5-methylcytosine"
taaatgtatataaccccaatgtgattactagtttgttatgaagcatatgtgcagtgagaacgtgctacaaagagaaagtgtatatggtagtgtgtgtagaaacgagacactggcttctcgta

SEQ ID NO: 17172 - DNA, 122 bp, Homo sapiens
  misc_feature (61)..(62): /note="This region represents a CpG dinucleotide"
  misc_feature (61)..(61): /note="Nucleotide may be methylated to form 5-methylcytosine"
gcccttcccctgcctctgcatagagctcagtcacgaggggaggctcacaaggccaccatccgcctgcctgtggtgcagacacctcccagctggcaggctcaaggcagccacgcacacctggc

SEQ ID NO: 17173 - DNA, 122 bp, Homo sapiens
  misc_feature (61)..(62): /note="This region represents a CpG dinucleotide"
  misc_feature (61)..(61): /note="Nucleotide may be methylated to form 5-methylcytosine"
acagtctcccttggtagctttgcggggaaatgcgggccagtagataatacactttaataccgaaagaatattagttaattatccaacccattaaacatttattgagcacttaacatgtgcca

SEQ ID NO: 17174 - DNA, 122 bp, Homo sapiens
  misc_feature (61)..(62): /note="This region represents a CpG dinucleotide"
  misc_feature (61)..(61): /note="Nucleotide may be methylated to form 5-methylcytosine"
cgaactcctgacctcaagtgatcctcctgccttggcttccgaaagtgctagggttacaggcgtgagccacagtactcggcttcatgatttaatgttcatgggagataaacaacatagggagg

SEQ ID NO: 17175 - DNA, 122 bp, Homo sapiens
  misc_feature (61)..(62): /note="This region represents a CpG dinucleotide"
  misc_feature (61)..(61): /note="Nucleotide may be methylated to form 5-methylcytosine"
cacaatgatgaaatcacctaacaatgcatttctcagaagttatcccagtgttaaatgacacgtgactgtatatatagggttcagtactatcttcagtttcaggcatccactgggggtcatgg

SEQ ID NO: 17176 - DNA, 122 bp, Homo sapiens
  misc_feature (61)..(62): /note="This region represents a CpG dinucleotide"
  misc_feature (61)..(61): /note="Nucleotide may be methylated to form 5-methylcytosine"
aggtatccctcagtgttcttctatttataaggaacagaaaacccaacttaaattgacttacgtaaaaagagtttgttggttggtgtaattgaaaagtacatggttaactagcttcaggcata

SEQ ID NO: 17177 - DNA, 122 bp, Homo sapiens
  misc_feature (61)..(62): /note="This region represents a CpG dinucleotide"
  misc_feature (61)..(61): /note="Nucleotide may be methylated to form 5-methylcytosine"
cactttctcccttgctcttcctgggcagcatcttgaaagcatgcttacactcttgcctctcgttcacacctgacctcctccaacctgacttacatccatcactttacaaaagtagctcctcc

SEQ ID NO: 17178 - DNA, 122 bp, Homo sapiens
  misc_feature (61)..(62): /note="This region represents a CpG dinucleotide"
  misc_feature (61)..(61): /note="Nucleotide may be methylated to form 5-methylcytosine"
caggttgctttttaatttctaatgtgtttttaatttgcaaagcatgcatgtgcctttcaccgcagtagaattgagtcagcatttctgagtccagatattaagagtcaggcttaagaatgctg

SEQ ID NO: 17179 - DNA, 122 bp, Homo sapiens
  misc_feature (61)..(62): /note="This region represents a CpG dinucleotide"
  misc_feature (61)..(61): /note="Nucleotide may be methylated to form 5-methylcytosine"
cgttatcttgaggcggagctgctgcctcaggctgctgttagtgacttccagaaccctgttcgtctgctggagctgctgagacacctgcagatctgtttggccacagagatttggtggatgtc

SEQ ID NO: 17180 - DNA, 122 bp, Homo sapiens
  misc_feature (61)..(62): /note="This region represents a CpG dinucleotide"
  misc_feature (61)..(61): /note="Nucleotide may be methylated to form 5-methylcytosine"
gggctcaagaatcctcccacctccgcctcctgaagtgctgggattacaggcgtgagccaccgcacccagccccaggagtcccttttgaatcagggttgggcaccaatttgacccatactgaa

SEQ ID NO: 17181 - DNA, 122 bp, Homo sapiens
  misc_feature (61)..(62): /note="This region represents a CpG dinucleotide"
  misc_feature (61)..(61): /note="Nucleotide may be methylated to form 5-methylcytosine"
ctaggaacttggccaacatatgcaacattgttctatttaaaatattccttgaattaaattcgatagtatcaatttaaaacataaagttttcactcaactcctttagaagttagattttagct

SEQ ID NO: 17182 - DNA, 122 bp, Homo sapiens
  misc_feature (61)..(62): /note="This region represents a CpG dinucleotide"
  misc_feature (61)..(61): /note="Nucleotide may be methylated to form 5-methylcytosine"
catttaagcactgtggcttagtgattaagaacacaactcatgaccgggtgcagtggcttacgcctgtaatcccagcactttgggaggctgaggcgggtggatcacctgaggacaggagttcg

SEQ ID NO: 17183 - DNA, 122 bp, Homo sapiens
  misc_feature (61)..(62): /note="This region represents a CpG dinucleotide"
  misc_feature (61)..(61): /note="Nucleotide may be methylated to form 5-methylcytosine"
actcacctggacccatgcaagagactcctaactcagctgcttctttcatctgctgccctgcggggcatttgtgtattctcaacagggcagggattctgttacaatgtaaaccagagcctgct

SEQ ID NO: 17184 - DNA, 122 bp, Homo sapiens
  misc_feature (61)..(62): /note="This region represents a CpG dinucleotide"
  misc_feature (61)..(61): /note="Nucleotide may be methylated to form 5-methylcytosine"
cggcaaagactgagacagctccgctgcccgctgaactccatcctcccggcggtcgggcggcggcggctgccaagtctttttcattgttaccaatctaataggtaatatttcctcagaaattc

SEQ ID NO: 17185 - DNA, 122 bp, Homo sapiens
  misc_feature (61)..(62): /note="This region represents a CpG dinucleotide"
  misc_feature (61)..(61): /note="Nucleotide may be methylated to form 5-methylcytosine"
ctcctgggtgaggcaaacattttgagtcagttgagagggatcgctcattcactcttgcagcgggaaggcagagaagtttcagtttatcttctgttctgtctcaatcagttgggtagaatgag

SEQ ID NO: 17186 - DNA, 122 bp, Homo sapiens
  misc_feature (61)..(62): /note="This region represents a CpG dinucleotide"
  misc_feature (61)..(61): /note="Nucleotide may be methylated to form 5-methylcytosine"
tgactccaggctgtcactacactatgttactgggctacactgcctcacagattcagaacacgctcagaagactatcactttggtcacagtgccagtggcccaaataacctatagaacattaa

SEQ ID NO: 17187 - DNA, 122 bp, Homo sapiens
  misc_feature (61)..(62): /note="This region represents a CpG dinucleotide"
  misc_feature (61)..(61): /note="Nucleotide may be methylated to form 5-methylcytosine"
ttggatgtgctgttcccatctagtactgaataactcataaaactgtgtgtctaggttgggcgtggagcaaacaaaagacctgcaccagatccagattgagaagcaagcagccaggctatgcg

SEQ ID NO: 17188 - DNA, 122 bp, Homo sapiens
  misc_feature (61)..(62): /note="This region represents a CpG dinucleotide"
  misc_feature (61)..(61): /note="Nucleotide may be methylated to form 5-methylcytosine"
caaactccgacctcggtttcgcccttgcaactcccagctttcctatatgtccaagggcggcgagggctcaaaagtcctggataatccgcagatagaacacacacacccttttccgaattctg

SEQ ID NO: 17189 - DNA, 122 bp, Homo sapiens
  misc_feature (61)..(62): /note="This region represents a CpG dinucleotide"
  misc_feature (61)..(61): /note="Nucleotide may be methylated to form 5-methylcytosine"
tgattagatatgacagcaacccacaccgtcgtagtcacggtcatgctgaaaaggcagaagcgaacctgagctgcccaaagacaaaggctgaaaccacatgcagatttgggccaaatcccagg

SEQ ID NO: 17190 - DNA, 122 bp, Homo sapiens
  misc_feature (61)..(62): /note="This region represents a CpG dinucleotide"
  misc_feature (61)..(61): /note="Nucleotide may be methylated to form 5-methylcytosine"
aggactcaggctaggggtggtgcctttcccttcttggaaactcttgctggcattctcaaccgtcatccttgctccaggaaggagactctcctatatgctcctatagcatccagagctgacat

SEQ ID NO: 17191 - DNA, 122 bp, Homo sapiens
  misc_feature (61)..(62): /note="This region represents a CpG dinucleotide"
  misc_feature (61)..(61): /note="Nucleotide may be methylated to form 5-methylcytosine"
aatgctttgaaaactaaagaaaatcacgttatattagaagccttaccctggtttcactttcgctgaagatatcactgtttgccacacaggcaatcagggagctaaaactgtagttaaagttt

SEQ ID NO: 17192 - DNA, 122 bp, Homo sapiens
  misc_feature (61)..(62): /note="This region represents a CpG dinucleotide"
  misc_feature (61)..(61): /note="Nucleotide may be methylated to form 5-methylcytosine"
acactggccactaaggtggagtttcctttggccacaggccactaacaatccttgagttcccgcctatcccacgtccaaataagtacaagaataacagtgtccttatcccacaggttacatgt

SEQ ID NO: 17193 - DNA, 122 bp, Homo sapiens
  misc_feature (61)..(62): /note="This region represents a CpG dinucleotide"
  misc_feature (61)..(61): /note="Nucleotide may be methylated to form 5-methylcytosine"
gctcctccactcccactctgccagagctggatttgttaagttggccagggacctctgctgcgtgaggaacactgctcgctctgacttctcagcaaaacacaaagcgcagccagccacttcct

SEQ ID NO: 17194 - DNA, 122 bp, Homo sapiens
  misc_feature (61)..(62): /note="This region represents a CpG dinucleotide"
  misc_feature (61)..(61): /note="Nucleotide may be methylated to form 5-methylcytosine"
caaaaaactgtcacttacatttcagtacatacccctctggtcttttgttgtacatatacacgtatatttaaaatccttttcttgtgaactttatgttggtgcgggggaggtgtataattgca

SEQ ID NO: 17195 - DNA, 122 bp, Homo sapiens
  misc_feature (61)..(62): /note="This region represents a CpG dinucleotide"
  misc_feature (61)..(61): /note="Nucleotide may be methylated to form 5-methylcytosine"
aactgaatcatattttcctactgactgactaacagtaatttaagactctaattggtcttccgttagctgtcatttattgtaattctttgtgaaatgcacatgatctttaacataaaatatct

SEQ ID NO: 17196 - DNA, 122 bp, Homo sapiens
  misc_feature (61)..(62): /note="This region represents a CpG dinucleotide"
  misc_feature (61)..(61): /note="Nucleotide may be methylated to form 5-methylcytosine"
ttctcaaagactgtggtgtgttgacaaaataaaaaaatgaatcaagcctttcaggcactacggtggatgcaggtgtcttgaaagatctgctttactgctacaagtgcatagaaaatcttagg

SEQ ID NO: 17197 - DNA, 122 bp, Homo sapiens
  misc_feature (61)..(62): /note="This region represents a CpG dinucleotide"
  misc_feature (61)..(61): /note="Nucleotide may be methylated to form 5-methylcytosine"
agggctgagacagtgaggctggtgtggcaacggtgctgccctgagcccctgatctggctccgacactcactagccgtgggaccccaggcaagtcactgagcctgggctggattttctcatct

SEQ ID NO: 17198 - DNA, 122 bp, Homo sapiens
  misc_feature (61)..(62): /note="This region represents a CpG dinucleotide"
  misc_feature (61)..(61): /note="Nucleotide may be methylated to form 5-methylcytosine"
tgccaggcaaggcctctcgcctgcctccttaggaccaaagccacctaacttctgcccaggcgaaggcagtaaacgtctctaactctgcggaaggcaaaaagtcaagtcacacaaagaaaaaa

SEQ ID NO: 17199 - DNA, 122 bp, Homo sapiens
  misc_feature (61)..(62): /note="This region represents a CpG dinucleotide"
  misc_feature (61)..(61): /note="Nucleotide may be methylated to form 5-methylcytosine"
gtgtctggttcagtcttctgtgcatttggaattttcaaattgaggctatcagggtttgttcgccctggatgtagaaagcaaaaatctggatcttacacattcctgggatctgactggtgagg

SEQ ID NO: 17200 - DNA, 122 bp, Homo sapiens
  misc_feature (61)..(62): /note="This region represents a CpG dinucleotide"
  misc_feature (61)..(61): /note="Nucleotide may be methylated to form 5-methylcytosine"
aacattgctgacagatggccatttggtatgtgcctgaaatacatctagaggtgggaagcacgttagttagaggcaacctgttcactagatttgggacttgagtgttttagcaagatccttga

SEQ ID NO: 17201 - DNA, 122 bp, Homo sapiens
  misc_feature (61)..(62): /note="This region represents a CpG dinucleotide"
  misc_feature (61)..(61): /note="Nucleotide may be methylated to form 5-methylcytosine"
caactgtgggagagaaggttgtttgtccactaaaatcctggctcctcctccagagaatagcgtttgttctaggaagtggctgcctccctgtgactggaatgtgagccaatgtaatgtgtaac

SEQ ID NO: 17202 - DNA, 122 bp, Homo sapiens
  misc_feature (61)..(62): /note="This region represents a CpG dinucleotide"
  misc_feature (61)..(61): /note="Nucleotide may be methylated to form 5-methylcytosine"
ggttggatgaatatacttaacactactgaactgtacacttaaagatcgttaggaaggaaacgggactacatcaaacttaaaaatgtctgtgtgtcaaaggaagcaatcaacaaagtgaaaac

SEQ ID NO: 17203 - DNA, 122 bp, Homo sapiens
  misc_feature (61)..(62): /note="This region represents a CpG dinucleotide"
  misc_feature (61)..(61): /note="Nucleotide may be methylated to form 5-methylcytosine"
ggcggacgcccaggaggcaacttctgagacgcagctcctgagaggggcagggaccaggcgcgggaggccagagggggcacagagaacaaaccccctcagaagtgaagaggagagcggaagga

SEQ ID NO: 17204 - DNA, 122 bp, Homo sapiens
  misc_feature (61)..(62): /note="This region represents a CpG dinucleotide"
  misc_feature (61)..(61): /note="Nucleotide may be methylated to form 5-methylcytosine"
aatctgtgtacctaattgggggaaaagttggctttagaaccagagaaactaaatgggaaacgtactttatgtttgtgctgaaatctgatgataagatttgaaaacattctttttcagagttc

SEQ ID NO: 17205 - DNA, 122 bp, Homo sapiens
  misc_feature (61)..(62): /note="This region represents a CpG dinucleotide"
  misc_feature (61)..(61): /note="Nucleotide may be methylated to form 5-methylcytosine"
gggtctctctgctcccaaagaaccacaggccgctgtgtatgtcgggggctcacgagctcacgtgctacacggcccagaagcaaaaggtttagacagattcatccaggggcttgattcatggc

SEQ ID NO: 17206 - DNA, 122 bp, Homo sapiens
  misc_feature (61)..(62): /note="This region represents a CpG dinucleotide"
  misc_feature (61)..(61): /note="Nucleotide may be methylated to form 5-methylcytosine"
atacatttcattctttgctagcttacacttatgtttgttttccttcctgcaactttacggcggacatcagatactgatgtttgcctgaggatgtgtactgcttcaggaacacaaatttcaca

SEQ ID NO: 17207 - DNA, 122 bp, Homo sapiens
  misc_feature (61)..(62): /note="This region represents a CpG dinucleotide"
  misc_feature (61)..(61): /note="Nucleotide may be methylated to form 5-methylcytosine"
aactagttagagattattcactgtgaggcttttgcaaagggcacaggctggatgagtggccgtgagcgtccgtgttcctgagcagactgtgctgtggcccaatcctgtgcgtgtctcctctt

SEQ ID NO: 17208 - DNA, 122 bp, Homo sapiens
  misc_feature (61)..(62): /note="This region represents a CpG dinucleotide"
  misc_feature (61)..(61): /note="Nucleotide may be methylated to form 5-methylcytosine"
ttgactctgcaatgcctagtacagtatctggtacatagtagctgctcaatagatatttgtcgaattaatgagttaaatcagggaaatggccactccttaaaatgtttttaattggtgtgtca

SEQ ID NO: 17209 - DNA, 122 bp, Homo sapiens
  misc_feature (61)..(62): /note="This region represents a CpG dinucleotide"
  misc_feature (61)..(61): /note="Nucleotide may be methylated to form 5-methylcytosine"
aggaattccagtggagcgctgagagcgctgcccagatttcagcaggctgaggtttggagacgaggggtgtagggtgtggtgggaagatgggaggtgaagtcagtccacgtgtgtgattagct

SEQ ID NO: 17210 - DNA, 122 bp, Homo sapiens
  misc_feature (61)..(62): /note="This region represents a CpG dinucleotide"
  misc_feature (61)..(61): /note="Nucleotide may be methylated to form 5-methylcytosine"
tggagcctcagggcgggttggggaagctggcgaggccgagccccgctttgggcttctgggcgccctgacctcgctcccggaaccctggggactgggaggcgggagggggcttattgattcca

SEQ ID NO: 17211 - DNA, 122 bp, Homo sapiens
  misc_feature (61)..(62): /note="This region represents a CpG dinucleotide"
  misc_feature (61)..(61): /note="Nucleotide may be methylated to form 5-methylcytosine"
cttatcctgccttatatgtcaataaccttaatttaccttctgatcatctccttggctgcccgtgctgtctgaaaatcagccttttcttaaaatggcaaatagtggggaaaagtagcatctaa

SEQ ID NO: 17212 - DNA, 122 bp, Homo sapiens
  misc_feature (61)..(62): /note="This region represents a CpG dinucleotide"
  misc_feature (61)..(61): /note="Nucleotide may be methylated to form 5-methylcytosine"
agagccaggttgggggaaaaggataaggccacaaaagacgagcagagagagaaaaaaacacgaatttggggaaagctagcgtaagaatacagaaaagtattttttaaatccactcaaaaact

SEQ ID NO: 17213 - DNA, 122 bp, Homo sapiens
  misc_feature (61)..(62): /note="This region represents a CpG dinucleotide"
  misc_feature (61)..(61): /note="Nucleotide may be methylated to form 5-methylcytosine"
acctggaaggactccccttcccttcttcctaccatactcccccttcttatttgagctggccggaccacatactgatgacatacaaccctggtaataaagcactgctaagggtgacattcact

SEQ ID NO: 17214 - DNA, 122 bp, Homo sapiens
  misc_feature (61)..(62): /note="This region represents a CpG dinucleotide"
  misc_feature (61)..(61): /note="Nucleotide may be methylated to form 5-methylcytosine"
ggcattccttttattgtccctgaaggtgattttcagatgctcgtgtttccacaggaaaaacgtgtcaacatggttcatattgaatccaggaaatctcggcgaagaagttctgaggttgaaat

SEQ ID NO: 17215 - DNA, 122 bp, Homo sapiens
  misc_feature (61)..(62): /note="This region represents a CpG dinucleotide"
  misc_feature (61)..(61): /note="Nucleotide may be methylated to form 5-methylcytosine"
tttcaaaacaaacaaaaaaacaaacccacagcagtgctctcctgagtatgcagcctgcagcgtgagtgactacacaggttgcacagccatgaagctggccccgctaatctctctgtaagaat

SEQ ID NO: 17216 - DNA, 122 bp, Homo sapiens
  misc_feature (61)..(62): /note="This region represents a CpG dinucleotide"
  misc_feature (61)..(61): /note="Nucleotide may be methylated to form 5-methylcytosine"
tactgtggttaccattcttgggaggccattttaagatttcttaaagtgacccagagaaatcgtagcttggtatttactaaatgtgtttgtgtatgttatttcatagctgtatacgctcacct

SEQ ID NO: 17217 - DNA, 122 bp, Homo sapiens
  misc_feature (61)..(62): /note="This region represents a CpG dinucleotide"
  misc_feature (61)..(61): /note="Nucleotide may be methylated to form 5-methylcytosine"
tggccccttcatggcacagcgacagctttgccatcagccggcaagcatgcggggtgtggacgacacagccggagagagcagaggccaggctcatgaatcggacaacgagctcgagttttcaa

SEQ ID NO: 17218 - DNA, 122 bp, Homo sapiens
  misc_feature (61)..(62): /note="This region represents a CpG dinucleotide"
  misc_feature (61)..(61): /note="Nucleotide may be methylated to form 5-methylcytosine"
atgaggggctggggtatagctgacgccctttagctttatctcctgtcttgactagcaagccgtgggtagtcctgcagatcatgggtggatgattaactgctggaaagcagtcctccttggct

SEQ ID NO: 17219 - DNA, 122 bp, Homo sapiens
  misc_feature (61)..(62): /note="This region represents a CpG dinucleotide"
  misc_feature (61)..(61): /note="Nucleotide may be methylated to form 5-methylcytosine"
ggggaatggaaagcctggcgctgggagagctgcgctcttgaccctcctttccctctaactcgcccagccatctagggaaatgcacttcgtttttgcgcttcaacctcttatctgtaaaacat

SEQ ID NO: 17220 - DNA, 122 bp, Homo sapiens
  misc_feature (61)..(62): /note="This region represents a CpG dinucleotide"
  misc_feature (61)..(61): /note="Nucleotide may be methylated to form 5-methylcytosine"
tgtttagcatccctgggcttaaaatgccaggagactcccagttactgagacaacacacatcgtggcacctctagagaaagggtacagaactggggataccatgcccaggaagaccagtctag

SEQ ID NO: 17221 - DNA, 122 bp, Homo sapiens
  misc_feature (61)..(62): /note="This region represents a CpG dinucleotide"
  misc_feature (61)..(61): /note="Nucleotide may be methylated to form 5-methylcytosine"
acagtagcaccatgagactgttctcagcctcattttaaagatgagagttgaagcacagagcggtaaagaaacttgcccaagctaaggtcacacagctacgaagtgcaaaggctggatttcaa

SEQ ID NO: 17222 - DNA, 122 bp, Homo sapiens
  misc_feature (61)..(62): /note="This region represents a CpG dinucleotide"
  misc_feature (61)..(61): /note="Nucleotide may be methylated to form 5-methylcytosine"
ctcaaaaatccagttactcaactacctgatttgccagtggagctggccctggttcttgtccgtgggacagggtgagtcaggggattgaattgggggttctctggactcagggcctagggctt

SEQ ID NO: 17223 - DNA, 122 bp, Homo sapiens
  misc_feature (61)..(62): /note="This region represents a CpG dinucleotide"
  misc_feature (61)..(61): /note="Nucleotide may be methylated to form 5-methylcytosine"
cttttgaaaaatgagagaaactaagtgccagaagtcaatgactttgtttcacgctcaattcgctcccaggcaccggatctgagagcaaaccttttaaatctcccctcctgctcccaaacttg

SEQ ID NO: 17224 - DNA, 122 bp, Homo sapiens
  misc_feature (61)..(62): /note="This region represents a CpG dinucleotide"
  misc_feature (61)..(61): /note="Nucleotide may be methylated to form 5-methylcytosine"
ttctggaggcttagttacgcaattgccggctctgtcatcttctacagggatgtgaccttacggaaaagtaaggaatctgaagcgtggcagatcactttgaagcttgcccagtttttgcatgt

SEQ ID NO: 17225 - DNA, 122 bp, Homo sapiens
  misc_feature (61)..(62): /note="This region represents a CpG dinucleotide"
  misc_feature (61)..(61): /note="Nucleotide may be methylated to form 5-methylcytosine"
ctctaactaaacacatgagtgagcatttggtcatctcaggccaggcaggaatattggaaacggatggagcaaagtcacagacaaagcctgcatgcctgcatgccatgtttttaggttgtaag

SEQ ID NO: 17226 - DNA, 122 bp, Homo sapiens
  misc_feature (61)..(62): /note="This region represents a CpG dinucleotide"
  misc_feature (61)..(61): /note="Nucleotide may be methylated to form 5-methylcytosine"
caacctcatccaaggccacaccccttgcaagtgatatgatatcgtttggatatttgtccccgcccaaatctcgtgttgaattgtaaaccccagtgttagaggtgggcctggtgggaggtgtt

SEQ ID NO: 17227 - DNA, 122 bp, Homo sapiens
  misc_feature (61)..(62): /note="This region represents a CpG dinucleotide"
  misc_feature (61)..(61): /note="Nucleotide may be methylated to form 5-methylcytosine"
tttgataagttattgctcaattccccttaagtggctgtttcctcatatcctcatcaacaccgtgttatcaaactttttgatctttgccaatctgagaggtgaaaaatgttatctccaagtgg

SEQ ID NO: 17228 - DNA, 122 bp, Homo sapiens
  misc_feature (61)..(62): /note="This region represents a CpG dinucleotide"
  misc_feature (61)..(61): /note="Nucleotide may be methylated to form 5-methylcytosine"
accaatagattatttcataaaactaaaatggcacatattgtaaggtgtaccattattttacgtaccagtaagaacatgaactgccagtccaactagtgcatgatgtccagatttcagagatg

SEQ ID NO: 17229 - DNA, 122 bp, Homo sapiens
  misc_feature (61)..(62): /note="This region represents a CpG dinucleotide"
  misc_feature (61)..(61): /note="Nucleotide may be methylated to form 5-methylcytosine"
actttgcccatggtccattgctaatcctctctgctagtggtaatgtatggaagtgagaggcgtcagcaacattgaaagacatcacattctaggagtgcaatcattacagcaattcaagagaa

SEQ ID NO: 17230 - DNA, 122 bp, Homo sapiens
  misc_feature (61)..(62): /note="This region represents a CpG dinucleotide"
  misc_feature (61)..(61): /note="Nucleotide may be methylated to form 5-methylcytosine"
gtctccctagtgtgtgctctgacacgcaactgcagtactacacactgaaaagtgttgagacgtgattgcaccactcttgattttgtcattaagtagccagttgccactggaaagagactttt

SEQ ID NO: 17231 - DNA, 122 bp, Homo sapiens
  misc_feature (61)..(62): /note="This region represents a CpG dinucleotide"
  misc_feature (61)..(61): /note="Nucleotide may be methylated to form 5-methylcytosine"
tttgtttttcagctctgacttttagaaacctattcattgcatagtaatacacctgaatttcggtttttatttttctgattcagaagcaagtaacaaaagctaaaaaagaactttatctgtca

SEQ ID NO: 17232 - DNA, 122 bp, Homo sapiens
  misc_feature (61)..(62): /note="This region represents a CpG dinucleotide"
  misc_feature (61)..(61): /note="Nucleotide may be methylated to form 5-methylcytosine"
gtgagattatggaactcctgagcctcttagattgcaaaagagaccaaacagttgaccttacggtttccagcagacatgggtcctggtacagtgttatgaaatctaatatttgtaatatagaa

SEQ ID NO: 17233 - DNA, 122 bp, Homo sapiens
  misc_feature (61)..(62): /note="This region represents a CpG dinucleotide"
  misc_feature (61)..(61): /note="Nucleotide may be methylated to form 5-methylcytosine"
gaagtgatgtgtgccacttcgaagcagaagctctgattcatcatatggttctactatgttcgttctctcttccatgaaaccagcaatatcccaaatacagactgctggtcccaggatggaaa

SEQ ID NO: 17234 - DNA, 122 bp, Homo sapiens
  misc_feature (61)..(62): /note="This region represents a CpG dinucleotide"
  misc_feature (61)..(61): /note="Nucleotide may be methylated to form 5-methylcytosine"
gggtagtgtttatttttcagtcattcattacattaacagattagtcacctactacatgcccgttagtgtgcttgtcccttgtgagagattagtgagtggtaactagagatataattcccgct

SEQ ID NO: 17235 - DNA, 122 bp, Homo sapiens
  misc_feature (61)..(62): /note="This region represents a CpG dinucleotide"
  misc_feature (61)..(61): /note="Nucleotide may be methylated to form 5-methylcytosine"
aatgatcacaacagccagggaacccagtccaacacccgccatctgcagcagcatgagtgacgaatctgtgggacaaaaccacaggcttagcccagagtgcacggcatcaccacctcccagga

SEQ ID NO: 17236 - DNA, 122 bp, Homo sapiens
  misc_feature (61)..(62): /note="This region represents a CpG dinucleotide"
  misc_feature (61)..(61): /note="Nucleotide may be methylated to form 5-methylcytosine"
ctcaatggcattactggatccaggttaggattatctgagaatacatttatctgcattttacggaaggcaaccgaggttcatagagatagtgatttggccagcgtcacaggcccagtaaaagg

SEQ ID NO: 17237 - DNA, 122 bp, Homo sapiens
  misc_feature (61)..(62): /note="This region represents a CpG dinucleotide"
  misc_feature (61)..(61): /note="Nucleotide may be methylated to form 5-methylcytosine"
tcacaatgaatgagaaatggattctgcccacaagtaacttagcctggggtggggacatggcgcacctaattagctgggttgaggctgacatttctgttaggaacttgaagtacaggtatttt

SEQ ID NO: 17238 - DNA, 122 bp, Homo sapiens
  misc_feature (61)..(62): /note="This region represents a CpG dinucleotide"
  misc_feature (61)..(61): /note="Nucleotide may be methylated to form 5-methylcytosine"
ctctgggctgcgctgggagaccgcggagttcctgcctcactcacgtctgatcagaagccccggctcccactccaggaagagtccagtcggggcaactcaagcccctttccccagaaacttcc

SEQ ID NO: 17239 - DNA, 122 bp, Homo sapiens
  misc_feature (61)..(62): /note="This region represents a CpG dinucleotide"
  misc_feature (61)..(61): /note="Nucleotide may be methylated to form 5-methylcytosine"
attcttgtatgtcactataacacttgactattccagacgaacaggaaattccttattcatcggtttgttcaacatactgcatagtccaagatgtattataggagtagagggtgtgcctgaga

SEQ ID NO: 17240 - DNA, 122 bp, Homo sapiens
  misc_feature (61)..(62): /note="This region represents a CpG dinucleotide"
  misc_feature (61)..(61): /note="Nucleotide may be methylated to form 5-methylcytosine"
aacccgcccaatcgcccaaatacttcagaacgtttcaggcagaggaaatatgccaagacccggtgctcagaaggtgggggagcgtggccaaagctaaagcagtggctggcagctggtggcgc

SEQ ID NO: 17241 - DNA, 122 bp, Homo sapiens
  misc_feature (61)..(62): /note="This region represents a CpG dinucleotide"
  misc_feature (61)..(61): /note="Nucleotide may be methylated to form 5-methylcytosine"
acatcctgcagttctactccctgggatctacacaagagaactaacacagaatctcagaaacgtgcacatgaatgttcccagcagcattattcatagtagccaaaacaacccagataaatgga

SEQ ID NO: 17242 - DNA, 122 bp, Homo sapiens
  misc_feature (61)..(62): /note="This region represents a CpG dinucleotide"
  misc_feature (61)..(61): /note="Nucleotide may be methylated to form 5-methylcytosine"
ctttagcacagcggttgctgtgaggattaaatgagatgctttgtgtaaagccctgtgcagcgtgtgacccacagtgagtgctcagttcatagtggttgctgctgtctgttatgataacactg

SEQ ID NO: 17243 - DNA, 122 bp, Homo sapiens
  misc_feature (61)..(62): /note="This region represents a CpG dinucleotide"
  misc_feature (61)..(61): /note="Nucleotide may be methylated to form 5-methylcytosine"
tgggagatcgccacactggccgagcagccctaccagggcttgtccaacgagcaagtccttcgcttcgtcatggagggcggccttctggacaagccagacaactgtcctgacatgctgtacgt

SEQ ID NO: 17244 - DNA, 122 bp, Homo sapiens
  misc_feature (61)..(62): /note="This region represents a CpG dinucleotide"
  misc_feature (61)..(61): /note="Nucleotide may be methylated to form 5-methylcytosine"
tccacaaaatagctttttagaacaaaggcatcagccagtttctcaaggactaggaagtagcgtcattctgagatctcagccatttcgataaaaaatagatataagaaataggacagaaaatg

SEQ ID NO: 17245 - DNA, 122 bp, Homo sapiens
  misc_feature (61)..(62): /note="This region represents a CpG dinucleotide"
  misc_feature (61)..(61): /note="Nucleotide may be methylated to form 5-methylcytosine"
tggactcagtcggggggcagcaatggaagtcagcaattgcttagggcggaatgcgatttccggggaggaggcgcgggtatgtagacagagggggttgggacacaccaggaggggaggagcca

SEQ ID NO: 17246 - DNA, 122 bp, Homo sapiens
  misc_feature (61)..(62): /note="This region represents a CpG dinucleotide"
  misc_feature (61)..(61): /note="Nucleotide may be methylated to form 5-methylcytosine"
ggataggggtcatggtttgttgcagagtcggggtatactgtgctcagcggaaatggggtccgtgcagcagacctggaggactcacgtgctgtgggaatgggggattctgtgtcagagctggg

SEQ ID NO: 17247 - DNA, 122 bp, Homo sapiens
  misc_feature (61)..(62): /note="This region represents a CpG dinucleotide"
  misc_feature (61)..(61): /note="Nucleotide may be methylated to form 5-methylcytosine"
ccctgccaaggtagcgaaggaagaagggtgagatctctgcaagaaatgctgatgaatccacgtcagggcatttttagtcagaaatggtatcctctggtatgacatcagaagagtttaagact

SEQ ID NO: 17248 - DNA, 122 bp, Homo sapiens
  misc_feature (61)..(62): /note="This region represents a CpG dinucleotide"
  misc_feature (61)..(61): /note="Nucleotide may be methylated to form 5-methylcytosine"
taacggattggcttggccttacccacgaggctttgcggtggctgttggcttggcggtggtcgcttggcttggcgtggcagtgatcgcttggcttggcatttctggcttggcggtcctccttt

SEQ ID NO: 17249 - DNA, 122 bp, Homo sapiens
  misc_feature (61)..(62): /note="This region represents a CpG dinucleotide"
  misc_feature (61)..(61): /note="Nucleotide may be methylated to form 5-methylcytosine"
cttctgaggtcagagaatatacaaagcaagtctagaagctgctgtgactatgagcgtcaacggtgaaatcttaggcatctacttcatgccagacttgttccacatgctttatctcagttaat

SEQ ID NO: 17250 - DNA, 122 bp, Homo sapiens
  misc_feature (61)..(62): /note="This region represents a CpG dinucleotide"
  misc_feature (61)..(61): /note="Nucleotide may be methylated to form 5-methylcytosine"
gggcgggatagagcctcaagtctgtctgcggcctgaggcctttctgtgggctgctgcagacgatcactgccaggtggagaagaaagcccaagacaagctctggtttttctgcatctcttatt

SEQ ID NO: 17251 - DNA, 122 bp, Homo sapiens
  misc_feature (61)..(62): /note="This region represents a CpG dinucleotide"
  misc_feature (61)..(61): /note="Nucleotide may be methylated to form 5-methylcytosine"
caagccctctcttcactgaagtgaactgaaacattgggcagatcaccagtaacccacaggcgcactcgaagtgcacagggtcagtacaccaaagagcacgactctaacgaccacagaacagt

SEQ ID NO: 17252 - DNA, 122 bp, Homo sapiens
  misc_feature (61)..(62): /note="This region represents a CpG dinucleotide"
  misc_feature (61)..(61): /note="Nucleotide may be methylated to form 5-methylcytosine"
tgagtcgcaggaattacccagcatcccacttacttcagcctcatcctaggcattaatatgcgtgaaatcccaggttggctgtgcgagtcacattgtcctcatgcctgttaagtaaatatatc

SEQ ID NO: 17253 - DNA, 122 bp, Homo sapiens
  misc_feature (61)..(62): /note="This region represents a CpG dinucleotide"
  misc_feature (61)..(61): /note="Nucleotide may be methylated to form 5-methylcytosine"
tttgaaaacacccatgtaattggaagcacgggatctgaactcatgacttaaccatacccacgtcttcaccatcctcactatatcacacttgcactggggtaaaatgagataaagcatttgga

SEQ ID NO: 17254 - DNA, 122 bp, Homo sapiens
  misc_feature (61)..(62): /note="This region represents a CpG dinucleotide"
  misc_feature (61)..(61): /note="Nucleotide may be methylated to form 5-methylcytosine"
aggcgtgagccaccgcgcctgtccagatgtttgggttagaggtcctcaaaaccactcccacgtatgatgattcactaggaggattcacaggactcagcatatagttatactcatggctaagg

SEQ ID NO: 17255 - DNA, 122 bp, Homo sapiens
  misc_feature (61)..(62): /note="This region represents a CpG dinucleotide"
  misc_feature (61)..(61): /note="Nucleotide may be methylated to form 5-methylcytosine"
tcgatggggaggcggctcaacctttttccttctcaggcagaagcccctgagtaaggccgccgctgccacccactgcccctgaaaggacatctgagcacagtgattccggtggtgccaggact

SEQ ID NO: 17256 - DNA, 122 bp, Homo sapiens
  misc_feature (61)..(62): /note="This region represents a CpG dinucleotide"
  misc_feature (61)..(61): /note="Nucleotide may be methylated to form 5-methylcytosine"
ttttgctttattcagcctttattcaagatggagtcactctggtttggactcctctgacagcgggagtgaagtagaagtgatagggtttctttacagttcttatatccaactatttgatttag

SEQ ID NO: 17257 - DNA, 122 bp, Homo sapiens
  misc_feature (61)..(62): /note="This region represents a CpG dinucleotide"
  misc_feature (61)..(61): /note="Nucleotide may be methylated to form 5-methylcytosine"
tgaatatctgccgaggcaggcaacccctccctgacacaatcttcactaacaggaaaagggcggtaacctctggcagctaaggaatccctattagagcttcacctgcagataagaaaaggcct

SEQ ID NO: 17258 - DNA, 122 bp, Homo sapiens
  misc_feature (61)..(62): /note="This region represents a CpG dinucleotide"
  misc_feature (61)..(61): /note="Nucleotide may be methylated to form 5-methylcytosine"
ttttgtagcccactgctggagtgtgcattgcttaatcctctgttgctttttaactctcagcgtgtaatgaattaaatagttttttacccttcctgataaggatatttatgagtcagggtggc

SEQ ID NO: 17259 - DNA, 122 bp, Homo sapiens
  misc_feature (61)..(62): /note="This region represents a CpG dinucleotide"
  misc_feature (61)..(61): /note="Nucleotide may be methylated to form 5-methylcytosine"
agaagtgtctggcttctgctctgaaagattctgatttattggtctgggatatgacctgagcgatgggatttttagaagtttcccaggtgattataatacgaagccaaggttgagaaccacag

SEQ ID NO: 17260 - DNA, 122 bp, Homo sapiens
  misc_feature (61)..(62): /note="This region represents a CpG dinucleotide"
  misc_feature (61)..(61): /note="Nucleotide may be methylated to form 5-methylcytosine"
tggagggcgaaggtggcacctagatcctgcagtcacatggggctaatcaattttcctgcccgccagggttccatttgagtcatctgggttttattttgattcagcctctttaactggctgct

SEQ ID NO: 17261 - DNA, 122 bp, Homo sapiens
  misc_feature (61)..(62): /note="This region represents a CpG dinucleotide"
  misc_feature (61)..(61): /note="Nucleotide may be methylated to form 5-methylcytosine"
gttcaggagtagaaatcaacacaggcatattacagatatagataaggttgttgatatgcacgtgggtacaggcagagctatgcatatagatagagatacaagtgtaatcagagacacagatg

SEQ ID NO: 17262 - DNA, 122 bp, Homo sapiens
  misc_feature (61)..(62): /note="This region represents a CpG dinucleotide"
  misc_feature (61)..(61): /note="Nucleotide may be methylated to form 5-methylcytosine"
tcaagcaaagccagaatggccacttggtggggatgttgcagaggggataaaatatcagggcgatgcttgcaagagaagattgctaaggtcctttctaatccctgggaattaacatttaagag

SEQ ID NO: 17263 - DNA, 122 bp, Homo sapiens
  misc_feature (61)..(62): /note="This region represents a CpG dinucleotide"
  misc_feature (61)..(61): /note="Nucleotide may be methylated to form 5-methylcytosine"
atggggtacgtagccttctcagcctgggctccacctcccaggcatcgcctctgcccgtgacgcctgtcactgtgctccagacgtcccaggccatttggttcccatgcacgccccgccttctc

SEQ ID NO: 17264 - DNA, 122 bp, Homo sapiens
  misc_feature (61)..(62): /note="This region represents a CpG dinucleotide"
  misc_feature (61)..(61): /note="Nucleotide may be methylated to form 5-methylcytosine"
tctcagagcagtcagtgagtcaactgcgaaggcgctgagtaacgaactacgagatctgagcggcatctcacacaggacactgaagaaaggcattttgtagacggatgactgccctgccagtg

SEQ ID NO: 17265 - DNA, 122 bp, Homo sapiens
  misc_feature (61)..(62): /note="This region represents a CpG dinucleotide"
  misc_feature (61)..(61): /note="Nucleotide may be methylated to form 5-methylcytosine"
tttcgcacccgtgatgagcaaactagcgcgcggaggaaccaatcggggagcttgcgaacgcgcaccagtcggagaggttttagaaacggtggccccgcgccggagagcccaaggcgggaggc

SEQ ID NO: 17266 - DNA, 122 bp, Homo sapiens
  misc_feature (61)..(62): /note="This region represents a CpG dinucleotide"
  misc_feature (61)..(61): /note="Nucleotide may be methylated to form 5-methylcytosine"
tcccaaagtgctgggattacaggcgtgagccaccgtgcccagctggtttattttcaaacacgtatttataaggtgacctatgaagttgaagttgtgcagcctttctctagttatataaggct

SEQ ID NO: 17267 - DNA, 122 bp, Homo sapiens
  misc_feature (61)..(62): /note="This region represents a CpG dinucleotide"
  misc_feature (61)..(61): /note="Nucleotide may be methylated to form 5-methylcytosine"
gttaggcttcaggaataagggaacagagtgtaaaacagggagaaacgtttccttctgctccggcaagcccacatttgtgggaggaagtggaagaactcccacgtgtgcagcagggctgggca

SEQ ID NO: 17268 - DNA, 122 bp, Homo sapiens
  misc_feature (61)..(62): /note="This region represents a CpG dinucleotide"
  misc_feature (61)..(61): /note="Nucleotide may be methylated to form 5-methylcytosine"
tttacctgcttcatgatttggcccaaggctcgttaagacttttagcatattttttaatctcgtgtttaagggacttaagccaccatcaaatagagcaatttcatcaagccatccactataca

SEQ ID NO: 17269 - DNA, 122 bp, Homo sapiens
  misc_feature (61)..(62): /note="This region represents a CpG dinucleotide"
  misc_feature (61)..(61): /note="Nucleotide may be methylated to form 5-methylcytosine"
gcctgtcttccctccttctccactctcctaccccctgtaaatgactgctacatacaactacgacactaaagtggaaggaaaaactgtcatgctgaaccacagctctcccaaatttgtgacat

SEQ ID NO: 17270 - DNA, 122 bp, Homo sapiens
  misc_feature (61)..(62): /note="This region represents a CpG dinucleotide"
  misc_feature (61)..(61): /note="Nucleotide may be methylated to form 5-methylcytosine"
ccatatcaatgtagagaattatgaaacacaggtgggagtcagtagaaagtgaagaaacagcgccacaaatgagtaaagcaggtctagcaggcttgtctgttgagttactgactactggcatg

SEQ ID NO: 17271 - DNA, 122 bp, Homo sapiens
  misc_feature (61)..(62): /note="This region represents a CpG dinucleotide"
  misc_feature (61)..(61): /note="Nucleotide may be methylated to form 5-methylcytosine"
gacccagaactgtgatctattttcttttgtgttttcagctgttgagcatgttgggcagcacggagtgtagctacaactgtgtgaccccacctgtgtgactgactccacctgtgtgactccag

SEQ ID NO: 17272 - DNA, 122 bp, Homo sapiens
  misc_feature (61)..(62): /note="This region represents a CpG dinucleotide"
  misc_feature (61)..(61): /note="Nucleotide may be methylated to form 5-methylcytosine"
tccgaagtgctgagattacaggtgcgagtcaccgtgcctggcctattcctgttttcttaacgctcctctctcccactgggccgtgactgcctctaaggcagagatgtgttcatttttattat

SEQ ID NO: 17273 - DNA, 122 bp, Homo sapiens
  misc_feature (61)..(62): /note="This region represents a CpG dinucleotide"
  misc_feature (61)..(61): /note="Nucleotide may be methylated to form 5-methylcytosine"
agtgatccacccaccttggcctcccaaagtgctgggattacaggtgtgtgccaccgtgcccggctgaatcattattattattgtgactaattgtgacacctgtcctgcaaggccttcaaaaa

SEQ ID NO: 17274 - DNA, 122 bp, Homo sapiens
  misc_feature (61)..(62): /note="This region represents a CpG dinucleotide"
  misc_feature (61)..(61): /note="Nucleotide may be methylated to form 5-methylcytosine"
ctgagcggtaaggccaggccgaactcatgccacggacgccccgtgcctcccggcctgggccggcagcgctgaactattaccttatattaaacacgggctcgtggattaccatgaacactaaa

SEQ ID NO: 17275 - DNA, 122 bp, Homo sapiens
  misc_feature (61)..(62): /note="This region represents a CpG dinucleotide"
  misc_feature (61)..(61): /note="Nucleotide may be methylated to form 5-methylcytosine"
gcccttgttccttctttacattcctcagacgttgtgctttacagccacagtttcagtaaccgctgccagagccccacctgtgcgtgttctccaggatggctgcgtctgggctctgggcgact

SEQ ID NO: 17276 - DNA, 122 bp, Homo sapiens
  misc_feature (61)..(62): /note="This region represents a CpG dinucleotide"
  misc_feature (61)..(61): /note="Nucleotide may be methylated to form 5-methylcytosine"
acagcctcagacaaagctgcgccgtgtatcaattaccgagaggctgcgtgctcctctgggcggagggagccggagcgagcggccagggctgctgccccagctgataagggcccgcattgttc

SEQ ID NO: 17277 - DNA, 122 bp, Homo sapiens
  misc_feature (61)..(62): /note="This region represents a CpG dinucleotide"
  misc_feature (61)..(61): /note="Nucleotide may be methylated to form 5-methylcytosine"
tgctttattggatggaaataataaattgtcaatgcctccggactctcaggtgctgctcaacgccctgccctgccccaggaagcttctccccacagcggaagccacttagctctcacatgcag

SEQ ID NO: 17278 - DNA, 122 bp, Homo sapiens
  misc_feature (61)..(62): /note="This region represents a CpG dinucleotide"
  misc_feature (61)..(61): /note="Nucleotide may be methylated to form 5-methylcytosine"
cactaggtcaggaggagcctccttggatgctcatgccaaacctcaaaaactctaaaaatgcgtgccaaatagggggacagtctcttgcttcacatttccaactatggccctattaaagggct

SEQ ID NO: 17279 - DNA, 122 bp, Homo sapiens
  misc_feature (61)..(62): /note="This region represents a CpG dinucleotide"
  misc_feature (61)..(61): /note="Nucleotide may be methylated to form 5-methylcytosine"
aaacaagaagagattattccaaagactgtgactatcagaactgccaaaaacatgtccaaacgtgggtaacatgtttgataccccttgttatcaaatgctaatgttccagtagagactgactt

SEQ ID NO: 17280 - DNA, 122 bp, Homo sapiens
  misc_feature (61)..(62): /note="This region represents a CpG dinucleotide"
  misc_feature (61)..(61): /note="Nucleotide may be methylated to form 5-methylcytosine"
taaggtcttatcattgtgtgaacatttctcactcactttattgcatctctgtgattacttcgatactatcttgagtcagcactttctactttaagttatacagccaaggtgtgtcatggctg

SEQ ID NO: 17281 - DNA, 122 bp, Homo sapiens
  misc_feature (61)..(62): /note="This region represents a CpG dinucleotide"
  misc_feature (61)..(61): /note="Nucleotide may be methylated to form 5-methylcytosine"
atctgctttctggcagacccaacacaaccctgaatacaagggagctggtctgtcatacctcgtacataacagtcactggctaatagctaacaataggacagatggggaagttggggggtggc

SEQ ID NO: 17282 - DNA, 122 bp, Homo sapiens
  misc_feature (61)..(62): /note="This region represents a CpG dinucleotide"
  misc_feature (61)..(61): /note="Nucleotide may be methylated to form 5-methylcytosine"
ttcgcctctgctgacctttggtgacctgaacactgacatgtggcaggcccaaaagtcactcgttttctttttgagctagcagcaggattactcaatggccgatttggaaatgacatttcaat

SEQ ID NO: 17283 - DNA, 122 bp, Homo sapiens
  misc_feature (61)..(62): /note="This region represents a CpG dinucleotide"
  misc_feature (61)..(61): /note="Nucleotide may be methylated to form 5-methylcytosine"
aattgcttcataaatcacagcagtcttatggtctggaacactaacagtctagatagtcaccgtaagttctcggtcataacacattcaggggacactccgtgctccaggagagtggttccttg

SEQ ID NO: 17284 - DNA, 122 bp, Homo sapiens
  misc_feature (61)..(62): /note="This region represents a CpG dinucleotide"
  misc_feature (61)..(61): /note="Nucleotide may be methylated to form 5-methylcytosine"
cggcagtcagattctgcagtgaagtagaggcggtaaacttgaatgcaacgatcttcataccgcatcccacaaagccacgtaaatccaaaagcagtccgactctcgatagtgaaacacatgcg

SEQ ID NO: 17285 - DNA, 122 bp, Homo sapiens
  misc_feature (61)..(62): /note="This region represents a CpG dinucleotide"
  misc_feature (61)..(61): /note="Nucleotide may be methylated to form 5-methylcytosine"
ttccttgtctcagtttctaggactctattctattatgctatcactagtcctaatgggaggcgacctcatgcccgtcttacccaatagagcagactaggttgagtgctgtacctggaagttcc

SEQ ID NO: 17286 - DNA, 122 bp, Homo sapiens
  misc_feature (61)..(62): /note="This region represents a CpG dinucleotide"
  misc_feature (61)..(61): /note="Nucleotide may be methylated to form 5-methylcytosine"
tagccaaaggaacaaactactcttcttaaatgttcatcaaaacaggtatatgagtctgggcgcagtggctcacgcctgtaattccaacactttgagaggccgaggtgggtgaatcacttgag

SEQ ID NO: 17287 - DNA, 122 bp, Homo sapiens
  misc_feature (61)..(62): /note="This region represents a CpG dinucleotide"
  misc_feature (61)..(61): /note="Nucleotide may be methylated to form 5-methylcytosine"
ccctgaggccagggatgaggactcacacacacacacacacacacacactacacacgtgtgcgtgcatatgacaggtcaccaagggttatgcaaccaggcctcagagacaggaatagcctctg

SEQ ID NO: 17288 - DNA, 122 bp, Homo sapiens
  misc_feature (61)..(62): /note="This region represents a CpG dinucleotide"
  misc_feature (61)..(61): /note="Nucleotide may be methylated to form 5-methylcytosine"
gcaggcttccaggccaccagggcatgggcaggactcagcccgccatgggcgcctgctcagcgggaaatgcgattcccaggggtcactggttctcaactgggaggaaacacctgtcatctctt

SEQ ID NO: 17289 - DNA, 122 bp, Homo sapiens
  misc_feature (61)..(62): /note="This region represents a CpG dinucleotide"
  misc_feature (61)..(61): /note="Nucleotide may be methylated to form 5-methylcytosine"
tgctaaaagttagatcctggtgccaatttccttaaattctgtgttcatactgttgaacctcgaaagttgtagcttcctctttttctctttgaacagtataattgtccttttttgcatatgct

SEQ ID NO: 17290 - DNA, 122 bp, Homo sapiens
  misc_feature (61)..(62): /note="This region represents a CpG dinucleotide"
  misc_feature (61)..(61): /note="Nucleotide may be methylated to form 5-methylcytosine"
agtttttgttagttgtctccctctcttcttctggaatggagccttccagagttcttgggtcgttctggagtttgttgagcattaccctgtatctgccttatctttgttttctgagtggtaag

SEQ ID NO: 17291 - DNA, 122 bp, Homo sapiens
  misc_feature (61)..(62): /note="This region represents a CpG dinucleotide"
  misc_feature (61)..(61): /note="Nucleotide may be methylated to form 5-methylcytosine"
ccggcactgtaccttgaatttacaagccaagaaaaagactcagactgaaaagaagaccttcggtatcatcttcctgaaatacatcagactctacaaatgagttagaagacccagatccaatt

SEQ ID NO: 17292 - DNA, 122 bp, Homo sapiens
  misc_feature (61)..(62): /note="This region represents a CpG dinucleotide"
  misc_feature (61)..(61): /note="Nucleotide may be methylated to form 5-methylcytosine"
ggagcttggctgatagaaccagccactggatgtcaccctttctctataaccaacaaacagcgctggctgctcacaaccaccaccaaagtgcccactgctggtctgatgtgttggcagtaaga

SEQ ID NO: 17293 - DNA, 122 bp, Homo sapiens
  misc_feature (61)..(62): /note="This region represents a CpG dinucleotide"
  misc_feature (61)..(61): /note="Nucleotide may be methylated to form 5-methylcytosine"
atgtgaggctgatttctcattataggttgtgatgaaagcctgatctagaggcctccctcccgtcctgttgcggcccccgcaagcctccttaccctgtggcctctggtacttcttgtctagct

SEQ ID NO: 17294 - DNA, 122 bp, Homo sapiens
  misc_feature (61)..(62): /note="This region represents a CpG dinucleotide"
  misc_feature (61)..(61): /note="Nucleotide may be methylated to form 5-methylcytosine"
atgtgggcagccaatggcccctgagaaggctcaaaactttctggatgttctttctgaagtcgtcttcagagccagtttagtcaggcaggactactactctgattccctataatcagatactt

SEQ ID NO: 17295 - DNA, 122 bp, Homo sapiens
  misc_feature (61)..(62): /note="This region represents a CpG dinucleotide"
  misc_feature (61)..(61): /note="Nucleotide may be methylated to form 5-methylcytosine"
ctgggtaattgtgaagttagacatgtgtttccttgtaaatgtctctctgcagagtcatctcgtttccaaagccctaaagaaaattaacagcagaaggctgccggttaaccatgtactctcat

SEQ ID NO: 17296 - DNA, 122 bp, Homo sapiens
  misc_feature (61)..(62): /note="This region represents a CpG dinucleotide"
  misc_feature (61)..(61): /note="Nucleotide may be methylated to form 5-methylcytosine"
catagccttgattcttctgctcagctcagctctgcacttcccaataggaaccactgttctcgctccctcaaactgagcctgagctctctatcatgttgtcctgggttattttaccactggct

SEQ ID NO: 17297 - DNA, 122 bp, Homo sapiens
  misc_feature (61)..(62): /note="This region represents a CpG dinucleotide"
  misc_feature (61)..(61): /note="Nucleotide may be methylated to form 5-methylcytosine"
tcatactaaggagggctttattgttataaatatttaaacctgctttgcagccagtcgctacgattactcagctcagaaagcatgcacaaagcctgcctctagtggacgatcctgtgctattc

SEQ ID NO: 17298 - DNA, 122 bp, Homo sapiens
  misc_feature (61)..(62): /note="This region represents a CpG dinucleotide"
  misc_feature (61)..(61): /note="Nucleotide may be methylated to form 5-methylcytosine"
ggcagaccctcctgtctccgcctgcagccccctccagcagacccccccgccttgggtttccgccaggacctaaatgcagtgtctgagttgccgcgacagtgcccacagagccccagatgaca

SEQ ID NO: 17299 - DNA, 122 bp, Homo sapiens
  misc_feature (61)..(62): /note="This region represents a CpG dinucleotide"
  misc_feature (61)..(61): /note="Nucleotide may be methylated to form 5-methylcytosine"
atgacctatggccagtaaaagaaacactggaatgagtcagcaggacaagtctcacagctccgtagatctgggaattccttacactgccaagaggtagaacagagaaacctcataatacatgg

SEQ ID NO: 17300 - DNA, 122 bp, Homo sapiens
  misc_feature (61)..(62): /note="This region represents a CpG dinucleotide"
  misc_feature (61)..(61): /note="Nucleotide may be methylated to form 5-methylcytosine"
ctccttcccccagctcacttggagtcatgctgattttgtttagtcaatgctctgacagatcgcctttggtattttttcaattgtacctaggcttatctctcggtcacagatcaccttgagaa

SEQ ID NO: 17301 - DNA, 122 bp, Homo sapiens
  misc_feature (61)..(62): /note="This region represents a CpG dinucleotide"
  misc_feature (61)..(61): /note="Nucleotide may be methylated to form 5-methylcytosine"
gcagagatgatgggatagagcagtgccacccaccctgccttgtttaccctgcctccccttcgctgagctgtctctgtccctggctgcctctgaagcttgcttcacgcaatgagatgtcaatg

SEQ ID NO: 17302 - DNA, 122 bp, Homo sapiens
  misc_feature (61)..(62): /note="This region represents a CpG dinucleotide"
  misc_feature (61)..(61): /note="Nucleotide may be methylated to form 5-methylcytosine"
gggactgctgcaagactctttggtctgtgacttgcccaagagagaagtttctgggcagaacggggagctcaggaaagaagaaagttacatccgcacaaagtttcaattataaagcccaataa

SEQ ID NO: 17303 - DNA, 122 bp, Homo sapiens
  misc_feature (61)..(62): /note="This region represents a CpG dinucleotide"
  misc_feature (61)..(61): /note="Nucleotide may be methylated to form 5-methylcytosine"
cagtccagggagcaccccagccttccatggtagaaaacccactccacatccactgttcctcggaataatctggttttaggatgcaggggacatacaaccaatttgatacaggcagagttttc

SEQ ID NO: 17304 - DNA, 122 bp, Homo sapiens
  misc_feature (61)..(62): /note="This region represents a CpG dinucleotide"
  misc_feature (61)..(61): /note="Nucleotide may be methylated to form 5-methylcytosine"
gagtgacctaacctctctgagccacaaatgggataatagcatctccctaatgggatcaagcgagttaatgaacatggagtgcctgcaggtagaaaactcattaaagattaatttctttccct

SEQ ID NO: 17305 - DNA, 122 bp, Homo sapiens
  misc_feature (61)..(62): /note="This region represents a CpG dinucleotide"
  misc_feature (61)..(61): /note="Nucleotide may be methylated to form 5-methylcytosine"
gcatgatctcagctcactgcagcatcaacttcctgggctcagatgatcctcccacctcagcgcctctgtagctgggactgtgggcgttcaccacaacaccaggctaatttttttgtattttc

SEQ ID NO: 17306 - DNA, 122 bp, Homo sapiens
  misc_feature (61)..(62): /note="This region represents a CpG dinucleotide"
  misc_feature (61)..(61): /note="Nucleotide may be methylated to form 5-methylcytosine"
tgtgcgcgagtcttttaacctttctgagcctcagttttctcctctgtaaagtcatctggccgtatggtttcttcaaggattaaatgagatgctcaatatattataaatgtgtaatagaagaa

SEQ ID NO: 17307 - DNA, 122 bp, Homo sapiens
  misc_feature (61)..(62): /note="This region represents a CpG dinucleotide"
  misc_feature (61)..(61): /note="Nucleotide may be methylated to form 5-methylcytosine"
atctccttacttccatatggcactgttgtacactcatttactcagagccagaaacgtcagcgtcatcttggatttttcttatgctctttctctctctagtcatatgccagactttaaactct

SEQ ID NO: 17308 - DNA, 122 bp, Homo sapiens
  misc_feature (61)..(62): /note="This region represents a CpG dinucleotide"
  misc_feature (61)..(61): /note="Nucleotide may be methylated to form 5-methylcytosine"
ctcattgctcttctgcagtttgctgcactgttcctgtctttagcagatagcagcatttgacgatgatggcttggaagaattgctgccaatatgattcttatgtaagactggcatagaggaat

SEQ ID NO: 17309 - DNA, 122 bp, Homo sapiens
  misc_feature (61)..(62): /note="This region represents a CpG dinucleotide"
  misc_feature (61)..(61): /note="Nucleotide may be methylated to form 5-methylcytosine"
gtgagctcctagaggacagggatcatcctgttttatctttcaaccttgctctcagggtctcgcacagtgagatcaatgacatagtcatcctggccacagggaagacatactagtgatgtgtt

SEQ ID NO: 17310 - DNA, 122 bp, Homo sapiens
  misc_feature (61)..(62): /note="This region represents a CpG dinucleotide"
  misc_feature (61)..(61): /note="Nucleotide may be methylated to form 5-methylcytosine"
cccggggcactgcagataactcagaagggcgccaaatggatatctgacatttgagggaaacggccaccgcagtatctgcaggacaccgcgtgaactactcgctcgagacagttcagcttcaa

SEQ ID NO: 17311 - DNA, 122 bp, Homo sapiens
  misc_feature (61)..(62): /note="This region represents a CpG dinucleotide"
  misc_feature (61)..(61): /note="Nucleotide may be methylated to form 5-methylcytosine"
tccgcttgcggtcggtagtctctcctccccgcccatgggcggtggttggaggcaggggtgcggaatccggccgacctcgctgtcctcgccctctaccttgtggcgtcggtggggttggggag

SEQ ID NO: 17312 - DNA, 122 bp, Homo sapiens
  misc_feature (61)..(62): /note="This region represents a CpG dinucleotide"
  misc_feature (61)..(61): /note="Nucleotide may be methylated to form 5-methylcytosine"
ctgagtggcactgtgggactagtggtatgggggagaacattttaggtggtggcatatggacgtgacattacataacattgaatcacgtagagtgaaaattatttcgttttcaatttcttctc

SEQ ID NO: 17313 - DNA, 122 bp, Homo sapiens
  misc_feature (61)..(62): /note="This region represents a CpG dinucleotide"
  misc_feature (61)..(61): /note="Nucleotide may be methylated to form 5-methylcytosine"
gcctgcttccatagctgtaatgatacagagggctcatcctaaaagacaataaagtagaatcgatgccatataaccatgattcaccactgtagttcatgcacctgtggtctaaggatgaaatc

SEQ ID NO: 17314 - DNA, 122 bp, Homo sapiens
  misc_feature (61)..(62): /note="This region represents a CpG dinucleotide"
  misc_feature (61)..(61): /note="Nucleotide may be methylated to form 5-methylcytosine"
aacagccttgacaagtgtgaagtagctgactcaggaaagcaaccagatgggaagctgtgacgtaatgtgatgaactccaggttcaagagtcacacatgttgtaagagtgcatcccgggccgg

SEQ ID NO: 17315 - DNA, 122 bp, Homo sapiens
  misc_feature (61)..(62): /note="This region represents a CpG dinucleotide"
  misc_feature (61)..(61): /note="Nucleotide may be methylated to form 5-methylcytosine"
tacaatggcagaatttatctgaagattcacaatctacaaatggaactgccactttttcaacggagaccatctcagtggcatcgctggaaagtccagattgcctgacacactggtaaccaact

SEQ ID NO: 17316 - DNA, 122 bp, Homo sapiens
  misc_feature (61)..(62): /note="This region represents a CpG dinucleotide"
  misc_feature (61)..(61): /note="Nucleotide may be methylated to form 5-methylcytosine"
cttgtttacacagagctgggccaatggttacacaataacagataatcagaaaaatcttctcgtaaggcacactgtaactagcagagagaggtgtgcatactcaataagtatgttaaagcctg

SEQ ID NO: 17317 - DNA, 122 bp, Homo sapiens
  misc_feature (61)..(62): /note="This region represents a CpG dinucleotide"
  misc_feature (61)..(61): /note="Nucleotide may be methylated to form 5-methylcytosine"
caaatcaccaccaagggtcctggtgttttcataaagatcagccatctcattgatctgagacgccatcctaccagagcactggcttccctgaaaccctggagacagcttgttaaaaggacctc

SEQ ID NO: 17318 - DNA, 122 bp, Homo sapiens
  misc_feature (61)..(62): /note="This region represents a CpG dinucleotide"
  misc_feature (61)..(61): /note="Nucleotide may be methylated to form 5-methylcytosine"
ctctctcacttggaccacattaatcttctaatttatcctgtcattctggcccacctccaacgtgtcctccacagagcagcaagagggacccatctaaaccggaatcaggtcaggtcagccca

SEQ ID NO: 17319 - DNA, 122 bp, Homo sapiens
  misc_feature (61)..(62): /note="This region represents a CpG dinucleotide"
  misc_feature (61)..(61): /note="Nucleotide may be methylated to form 5-methylcytosine"
atttgactaaaaaaaaaaaatcagagcctactataatccccgctatactgatgatcacaacgggattaagaagtttaagtaactagcccaaggtcacttagcaggcaatggtagacacagct

SEQ ID NO: 17320 - DNA, 122 bp, Homo sapiens
  misc_feature (61)..(62): /note="This region represents a CpG dinucleotide"
  misc_feature (61)..(61): /note="Nucleotide may be methylated to form 5-methylcytosine"
tgagagattaaactccttcaatggcagtaaaaacaaggatgttttgcatacatcagagcacgggcatgatgctttagagagcaaatgttgcattttgcagttccagtgtagactggaggtga

SEQ ID NO: 17321 - DNA, 122 bp, Homo sapiens
  misc_feature (61)..(62): /note="This region represents a CpG dinucleotide"
  misc_feature (61)..(61): /note="Nucleotide may be methylated to form 5-methylcytosine"
gattatcaggttacagtgacacacacacaggctgtcagataatggacaaagtcccagcagcgtgtacaaccagctggtggctcccaaattcaaattcccccagcggcatccgttcggttatt

SEQ ID NO: 17322 - DNA, 122 bp, Homo sapiens
  misc_feature (61)..(62): /note="This region represents a CpG dinucleotide"
  misc_feature (61)..(61): /note="Nucleotide may be methylated to form 5-methylcytosine"
agtcctggagccatgacagcaagaggccagcctctaagagatgatccgtaccttgcttttcggtctttaataacttgagatattgctgccagctacttaaccaagctctgcaactgctgtaa

SEQ ID NO: 17323 - DNA, 122 bp, Homo sapiens
  misc_feature (61)..(62): /note="This region represents a CpG dinucleotide"
  misc_feature (61)..(61): /note="Nucleotide may be methylated to form 5-methylcytosine"
cttataccacaataggtctagcattttaaaaagttaactagtttgcacatagacacttggcgaatagttgattggttatataatcccatcaaggtatgcaaataaacatgtattatggcatc

SEQ ID NO: 17324 - DNA, 122 bp, Homo sapiens
  misc_feature (61)..(62): /note="This region represents a CpG dinucleotide"
  misc_feature (61)..(61): /note="Nucleotide may be methylated to form 5-methylcytosine"
ccaccctgtgtcttgcttttctattatagtatagcatgctgctatacctagccctggcctcgtgctgtttgagtgcctaaatgcctgcttctctgtttgtagagctaaccaatctcaaactg

SEQ ID NO: 17325 - DNA, 122 bp, Homo sapiens
  misc_feature (61)..(62): /note="This region represents a CpG dinucleotide"
  misc_feature (61)..(61): /note="Nucleotide may be methylated to form 5-methylcytosine"
ctagattctgagtcatgtaggtgctgcatgcctagatgactaaatcttcttactcacacacgtaagaaaaacacacaccctggacaccaaggctcaaatgaaagtcaaaaatgcttacctgg

SEQ ID NO: 17326 - DNA, 122 bp, Homo sapiens
  misc_feature (61)..(62): /note="This region represents a CpG dinucleotide"
  misc_feature (61)..(61): /note="Nucleotide may be methylated to form 5-methylcytosine"
gcaccccgacattcctgcggatggagtcatcagtctcttgcatggtggtgctgacaggatcgctcacctccaggctctcagcagtgatcctgtgacgcaagggctggccctgcactggggtt

SEQ ID NO: 17327 - DNA, 122 bp, Homo sapiens
  misc_feature (61)..(62): /note="This region represents a CpG dinucleotide"
  misc_feature (61)..(61): /note="Nucleotide may be methylated to form 5-methylcytosine"
cggttgggtgcagttggagctgtcggaagcatttcccgagagaaacaccatggtcccagccggggccgggcgaggtccggctgtccagggccacctcccgggctggcgcggaggcgggagcg

SEQ ID NO: 17328 - DNA, 122 bp, Homo sapiens
  misc_feature (61)..(62): /note="This region represents a CpG dinucleotide"
  misc_feature (61)..(61): /note="Nucleotide may be methylated to form 5-methylcytosine"
catttagttggttcatttttcaagtgcctatgagaattttttttttttctgtcttgatcacgaacattgtcaaccctcaccttgttaagagtgccttttagactaggttgctaaatcttaac

SEQ ID NO: 17329 - DNA, 122 bp, Homo sapiens
  misc_feature (61)..(62): /note="This region represents a CpG dinucleotide"
  misc_feature (61)..(61): /note="Nucleotide may be methylated to form 5-methylcytosine"
tcacgtgctactacatggatgagctttgaggacaccatgctgagtgaagtcagtgagtcacgaaaaggcaaggactgtatgattccagttaaatgaggcatctaaaaagtagtcaaattcag

SEQ ID NO: 17330 - DNA, 122 bp, Homo sapiens
  misc_feature (61)..(62): /note="This region represents a CpG dinucleotide"
  misc_feature (61)..(61): /note="Nucleotide may be methylated to form 5-methylcytosine"
gtttccaggcctgtggctgctaagctagcgtccaagtctggctgagaggtgggaggactacggccaggagatgttgggtttcactacatgatgcaatgctctaatttgctgaatcatagttc

SEQ ID NO: 17331 - DNA, 122 bp, Homo sapiens
  misc_feature (61)..(62): /note="This region represents a CpG dinucleotide"
  misc_feature (61)..(61): /note="Nucleotide may be methylated to form 5-methylcytosine"
agttccaaaccctgcatgggaccaggggcaccgagggccccagctcccagggtagggggtcgtgccactatgcactgccttttcttcttccggtgctgctttactttctcttgctcctggag

SEQ ID NO: 17332 - DNA, 122 bp, Homo sapiens
  misc_feature (61)..(62): /note="This region represents a CpG dinucleotide"
  misc_feature (61)..(61): /note="Nucleotide may be methylated to form 5-methylcytosine"
gctattggctttttatttcactctccctttttttccacatttgctgtagaaatctatccacgggtacagtggttaagttgctgtttctagagctatggtgagaggaacagcgatctgtgcat

SEQ ID NO: 17333 - DNA, 122 bp, Homo sapiens
  misc_feature (61)..(62): /note="This region represents a CpG dinucleotide"
  misc_feature (61)..(61): /note="Nucleotide may be methylated to form 5-methylcytosine"
ttatcctggcaattgcagtagcctcctctctgcccctttctctccactgatgcattctctcgccagcttgatctaagtccagatataatcctgtgtctcttctggaaaaccttccctagcgt

SEQ ID NO: 17334 - DNA, 122 bp, Homo sapiens
  misc_feature (61)..(62): /note="This region represents a CpG dinucleotide"
  misc_feature (61)..(61): /note="Nucleotide may be methylated to form 5-methylcytosine"
tcttttgcacagtcccttaacatggagaagcaaaataaaataacctgaccagtcatctctcggtgatttagtgtggaggggtgagtgtgagggtatgtggctctgttctcaagggcacatgc

SEQ ID NO: 17335 - DNA, 122 bp, Homo sapiens
  misc_feature (61)..(62): /note="This region represents a CpG dinucleotide"
  misc_feature (61)..(61): /note="Nucleotide may be methylated to form 5-methylcytosine"
cttaaatcatgcagcttgtcaggtcaggtcaagcatagcctggatctcaccacattcttacgggattgaaggatgtaatattaatgactcagtaggcttggaatcagccaatcagcaagtgc

SEQ ID NO: 17336 - DNA, 122 bp, Homo sapiens
  misc_feature (61)..(62): /note="This region represents a CpG dinucleotide"
  misc_feature (61)..(61): /note="Nucleotide may be methylated to form 5-methylcytosine"
tgtttgctcaaggctcatcaggctttccttgactggcctgagcaaatatgtatagtaatacgcagtgttgattgggtattccctagagagagggcacatctgcattttatgtgctctttatg

SEQ ID NO: 17337 - DNA, 122 bp, Homo sapiens
  misc_feature (61)..(62): /note="This region represents a CpG dinucleotide"
  misc_feature (61)..(61): /note="Nucleotide may be methylated to form 5-methylcytosine"
acattagccatgtggcagtgccaagactggaattcaggcatgatgaactcccttctactgcgctatgacaaactgtctttcctgtgctggtaaggcatagctattatatatgctacagacac

SEQ ID NO: 17338 - DNA, 122 bp, Homo sapiens
  misc_feature (61)..(62): /note="This region represents a CpG dinucleotide"
  misc_feature (61)..(61): /note="Nucleotide may be methylated to form 5-methylcytosine"
ctactgtactcagtcaccacccctctcttacaagcctactttaaattggaaagcctgtctcgcttgtttcggtgtggtgagtgaaatggagaaggctaaactttttcttcccacatgctcac

SEQ ID NO: 17339 - DNA, 122 bp, Homo sapiens
  misc_feature (61)..(62): /note="This region represents a CpG dinucleotide"
  misc_feature (61)..(61): /note="Nucleotide may be methylated to form 5-methylcytosine"
aaaggcaaatccgaattccaaatcagtcattgatatgaacatgaaatccccaaggaagcacgttccaagctgagtaagaatgataagggttagatgagttgtcaattgcttcacagcatatt

SEQ ID NO: 17340 - DNA, 122 bp, Homo sapiens
  misc_feature (61)..(62): /note="This region represents a CpG dinucleotide"
  misc_feature (61)..(61): /note="Nucleotide may be methylated to form 5-methylcytosine"
catagagcaaggaatgagggaaggggaaggagtgcagagcttccgtgccctccctgggcacgccacactccaggaagtgccaggtgttcagctatccagaagctctctgaaccctgtcctct

SEQ ID NO: 17341 - DNA, 122 bp, Homo sapiens
  misc_feature (61)..(62): /note="This region represents a CpG dinucleotide"
  misc_feature (61)..(61): /note="Nucleotide may be methylated to form 5-methylcytosine"
cgaaaccaacaaagctcagcttgtctcacagcttctggggagtgggtaagaagagtagaacgtgtatccaatgttctaatattttcagagagcttcctgaaggacaggtttcagtcttgact

SEQ ID NO: 17342 - DNA, 122 bp, Homo sapiens
  misc_feature (61)..(62): /note="This region represents a CpG dinucleotide"
  misc_feature (61)..(61): /note="Nucleotide may be methylated to form 5-methylcytosine"
cctggtcctctgtagcgtccctccatgtgaggtcctcccattctatctcattgtgcctcacgccctgctgctggcctcctttctgcctctctggcttcctctttccttctaggagggaaaga

SEQ ID NO: 17343 - DNA, 122 bp, Homo sapiens
  misc_feature (61)..(62): /note="This region represents a CpG dinucleotide"
  misc_feature (61)..(61): /note="Nucleotide may be methylated to form 5-methylcytosine"
tcccacagaagggggaacgcaaggggcgtcccaagacctcatctgcctgcagcgtcacaccgatggcctggcctcggcttctcattatttgcaactgccatggatgtttacaggaacccagc

SEQ ID NO: 17344 - DNA, 122 bp, Homo sapiens
  misc_feature (61)..(62): /note="This region represents a CpG dinucleotide"
  misc_feature (61)..(61): /note="Nucleotide may be methylated to form 5-methylcytosine"
gcttaagcacttctgtgggctgacagctccagcaatggccaaagattttacttaaataagcgattagctctgggaatcagattctaagtggaaacatgaataattagtgaattaagtagtct

SEQ ID NO: 17345 - DNA, 122 bp, Homo sapiens
  misc_feature (61)..(62): /note="This region represents a CpG dinucleotide"
  misc_feature (61)..(61): /note="Nucleotide may be methylated to form 5-methylcytosine"
taaagaagataaatatcaagatagcatctttgttttgttagtcatggtatttagtggctgcgtaaacagagtgagatcaattgtagttcaaaaggactggagatgaaactgaagttaggaaa

SEQ ID NO: 17346 - DNA, 122 bp, Homo sapiens
  misc_feature (61)..(62): /note="This region represents a CpG dinucleotide"
  misc_feature (61)..(61): /note="Nucleotide may be methylated to form 5-methylcytosine"
gcttccaaatatttgagacagatttatggacactgagtcacaaatggctgccatatacttcgccttttgagctagtctggtggcagaacacctctctcctgatattcaaggacctgtctcca

SEQ ID NO: 17347 - DNA, 122 bp, Homo sapiens
  misc_feature (61)..(62): /note="This region represents a CpG dinucleotide"
  misc_feature (61)..(61): /note="Nucleotide may be methylated to form 5-methylcytosine"
ataaaggcctgccctcttacaggtagcagtctgaagttaagatgtaacacacatacctcacggtaccttgctgtctttgggttgatagatcataaggataaccctgcctcccccagattgct

SEQ ID NO: 17348 - DNA, 122 bp, Homo sapiens
  misc_feature (61)..(62): /note="This region represents a CpG dinucleotide"
  misc_feature (61)..(61): /note="Nucleotide may be methylated to form 5-methylcytosine"
aagggcaagagtaggggcaggaggggcccttcctgcccctgctcctggtccccacttggccgccagcagagaaggcaaaaagcaggaactagaggccagcaaggtacaggatgggggaggga

SEQ ID NO: 17349 - DNA, 122 bp, Homo sapiens
  misc_feature (61)..(62): /note="This region represents a CpG dinucleotide"
  misc_feature (61)..(61): /note="Nucleotide may be methylated to form 5-methylcytosine"
ttgaaagcatgccacctttcttcacttgccaacttgacagatttattagttgacaacatccgctgatagcatcagtaataagttaattgtttttgcacatgtagctttaattattctcatta

SEQ ID NO: 17350 - DNA, 122 bp, Homo sapiens
  misc_feature (61)..(62): /note="This region represents a CpG dinucleotide"
  misc_feature (61)..(61): /note="Nucleotide may be methylated to form 5-methylcytosine"
catcagccaggggtggcgactgcaggggcctcactccactccaggctgcatgcagagccacgtggagaactttaaaagaatacctgagcctggacttcactccagaccagttatatcagttc

SEQ ID NO: 17351 - DNA, 122 bp, Homo sapiens
  misc_feature (61)..(62): /note="This region represents a CpG dinucleotide"
  misc_feature (61)..(61): /note="Nucleotide may be methylated to form 5-methylcytosine"
taaactggggcaaagtatggtcaccagactaaccattgtccttttttacccctcctgtgacggggctactacaggttacaaaatcgcgctcttcctcctagctactgtgttactctgagata

SEQ ID NO: 17352 - DNA, 122 bp, Homo sapiens
  misc_feature (61)..(62): /note="This region represents a CpG dinucleotide"
  misc_feature (61)..(61): /note="Nucleotide may be methylated to form 5-methylcytosine"
cctctgacagttccataataacctgtgtacactttctggcacccttgcttctccaggtcacgccttccaatggaaggggaagcagtgacaaaggtgaaaatcatggcggtaacagaagtcat

SEQ ID NO: 17353 - DNA, 122 bp, Homo sapiens
  misc_feature (61)..(62): /note="This region represents a CpG dinucleotide"
  misc_feature (61)..(61): /note="Nucleotide may be methylated to form 5-methylcytosine"
tctctgcagcctctccgactccccaggctgggttgggtgctcctccctctcatcccacagcgctatgtctcatgtcttctggaaaacttgccaatccctagtgtaagtgtgactggtctatt

SEQ ID NO: 17354 - DNA, 122 bp, Homo sapiens
  misc_feature (61)..(62): /note="This region represents a CpG dinucleotide"
  misc_feature (61)..(61): /note="Nucleotide may be methylated to form 5-methylcytosine"
gatctctttatcagatatatgacttgccagtattttccactagcctgtggtttatcttttcgttttcttaactatctatttaagaacagattcttaattttgatgaagtccaatcactttaa

SEQ ID NO: 17355 - DNA, 122 bp, Homo sapiens
  misc_feature (61)..(62): /note="This region represents a CpG dinucleotide"
  misc_feature (61)..(61): /note="Nucleotide may be methylated to form 5-methylcytosine"
agagattgaaaatttatgacaaaagtccaggccattgtaaacattgctttctcctacatgcgtaacaggcatgcattttttgccaccagaatcactaatctactatagggtaataagactat

SEQ ID NO: 17356 - DNA, 122 bp, Homo sapiens
  misc_feature (61)..(62): /note="This region represents a CpG dinucleotide"
  misc_feature (61)..(61): /note="Nucleotide may be methylated to form 5-methylcytosine"
ggaacctgtgagaaatgccgagtctcggacccatccagagcgcccgaatggaaacctaggcgttacgaggccccaggttcagcgtctcacgggtcctgcaccacctgggacgccccgcaagc

SEQ ID NO: 17357 - DNA, 122 bp, Homo sapiens
  misc_feature (61)..(62): /note="This region represents a CpG dinucleotide"
  misc_feature (61)..(61): /note="Nucleotide may be methylated to form 5-methylcytosine"
agtatggtataaaaggtaaaaatgccacacctgcctggggtgcccatcacgagtgggtctcgcgggactggaggttgctctggcgaggcagtgggtgagcgtgaggggttgcgaaggcctag

SEQ ID NO: 17358 - DNA, 122 bp, Homo sapiens
  misc_feature (61)..(62): /note="This region represents a CpG dinucleotide"
  misc_feature (61)..(61): /note="Nucleotide may be methylated to form 5-methylcytosine"
tgagctggtttcagcacaccagtgtagtcttggtctcctttgtcatttttttctgaatgccgtctttccagtatgcaggctttgactaagcatttaggcagaactgaaacattcaaattaat

SEQ ID NO: 17359 - DNA, 122 bp, Homo sapiens
  misc_feature (61)..(62): /note="This region represents a CpG dinucleotide"
  misc_feature (61)..(61): /note="Nucleotide may be methylated to form 5-methylcytosine"
taataatatacatgcacaaggcctgccccagaaaaaagtgtcattcaaaaaaacaaaaatcgtagagtgaaattattgctaaataattggacaattaaatttattgtgccctgctgtctaca

SEQ ID NO: 17360 - DNA, 122 bp, Homo sapiens
  misc_feature (61)..(62): /note="This region represents a CpG dinucleotide"
  misc_feature (61)..(61): /note="Nucleotide may be methylated to form 5-methylcytosine"
ttctgctccttggttgctaacatccactcacactagtctcccaaaataaacatgcaaaaccgcctggccttatatgatgcaacgatcacatatacaaccaaaaatgtctccatcccatcaag

SEQ ID NO: 17361 - DNA, 122 bp, Homo sapiens
  misc_feature (61)..(62): /note="This region represents a CpG dinucleotide"
  misc_feature (61)..(61): /note="Nucleotide may be methylated to form 5-methylcytosine"
cttcaaaagggcaacaaaattagccttaaatagtatttcttggattgcctttaacaatggcgataaggccaaagcttctagtcttgacagaagtggtttcatgacaacttgtttttatcttg

SEQ ID NO: 17362 - DNA, 122 bp, Homo sapiens
  misc_feature (61)..(62): /note="This region represents a CpG dinucleotide"
  misc_feature (61)..(61): /note="Nucleotide may be methylated to form 5-methylcytosine"
agctgcctctcttttgcaatttttatatgacacaactactaaagcatagctttacccttccgtcttctaacctgattttctgctattcattgaaaacgttcaattttcccatcagccatgag

SEQ ID NO: 17363 - DNA, 122 bp, Homo sapiens
  misc_feature (61)..(62): /note="This region represents a CpG dinucleotide"
  misc_feature (61)..(61): /note="Nucleotide may be methylated to form 5-methylcytosine"
cactgggggcccccacccatagagggagggggtcagtgtggggaggggcggagcaggacacgatctatggacgtttggctcacttgttaggttttacgactcttaaattaatttgttttaaa

SEQ ID NO: 17364 - DNA, 122 bp, Homo sapiens
  misc_feature (61)..(62): /note="This region represents a CpG dinucleotide"
  misc_feature (61)..(61): /note="Nucleotide may be methylated to form 5-methylcytosine"
accccggatgtcgtccccacttctcgctccaaggagcgcggggccggactctgaacgcctcgcccgccaattcaaagggttggccctaactttgaacgccccacccaccacgtggaatgttc

SEQ ID NO: 17365 - DNA, 122 bp, Homo sapiens
  misc_feature (61)..(62): /note="This region represents a CpG dinucleotide"
  misc_feature (61)..(61): /note="Nucleotide may be methylated to form 5-methylcytosine"
aagagcagatgaaagcctctgcttttgtgaatgtgtaacactgactgacttttcaccagccggttcatgtgcaaattcagccagacagatctggccacaagcagaagtgtctgtttacacca

SEQ ID NO: 17366 - DNA, 122 bp, Homo sapiens
  misc_feature (61)..(62): /note="This region represents a CpG dinucleotide"
  misc_feature (61)..(61): /note="Nucleotide may be methylated to form 5-methylcytosine"
ataatttgtacgacttgaattcttttaaatttattgagattcattttggggctcagaatacgttctatcttggtaaatggtgcaggtacacttgaaaagaatgtttattcttctgttgttgg

SEQ ID NO: 17367 - DNA, 122 bp, Homo sapiens
  misc_feature (61)..(62): /note="This region represents a CpG dinucleotide"
  misc_feature (61)..(61): /note="Nucleotide may be methylated to form 5-methylcytosine"
cacttggaagaaaggagggcagcagggagcttctgtcatgaaggctgtggtggtggcggtcgtagccatgacaaatgaccaaaggaaaacagaaaaccgcaggctttctggtctgcagagcc

SEQ ID NO: 17368 - DNA, 122 bp, Homo sapiens
  misc_feature (61)..(62): /note="This region represents a CpG dinucleotide"
  misc_feature (61)..(61): /note="Nucleotide may be methylated to form 5-methylcytosine"
cctcagctcaaaactctaaacacacattccagtgtgtctgccataaagggtcattctcagcgtaggcttaagttatatactgaattggcgtaggccatgaccttaagttaaattattgctgt

SEQ ID NO: 17369 - DNA, 122 bp, Homo sapiens
  misc_feature (61)..(62): /note="This region represents a CpG dinucleotide"
  misc_feature (61)..(61): /note="Nucleotide may be methylated to form 5-methylcytosine"
gagcagatatttggtcttcagctctttcatttccacctctttgcgatatgagacagcagacgttcccaaaaagggcttgcggtttatgttatcggtaacccatttcattcttccagatggtg

SEQ ID NO: 17370 - DNA, 122 bp, Homo sapiens
  misc_feature (61)..(62): /note="This region represents a CpG dinucleotide"
  misc_feature (61)..(61): /note="Nucleotide may be methylated to form 5-methylcytosine"
gaacacaaaactcagctgaagccatgactcctgactcaccgtgaaatcataaattcatatcgttttaagcagataagtttgtggtaatttgtcatgcagcaaaagaaaatgaattcagcata

SEQ ID NO: 17371 - DNA, 122 bp, Homo sapiens
  misc_feature (61)..(62): /note="This region represents a CpG dinucleotide"
  misc_feature (61)..(61): /note="Nucleotide may be methylated to form 5-methylcytosine"
aagacactgacagccacagcaggctggcggtcaggcacaggccaggcgagggccacctcccgggaccgagcaaggcgccctggtcagcctgaagacactggcactaggtctaagacggtgtg

SEQ ID NO: 17372 - DNA, 122 bp, Homo sapiens
  misc_feature (61)..(62): /note="This region represents a CpG dinucleotide"
  misc_feature (61)..(61): /note="Nucleotide may be methylated to form 5-methylcytosine"
caactgagaaaacgcaggattagaaaatggggcattcattctgctagatactgattgccacgtaagaatatcagaagtataaatggacagaaagatggctcaggtcagcaaaaacacaaata

SEQ ID NO: 17373 - DNA, 122 bp, Homo sapiens
  misc_feature (61)..(62): /note="This region represents a CpG dinucleotide"
  misc_feature (61)..(61): /note="Nucleotide may be methylated to form 5-methylcytosine"
agtagaattaagagtttgagttaatcccctcagtattccatattcttttagataaagaggcggaggaagtactgctccctggctgtgattactgatgacacagtatagctgcttataattct

SEQ ID NO: 17374 - DNA, 122 bp, Homo sapiens
  misc_feature (61)..(62): /note="This region represents a CpG dinucleotide"
  misc_feature (61)..(61): /note="Nucleotide may be methylated to form 5-methylcytosine"
aagaaaattaaaacacttgcttaaagcttgccgcagctcagaacccaaaagggctgcggacgcataaaaggggaagtatcagaggagaaggggccaaggccgctggggaagctgagagactg

SEQ ID NO: 17375 - DNA, 122 bp, Homo sapiens
  misc_feature (61)..(62): /note="This region represents a CpG dinucleotide"
  misc_feature (61)..(61): /note="Nucleotide may be methylated to form 5-methylcytosine"
aggtgagaaaaatggcatcatggtgaccttcctgggattctcactttagcacagtaaattcgtcgactctggggattggaagaacaatgttacactgccaggatactggttgcccattctgc

SEQ ID NO: 17376 - DNA, 122 bp, Homo sapiens
  misc_feature (61)..(62): /note="This region represents a CpG dinucleotide"
  misc_feature (61)..(61): /note="Nucleotide may be methylated to form 5-methylcytosine"
ccagggatgagtgcttttgtttgggtagttgctttaggctgcgggagttccagaggacagcgtgtgtaggagggagggagggagggaggtggaactggcgcctgcagtggggccttcctgaa

SEQ ID NO: 17377 - DNA, 122 bp, Homo sapiens
  misc_feature (61)..(62): /note="This region represents a CpG dinucleotide"
  misc_feature (61)..(61): /note="Nucleotide may be methylated to form 5-methylcytosine"
agacatttctccttatcttgttttcacatcagctgcagcacgatttctgttcagagcaagcgtgggtgggggttcctcccgccctgccctgtgctagctgttaaaataggagggtggtttac

SEQ ID NO: 17378 - DNA, 122 bp, Homo sapiens
  misc_feature (61)..(62): /note="This region represents a CpG dinucleotide"
  misc_feature (61)..(61): /note="Nucleotide may be methylated to form 5-methylcytosine"
atggttgtaattaagtacagcaactatgaattgtttaggggcttaatttaaccttacccacggaggctccaagttgctacttgctcggtcccctgaacttgggttatttctgtggtcagggc

SEQ ID NO: 17379 - DNA, 122 bp, Homo sapiens
  misc_feature (61)..(62): /note="This region represents a CpG dinucleotide"
  misc_feature (61)..(61): /note="Nucleotide may be methylated to form 5-methylcytosine"
tgacctcgtgatccacccacctcggcctcccaaagtgctgggattacaggcatgagccaccgcacctggccaaagaaaaattttttaaagcagatttcctgcagagatttacatactgcatg

SEQ ID NO: 17380 - DNA, 122 bp, Homo sapiens
  misc_feature (61)..(62): /note="This region represents a CpG dinucleotide"
  misc_feature (61)..(61): /note="Nucleotide may be methylated to form 5-methylcytosine"
ctgttccacttcactgagcaattactgaacagacgagctgtacagactctaaatgaacatcgtcactacctctcacttgttttttgcttctgacctctttaaaggttcggacaaagtaggta

SEQ ID NO: 17381 - DNA, 122 bp, Homo sapiens
  misc_feature (61)..(62): /note="This region represents a CpG dinucleotide"
  misc_feature (61)..(61): /note="Nucleotide may be methylated to form 5-methylcytosine"
cgtctgtgatagataggcacgccggttttaagtttttccccttacctttttagatagtcacgtttacagcagctgtaaattagtgatgggctattagtgagctgtgtcattatttaataaaa

SEQ ID NO: 17382 - DNA, 122 bp, Homo sapiens
  misc_feature (61)..(62): /note="This region represents a CpG dinucleotide"
  misc_feature (61)..(61): /note="Nucleotide may be methylated to form 5-methylcytosine"
ggtggttctgcccctgcccagcctgtcttaaccatgctgcctggtctgtgccgggctctgcgcattcagggtgtgattccatttaattaaacttaaactaaaccttagtgcacaaaggggaa

SEQ ID NO: 17383 - DNA, 122 bp, Homo sapiens
  misc_feature (61)..(62): /note="This region represents a CpG dinucleotide"
  misc_feature (61)..(61): /note="Nucleotide may be methylated to form 5-methylcytosine"
ggggccatgtcagtggctgacggtcacaggtcaggaagccagtgcggcctcctagtagcccgggctctgccaggtggggcgggaggcttctgatgctcaccttggcagacaggcacccccca

SEQ ID NO: 17384 - DNA, 122 bp, Homo sapiens
  misc_feature (61)..(62): /note="This region represents a CpG dinucleotide"
  misc_feature (61)..(61): /note="Nucleotide may be methylated to form 5-methylcytosine"
ggttttcagaaactggattacaaagtgccctggtgaggttctgtttgtgtttacactatgcgcttaggctgcttgttcagtgcctttgatctgtgggtttataaaacttgaaacgttttcag

SEQ ID NO: 17385 - DNA, 122 bp, Homo sapiens
  misc_feature (61)..(62): /note="This region represents a CpG dinucleotide"
  misc_feature (61)..(61): /note="Nucleotide may be methylated to form 5-methylcytosine"
caggactgaccctatggagacaccaggctggcttccacctcttgttgggaggagtgtgagcggcctggctgtgggctgagaggcagctgcatgtgcttggatgctgccgtggataccccagc

SEQ ID NO: 17386 - DNA, 122 bp, Homo sapiens
  misc_feature (61)..(62): /note="This region represents a CpG dinucleotide"
  misc_feature (61)..(61): /note="Nucleotide may be methylated to form 5-methylcytosine"
caggggcgggcagggggcgtggggaagtctgcagccgagagtccaggtaggagtctcctgcgtggtcccgggagaggaaggggcctggcccggggcggggtgtggaggtgggaggacggcgg

SEQ ID NO: 17387 - DNA, 122 bp, Homo sapiens
  misc_feature (61)..(62): /note="This region represents a CpG dinucleotide"
  misc_feature (61)..(61): /note="Nucleotide may be methylated to form 5-methylcytosine"
atgggcagatgcaaacgagccgtctgctgaggagaaagtcgaatgtgctcggggtgggtgcgcgtctgcctgaagcacgtgtccctgaggcctcctgctgtctccccagccggctgacgggc

SEQ ID NO: 17388 - DNA, 122 bp, Homo sapiens
  misc_feature (61)..(62): /note="This region represents a CpG dinucleotide"
  misc_feature (61)..(61): /note="Nucleotide may be methylated to form 5-methylcytosine"
gcttttggtgcctcatcataccttttgggatctgttaacctgtacacatttctgtagtctcgtcattaaactatcttgctgatgacctcttctgagtatttaatttacatcctgattgattt

SEQ ID NO: 17389 - DNA, 122 bp, Homo sapiens
  misc_feature (61)..(62): /note="This region represents a CpG dinucleotide"
  misc_feature (61)..(61): /note="Nucleotide may be methylated to form 5-methylcytosine"
ttctactcttggcttggatatcttttgttcatctttcaacacttaggccaagcagcttggcgaactttggatccatttgcatgatgtgtacttaatgcttggttgattcccttactagtgtg

SEQ ID NO: 17390 - DNA, 122 bp, Homo sapiens
  misc_feature (61)..(62): /note="This region represents a CpG dinucleotide"
  misc_feature (61)..(61): /note="Nucleotide may be methylated to form 5-methylcytosine"
caggcaggtggagtggttctctgaagaaaaatctccactgttagaggaagaagtttccaacgccaagcataaggaatctacaagatgtggaagaagcactgagcaatgtagaagtttccaga

SEQ ID NO: 17391 - DNA, 122 bp, Homo sapiens
  misc_feature (61)..(62): /note="This region represents a CpG dinucleotide"
  misc_feature (61)..(61): /note="Nucleotide may be methylated to form 5-methylcytosine"
ggaatgcagccaccttcatggaggaaaacagccaccaaacccctcatgctgccatggcaacgggagctcacaaatgatgcaattgcaaaggcagctggacacttgcacatgtgactgttgga

SEQ ID NO: 17392 - DNA, 122 bp, Homo sapiens
  misc_feature (61)..(62): /note="This region represents a CpG dinucleotide"
  misc_feature (61)..(61): /note="Nucleotide may be methylated to form 5-methylcytosine"
tcctctcagggaagtttatcccagatcctctatagcacattttattctgttaccacacatcgtgctaatgttacaaaggcaatattaatgttttaccactggtgccaacatcaaatgctcct

SEQ ID NO: 17393 - DNA, 122 bp, Homo sapiens
  misc_feature (61)..(62): /note="This region represents a CpG dinucleotide"
  misc_feature (61)..(61): /note="Nucleotide may be methylated to form 5-methylcytosine"
atcctggcatctctacttctgaagatgccattccttttcctcagagggaatgggcttctccgcctccctctccaataggtgtggcaatcagctgtcttccagttccctttcactgcatcagc

SEQ ID NO: 17394 - DNA, 122 bp, Homo sapiens
  misc_feature (61)..(62): /note="This region represents a CpG dinucleotide"
  misc_feature (61)..(61): /note="Nucleotide may be methylated to form 5-methylcytosine"
cttataattcgctgactaaaagcatacaagtttgctaagacaataactaaatatcacccacgtagtctccaggggaggaggaatcgctgaaaaataccatcaataaaagttaaaaactgaaa

SEQ ID NO: 17395 - DNA, 122 bp, Homo sapiens
  misc_feature (61)..(62): /note="This region represents a CpG dinucleotide"
  misc_feature (61)..(61): /note="Nucleotide may be methylated to form 5-methylcytosine"
cgtctcattcaactccccacgccccagccgaggggtactgtccttccagcccccgcgctacgcagctgctgcctggtcctcgcctgtccccgcggagcccccgccctggccaggctcactgc

SEQ ID NO: 17396 - DNA, 122 bp, Homo sapiens
  misc_feature (61)..(62): /note="This region represents a CpG dinucleotide"
  misc_feature (61)..(61): /note="Nucleotide may be methylated to form 5-methylcytosine"
cgtcccgctagtctgagagtatcgctttatttcctgcctgccagacccctcccctccgcccgcccggctcatcccttcagaaggccctcgtggctgcccacctttctcgccaatcgtggggg

SEQ ID NO: 17397 - DNA, 122 bp, Homo sapiens
  misc_feature (61)..(62): /note="This region represents a CpG dinucleotide"
  misc_feature (61)..(61): /note="Nucleotide may be methylated to form 5-methylcytosine"
gcatagtctcagagaatctcccccaaaatatttatcaattactatgatgatttcgacatacgtccgcaaagtctgtgttattcctgccactggaaggtggaacttaattctcccctcagaat

SEQ ID NO: 17398 - DNA, 122 bp, Homo sapiens
  misc_feature (61)..(62): /note="This region represents a CpG dinucleotide"
  misc_feature (61)..(61): /note="Nucleotide may be methylated to form 5-methylcytosine"
ctgacttcatccctctggtttcctgttgagccctctggaatgcatgtttccctgcagtgacgcatagtcagggaaggcaggcgctggggccgtgccctgactgagtgtgaggtaagggctct

SEQ ID NO: 17399 - DNA, 122 bp, Homo sapiens
  misc_feature (61)..(62): /note="This region represents a CpG dinucleotide"
  misc_feature (61)..(61): /note="Nucleotide may be methylated to form 5-methylcytosine"
ctccatcccagtgcacgagggtgggtgaggctgtaccctaaggtggagcacctgccctcacggggctgtaccccgaggactggtcttgaacgttgggaacagagatcagctctggaaaggag

SEQ ID NO: 17400 - DNA, 122 bp, Homo sapiens
  misc_feature (61)..(62): /note="This region represents a CpG dinucleotide"
  misc_feature (61)..(61): /note="Nucleotide may be methylated to form 5-methylcytosine"
aaagcaagtcaagtgaccaaccccagatccaaggagtgtggaaatagactctgctctagacgctacctcatagaaagaggaattatgagatcacctgaaaaaggatacatgaatacagggtt

SEQ ID NO: 17401 - DNA, 122 bp, Homo sapiens
  misc_feature (61)..(62): /note="This region represents a CpG dinucleotide"
  misc_feature (61)..(61): /note="Nucleotide may be methylated to form 5-methylcytosine"
gagagcttggatgacaggcaacagcttttagcagctgtgctaatgatctcatccatcaaacgaccctctcttcaccttactgttgtcagttatatccacgtctttgatgagaagtggatatg

SEQ ID NO: 17402 - DNA, 122 bp, Homo sapiens
  misc_feature (61)..(62): /note="This region represents a CpG dinucleotide"
  misc_feature (61)..(61): /note="Nucleotide may be methylated to form 5-methylcytosine"
ttgtttttagtagttttactccacctcgatgacataacactcaaacaccttttggttttccgtccacctccccagctgctcctggactggcttgttctacctggccagtgcacatcctcact

SEQ ID NO: 17403 - DNA, 122 bp, Homo sapiens
  misc_feature (61)..(62): /note="This region represents a CpG dinucleotide"
  misc_feature (61)..(61): /note="Nucleotide may be methylated to form 5-methylcytosine"
acttacacctaagaaaacaatttgcttagaagaccttaggatataggatctacatctctccgcatcctgtgtttatgctcctgtatgttccaggttggcccaacaagccagaaggaagagcc

SEQ ID NO: 17404 - DNA, 122 bp, Homo sapiens
  misc_feature (61)..(62): /note="This region represents a CpG dinucleotide"
  misc_feature (61)..(61): /note="Nucleotide may be methylated to form 5-methylcytosine"
actaacaccaaggaagtgaaaatactaacctcaaactcccatgtaagcatttgggggatacgtgtagtgataagtacaaaatacacagtttaataagagccacccaaatagcaatctttata

SEQ ID NO: 17405 - DNA, 122 bp, Homo sapiens
  misc_feature (61)..(62): /note="This region represents a CpG dinucleotide"
  misc_feature (61)..(61): /note="Nucleotide may be methylated to form 5-methylcytosine"
acttgaaatatggacgaaaccaaatatagcatttagacaagggggatttctttacccagccggaattaatacaataaaaaatatttttgtctttattattaacagtgctaattaagccaaaa

SEQ ID NO: 17406 - DNA, 122 bp, Homo sapiens
  misc_feature (61)..(62): /note="This region represents a CpG dinucleotide"
  misc_feature (61)..(61): /note="Nucleotide may be methylated to form 5-methylcytosine"
tagcatatgttcattctataattcatctctgccctttagatgcagccagaatctgagatacgtacctgtatcactttcccagcactttcctttattggtttgtcttttacaatgactcagca

SEQ ID NO: 17407 - DNA, 122 bp, Homo sapiens
  misc_feature (61)..(62): /note="This region represents a CpG dinucleotide"
  misc_feature (61)..(61): /note="Nucleotide may be methylated to form 5-methylcytosine"
ttctcctgcatgcagagccccggatatctcatcttcatgcagcagaagtgcatctaaatgcgatgcactgtattccctacggcccggtcacctgcctgttcttgtgacaaatgccaagatgc

SEQ ID NO: 17408 - DNA, 122 bp, Homo sapiens
  misc_feature (61)..(62): /note="This region represents a CpG dinucleotide"
  misc_feature (61)..(61): /note="Nucleotide may be methylated to form 5-methylcytosine"
agcgcaacagcacaaatgctgggagtcaagctctgacaccaccagctcctagttgtgtaacgctgggcaaggtccttaacctctcggtttctccatgtgcaagtgaagagtcacttcctcag

SEQ ID NO: 17409 - DNA, 122 bp, Homo sapiens
  misc_feature (61)..(62): /note="This region represents a CpG dinucleotide"
  misc_feature (61)..(61): /note="Nucleotide may be methylated to form 5-methylcytosine"
taccaagcattccaggaaacaggaccatcatataacagaaaccagaaaaaaaaaaaaagacgtaaaatagagttagatccagagttgatcaagatcttgaagttagtagataaggtatttaa

SEQ ID NO: 17410 - DNA, 122 bp, Homo sapiens
  misc_feature (61)..(62): /note="This region represents a CpG dinucleotide"
  misc_feature (61)..(61): /note="Nucleotide may be methylated to form 5-methylcytosine"
aatgacatctcagcagtggctgacacacccagagcccagatcttgttctctaatgtcattcgccataaaaggaaccagggatccctggagaaatggttgattctagggctgggacaggggat

SEQ ID NO: 17411 - DNA, 122 bp, Homo sapiens
  misc_feature (61)..(62): /note="This region represents a CpG dinucleotide"
  misc_feature (61)..(61): /note="Nucleotide may be methylated to form 5-methylcytosine"
ttaaagcaaagtttattgaagcacaataatacactctgagggacagcgggcttatttctgcgaagtgaactcagcacttctttacagagctcaaggtgcttttatggggtttgtggggagga

SEQ ID NO: 17412 - DNA, 122 bp, Homo sapiens
  misc_feature (61)..(62): /note="This region represents a CpG dinucleotide"
  misc_feature (61)..(61): /note="Nucleotide may be methylated to form 5-methylcytosine"
actggcatccctattctccaggtgaggaaactgaagctcagaactcaataaacatacacacggccacacagctagcaaaaggcaagaggaaatttgaaacaagcgtgtctgcctctaaagcc

SEQ ID NO: 17413 - DNA, 122 bp, Homo sapiens
  misc_feature (61)..(62): /note="This region represents a CpG dinucleotide"
  misc_feature (61)..(61): /note="Nucleotide may be methylated to form 5-methylcytosine"
aggacctggcattgggggcctctatttcccagcagcagaaaaggggaaagccatttttcccggcagttttctgccctgcaccagggagatgctttatgggtctcagcccagccagcgggggc

SEQ ID NO: 17414 - DNA, 122 bp, Homo sapiens
  misc_feature (61)..(62): /note="This region represents a CpG dinucleotide"
  misc_feature (61)..(61): /note="Nucleotide may be methylated to form 5-methylcytosine"
tttctgttatagacctcatacagagtcatgtgtcctatatgatctctcagactgcaaatacgatggattagacgcctgtgattaggttatactatatgatactgtcagctttaaggagggca

SEQ ID NO: 17415 - DNA, 122 bp, Homo sapiens
  misc_feature (61)..(62): /note="This region represents a CpG dinucleotide"
  misc_feature (61)..(61): /note="Nucleotide may be methylated to form 5-methylcytosine"
agttaacagaagcaagttgactcaggcaactgtgagaaaagctaagactgtttgcatgcacgtggtgagtcatctaatgtgtaagtcaagctaccagctagaattaatcttgtgcatggaaa

SEQ ID NO: 17416 - DNA, 122 bp, Homo sapiens
  misc_feature (61)..(62): /note="This region represents a CpG dinucleotide"
  misc_feature (61)..(61): /note="Nucleotide may be methylated to form 5-methylcytosine"
cactctcaaaactaagccagtgagcaatttaaatccttgacattctgccaatcttagactcgtgagtctagaacagtacctggaatgtagaagatgctccatcaatatttgctgaataataa

SEQ ID NO: 17417 - DNA, 122 bp, Homo sapiens
  misc_feature (61)..(62): /note="This region represents a CpG dinucleotide"
  misc_feature (61)..(61): /note="Nucleotide may be methylated to form 5-methylcytosine"
aatatacctagtgtgatccatccacacaatggaatatcactcagccatgaaaaggctgggcgaggtggctcatgtctgtaatcccagcactttgggaggccgaggcaggtagatcacgaggt

SEQ ID NO: 17418 - DNA, 122 bp, Homo sapiens
  misc_feature (61)..(62): /note="This region represents a CpG dinucleotide"
  misc_feature (61)..(61): /note="Nucleotide may be methylated to form 5-methylcytosine"
agtgctccaggcatctcagtgggtagaggccagggatgctggtaaaaatcctcctttactcggaacagccactcacaggaaagaattataaggctcaaaatgtcaataggctgggcgtggtg

SEQ ID NO: 17419 - DNA, 122 bp, Homo sapiens
  misc_feature (61)..(62): /note="This region represents a CpG dinucleotide"
  misc_feature (61)..(61): /note="Nucleotide may be methylated to form 5-methylcytosine"
agacagacatgtcgagcggcagtgacacctgagggtacctcagtctgagtcacccctctgcgctaagggagcccatatatgagacacctgacccagaccctgagggtcaggaagatgctcag

SEQ ID NO: 17420 - DNA, 122 bp, Homo sapiens
  misc_feature (61)..(62): /note="This region represents a CpG dinucleotide"
  misc_feature (61)..(61): /note="Nucleotide may be methylated to form 5-methylcytosine"
ccacaaaaatttatttctcgtaattgtggctaagaattgttctcagtactctcccaaggtcggggagaagatcttaaatgataaatgtcgctaagaatttggattctttcctctacagtatg

SEQ ID NO: 17421 - DNA, 122 bp, Homo sapiens
  misc_feature (61)..(62): /note="This region represents a CpG dinucleotide"
  misc_feature (61)..(61): /note="Nucleotide may be methylated to form 5-methylcytosine"
ggtggaaaggctgttgccaattaattttattttcgtcacccattttcccttccatgtaatcgtcaaattgtttattgtacatattaaaaatgacacacaatcaagagggcatatgctatatt

SEQ ID NO: 17422 - DNA, 122 bp, Homo sapiens
  misc_feature (61)..(62): /note="This region represents a CpG dinucleotide"
  misc_feature (61)..(61): /note="Nucleotide may be methylated to form 5-methylcytosine"
gagactgtttctgtttgagttgcaaaagctgcaaactggattcaactgttgttcctggaacgacctgccactgcaggatgaaagagtgcttccagagagacataggaataacaagcagaaaa

SEQ ID NO: 17423 - DNA, 122 bp, Homo sapiens
  misc_feature (61)..(62): /note="This region represents a CpG dinucleotide"
  misc_feature (61)..(61): /note="Nucleotide may be methylated to form 5-methylcytosine"
tgtcttttaaaacagtacattttaataagggtgacacactaaagtgtctctgctggtgggcgtctagaaggctgaagggtcctgaatcttataattcagatggaattgaaataaactggaat

SEQ ID NO: 17424 - DNA, 122 bp, Homo sapiens
  misc_feature (61)..(62): /note="This region represents a CpG dinucleotide"
  misc_feature (61)..(61): /note="Nucleotide may be methylated to form 5-methylcytosine"
tcttgttgctgtgctttggacagaggatcctccaagtacatgtgagtgagccttcctggacgtgaggctttaccttcctctacagtggagactcagcacagctcccaccccacccggcagac

SEQ ID NO: 17425 - DNA, 122 bp, Homo sapiens
  misc_feature (61)..(62): /note="This region represents a CpG dinucleotide"
  misc_feature (61)..(61): /note="Nucleotide may be methylated to form 5-methylcytosine"
tgttttaccaacttatcataaattagccacagaactgcccaaagtacaagccagaacttacgtaagtcaaaaactgagtcatgattcagtcataattaatgtttttccttccttcccctttt

SEQ ID NO: 17426 - DNA, 122 bp, Homo sapiens
  misc_feature (61)..(62): /note="This region represents a CpG dinucleotide"
  misc_feature (61)..(61): /note="Nucleotide may be methylated to form 5-methylcytosine"
tgtgacaggaaggtaagttaggaaggcagatctctaagcagttccctgcactagagtctgcgtgactggtcactcccagccaggcaggccattctgcagcatggacatcagaccggggcttg

SEQ ID NO: 17427 - DNA, 122 bp, Homo sapiens
  misc_feature (61)..(62): /note="This region represents a CpG dinucleotide"
  misc_feature (61)..(61): /note="Nucleotide may be methylated to form 5-methylcytosine"
tgtttaagtcagcagacacttatcatgaccctataatgccaaatgcacagtgctacatgccgtggggggagatttttttttgttacactttggcaaaaagtgatgtgtacacaaagaaatag

SEQ ID NO: 17428 - DNA, 122 bp, Homo sapiens
  misc_feature (61)..(62): /note="This region represents a CpG dinucleotide"
  misc_feature (61)..(61): /note="Nucleotide may be methylated to form 5-methylcytosine"
cctgagcgacccggcctaggcagccgggcggcggcgggctctgtccacggtgctggagcgcgtacctgattcaccacgtccatgtccgccagcagcagcatcagcaatgcagggggcgggag

SEQ ID NO: 17429 - DNA, 122 bp, Homo sapiens
  misc_feature (61)..(62): /note="This region represents a CpG dinucleotide"
  misc_feature (61)..(61): /note="Nucleotide may be methylated to form 5-methylcytosine"
gcaagggtttcctctcagcagcggctcatcctccacgccgggggcagctgctttagttttcggctcgcgggctcctggaagatcctccatgcagtcttgctggccagaacccgggtcccgct

SEQ ID NO: 17430 - DNA, 122 bp, Homo sapiens
  misc_feature (61)..(62): /note="This region represents a CpG dinucleotide"
  misc_feature (61)..(61): /note="Nucleotide may be methylated to form 5-methylcytosine"
tagcccctggaggacaatctatttcctccataataccatacaataaagatcacatcatatcgtaataaatctactaaacaaaatcaaggtgctggtgtctggtaagggccttctcactgtgc

SEQ ID NO: 17431 - DNA, 122 bp, Homo sapiens
  misc_feature (61)..(62): /note="This region represents a CpG dinucleotide"
  misc_feature (61)..(61): /note="Nucleotide may be methylated to form 5-methylcytosine"
gaaatcacactgttgataatgtataaaatactgaaccaatcttagccaaagccacttaaacgtgaggtcaagttaattttgatatagctattgttgtactcttcagttggagtgtcttccgt

SEQ ID NO: 17432 - DNA, 122 bp, Homo sapiens
  misc_feature (61)..(62): /note="This region represents a CpG dinucleotide"
  misc_feature (61)..(61): /note="Nucleotide may be methylated to form 5-methylcytosine"
tctactcttgtctggaaatcatacaagtaggtatctcagcaaatgatactcgtgtgttatcgttcttatgagtaaatcattggcagtgagtgtgatttttttttttttatgaaaggataaat

SEQ ID NO: 17433 - DNA, 122 bp, Homo sapiens
  misc_feature (61)..(62): /note="This region represents a CpG dinucleotide"
  misc_feature (61)..(61): /note="Nucleotide may be methylated to form 5-methylcytosine"
atcagagatctgtacctcgattacaggcaaaattcaaaaccttgaagttgctcatggcaacgctaaaagtaggactaaggtctttttcttagtgtaatataaaaacccttctgttggctctt

SEQ ID NO: 17434 - DNA, 122 bp, Homo sapiens
  misc_feature (61)..(62): /note="This region represents a CpG dinucleotide"
  misc_feature (61)..(61): /note="Nucleotide may be methylated to form 5-methylcytosine"
tattctaggggacaattacaataggccagaccctctgataaaattggaacctacaaaaagcgcctcttgaatttggaaagccaaagtgaaagcacaatgactgttttctttgtatggctagt

SEQ ID NO: 17435 - DNA, 122 bp, Homo sapiens
  misc_feature (61)..(62): /note="This region represents a CpG dinucleotide"
  misc_feature (61)..(61): /note="Nucleotide may be methylated to form 5-methylcytosine"
cctgttcctctgatttaaggaaattagaacactgaaaatgtttaatttttgataaaggaacgagagaaaagaaagcatgaaagaattctgagtgaagaacttgttgctgctgtgacctatct

SEQ ID NO: 17436 - DNA, 122 bp, Homo sapiens
  misc_feature (61)..(62): /note="This region represents a CpG dinucleotide"
  misc_feature (61)..(61): /note="Nucleotide may be methylated to form 5-methylcytosine"
actttggggaggaacgtctacctttatctgctgcataaaattatagcaacaaagttgccacgtaatcaagattgttggtaaagtaaatatgataaggtttgaaaatttatttttaacttcct

SEQ ID NO: 17437 - DNA, 122 bp, Homo sapiens
  misc_feature (61)..(62): /note="This region represents a CpG dinucleotide"
  misc_feature (61)..(61): /note="Nucleotide may be methylated to form 5-methylcytosine"
tggagaagcacggcttgagcccgctagaggtggtgctgcaccgggtgagcttccgggccgcggggcggggcggggcggggccgggccggggccggggccggggccggggccggggccggggc

SEQ ID NO: 17438 - DNA, 122 bp, Homo sapiens
  misc_feature (61)..(62): /note="This region represents a CpG dinucleotide"
  misc_feature (61)..(61): /note="Nucleotide may be methylated to form 5-methylcytosine"
tcggtgaatcatatgttctgggcctgacctggatccccagtcctgacacccagcccagcacgggagctcagtgaatgaatgaatgaatgaaatgaatgaatgaaatgaatgaatgaatgaat

SEQ ID NO: 17439 - DNA, 122 bp, Homo sapiens
  misc_feature (61)..(62): /note="This region represents a CpG dinucleotide"
  misc_feature (61)..(61): /note="Nucleotide may be methylated to form 5-methylcytosine"
cccagttctttttctttggcggggggagagggggcggataagatcattaacataataatgcgtgagctgagtttttgcatatgatcattagcataataatgcttgatctagatggcgcaccc

SEQ ID NO: 17440 - DNA, 122 bp, Homo sapiens
  misc_feature (61)..(62): /note="This region represents a CpG dinucleotide"
  misc_feature (61)..(61): /note="Nucleotide may be methylated to form 5-methylcytosine"
ttttattggcctgttgtttgagggggcaggttataggcaagggatgaggattctgtcttacgtgaggcaattattagtgatattttatcacttgtcataatatgcactaacttgtttctctc

SEQ ID NO: 17441 - DNA, 122 bp, Homo sapiens
  misc_feature (61)..(62): /note="This region represents a CpG dinucleotide"
  misc_feature (61)..(61): /note="Nucleotide may be methylated to form 5-methylcytosine"
ctgtctgggttcctgctgtagacactgtgagaacttcctttccaagtgtagccaagcacccgccccactgctgcagcctgtgccatcctcccccttctctgcacacattgcatatccctgtg

SEQ ID NO: 17442 - DNA, 122 bp, Homo sapiens
  misc_feature (61)..(62): /note="This region represents a CpG dinucleotide"
  misc_feature (61)..(61): /note="Nucleotide may be methylated to form 5-methylcytosine"
tactcataggtttccctctgggaggaggttgcaccatggttagtcaaaaaaactactgtacgcttctcagtaaacattttcccccagagctgctgagcagtggcaaatgtctaatgctgttt

SEQ ID NO: 17443 - DNA, 122 bp, Homo sapiens
  misc_feature (61)..(62): /note="This region represents a CpG dinucleotide"
  misc_feature (61)..(61): /note="Nucleotide may be methylated to form 5-methylcytosine"
actttaattttggtaacaactcacttatccagaaataaagtatctaatatccttacccaccgggaatgtatatcagcactaggaataaagccaaaaaacatctgagtatccagtccgtttac

SEQ ID NO: 17444 - DNA, 122 bp, Homo sapiens
  misc_feature (61)..(62): /note="This region represents a CpG dinucleotide"
  misc_feature (61)..(61): /note="Nucleotide may be methylated to form 5-methylcytosine"
ggttatgaataattactttccctttactctgaaagagattctgatcatttcagtgttcctcgccaccaaggaagtggtgaaactcttagctagatgtggttaaggggttactcttgaatctg

SEQ ID NO: 17445 - DNA, 122 bp, Homo sapiens
  misc_feature (61)..(62): /note="This region represents a CpG dinucleotide"
  misc_feature (61)..(61): /note="Nucleotide may be methylated to form 5-methylcytosine"
tttattatttgctaaatgtcacttagcatttgataaatgtaacatttacagtgcattctccgaggactggaaacagtattgtagaacaccagaacctgttttccccttgaagtaacacgcta

SEQ ID NO: 17446 - DNA, 122 bp, Homo sapiens
  misc_feature (61)..(62): /note="This region represents a CpG dinucleotide"
  misc_feature (61)..(61): /note="Nucleotide may be methylated to form 5-methylcytosine"
cagtccaagaagtccagtttcttaagtaacataagacagctggcctccaaatgacaagcccgcaaaatcaccagggagttatatggtgagttcactgaaggaagctatactgtaagaacaca

SEQ ID NO: 17447 - DNA, 122 bp, Homo sapiens
  misc_feature (61)..(62): /note="This region represents a CpG dinucleotide"
  misc_feature (61)..(61): /note="Nucleotide may be methylated to form 5-methylcytosine"
ttgggacacgtacatgttgacatcctgaggatcatgcagctcataaatgtcaccactgaccgcttctgaagggtttttatgtgtgtgtggatgtgtttgttgaggcacagggggcagaggtg

SEQ ID NO: 17448 - DNA, 122 bp, Homo sapiens
  misc_feature (61)..(62): /note="This region represents a CpG dinucleotide"
  misc_feature (61)..(61): /note="Nucleotide may be methylated to form 5-methylcytosine"
aacaagcctgtaacgtgacagatctgtatcccaggggctgatcatagagaaaccacaaagcgatgttttagctgcgtcgagtcctcaacacgggggacttccagcctggtaccaggatagcc

SEQ ID NO: 17449 - DNA, 122 bp, Homo sapiens
  misc_feature (61)..(62): /note="This region represents a CpG dinucleotide"
  misc_feature (61)..(61): /note="Nucleotide may be methylated to form 5-methylcytosine"
ggggtaactaaaatactacctgctgttattcagcctcccttattaagcatacactgtgagcgggaaactatgccagggcctggggtttcacagatacagtcttgtagctaggagtgatttgt

SEQ ID NO: 17450 - DNA, 122 bp, Homo sapiens
  misc_feature (61)..(62): /note="This region represents a CpG dinucleotide"
  misc_feature (61)..(61): /note="Nucleotide may be methylated to form 5-methylcytosine"
acacacgagcctacccagcctggggccctgtgtgccagcacctactctttttttttgagacggagtcttggctctgtcacccaggctggagtgcaatggcgtggtttcagctcactgcaacc

SEQ ID NO: 17451 - DNA, 122 bp, Homo sapiens
  misc_feature (61)..(62): /note="This region represents a CpG dinucleotide"
  misc_feature (61)..(61): /note="Nucleotide may be methylated to form 5-methylcytosine"
aattgcgtgttgttctaagttgatgaaatctcttgccatcccattctgtcctacctgggacgtgagtcacccctttgtccggcattccattaaacgcccattagtcactgacatcctctgct

SEQ ID NO: 17452 - DNA, 122 bp, Homo sapiens
  misc_feature (61)..(62): /note="This region represents a CpG dinucleotide"
  misc_feature (61)..(61): /note="Nucleotide may be methylated to form 5-methylcytosine"
agaactagtggtggtgggatggtatttggtacagaggagggaatgttctgccatctggtccgagaagaagagaaggtcaatttgcctagaaagaagaatgaagctgactcacaaagaagcag

SEQ ID NO: 17453 - DNA, 122 bp, Homo sapiens
  misc_feature (61)..(62): /note="This region represents a CpG dinucleotide"
  misc_feature (61)..(61): /note="Nucleotide may be methylated to form 5-methylcytosine"
aaaatgttatctggcaggggaactaagtagactcagtgcctatgggttatattgaggatgcgtgggtcatgaaggcaccctttgcctagcccagactaccagagtcccagactacaaggaaa

SEQ ID NO: 17454 - DNA, 122 bp, Homo sapiens
  misc_feature (61)..(62): /note="This region represents a CpG dinucleotide"
  misc_feature (61)..(61): /note="Nucleotide may be methylated to form 5-methylcytosine"
tctcctccaggcctggctgtcagcctgttctggggagagtcacttcccctctctgggtctcgacttccttgtgagtgaaataaaggggtgggaccagatgctctttgagccgctccagtgtc

SEQ ID NO: 17455 - DNA, 122 bp, Homo sapiens
  misc_feature (61)..(62): /note="This region represents a CpG dinucleotide"
  misc_feature (61)..(61): /note="Nucleotide may be methylated to form 5-methylcytosine"
tatgtgtatgcatgtccctgagtgtgtgtgttcatgcgtctgggttcacacgtatgcctgcgtgtttctgtgcgtgtgtttgtgagagtgtgtgtctatgtgtgcccaccaacgcccctgcc

SEQ ID NO: 17456 - DNA, 122 bp, Homo sapiens
  misc_feature (61)..(62): /note="This region represents a CpG dinucleotide"
  misc_feature (61)..(61): /note="Nucleotide may be methylated to form 5-methylcytosine"
gtttctgtgggtcagaaggccaagaacaatgtggcttagctggttccctgcttagggtttcgtaaggctgaaatgatggtgtcagcagtattgtgttcctttctggtgactctggagatgaa

SEQ ID NO: 17457 - DNA, 122 bp, Homo sapiens
  misc_feature (61)..(62): /note="This region represents a CpG dinucleotide"
  misc_feature (61)..(61): /note="Nucleotide may be methylated to form 5-methylcytosine"
gggagagcaggatttccaggattcctggaagagtaacgtgaatgctcctgggtgggcagacgcaggggtgggtatggatcactgtctgtcactgcccccatcgggcagtgcagagctgattc

SEQ ID NO: 17458 - DNA, 122 bp, Homo sapiens
  misc_feature (61)..(62): /note="This region represents a CpG dinucleotide"
  misc_feature (61)..(61): /note="Nucleotide may be methylated to form 5-methylcytosine"
gttactcttatcatttaatattctaaatctcaattttctaattttgccttttatataattcgccaactttcaacctttcaactctaggtagggtataaataccagaatagaatttgggaatt

SEQ ID NO: 17459 - DNA, 122 bp, Homo sapiens
  misc_feature (61)..(62): /note="This region represents a CpG dinucleotide"
  misc_feature (61)..(61): /note="Nucleotide may be methylated to form 5-methylcytosine"
acagaatgtacccaaatggctttaatgctaaatggcccagccagaagggtgaggcacctccgcttgtcaggtcagagtgggaaggaacagtgaacaactgctgacattctctcaccgtatgc

SEQ ID NO: 17460 - DNA, 122 bp, Homo sapiens
  misc_feature (61)..(62): /note="This region represents a CpG dinucleotide"
  misc_feature (61)..(61): /note="Nucleotide may be methylated to form 5-methylcytosine"
taaccattttaagcatacaatttggtgacattaagtacattcacattgtcacgcaaccatcgccaccatgcatctctagaactttatcttcccaaactgaaattacatactgatatggtttg

SEQ ID NO: 17461 - DNA, 122 bp, Homo sapiens
  misc_feature (61)..(62): /note="This region represents a CpG dinucleotide"
  misc_feature (61)..(61): /note="Nucleotide may be methylated to form 5-methylcytosine"
agattggagggatcagtgtggattctgcacagatctggggtaggaggcaagcgtgggtaacgctcagcttattgttggatctcaccacagtgaaagacaagcacttccctcattgaaagttg

SEQ ID NO: 17462 - DNA, 122 bp, Homo sapiens
  misc_feature (61)..(62): /note="This region represents a CpG dinucleotide"
  misc_feature (61)..(61): /note="Nucleotide may be methylated to form 5-methylcytosine"
aatgatgtggtgtaagggcaatggccttcagtccaaagacctcatcactaccctgcattacgaggctgagccctattgcagttgttttgaaactcgaaggattagttagatacaatgttgcc

SEQ ID NO: 17463 - DNA, 122 bp, Homo sapiens
  misc_feature (61)..(62): /note="This region represents a CpG dinucleotide"
  misc_feature (61)..(61): /note="Nucleotide may be methylated to form 5-methylcytosine"
aacccaaggcacttcctctgcctgaggtgctgaccttgcctctttccctgacagtaagaacgagtctgaaaaacaaattgagaatctgacttccaatcaataatctttctccatgaccacag

SEQ ID NO: 17464 - DNA, 122 bp, Homo sapiens
  misc_feature (61)..(62): /note="This region represents a CpG dinucleotide"
  misc_feature (61)..(61): /note="Nucleotide may be methylated to form 5-methylcytosine"
tcatagatcagtaattgtttcatttgtgcttgttttctcttccttctcaagggcaagaaccgtctttgtgtatattcctcaatgcttggtataaagcaggagatagatagatagatagatag

SEQ ID NO: 17465 - DNA, 122 bp, Homo sapiens
  misc_feature (61)..(62): /note="This region represents a CpG dinucleotide"
  misc_feature (61)..(61): /note="Nucleotide may be methylated to form 5-methylcytosine"
aacctcatcttacctccagccaccaggcaggagtcaatgcgagcagcaaagtttcccgagcgctctcatccactgtgagtcacttaatactcaggacaaatgggtgaggtcactggggccca

SEQ ID NO: 17466 - DNA, 122 bp, Homo sapiens
  misc_feature (61)..(62): /note="This region represents a CpG dinucleotide"
  misc_feature (61)..(61): /note="Nucleotide may be methylated to form 5-methylcytosine"
tttaagtacttattcaaactctgctaatacagtacattcagtcttggtgtagaaagtacacgtcgtgagactctgtctcaaaaaaaaaaaaaaaaagtacacatctaggaatccactgctgc

SEQ ID NO: 17467 - DNA, 122 bp, Homo sapiens
  misc_feature (61)..(62): /note="This region represents a CpG dinucleotide"
  misc_feature (61)..(61): /note="Nucleotide may be methylated to form 5-methylcytosine"
ctcctaactcattggagtctgtatttctttatctctgaaatgacagcaacactcaacacacgttgactgaggacagactgtatgctagtctgaactatgtgtgagtgaacacatagtcatca

SEQ ID NO: 17468 - DNA, 122 bp, Homo sapiens
  misc_feature (61)..(62): /note="This region represents a CpG dinucleotide"
  misc_feature (61)..(61): /note="Nucleotide may be methylated to form 5-methylcytosine"
taagtgacagagctgggttttaaacctaagcaatctagttccggaggctatgctctcaaccgcaaactctcattttcatgactaaatctatgataattatttcaccactcccttctttctgt

SEQ ID NO: 17469 - DNA, 122 bp, Homo sapiens
  misc_feature (61)..(62): /note="This region represents a CpG dinucleotide"
  misc_feature (61)..(61): /note="Nucleotide may be methylated to form 5-methylcytosine"
aaatgatgcaggttttgcctctgttccccggaacaagaggtgagaggctggcctggctggcgtgagattctcactcgtggtcattctcactgaggttggctcagaaatctgggtgaaatgat

SEQ ID NO: 17470 - DNA, 122 bp, Homo sapiens
  misc_feature (61)..(62): /note="This region represents a CpG dinucleotide"
  misc_feature (61)..(61): /note="Nucleotide may be methylated to form 5-methylcytosine"
acattgattgagtattttctaaatgtcatggcttgtgctaagccgtggctgcatcacccacgtaactctccttacaaccacgcctcatgaggctgttaagaataaggttagactgcctgagt

SEQ ID NO: 17471 - DNA, 122 bp, Homo sapiens
  misc_feature (61)..(62): /note="This region represents a CpG dinucleotide"
  misc_feature (61)..(61): /note="Nucleotide may be methylated to form 5-methylcytosine"
tgcaaatgagagaaaagagtgagaaaaagtcatttcacatacagaaaaaacaagacatgtcgtctcagaaattgtgtagtttcttgcttaagcactcgagatgttcagtgaacagctaacaa

SEQ ID NO: 17472 - DNA, 122 bp, Homo sapiens
  misc_feature (61)..(62): /note="This region represents a CpG dinucleotide"
  misc_feature (61)..(61): /note="Nucleotide may be methylated to form 5-methylcytosine"
ctcaccacttttgttttcatctcggagactgcatatcgtgaattgcgtaagtcactgagacgaataaatcattgagagaagctaatcaatgtccctggaagtttatatttcatcttctctta

SEQ ID NO: 17473 - DNA, 122 bp, Homo sapiens
  misc_feature (61)..(62): /note="This region represents a CpG dinucleotide"
  misc_feature (61)..(61): /note="Nucleotide may be methylated to form 5-methylcytosine"
tcatgatgtctctagacttctacttctttatttttcctttgtaaactgtgtcacaccaggcgtatctcaccatgaaaacattgtgagtaatctcaccacactggggagaattcatattagta

SEQ ID NO: 17474 - DNA, 122 bp, Homo sapiens
  misc_feature (61)..(62): /note="This region represents a CpG dinucleotide"
  misc_feature (61)..(61): /note="Nucleotide may be methylated to form 5-methylcytosine"
gcacccctagtggtacagcaacacatgctcaaatctcttgatgagtaacattttccatgtcgtacctgtggcatctcagtgacaaatggattctagggccctggaatattgccactcactga

SEQ ID NO: 17475 - DNA, 122 bp, Homo sapiens
  misc_feature (61)..(62): /note="This region represents a CpG dinucleotide"
  misc_feature (61)..(61): /note="Nucleotide may be methylated to form 5-methylcytosine"
ttctgggcactgaggatatgacagtgaataagcaggtgaaaattccttccttgatggcaccgatattctagtgggcagttgtaatcccaccactgcacaactgaacaagcctgaatgtctcc

SEQ ID NO: 17476 - DNA, 122 bp, Homo sapiens
  misc_feature (61)..(62): /note="This region represents a CpG dinucleotide"
  misc_feature (61)..(61): /note="Nucleotide may be methylated to form 5-methylcytosine"
tgtgagatgaaagctgagtgggaagctggaccctacaaaggagtctgggggcgccgggaccggaccccttcggaaaggtttgcgggaaggggcttccggggacgatggttattgttgtaacg

SEQ ID NO: 17477 - DNA, 122 bp, Homo sapiens
  misc_feature (61)..(62): /note="This region represents a CpG dinucleotide"
  misc_feature (61)..(61): /note="Nucleotide may be methylated to form 5-methylcytosine"
gctacatctggatgtggcttttgtcagaaattatttgcatttctaagcaaatcagattaacgtctagtacaatcttccatctctgcatgtcaagtggacaggccaatttaacatttggcata

SEQ ID NO: 17478 - DNA, 122 bp, Homo sapiens
  misc_feature (61)..(62): /note="This region represents a CpG dinucleotide"
  misc_feature (61)..(61): /note="Nucleotide may be methylated to form 5-methylcytosine"
ctttgcattctttatctggatgtattattgagttaaaatatcctcattaaatctgttcttcgagtccacatcatggagccacctggtggaaagctggctcatcacaaggtcctgtgaatagc

SEQ ID NO: 17479 - DNA, 122 bp, Homo sapiens
  misc_feature (61)..(62): /note="This region represents a CpG dinucleotide"
  misc_feature (61)..(61): /note="Nucleotide may be methylated to form 5-methylcytosine"
cctatgttgcaggctatttggaggctgaacttgaggtcagtatcaccagcatttttaggacggcagtggcctgatcaagtttatattctgagaggagcacttgggtgaccaggtgaagaatg

SEQ ID NO: 17480 - DNA, 122 bp, Homo sapiens
  misc_feature (61)..(62): /note="This region represents a CpG dinucleotide"
  misc_feature (61)..(61): /note="Nucleotide may be methylated to form 5-methylcytosine"
agatatggtcaaagactataattgctctcttgcatgtatctttaacttccttaacacttccgtcacatttgtttcacaaaaccacagccatggttaaaagccagctctccacctactcctta

SEQ ID NO: 17481 - DNA, 122 bp, Homo sapiens
  misc_feature (61)..(62): /note="This region represents a CpG dinucleotide"
  misc_feature (61)..(61): /note="Nucleotide may be methylated to form 5-methylcytosine"
tgacaaaattgagtcagtgctagtctgcacgcacaggtgtgcttcacatgctaaaataaacgtgttcctgaaaggttacgtataaattgagtcattttcctattggcttatattatcttgtc

SEQ ID NO: 17482 - DNA, 122 bp, Homo sapiens
  misc_feature (61)..(62): /note="This region represents a CpG dinucleotide"
  misc_feature (61)..(61): /note="Nucleotide may be methylated to form 5-methylcytosine"
ttgtcccatatgattataatagaactaaaaaattcctattgcctaatgtcatggctgtagcgtcacagtgaaaagcattactcacatttgtggtgatgtggtataaacaaaccactgcaagt

SEQ ID NO: 17483 - DNA, 122 bp, Homo sapiens
  misc_feature (61)..(62): /note="This region represents a CpG dinucleotide"
  misc_feature (61)..(61): /note="Nucleotide may be methylated to form 5-methylcytosine"
aacactccaggaagagccggccatggcaggcggggactgtgtggcaagcctggttctgggcgccggcggaccggggctccggcgcggacatggcaaggtggccatgagggggacagaatggg

SEQ ID NO: 17484 - DNA, 122 bp, Homo sapiens
  misc_feature (61)..(62): /note="This region represents a CpG dinucleotide"
  misc_feature (61)..(61): /note="Nucleotide may be methylated to form 5-methylcytosine"
tttggttttctaatgcctgtaaattagagcttctgagccatgtggggagcaacccctacccgcaaaggagtgatgtaatgtctgggggctgcaatggttttttcctttgagatggataccat

SEQ ID NO: 17485 - DNA, 122 bp, Homo sapiens
  misc_feature (61)..(62): /note="This region represents a CpG dinucleotide"
  misc_feature (61)..(61): /note="Nucleotide may be methylated to form 5-methylcytosine"
gttgaaattcgacccatttctattactcaagcttactacaaggtcacatgaggccaagaacgggtactgcaggaacactaataatactgactattgtaacaagagctagcatttaggccagg

SEQ ID NO: 17486 - DNA, 122 bp, Homo sapiens
  misc_feature (61)..(62): /note="This region represents a CpG dinucleotide"
  misc_feature (61)..(61): /note="Nucleotide may be methylated to form 5-methylcytosine"
aacgtaagtcacacgtgaatagcggtggaaatccaagaattttatctcatttcctgtacacgttactgaactgttcacctctgagtgtaatgctttcctggtggcacatggagaatataatc

SEQ ID NO: 17487 - DNA, 122 bp, Homo sapiens
  misc_feature (61)..(62): /note="This region represents a CpG dinucleotide"
  misc_feature (61)..(61): /note="Nucleotide may be methylated to form 5-methylcytosine"
ctcaggaattaaacaaacttccatgtcttttcatatatttgattctcatatgaacctttgcgagaagaaggatggatgggtattatcttggagccaaggctggggatttaatgagcattctg

SEQ ID NO: 17488 - DNA, 122 bp, Homo sapiens
  misc_feature (61)..(62): /note="This region represents a CpG dinucleotide"
  misc_feature (61)..(61): /note="Nucleotide may be methylated to form 5-methylcytosine"
cacccgctctgaggttgtgaaggtcaacgacaccctgtcctgggggctcaggatgtgcaccgggctctctgtgtggggagaagtacagataagcacccctccctccggtgcatgggctcagt

SEQ ID NO: 17489 - DNA, 122 bp, Homo sapiens
  misc_feature (61)..(62): /note="This region represents a CpG dinucleotide"
  misc_feature (61)..(61): /note="Nucleotide may be methylated to form 5-methylcytosine"
tagcatcgtgggaccttgcatatcctcaccgatctcctgtatgttggacaccatctctcccgagaacctcagcctccaaaaggtaaaggtacacctcagttgtttttctttttctttttctt

SEQ ID NO: 17490 - DNA, 122 bp, Homo sapiens
  misc_feature (61)..(62): /note="This region represents a CpG dinucleotide"
  misc_feature (61)..(61): /note="Nucleotide may be methylated to form 5-methylcytosine"
tggggaagtctgcattcctcccagtcttgaacaattactgacaagtgctttatttgtctgcgctcattagggtcaatctgattcgtctagggatatgagaagtgctatttgagatgcctttg

SEQ ID NO: 17491 - DNA, 122 bp, Homo sapiens
  misc_feature (61)..(62): /note="This region represents a CpG dinucleotide"
  misc_feature (61)..(61): /note="Nucleotide may be methylated to form 5-methylcytosine"
atgtggtactcgtgagcaggattttcaatgcctggctggttgttacttatccatttagtccgagcttcagggaaagaacatgacaccggcctccagcagagcctgctcttggtccactgttt

SEQ ID NO: 17492 - DNA, 122 bp, Homo sapiens
  misc_feature (61)..(62): /note="This region represents a CpG dinucleotide"
  misc_feature (61)..(61): /note="Nucleotide may be methylated to form 5-methylcytosine"
tacctcaagtgatccacccacctcagcctcccaaagttctgggattacaggtgtgagccacggcacacggccagattggttgtttttctggtaatgaaagagaaactataccaagctacccc

SEQ ID NO: 17493 - DNA, 122 bp, Homo sapiens
  misc_feature (61)..(62): /note="This region represents a CpG dinucleotide"
  misc_feature (61)..(61): /note="Nucleotide may be methylated to form 5-methylcytosine"
ggtaatctacccgcctgggcctcccaaagtgctgggattataggcgtgagccaccgtgcccggcccaggcattttgaaatacttcagaatgtgtttcaggctgacatcactgaaactcagaa

SEQ ID NO: 17494 - DNA, 122 bp, Homo sapiens
  misc_feature (61)..(62): /note="This region represents a CpG dinucleotide"
  misc_feature (61)..(61): /note="Nucleotide may be methylated to form 5-methylcytosine"
cttcagggaggagccagcaacacaaaagccctttcaccagcacattttttaactctctgccgggcctcccacccgtctctaatcaagttcctgctgccaggaattctagccccagctcccac

SEQ ID NO: 17495 - DNA, 122 bp, Homo sapiens
  misc_feature (61)..(62): /note="This region represents a CpG dinucleotide"
  misc_feature (61)..(61): /note="Nucleotide may be methylated to form 5-methylcytosine"
atgaaagcaatcctgcttgatactattcacacggtgcatgattacttcacgggggtggaacggaacagtctgtcgccatttgatagtatggttccagaatgaaaacaaaaccactgaataaa

SEQ ID NO: 17496 - DNA, 122 bp, Homo sapiens
  misc_feature (61)..(62): /note="This region represents a CpG dinucleotide"
  misc_feature (61)..(61): /note="Nucleotide may be methylated to form 5-methylcytosine"
ctttgtgcaggggcagtgtgggcgagcctggcagcctcctgagcggcaggactatgcaggcgccttattgagctgtcagcggctggcagctgctcccaggtagcaggaagaagggccgagct

SEQ ID NO: 17497 - DNA, 122 bp, Homo sapiens
  misc_feature (61)..(62): /note="This region represents a CpG dinucleotide"
  misc_feature (61)..(61): /note="Nucleotide may be methylated to form 5-methylcytosine"
gttcttgtctgactctttagctgcatatgtaaagagcacagactttgaaacctgagctcccgcgttcgaatccccactgtaccactatctaaacatggcatcttgggcaagtgattcaagca

SEQ ID NO: 17498 - DNA, 122 bp, Homo sapiens
  misc_feature (61)..(62): /note="This region represents a CpG dinucleotide"
  misc_feature (61)..(61): /note="Nucleotide may be methylated to form 5-methylcytosine"
gatgatgccagtgctgcaggtccatgaaccacactttgagaagcaagagtctaatgaactcgtcaaattcaacatgcccaaataccaacccctaagacttccagtttcagctccagcatgta

SEQ ID NO: 17499 - DNA, 122 bp, Homo sapiens
  misc_feature (61)..(62): /note="This region represents a CpG dinucleotide"
  misc_feature (61)..(61): /note="Nucleotide may be methylated to form 5-methylcytosine"
taaaattggaataaaagctacccttaaatctgggtctgaactgcttccttgacaggcaagcgcctacgagtacaggttagtcattcaagagtttataaattagtagtctgagctgtgagcca

SEQ ID NO: 17500 - DNA, 122 bp, Homo sapiens
  misc_feature (61)..(62): /note="This region represents a CpG dinucleotide"
  misc_feature (61)..(61): /note="Nucleotide may be methylated to form 5-methylcytosine"
aagcaacattcatcatgttcaccctaaggcttctggagcttgctggctggctgactggctcgccaggtacatttaagaagcctgtgcttggggatgtttcttaactgcagacggttccttta

SEQ ID NO: 17501 - DNA, 122 bp, Homo sapiens
  misc_feature (61)..(62): /note="This region represents a CpG dinucleotide"
  misc_feature (61)..(61): /note="Nucleotide may be methylated to form 5-methylcytosine"
atttgcttttactttcctgtctttggcctttgctctgatgtttcagtatctagactaatgcgaatttcattcttcagtttaaatcagcacgtcagtcagggattcatccaaaccttaatggc

SEQ ID NO: 17502 - DNA, 122 bp, Homo sapiens
  misc_feature (61)..(62): /note="This region represents a CpG dinucleotide"
  misc_feature (61)..(61): /note="Nucleotide may be methylated to form 5-methylcytosine"
aatttaattcctttatatcccacatgacagctacgactgccactgtttagttgatgttggcgtcgggtttggggcttacttggcttttgtgtttgcttctaacctgcagaaagagtcaaagt

SEQ ID NO: 17503 - DNA, 122 bp, Homo sapiens
  misc_feature (61)..(62): /note="This region represents a CpG dinucleotide"
  misc_feature (61)..(61): /note="Nucleotide may be methylated to form 5-methylcytosine"
gttgttttgattgtcaagacagatgaaagcataaacttatttatgagataagacttcaagcgtaggcggtactgacatcataaatgggtttaatgccatattaagtaagttgaaattagttc

SEQ ID NO: 17504 - DNA, 122 bp, Homo sapiens
  misc_feature (61)..(62): /note="This region represents a CpG dinucleotide"
  misc_feature (61)..(61): /note="Nucleotide may be methylated to form 5-methylcytosine"
ctacttgcctatgctgaaattaaggagatcgtaataaactaaggactaagtcctaagaaacgtatgcagaaatgtttaatattgttactgatagtgtaagatttaactaagaccacaatatc

SEQ ID NO: 17505 - DNA, 122 bp, Homo sapiens
  misc_feature (61)..(62): /note="This region represents a CpG dinucleotide"
  misc_feature (61)..(61): /note="Nucleotide may be methylated to form 5-methylcytosine"
tcttcctcccctggttactcatctgtgaaataattggattaggcagcaggtttcaactcacgtgtcagttctaacccgattgagaacaaatgcctgaagaaggacattgggaaggtccctga

SEQ ID NO: 17506 - DNA, 122 bp, Homo sapiens
  misc_feature (61)..(62): /note="This region represents a CpG dinucleotide"
  misc_feature (61)..(61): /note="Nucleotide may be methylated to form 5-methylcytosine"
tgagatgcccaacctgcgtggaaagcctccacccaccttgcagcataagtgcggaggaaacggtgacaaaatcattgccccgctccctaatggggctattactttaaagttatggggccaag

SEQ ID NO: 17507 - DNA, 122 bp, Homo sapiens
  misc_feature (61)..(62): /note="This region represents a CpG dinucleotide"
  misc_feature (61)..(61): /note="Nucleotide may be methylated to form 5-methylcytosine"
gagccttgcaaacaggcctggagacatgcgaagataggagttcatcctggcgtcagtacacggtgcctgcctaacacccaatgccagcccactgctgcgtgccaggcagcaccctggagcag

SEQ ID NO: 17508 - DNA, 122 bp, Homo sapiens
  misc_feature (61)..(62): /note="This region represents a CpG dinucleotide"
  misc_feature (61)..(61): /note="Nucleotide may be methylated to form 5-methylcytosine"
taaaaaagcaaatcatgcctgatgtcaaagaaatatctatgagttcatcataaacataaacgaatgaaagaaagaattaattagtcagggccatctgggtggtaacagaatatttatggcct

SEQ ID NO: 17509 - DNA, 122 bp, Homo sapiens
  misc_feature (61)..(62): /note="This region represents a CpG dinucleotide"
  misc_feature (61)..(61): /note="Nucleotide may be methylated to form 5-methylcytosine"
gctcccctgcattctgctcttcaaagacacatgcagaaccttcagggtgttgaaaggggccgcaaagatcacagctctcagcgggggcgcggtcagtcggccacagcggtggagatggcgtt

SEQ ID NO: 17510 - DNA, 122 bp, Homo sapiens
  misc_feature (61)..(62): /note="This region represents a CpG dinucleotide"
  misc_feature (61)..(61): /note="Nucleotide may be methylated to form 5-methylcytosine"
ttatataaagttgtttattaacattgtatttttaacaaagttctgcagttttgaaatgttcggtccccccaggtgtcaaggaaacggaaataaatatttttaacattttcaggtgtatctca

SEQ ID NO: 17511 - DNA, 122 bp, Homo sapiens
  misc_feature (61)..(62): /note="This region represents a CpG dinucleotide"
  misc_feature (61)..(61): /note="Nucleotide may be methylated to form 5-methylcytosine"
tgtgatctgattggtgggccccttacccaatcttgagagatcatcaaaggcttcctgaagcgtcacctgagtttaaccaggaaggatgagtgggagttaatggcaaggcggcaggaaacgcc

SEQ ID NO: 17512 - DNA, 122 bp, Homo sapiens
  misc_feature (61)..(62): /note="This region represents a CpG dinucleotide"
  misc_feature (61)..(61): /note="Nucleotide may be methylated to form 5-methylcytosine"
aaatttccatgccatgttctgaagggctggcatcccttcttggctcaggcaggcttgtagcgtagactggggacatggggttggagcggggcggtttcctgaggcatggcggccacactgga

SEQ ID NO: 17513 - DNA, 122 bp, Homo sapiens
  misc_feature (61)..(62): /note="This region represents a CpG dinucleotide"
  misc_feature (61)..(61): /note="Nucleotide may be methylated to form 5-methylcytosine"
gacagtgaagtaaaatggcctgctcatacattactaacaagaatataggccaggcacggtcgctcacgcctgtaatcccagtactttgggaggccgaggcgggtggatcatctgaggtcagg

SEQ ID NO: 17514 - DNA, 122 bp, Homo sapiens
  misc_feature (61)..(62): /note="This region represents a CpG dinucleotide"
  misc_feature (61)..(61): /note="Nucleotide may be methylated to form 5-methylcytosine"
actctggatggttatttcaagctttaacttcaggctctgattgtactgaactctctctctcgtggtaaataaccactaaactaaaaaataaaaataataataaaaagaaacagtacagatgg

SEQ ID NO: 17515 - DNA, 122 bp, Homo sapiens
  misc_feature (61)..(62): /note="This region represents a CpG dinucleotide"
  misc_feature (61)..(61): /note="Nucleotide may be methylated to form 5-methylcytosine"
ttttctgttctacatcttactctcttttaaagatacagacccaggatttacagtgactgacggacacaggaggctgagaaatagtctaattcaagagactgttgaaactcgttacttggtaa

SEQ ID NO: 17516 - DNA, 122 bp, Homo sapiens
  misc_feature (61)..(62): /note="This region represents a CpG dinucleotide"
  misc_feature (61)..(61): /note="Nucleotide may be methylated to form 5-methylcytosine"
tgttttgaaacaattgtgttgtaactgaaggggacaggagtattaaaccaagacagttttcgaaatggcatataatttaaggatttggggtagagcattgttattacgcaagtcaagatctg

SEQ ID NO: 17517 - DNA, 122 bp, Homo sapiens
  misc_feature (61)..(62): /note="This region represents a CpG dinucleotide"
  misc_feature (61)..(61): /note="Nucleotide may be methylated to form 5-methylcytosine"
ttgtgacagcagcatgcatgattgtgacagcagcattaggtgtgtggccacttgtaaccacgtgaatggcttttcttgactgtgtgtaactcttgcttatgttattgactgtatgtgaatag

SEQ ID NO: 17518 - DNA, 122 bp, Homo sapiens
  misc_feature (61)..(62): /note="This region represents a CpG dinucleotide"
  misc_feature (61)..(61): /note="Nucleotide may be methylated to form 5-methylcytosine"
ggtgagctatcttgggcatgtggaacattgacctttttgtgaaatgtggcatattggctccgtccttcatcctttactattgaaacgatttgattcagttgtacatttccattagcaagaag

SEQ ID NO: 17519 - DNA, 122 bp, Homo sapiens
  misc_feature (61)..(62): /note="This region represents a CpG dinucleotide"
  misc_feature (61)..(61): /note="Nucleotide may be methylated to form 5-methylcytosine"
gagtgaaagccccagaaggcagcatgtagtgaaacagtaaagggattctgggaatacgggcgtgcacaaaacactgacagcatctgctgcctttttaactggattcttactacttcccggtt

SEQ ID NO: 17520 - DNA, 122 bp, Homo sapiens
  misc_feature (61)..(62): /note="This region represents a CpG dinucleotide"
  misc_feature (61)..(61): /note="Nucleotide may be methylated to form 5-methylcytosine"
actttcccacagccaagttcaaactcaaagtgggtttcaaaatttaggtttgtccggctccgagacccgtgttctctgcagggcacttagaggactcctgtgctgacctctcaggcagcctt

SEQ ID NO: 17521 - DNA, 122 bp, Homo sapiens
  misc_feature (61)..(62): /note="This region represents a CpG dinucleotide"
  misc_feature (61)..(61): /note="Nucleotide may be methylated to form 5-methylcytosine"
tcccaataccaggagctgtgtaactctgttatacatggcacagggctcctcattggtcaacgaaatgagctttggccacttaatgccttgggagtcatttgctaagggcacctggaatgagc

SEQ ID NO: 17522 - DNA, 122 bp, Homo sapiens
  misc_feature (61)..(62): /note="This region represents a CpG dinucleotide"
  misc_feature (61)..(61): /note="Nucleotide may be methylated to form 5-methylcytosine"
cagcggccttgtggtaggaaaagactatctgtggcaaggttctggttggtttattttttgcgcaagacaagcatgaagaaaagaaaatgaagtaataggtaagccaactccacactatatga

SEQ ID NO: 17523 - DNA, 122 bp, Homo sapiens
  misc_feature (61)..(62): /note="This region represents a CpG dinucleotide"
  misc_feature (61)..(61): /note="Nucleotide may be methylated to form 5-methylcytosine"
cgtctcctcctcagtcatagagcaattgtttttcgtccgtttggtaggtaaaacccccatcgaaaccctcatccgggatatgttactgtccggcagcagttttaactggccgtatatggcaa

SEQ ID NO: 17524 - DNA, 122 bp, Homo sapiens
  misc_feature (61)..(62): /note="This region represents a CpG dinucleotide"
  misc_feature (61)..(61): /note="Nucleotide may be methylated to form 5-methylcytosine"
gttggtggctttgcagtgatagacaccttcatcctcttctgtgactctttcaataaacagcgtgctgcttcctggtcctaaaataattcctgaggggtgagagatgtttagattagtgggcc

SEQ ID NO: 17525 - DNA, 122 bp, Homo sapiens
  misc_feature (61)..(62): /note="This region represents a CpG dinucleotide"
  misc_feature (61)..(61): /note="Nucleotide may be methylated to form 5-methylcytosine"
attgttgatgtgttgcagtggagccagtccagtaactattttctgtatgatgcagtcacccgtattataaaggctgttgcaatcaatgactaatatccctgcttacttctgcaaaattttat

SEQ ID NO: 17526 - DNA, 122 bp, Homo sapiens
  misc_feature (61)..(62): /note="This region represents a CpG dinucleotide"
  misc_feature (61)..(61): /note="Nucleotide may be methylated to form 5-methylcytosine"
aaaagcatctcagactcccctgtttggggtcatctgtcttcctcagggagccccaagagtcgtgagtaggttcctctcaggtcagaggtgctgctgtcttttacattgagatccctgatcgc

SEQ ID NO: 17527 - DNA, 122 bp, Homo sapiens
  misc_feature (61)..(62): /note="This region represents a CpG dinucleotide"
  misc_feature (61)..(61): /note="Nucleotide may be methylated to form 5-methylcytosine"
ggaaaactgcctactcaagcctcagcaatggtggacgccccgcccctgaccaagctcaagcgtcccaggtggacttcaggctgctgttctggcaatgagaatttcaagccagtggatcttag

SEQ ID NO: 17528 - DNA, 122 bp, Homo sapiens
  misc_feature (61)..(62): /note="This region represents a CpG dinucleotide"
  misc_feature (61)..(61): /note="Nucleotide may be methylated to form 5-methylcytosine"
ggatgtgagtaacgggtagactcaagcctcaaactcacatcttctgactcatttattttccgctgacatgtctcaccccagaggctggcctgggcaggaccaaccactgcaggtgttcacac

SEQ ID NO: 17529 - DNA, 122 bp, Homo sapiens
  misc_feature (61)..(62): /note="This region represents a CpG dinucleotide"
  misc_feature (61)..(61): /note="Nucleotide may be methylated to form 5-methylcytosine"
aggctcggtgcaaaacccatcttctaaagggcagctggcctcttctagcggggcagagatcgttcagctttgacccctttgtaattatggcaggagtccagggccccacaccagccacccta

SEQ ID NO: 17530 - DNA, 122 bp, Homo sapiens
  misc_feature (61)..(62): /note="This region represents a CpG dinucleotide"
  misc_feature (61)..(61): /note="Nucleotide may be methylated to form 5-methylcytosine"
cttttacaagtaagatagctgcattttaattctgattgtcacaaattcatcccaaatgcccgcacgaggtttaattaccaccacaacttggaggtgggggcggagggtgggtggggaggtgt

SEQ ID NO: 17531 - DNA, 122 bp, Homo sapiens
  misc_feature (61)..(62): /note="This region represents a CpG dinucleotide"
  misc_feature (61)..(61): /note="Nucleotide may be methylated to form 5-methylcytosine"
tgtacagagtgatgaaaggtttgagtacccaatgtgcaagttcttagctgagatcaaagacgacattctctgcattcttattttacctctcatacaaagatggccacaggattaagacagta

SEQ ID NO: 17532 - DNA, 122 bp, Homo sapiens
  misc_feature (61)..(62): /note="This region represents a CpG dinucleotide"
  misc_feature (61)..(61): /note="Nucleotide may be methylated to form 5-methylcytosine"
aggtttgtaagttggaaacaaagaaggcaaataaactaagatgagaaccaaatgtctacacggatgctaccaaaatctctctgttcatttgactggtgaaattctgcccgctgttggatttg

SEQ ID NO: 17533 - DNA, 122 bp, Homo sapiens
  misc_feature (61)..(62): /note="This region represents a CpG dinucleotide"
  misc_feature (61)..(61): /note="Nucleotide may be methylated to form 5-methylcytosine"
aaatggaatatttaaggtatatgagaatgccaaacagaataaaagaaatgatggcacaatcgctaccagaggaaagcagtactaatgaaataaaaagatgataagaattgaaagtaaacaca

SEQ ID NO: 17534 - DNA, 122 bp, Homo sapiens
  misc_feature (61)..(62): /note="This region represents a CpG dinucleotide"
  misc_feature (61)..(61): /note="Nucleotide may be methylated to form 5-methylcytosine"
tgactttcattttgtttgcttcctaagccagtttatgcatgagcccctcaggggaatgtacggggacccttcctgaatctgtgctttgcttctgcctgcaaacattgtgaccctcacctcaa

SEQ ID NO: 17535 - DNA, 122 bp, Homo sapiens
  misc_feature (61)..(62): /note="This region represents a CpG dinucleotide"
  misc_feature (61)..(61): /note="Nucleotide may be methylated to form 5-methylcytosine"
taggctgaggcacaagtgtcgctgaacctgggaggcggaggttgtagcgagccgagatcacgcaactgctctccagcctggtgacagggtgagactcagtctcaacaacagcaacaacaaca

SEQ ID NO: 17536 - DNA, 122 bp, Homo sapiens
  misc_feature (61)..(62): /note="This region represents a CpG dinucleotide"
  misc_feature (61)..(61): /note="Nucleotide may be methylated to form 5-methylcytosine"
tcttccatgtgcacacacatttggacacataaacgtgcatgcacaggtgtccaggccaggcgtgtaagcccccaggagtgcatgcgtgtgtttgcgtgcagtctacaaacatgttttcacaa

SEQ ID NO: 17537 - DNA, 122 bp, Homo sapiens
  misc_feature (61)..(62): /note="This region represents a CpG dinucleotide"
  misc_feature (61)..(61): /note="Nucleotide may be methylated to form 5-methylcytosine"
tcaccctgatatactgaggacactcggtctctagcaatttcttcaggtcatccctgtagacggcatggaaattcccctttatcagggagtacttgtggtagacgtcgatgatagagttcaag

SEQ ID NO: 17538 - DNA, 122 bp, Homo sapiens
  misc_feature (61)..(62): /note="This region represents a CpG dinucleotide"
  misc_feature (61)..(61): /note="Nucleotide may be methylated to form 5-methylcytosine"
agaagaaacacttatgtagaagtaactaagattattaatgtctaagaaatacatgtttcacgaacaattttaagaatatgttttaagagacatagtattattggccatgattgtgatgttcc

SEQ ID NO: 17539 - DNA, 122 bp, Homo sapiens
  misc_feature (61)..(62): /note="This region represents a CpG dinucleotide"
  misc_feature (61)..(61): /note="Nucleotide may be methylated to form 5-methylcytosine"
atcttcctgggctggtgacatgtgatccgattctgtcgcagtgctgggcactagggcagccgcagctcctagttagccacgtgatcatgaagagggaacaaatactctacagtgggccctgc

SEQ ID NO: 17540 - DNA, 122 bp, Homo sapiens
  misc_feature (61)..(62): /note="This region represents a CpG dinucleotide"
  misc_feature (61)..(61): /note="Nucleotide may be methylated to form 5-methylcytosine"
actgttgtcattattttcattttaaaactaagaacatgaaggcccagagagtttaagcagcgtgcccaaggccacacagcaagtcctagtggcatgagtcactgggacttgactcagacagc

SEQ ID NO: 17541 - DNA, 122 bp, Homo sapiens
  misc_feature (61)..(62): /note="This region represents a CpG dinucleotide"
  misc_feature (61)..(61): /note="Nucleotide may be methylated to form 5-methylcytosine"
ttgggaagacacacccccagcctggaaagtgagagtccctgccctcccacctccacaggccggccctgtccaccctgaggttgcctgtgtcaaggaccattgccctggctccagcaggggca

SEQ ID NO: 17542 - DNA, 122 bp, Homo sapiens
  misc_feature (61)..(62): /note="This region represents a CpG dinucleotide"
  misc_feature (61)..(61): /note="Nucleotide may be methylated to form 5-methylcytosine"
gctggaaaacccacatgcttgtgtaactttgggactttcatagctctctgctcctgttcacgccacctgaatcaacagctgccaggaaatcccatgtcacctcctggaccttaacccacaga

SEQ ID NO: 17543 - DNA, 122 bp, Homo sapiens
  misc_feature (61)..(62): /note="This region represents a CpG dinucleotide"
  misc_feature (61)..(61): /note="Nucleotide may be methylated to form 5-methylcytosine"
tcagagagaaatgaaacggggccgggatccagtgtagagagagctttggctggctggcggcgcgcaaggccggactgcacaggtggcaggggcgtggttgtcaaataatcaaaatgatcagg

SEQ ID NO: 17544 - DNA, 122 bp, Homo sapiens
  misc_feature (61)..(62): /note="This region represents a CpG dinucleotide"
  misc_feature (61)..(61): /note="Nucleotide may be methylated to form 5-methylcytosine"
cccttaatttggccaggccacagggtgccctgcctgggtgacaggagtgggctgggattgcgagagacgcaggcttcgagggcctggccttggtgattgtgaggggaggagtccctggggca

SEQ ID NO: 17545 - DNA, 122 bp, Homo sapiens
  misc_feature (61)..(62): /note="This region represents a CpG dinucleotide"
  misc_feature (61)..(61): /note="Nucleotide may be methylated to form 5-methylcytosine"
tcttgtttactcacccatggcctgtgtggttccagggaggtcccatgggtgctgatcgggcgggggaggaaaggtggcggttggatggtaggcggggcggggtgagcttcctgtcccccccc

SEQ ID NO: 17546 - DNA, 122 bp, Homo sapiens
  misc_feature (61)..(62): /note="This region represents a CpG dinucleotide"
  misc_feature (61)..(61): /note="Nucleotide may be methylated to form 5-methylcytosine"
gatgtgtttggtttgcttggataattctacaggctgacggggacctgaagcctagcactgcgcctggtccctttgataaggagggttgcttggctagaggactttatccaccaggagcagag

SEQ ID NO: 17547 - DNA, 122 bp, Homo sapiens
  misc_feature (61)..(62): /note="This region represents a CpG dinucleotide"
  misc_feature (61)..(61): /note="Nucleotide may be methylated to form 5-methylcytosine"
gaacctggaaggttttcacttctgaggtggaagagattgtttctcaaatcttatcaagcacgtcaaacactttggaagtcttcattaggttgccactactttcaaagggcataaaaacataa

SEQ ID NO: 17548 - DNA, 122 bp, Homo sapiens
  misc_feature (61)..(62): /note="This region represents a CpG dinucleotide"
  misc_feature (61)..(61): /note="Nucleotide may be methylated to form 5-methylcytosine"
ctcaggtgatccacctgccttggcctcccaaagtgctgggattacaggcgtgagccactgcgtgcagcaaataaatgctctttgaatagatggttgggcttgcatgagatggtgagagaagt

SEQ ID NO: 17549 - DNA, 122 bp, Homo sapiens
  misc_feature (61)..(62): /note="This region represents a CpG dinucleotide"
  misc_feature (61)..(61): /note="Nucleotide may be methylated to form 5-methylcytosine"
ggggtagatgagtcaaccctctttcaagattccaagggtggtgtgttacctgatccttttcgtgtgtggagttcagggggtcgggaggtttggcctttattcccacattcaaagttggaacc

SEQ ID NO: 17550 - DNA, 122 bp, Homo sapiens
  misc_feature (61)..(62): /note="This region represents a CpG dinucleotide"
  misc_feature (61)..(61): /note="Nucleotide may be methylated to form 5-methylcytosine"
gtaaaggctggctttcatcaccaccagcgggctaacctcctacatatatctgtgtgtctacggcaaggtcgacagaacccatatataaggaaatactgatactgaaaaacttgaaaaacctg

SEQ ID NO: 17551 - DNA, 122 bp, Homo sapiens
  misc_feature (61)..(62): /note="This region represents a CpG dinucleotide"
  misc_feature (61)..(61): /note="Nucleotide may be methylated to form 5-methylcytosine"
ggttctccataatcttctggaaaagacttctgatggctttcacttcttcctttgactaagcgtgctttgatgggagtatgacaggatgtgaggaatgaactttcccaggaaacttaaggtca

SEQ ID NO: 17552 - DNA, 122 bp, Homo sapiens
  misc_feature (61)..(62): /note="This region represents a CpG dinucleotide"
  misc_feature (61)..(61): /note="Nucleotide may be methylated to form 5-methylcytosine"
actcatggaaacataatcatgatccagctaaggaagtacaagttacaaagactgagaaaacgaagaaaacttctgtccctgaggaaacagaatgtgttcatacactgcgtccccgtaatgta

SEQ ID NO: 17553 - DNA, 122 bp, Homo sapiens
  misc_feature (61)..(62): /note="This region represents a CpG dinucleotide"
  misc_feature (61)..(61): /note="Nucleotide may be methylated to form 5-methylcytosine"
gtctcatagcaatggtcttgctacataattccatcttgaatgtcagaatctaaatattgacgacttcttcctctttgcaaaccttcagacacaaattctaatctccttctcagatctccatc

SEQ ID NO: 17554 - DNA, 122 bp, Homo sapiens
  misc_feature (61)..(62): /note="This region represents a CpG dinucleotide"
  misc_feature (61)..(61): /note="Nucleotide may be methylated to form 5-methylcytosine"
ggtgtcgtggttggcaggaagtgccacattcagggatattgacttctggctctttctccacgtgactatgagatgaagcaatttctgaagagggttaagataaaaaccttagatgtcatcca

SEQ ID NO: 17555 - DNA, 122 bp, Homo sapiens
  misc_feature (61)..(62): /note="This region represents a CpG dinucleotide"
  misc_feature (61)..(61): /note="Nucleotide may be methylated to form 5-methylcytosine"
catctggcgccactgtcccacaccttccctagactacaggggagagagccgagtgcaaggcgcaaagccagcgctcacgggctctcccacgcaggagccccagtgagatgggagccactgag

SEQ ID NO: 17556 - DNA, 122 bp, Homo sapiens
  misc_feature (61)..(62): /note="This region represents a CpG dinucleotide"
  misc_feature (61)..(61): /note="Nucleotide may be methylated to form 5-methylcytosine"
ctaagtactagtttcctgaaagtcctgaaaagtaagccgaaatgcaagttcaaggtatcacgggctgaacttaatgaggaaggagtgacataatttggataggtccttagtttcagagttct

SEQ ID NO: 17557 - DNA, 122 bp, Homo sapiens
  misc_feature (61)..(62): /note="This region represents a CpG dinucleotide"
  misc_feature (61)..(61): /note="Nucleotide may be methylated to form 5-methylcytosine"
ccatgatagactttacagtatcaacttagtaacgtatcatacagagcatgtcgtcgtcaccgtttctaaaatgttcagtgagccaagagcaagtccacagtcacagggcaggtacagtgagt

SEQ ID NO: 17558 - DNA, 122 bp, Homo sapiens
  misc_feature (61)..(62): /note="This region represents a CpG dinucleotide"
  misc_feature (61)..(61): /note="Nucleotide may be methylated to form 5-methylcytosine"
atccccacaggagaaagtcccataaaagacctctagaaaggacaagtcattacctaatcacgcaaggccttcagcgactggcttgcccacacttgagtctgaaaatcaggggccattgaagg

SEQ ID NO: 17559 - DNA, 122 bp, Homo sapiens
  misc_feature (61)..(62): /note="This region represents a CpG dinucleotide"
  misc_feature (61)..(61): /note="Nucleotide may be methylated to form 5-methylcytosine"
ggggacagcaggtgcgccagaaaggtgaacaaagggaggacttcagctctgggaaagctacggctccacccaaagtctgagacaaagaggccaagagccctgcaaagaaacccaaccaaccg

SEQ ID NO: 17560 - DNA, 122 bp, Homo sapiens
  misc_feature (61)..(62): /note="This region represents a CpG dinucleotide"
  misc_feature (61)..(61): /note="Nucleotide may be methylated to form 5-methylcytosine"
aggaaggtaatatttgctgttgctctttaaaagttgtctcacttatttccttggtcctggcgtactacccttaagggatggacttacttttttcctgctaaaagacataagattggttgaca

SEQ ID NO: 17561 - DNA, 122 bp, Homo sapiens
  misc_feature (61)..(62): /note="This region represents a CpG dinucleotide"
  misc_feature (61)..(61): /note="Nucleotide may be methylated to form 5-methylcytosine"
aaaaagatatataggctgagcgcggtggctcttgcctgtaatcccagcacttggagaggccgagggggcagatcacctgaagtcaagagattgagaccagcctggccaacatggtgaagccc

SEQ ID NO: 17562 - DNA, 122 bp, Homo sapiens
  misc_feature (61)..(62): /note="This region represents a CpG dinucleotide"
  misc_feature (61)..(61): /note="Nucleotide may be methylated to form 5-methylcytosine"
ggctgtactaagcggtcgggtttccccgggaatttgatggttcctatagtctgcctgtgtcggaggcttctttggtttggaaggatctgggcaaatgtgttgggttcaggaatggacaaagg

SEQ ID NO: 17563 - DNA, 122 bp, Homo sapiens
  misc_feature (61)..(62): /note="This region represents a CpG dinucleotide"
  misc_feature (61)..(61): /note="Nucleotide may be methylated to form 5-methylcytosine"
tgaggtgggactcctggtagccagtggcagtggcagtgatggctgtggttcctgatgcctcgtgaaccaaaatggcctgcaaacctgagaccaggaagaaggaagccaccgttggatgtctg

SEQ ID NO: 17564 - DNA, 122 bp, Homo sapiens
  misc_feature (61)..(62): /note="This region represents a CpG dinucleotide"
  misc_feature (61)..(61): /note="Nucleotide may be methylated to form 5-methylcytosine"
cctcctcccaaaggtcagccaatcctccaaacacccccatctaccacattcctgagcagacgggcctgtgcttcaggcaggtaataggtaaaataaagcctgctatccttcaccccacaagg

SEQ ID NO: 17565 - DNA, 122 bp, Homo sapiens
  misc_feature (61)..(62): /note="This region represents a CpG dinucleotide"
  misc_feature (61)..(61): /note="Nucleotide may be methylated to form 5-methylcytosine"
gcagtttcagttcctctcctgattgttctgtctgccagaaatgttctttcactagatagccgcaagctcagttccttcatctttcaaatctttgctcaactgtcaccttctcaccgtactta

SEQ ID NO: 17566 - DNA, 122 bp, Homo sapiens
  misc_feature (61)..(62): /note="This region represents a CpG dinucleotide"
  misc_feature (61)..(61): /note="Nucleotide may be methylated to form 5-methylcytosine"
ttatgagctgtgtgatcttaggcaaactgcttagcctctctaatcctggatgtcctcatccgcaaaatggtgccagtaatgtcacccatctatatagctcacagagctacagtaaggataaa

SEQ ID NO: 17567 - DNA, 122 bp, Homo sapiens
  misc_feature (61)..(62): /note="This region represents a CpG dinucleotide"
  misc_feature (61)..(61): /note="Nucleotide may be methylated to form 5-methylcytosine"
ttctagaagattaatccaccaacatttcaaaatcttgtaaggagctgcgacccgctaggacgggagcctactgcgccctcaaaccccgcggcggctccctccccggagggggcgcgtgaggc

SEQ ID NO: 17568 - DNA, 122 bp, Homo sapiens
  misc_feature (61)..(62): /note="This region represents a CpG dinucleotide"
  misc_feature (61)..(61): /note="Nucleotide may be methylated to form 5-methylcytosine"
aggaacagggtgccacgagctcttggtaacggagcagcgagacctgcagctacatctggtcgggcaggaagagtgggaagttgggctgggtggcacagaagcccaggggagcagcagcacag

SEQ ID NO: 17569 - DNA, 122 bp, Homo sapiens
  misc_feature (61)..(62): /note="This region represents a CpG dinucleotide"
  misc_feature (61)..(61): /note="Nucleotide may be methylated to form 5-methylcytosine"
cagagtttgaaacagcctgactctcctcttctggcaacattcttttccttggtttggggacgctgtactgttctggttttgcccctccctccgagcattccttgtgtttgtcctggcccatt

SEQ ID NO: 17570 - DNA, 122 bp, Homo sapiens
  misc_feature (61)..(62): /note="This region represents a CpG dinucleotide"
  misc_feature (61)..(61): /note="Nucleotide may be methylated to form 5-methylcytosine"
ggcacccacctctcttgctcttccttaatatattataagggagatggtgataagtggccacgtgagcctctgaggattcagtgtcccctgcaggtccaaccagttatgaccttggtgtggcc

SEQ ID NO: 17571 - DNA, 122 bp, Homo sapiens
  misc_feature (61)..(62): /note="This region represents a CpG dinucleotide"
  misc_feature (61)..(61): /note="Nucleotide may be methylated to form 5-methylcytosine"
gctctcatgaagtagatgtcctagtggtagaaatagtagtacaaagaaggaaatataatacgtatataagcagggctatgaacacaaattagacaggcaagggacaggcagtgatggtggtg

SEQ ID NO: 17572 - DNA, 122 bp, Homo sapiens
  misc_feature (61)..(62): /note="This region represents a CpG dinucleotide"
  misc_feature (61)..(61): /note="Nucleotide may be methylated to form 5-methylcytosine"
ctacgactggcctcaagtgcctcgtgtgtatgacggcgtggaggctgcttgctccgagtccggagcaactgagagagctggagagggcaaccgcgccagctgtagtagcaaggtggggccag

SEQ ID NO: 17573 - DNA, 122 bp, Homo sapiens
  misc_feature (61)..(62): /note="This region represents a CpG dinucleotide"
  misc_feature (61)..(61): /note="Nucleotide may be methylated to form 5-methylcytosine"
catgatcaactttggtccatttacaaagccgtgatcagcagaaacttcctgactagcaatcgccccctctcaaccagatataaccagttgatctggcagtagctctgctgctgtgaacctca

SEQ ID NO: 17574 - DNA, 122 bp, Homo sapiens
  misc_feature (61)..(62): /note="This region represents a CpG dinucleotide"
  misc_feature (61)..(61): /note="Nucleotide may be methylated to form 5-methylcytosine"
ggcataagtctttctaatctgttcataaccaaatatagcacacaggaaatcactgcaaagcgctgatataatcttttctgttttactccatctgaagatggttcctgcctgaaccatgcaca

SEQ ID NO: 17575 - DNA, 122 bp, Homo sapiens
  misc_feature (61)..(62): /note="This region represents a CpG dinucleotide"
  misc_feature (61)..(61): /note="Nucleotide may be methylated to form 5-methylcytosine"
gaaaaaaaaaaaccttgaaaaaaatgggtgtaaccctgggctttgatacaactggcctttcggcccccacttgagatttgcacatccccaagggaagctgtggtttggaataagatggtgca

SEQ ID NO: 17576 - DNA, 122 bp, Homo sapiens
  misc_feature (61)..(62): /note="This region represents a CpG dinucleotide"
  misc_feature (61)..(61): /note="Nucleotide may be methylated to form 5-methylcytosine"
ggagatagctagaggccagttcagttccctctcccacatttctgtggcacccgggttgtgcgctgaggcccaggtttcctggaggttaggcaaagcttggctctggtccttgcgcattggcc

SEQ ID NO: 17577 - DNA, 122 bp, Homo sapiens
  misc_feature (61)..(62): /note="This region represents a CpG dinucleotide"
  misc_feature (61)..(61): /note="Nucleotide may be methylated to form 5-methylcytosine"
ctaattgtgtcactgtttattcagtaaacactgtgctagctgctagagatgcagagatgacgcttggttaatatttatggaacacttgccatgtgctagttgtacatcacctcatttaatct

SEQ ID NO: 17578 - DNA, 122 bp, Homo sapiens
  misc_feature (61)..(62): /note="This region represents a CpG dinucleotide"
  misc_feature (61)..(61): /note="Nucleotide may be methylated to form 5-methylcytosine"
gtgagatgtagtagagtggacagtctggggaaatatgtgttcagtgcagccagtagaccacgctgacagattggtgtggcaggttaaggaaaagaacaatatgaaactcagccttctggctt

SEQ ID NO: 17579 - DNA, 122 bp, Homo sapiens
  misc_feature (61)..(62): /note="This region represents a CpG dinucleotide"
  misc_feature (61)..(61): /note="Nucleotide may be methylated to form 5-methylcytosine"
tcctgggagatgaaagaacttgctaaaggccagtgtctgtccaggagatgacaatactgccgcttggcaagggcaggttttttgtggagaggtgtaatagggaaaaggtgaagcatggccaa

SEQ ID NO: 17580 - DNA, 122 bp, Homo sapiens
  misc_feature (61)..(62): /note="This region represents a CpG dinucleotide"
  misc_feature (61)..(61): /note="Nucleotide may be methylated to form 5-methylcytosine"
atacatggaggtcgctctacttacaaacaggctgaattccaaaaggctgttaaatccattcgtttaaacgtccaaaaccgtgtgtgagatttaggtttatggggtcagtatttcctcctagt

SEQ ID NO: 17581 - DNA, 122 bp, Homo sapiens
  misc_feature (61)..(62): /note="This region represents a CpG dinucleotide"
  misc_feature (61)..(61): /note="Nucleotide may be methylated to form 5-methylcytosine"
acaatgaatcataacccatacctcacactgcatattcaaaatgaattgaaaatcaccgggcgtggtggatcatgcctgtaattccagcactttaggaggccgaggctcaggtggatcaactg

SEQ ID NO: 17582 - DNA, 122 bp, Homo sapiens
  misc_feature (61)..(62): /note="This region represents a CpG dinucleotide"
  misc_feature (61)..(61): /note="Nucleotide may be methylated to form 5-methylcytosine"
tgggatccaatcagcaaggagggggcatgattaaatccaggctgactcagagatggcaggcgaggacagcaaggagagcagacatctgcaaggatttgggcaactcgttagggaggaatttt

SEQ ID NO: 17583 - DNA, 122 bp, Homo sapiens
  misc_feature (61)..(62): /note="This region represents a CpG dinucleotide"
  misc_feature (61)..(61): /note="Nucleotide may be methylated to form 5-methylcytosine"
acctggaatgtggtcatggttaggttgcagactcagctgcggagacagaactcaatatcccgtggctttgaagagaggtctatttcttcatcgtgtttaacagcccaggggcagcagtaagg

SEQ ID NO: 17584 - DNA, 122 bp, Homo sapiens
  misc_feature (61)..(62): /note="This region represents a CpG dinucleotide"
  misc_feature (61)..(61): /note="Nucleotide may be methylated to form 5-methylcytosine"
agaattctaaaactgtttttaccagcagagaaatgaagctgatttccaattcaaatctcccgtctccctctccctctcagcactctgaaggtgttgcagaaatgaaatgggggttatctgaa

SEQ ID NO: 17585 - DNA, 122 bp, Homo sapiens
  misc_feature (61)..(62): /note="This region represents a CpG dinucleotide"
  misc_feature (61)..(61): /note="Nucleotide may be methylated to form 5-methylcytosine"
cacgtgactgcggagagtgtggatgtgaggccagtgaaagttatctacctggagaagtgacgagtatgttgtttggatgagtcaaagcttatgtgcctcacttagtgtgcgttgccttgcag

SEQ ID NO: 17586 - DNA, 122 bp, Homo sapiens
  misc_feature (61)..(62): /note="This region represents a CpG dinucleotide"
  misc_feature (61)..(61): /note="Nucleotide may be methylated to form 5-methylcytosine"
gaagtgaaagtaacttgtacctgacgacttgagcctttgggcagtgtgctggagctggctcgtaccagctcaagagaccccttgttaaacatcaaggaattttgcaagtaggttggtagctt

SEQ ID NO: 17587 - DNA, 122 bp, Homo sapiens
  misc_feature (61)..(62): /note="This region represents a CpG dinucleotide"
  misc_feature (61)..(61): /note="Nucleotide may be methylated to form 5-methylcytosine"
aaacccttgtggccacaacacagctctgcacctgtcatttgctctagacaaactgctaaacgcaattgtttctgacaatggattactctgtatcccgtgggggaattctcagacagcagcat

SEQ ID NO: 17588 - DNA, 122 bp, Homo sapiens
  misc_feature (61)..(62): /note="This region represents a CpG dinucleotide"
  misc_feature (61)..(61): /note="Nucleotide may be methylated to form 5-methylcytosine"
cagcaccacccagggacgggaggcatgagccggtcaaggcacctgggcaaaatccggaagcgtctggaagatgtcaagagccagtgggtccggccagccagggctgactttagtgacaacga

SEQ ID NO: 17589 - DNA, 122 bp, Homo sapiens
  misc_feature (61)..(62): /note="This region represents a CpG dinucleotide"
  misc_feature (61)..(61): /note="Nucleotide may be methylated to form 5-methylcytosine"
tccagagctccctgagagcttgcctggcaagttactcttgcaattctagcttccagcaggcgttgatttctggggcacttttgataaactcctggcaggaaactcaatctctgggggtcaga

SEQ ID NO: 17590 - DNA, 122 bp, Homo sapiens
  misc_feature (61)..(62): /note="This region represents a CpG dinucleotide"
  misc_feature (61)..(61): /note="Nucleotide may be methylated to form 5-methylcytosine"
ttctaaggtgtgtcaccatctcttgacatttgacctgtgaaagcattagttccctgacagcgtatgactgtactctagaaaggtgttgtctgaatttttacttcccaatcagtattctcact

SEQ ID NO: 17591 - DNA, 122 bp, Homo sapiens
  misc_feature (61)..(62): /note="This region represents a CpG dinucleotide"
  misc_feature (61)..(61): /note="Nucleotide may be methylated to form 5-methylcytosine"
tcgtgacagccctgccagctaagggcagtagtctctctccctactccacccactacttaacggaagagaaactaaggctcagagaggttgagcaacacaccacagcctgcacagctgcctgg

SEQ ID NO: 17592 - DNA, 122 bp, Homo sapiens
  misc_feature (61)..(62): /note="This region represents a CpG dinucleotide"
  misc_feature (61)..(61): /note="Nucleotide may be methylated to form 5-methylcytosine"
ggaacttcaatccttcgtttcagaaattagtgctacagtttcatacattttctccagtgacgtgttgacttgaaacttcaggcagattaaaagaatcatttgttgaacaactgaatgtataa

SEQ ID NO: 17593 - DNA, 122 bp, Homo sapiens
  misc_feature (61)..(62): /note="This region represents a CpG dinucleotide"
  misc_feature (61)..(61): /note="Nucleotide may be methylated to form 5-methylcytosine"
tgccctgccctggagtcccttcaagttcaatgttgcttggcaacttacaatgtgctattacgaccgtgtctgttattccccatgatgatcctgtgaacgtggtgtggattagtagatccatc

SEQ ID NO: 17594 - DNA, 122 bp, Homo sapiens
  misc_feature (61)..(62): /note="This region represents a CpG dinucleotide"
  misc_feature (61)..(61): /note="Nucleotide may be methylated to form 5-methylcytosine"
tttagatgtgggtttacatgttaatcctacaatgttatttcacctcagtggtctgaagtgcgcacacagtacattttgttctttaacttcctcttttcttgtctaactggaagtccccaaat

SEQ ID NO: 17595 - DNA, 122 bp, Homo sapiens
  misc_feature (61)..(62): /note="This region represents a CpG dinucleotide"
  misc_feature (61)..(61): /note="Nucleotide may be methylated to form 5-methylcytosine"
ggagggagttggtgcaagcctttgaattattgtccccttcctttcactcttcagtatgagcgtgagccttcctccccaaatacatgaacaatttttaggagacttagatagagagaaacgca

SEQ ID NO: 17596 - DNA, 122 bp, Homo sapiens
  misc_feature (61)..(62): /note="This region represents a CpG dinucleotide"
  misc_feature (61)..(61): /note="Nucleotide may be methylated to form 5-methylcytosine"
agggaggggatggggcggtctccggcgagttccaagggcgtccctcgttgcgcactcgcccgcccaggttctttgaagagccaggagcctccggggaagtgggagcccccagcggcccgcag

SEQ ID NO: 17597 - DNA, 122 bp, Homo sapiens
  misc_feature (61)..(62): /note="This region represents a CpG dinucleotide"
  misc_feature (61)..(61): /note="Nucleotide may be methylated to form 5-methylcytosine"
ggtgatccacctaccttggcctcccaaagtgctgggattataggtgtgagtcactgtacccggccaggatgattctattctaagaagctaggagaacattccagatactcctccagaaacta

SEQ ID NO: 17598 - DNA, 122 bp, Homo sapiens
  misc_feature (61)..(62): /note="This region represents a CpG dinucleotide"
  misc_feature (61)..(61): /note="Nucleotide may be methylated to form 5-methylcytosine"
agcaaagcctggggtgtcatgtggtctcccagatctggctctgcaatgtctcagacatgccgttcgattttgaaattctcaaagatgttccaaacagcatgcagttgatttaattttttaaa

SEQ ID NO: 17599 - DNA, 122 bp, Homo sapiens
  misc_feature (61)..(62): /note="This region represents a CpG dinucleotide"
  misc_feature (61)..(61): /note="Nucleotide may be methylated to form 5-methylcytosine"
catttaaactccttcaatggtttataaaaacctcaataaaatagcccagccttactctctcgtctaatctcttgagactagccactccccacatccacaccccacggtgagctctacattca

SEQ ID NO: 17600 - DNA, 122 bp, Homo sapiens
  misc_feature (61)..(62): /note="This region represents a CpG dinucleotide"
  misc_feature (61)..(61): /note="Nucleotide may be methylated to form 5-methylcytosine"
ggggtgccaggcttttcctgaataattgagaaatgatcagatgatctaccctttgactgacgtatactggtatatgcattactattgctcttcgagtgactgtactggcttactcatttctt

SEQ ID NO: 17601 - DNA, 122 bp, Homo sapiens
  misc_feature (61)..(62): /note="This region represents a CpG dinucleotide"
  misc_feature (61)..(61): /note="Nucleotide may be methylated to form 5-methylcytosine"
tgcctcattaggccagggtaaaccacaacatcagaatgtttatataacaatttattaaagcggaaatgcttgattgtggtttttaataaactgttgagtgtttaagaaagagtcttgtggtt

SEQ ID NO: 17602 - DNA, 122 bp, Homo sapiens
  misc_feature (61)..(62): /note="This region represents a CpG dinucleotide"
  misc_feature (61)..(61): /note="Nucleotide may be methylated to form 5-methylcytosine"
ggggagaaagagcttcagatggtggaggggaacaaggagcttcaacctcatttaaaaagacgacttcactggaataacccaaagaataaaaggaaagtgtgacacagctgctgtgtttctgg

SEQ ID NO: 17603 - DNA, 122 bp, Homo sapiens
  misc_feature (61)..(62): /note="This region represents a CpG dinucleotide"
  misc_feature (61)..(61): /note="Nucleotide may be methylated to form 5-methylcytosine"
gtcctgataataccatcaaaggagagaagtaaaagacaaactagatgacatgaagctagccggaggcaataataacactctgtgttacatgcatacattgtcaagcattaaggattaagctg

SEQ ID NO: 17604 - DNA, 122 bp, Homo sapiens
  misc_feature (61)..(62): /note="This region represents a CpG dinucleotide"
  misc_feature (61)..(61): /note="Nucleotide may be methylated to form 5-methylcytosine"
aaaatgatacaacagaggactcactcagcacaactgaaacatgagatgaacctaagatagcgccagtcactgagaactcaatcagctaaaggaaatgaaaataaaattactagggaagctag

SEQ ID NO: 17605 - DNA, 122 bp, Homo sapiens
  misc_feature (61)..(62): /note="This region represents a CpG dinucleotide"
  misc_feature (61)..(61): /note="Nucleotide may be methylated to form 5-methylcytosine"
ctgatgaagtccggatttgccagcaatgaaaagcagtcagtgttctgccttaagcatacacgccgtgtcaagtaaatgctgcctttgtagttgccagagcaatagccaccaccaataacaac

SEQ ID NO: 17606 - DNA, 122 bp, Homo sapiens
  misc_feature (61)..(62): /note="This region represents a CpG dinucleotide"
  misc_feature (61)..(61): /note="Nucleotide may be methylated to form 5-methylcytosine"
tccacggtgatggggctctggaggctggggtgctccacgtggcaggtgtagacatctccacgctggggagtcatttccagcatcaccaggatctggaaagtccagtcaccattcctaataag

SEQ ID NO: 17607 - DNA, 122 bp, Homo sapiens
  misc_feature (61)..(62): /note="This region represents a CpG dinucleotide"
  misc_feature (61)..(61): /note="Nucleotide may be methylated to form 5-methylcytosine"
caaagtccagttattaacttgcaagtcctccttggagaactgttctgccactgtctctcccgtggcctcagggaaatgtcttaattacttattgtgtagattaaatgagaaaatatgtgtaa

SEQ ID NO: 17608 - DNA, 122 bp, Homo sapiens
  misc_feature (61)..(62): /note="This region represents a CpG dinucleotide"
  misc_feature (61)..(61): /note="Nucleotide may be methylated to form 5-methylcytosine"
aaaaacttgaaactgcttaaaagctaaagggaagaaacccaatagaagaagttggcaatacgactgcaaatggggacagtaagagctaactgtaaactggaaatgtctgtatgaaatgatgt

SEQ ID NO: 17609 - DNA, 122 bp, Homo sapiens
  misc_feature (61)..(62): /note="This region represents a CpG dinucleotide"
  misc_feature (61)..(61): /note="Nucleotide may be methylated to form 5-methylcytosine"
atttctaagcactctgaagatgtaagggaagcgggctgttcctctccatcctgcccgccacgtcgcaagcccaaatggacagagggtgctcagaacccttcagtttgaagcatgtcctaaga

SEQ ID NO: 17610 - DNA, 122 bp, Homo sapiens
  misc_feature (61)..(62): /note="This region represents a CpG dinucleotide"
  misc_feature (61)..(61): /note="Nucleotide may be methylated to form 5-methylcytosine"
ttcgccttgcaggcccttcctcctcttactgctaccccggccctgcctacctaggaggcacggctcgagccccgcctcccagcagctctcccaggcctcctagcagtcttcctccgctggga

SEQ ID NO: 17611 - DNA, 122 bp, Homo sapiens
  misc_feature (61)..(62): /note="This region represents a CpG dinucleotide"
  misc_feature (61)..(61): /note="Nucleotide may be methylated to form 5-methylcytosine"
tttgcttggatagggggttggcttctcaatagaggtggtgtcatgttgtgctgggaagatcgggacaatgattccaatggcacagtaccagggacccactgagatcctacttgacaggtcca

SEQ ID NO: 17612 - DNA, 122 bp, Homo sapiens
  misc_feature (61)..(62): /note="This region represents a CpG dinucleotide"
  misc_feature (61)..(61): /note="Nucleotide may be methylated to form 5-methylcytosine"
gagtcacaggtttcccaagcttcccggacctgttcaggaaatgtggtgtggctggggttccgcctttctcataagctccgagtaaagccaatacagctgatccactggccactctgaaaagc

SEQ ID NO: 17613 - DNA, 122 bp, Homo sapiens
  misc_feature (61)..(62): /note="This region represents a CpG dinucleotide"
  misc_feature (61)..(61): /note="Nucleotide may be methylated to form 5-methylcytosine"
tgaaccctctttaacaggaagtagaggttgaagcaattctgtggctgctattagggaatccgtagactgttcatggaagagtggaaggtgggctttatagcccggtagttatgtacttagac

SEQ ID NO: 17614 - DNA, 122 bp, Homo sapiens
  misc_feature (61)..(62): /note="This region represents a CpG dinucleotide"
  misc_feature (61)..(61): /note="Nucleotide may be methylated to form 5-methylcytosine"
ttcctcttacgatttcactaatggcagctcaaagctgctgagctctgccctgacggcatgcgcccccgcttctgtgagagcacgcttcctggcatgggggtcgaatcatgtcgataaaatgg

SEQ ID NO: 17615 - DNA, 122 bp, Homo sapiens
  misc_feature (61)..(62): /note="This region represents a CpG dinucleotide"
  misc_feature (61)..(61): /note="Nucleotide may be methylated to form 5-methylcytosine"
gagttcctcagaggtggggagcaggcaactcactctcagccatggtttctgcttgacatgcgcaaaacagggtggcccactccgaacaagtttgtgccagaggtacattcaaggtacatgct

SEQ ID NO: 17616 - DNA, 122 bp, Homo sapiens
  misc_feature (61)..(62): /note="This region represents a CpG dinucleotide"
  misc_feature (61)..(61): /note="Nucleotide may be methylated to form 5-methylcytosine"
taatggaaaaacaatgccaattacagcagcattatccgggattataaagcttctaagaggcggctcacacctccaggcatgctgtgcctgggaatttccagggtagacttgggatcagagca

SEQ ID NO: 17617 - DNA, 122 bp, Homo sapiens
  misc_feature (61)..(62): /note="This region represents a CpG dinucleotide"
  misc_feature (61)..(61): /note="Nucleotide may be methylated to form 5-methylcytosine"
ttgggtcttcatttccttcccagggctcctgagtcacataaaacttacattaaattagtacgcttttctcctgttaatatactttatgtcaatttaattctcaggctcagccaggacactaa

SEQ ID NO: 17618 - DNA, 122 bp, Homo sapiens
  misc_feature (61)..(62): /note="This region represents a CpG dinucleotide"
  misc_feature (61)..(61): /note="Nucleotide may be methylated to form 5-methylcytosine"
aatcttcacaccattgggaataggcaaagatgacttaaaccggacacacacaaaaaaacacggataaatgagactaaaaatgatttgcttacttcttccggatgaaaggtaggaggcaaggt

SEQ ID NO: 17619 - DNA, 122 bp, Homo sapiens
  misc_feature (61)..(62): /note="This region represents a CpG dinucleotide"
  misc_feature (61)..(61): /note="Nucleotide may be methylated to form 5-methylcytosine"
cctatagtttgtggtgacagggagcagggtaagacagtagggatgaatgctgaagtagagcggaagaggttgttaaagatgaagaaatcaagaaactgagaagcccaggactaggagagatt

SEQ ID NO: 17620 - DNA, 122 bp, Homo sapiens
  misc_feature (61)..(62): /note="This region represents a CpG dinucleotide"
  misc_feature (61)..(61): /note="Nucleotide may be methylated to form 5-methylcytosine"
cgggaggggcgggaagggaagtgactttaccaagaacctggcctgtgaagagtgggaggacgaaggggaaagtggctgaggggcttctcactatttttaagacggacaagacttgagtccag

SEQ ID NO: 17621 - DNA, 122 bp, Homo sapiens
  misc_feature (61)..(62): /note="This region represents a CpG dinucleotide"
  misc_feature (61)..(61): /note="Nucleotide may be methylated to form 5-methylcytosine"
acagtgagctaagtgttcccagtccctcccatctgcccatagatatgtacagcagcaccacggtggggctctttctattctgcaaccagctgtgccagcccatagagtgcctcacttctcca

SEQ ID NO: 17622 - DNA, 122 bp, Homo sapiens
  misc_feature (61)..(62): /note="This region represents a CpG dinucleotide"
  misc_feature (61)..(61): /note="Nucleotide may be methylated to form 5-methylcytosine"
gaaattgaaggaggaaagaataaaagcaaattaacaatcatattattgattccatagcaacgtgttaaatttgctatatccagtagcctttacattagtatagaagtaatgaacctgcattt

SEQ ID NO: 17623 - DNA, 122 bp, Homo sapiens
  misc_feature (61)..(62): /note="This region represents a CpG dinucleotide"
  misc_feature (61)..(61): /note="Nucleotide may be methylated to form 5-methylcytosine"
aaaaggcttctgaaatcaggcaatgcctttctaattcttacaccaacctctggagttgggcgacatggcttctcccctttctaggtcccatgaaagccatcttgctattactcacctttggg

SEQ ID NO: 17624 - DNA, 122 bp, Homo sapiens
  misc_feature (61)..(62): /note="This region represents a CpG dinucleotide"
  misc_feature (61)..(61): /note="Nucleotide may be methylated to form 5-methylcytosine"
cacgttcatctccagcttagacccacataataaactgctactgtacacctttgaactaaccgtccccacaaatagtctcaattcatctcatataaaaataagtcctctttccctcccaaact

SEQ ID NO: 17625 - DNA, 122 bp, Homo sapiens
  misc_feature (61)..(62): /note="This region represents a CpG dinucleotide"
  misc_feature (61)..(61): /note="Nucleotide may be methylated to form 5-methylcytosine"
acctcgtgatccgcccgcctcggcctcccaaagtgctgggattacaggcgtgagccatcgcgcccggccaggagtctttttcattgctagctctggatttgcatttggatttggcactatgt

SEQ ID NO: 17626 - DNA, 122 bp, Homo sapiens
  misc_feature (61)..(62): /note="This region represents a CpG dinucleotide"
  misc_feature (61)..(61): /note="Nucleotide may be methylated to form 5-methylcytosine"
acatgagcatgagactaccaggaggtggggatcattgggagtcatcttggaagcgttaaccgtgcccagacaagtattaccaggagatttccaactctcttactctcactgttatatacaac

SEQ ID NO: 17627 - DNA, 122 bp, Homo sapiens
  misc_feature (61)..(62): /note="This region represents a CpG dinucleotide"
  misc_feature (61)..(61): /note="Nucleotide may be methylated to form 5-methylcytosine"
atttttctccttagagcatggaaaaccaacacatagtagttggagttgtgccctgaacatcgcctgcctgctaaatgcagagcacttagtcatgcccatgaaacagacaccccatgtcgtca

SEQ ID NO: 17628 - DNA, 122 bp, Homo sapiens
  misc_feature (61)..(62): /note="This region represents a CpG dinucleotide"
  misc_feature (61)..(61): /note="Nucleotide may be methylated to form 5-methylcytosine"
aaggcaacagctgttcttgtggccactcagttggagccattgtctaggtggctattcaagcgtaagggggaacttttatttgcttcttacataactttcagctctgtcatccattttactca

SEQ ID NO: 17629 - DNA, 122 bp, Homo sapiens
  misc_feature (61)..(62): /note="This region represents a CpG dinucleotide"
  misc_feature (61)..(61): /note="Nucleotide may be methylated to form 5-methylcytosine"
cctgtcctcctgctctttgctccgtgagaaacatccacctacgacctcaggtcctcagaccgaccggcccaagaaacatctcaccaatttcgaatccggtaagtggcctctttttactctct

SEQ ID NO: 17630 - DNA, 122 bp, Homo sapiens
  misc_feature (61)..(62): /note="This region represents a CpG dinucleotide"
  misc_feature (61)..(61): /note="Nucleotide may be methylated to form 5-methylcytosine"
agttggttggcctccagctaagaggtggtgcttgcaaaagagcaccagctgcattattagcggtgggatttttgcaagccttgtgttgcccaggtatgggggctactatggattcttaggca

SEQ ID NO: 17631 - DNA, 122 bp, Homo sapiens
  misc_feature (61)..(62): /note="This region represents a CpG dinucleotide"
  misc_feature (61)..(61): /note="Nucleotide may be methylated to form 5-methylcytosine"
gcataattcaaccagtgacaccagctaacaatgacagggcagggtttcaatccagcagcccggccccagccttttagtctccaccttacactgccttattcgtgtttggttgaaccacatgc

SEQ ID NO: 17632 - DNA, 122 bp, Homo sapiens
  misc_feature (61)..(62): /note="This region represents a CpG dinucleotide"
  misc_feature (61)..(61): /note="Nucleotide may be methylated to form 5-methylcytosine"
caagtgcttctaagaagctaaacttggcaaggcaccagctccttaaagccagcagaagtgcggcttgcacagtctctgctctgagaccggcagcagtatctcaataactagcccaattgtct

SEQ ID NO: 17633 - DNA, 122 bp, Homo sapiens
  misc_feature (61)..(62): /note="This region represents a CpG dinucleotide"
  misc_feature (61)..(61): /note="Nucleotide may be methylated to form 5-methylcytosine"
gcctggtaggcagtcagtgtgagctgcagtcactgtcaccaccactgtctttgtcatcatcgccatgatgagttgagaagcactgggagatactcactatgagccactgtcaagtcactgtc

SEQ ID NO: 17634 - DNA, 122 bp, Homo sapiens
  misc_feature (61)..(62): /note="This region represents a CpG dinucleotide"
  misc_feature (61)..(61): /note="Nucleotide may be methylated to form 5-methylcytosine"
ttcttttaaagcaattaacttgcagagatttgcaggagattgaaatgaacaccacagaaacgaagcaccctgccccaagcacaggttcttggaatgcctgtagagaagtgaggactgcctgc

SEQ ID NO: 17635 - DNA, 122 bp, Homo sapiens
  misc_feature (61)..(62): /note="This region represents a CpG dinucleotide"
  misc_feature (61)..(61): /note="Nucleotide may be methylated to form 5-methylcytosine"
gcttcactaaaagtatctccgtttcttccattttcctcctgcaaaataggaggagaatatcgttagtgagtaggtacaaatgcacacaaaatgttttacattattatttgctattttccaaa

SEQ ID NO: 17636 - DNA, 122 bp, Homo sapiens
  misc_feature (61)..(62): /note="This region represents a CpG dinucleotide"
  misc_feature (61)..(61): /note="Nucleotide may be methylated to form 5-methylcytosine"
ctgtcagcacatttgccactgaggcctgatgggaatgtgtgtgactacacagcaacaaaacggattcaccagccacatggggaaaccagcctcattacttcagagtcacgtcacgtggtctc

SEQ ID NO: 17637 - DNA, 122 bp, Homo sapiens
  misc_feature (61)..(62): /note="This region represents a CpG dinucleotide"
  misc_feature (61)..(61): /note="Nucleotide may be methylated to form 5-methylcytosine"
gcgatgccagggagggcgaagaaacccagcagcgggaagccgcctaccggtgggctagtgcggcgggggaagggaatcggcctgcatccgagactccgccgctgtggcgtgggacctcccct

SEQ ID NO: 17638 - DNA, 122 bp, Homo sapiens
  misc_feature (61)..(62): /note="This region represents a CpG dinucleotide"
  misc_feature (61)..(61): /note="Nucleotide may be methylated to form 5-methylcytosine"
acggcagcgctgagagggatggaggggacggggtgctggtgtgagtcgcttcagggagtccgccccacacgaagccacctccccagaggccacgccaacagcaccgcccctgctcccctgct

SEQ ID NO: 17639 - DNA, 122 bp, Homo sapiens
  misc_feature (61)..(62): /note="This region represents a CpG dinucleotide"
  misc_feature (61)..(61): /note="Nucleotide may be methylated to form 5-methylcytosine"
gagttgcagtctgatttatcctccagggctgtaaacaggcggggacactcgcagccttgccgggagtcacttttttttgctcttaaacttgccctgcagcttcctggctgccaccttgaaga

SEQ ID NO: 17640 - DNA, 122 bp, Homo sapiens
  misc_feature (61)..(62): /note="This region represents a CpG dinucleotide"
  misc_feature (61)..(61): /note="Nucleotide may be methylated to form 5-methylcytosine"
aggagtcttcatgcaaatcagattgtttctcttttagtgtaggcaacagcaagttgttgacgacagtggttaccttaggctcttgacattctgctcccaaggtccagtgtgggaaccctgcc

SEQ ID NO: 17641 - DNA, 122 bp, Homo sapiens
  misc_feature (61)..(62): /note="This region represents a CpG dinucleotide"
  misc_feature (61)..(61): /note="Nucleotide may be methylated to form 5-methylcytosine"
acagtgcagtgtgatctgacaaggctgagcaaatgtggttttggctttgcacagctgaggcgtttaactgcatcatgctgaggtggactgaaacttcaagggcacccagtgacttatgtgtt

SEQ ID NO: 17642 - DNA, 122 bp, Homo sapiens
  misc_feature (61)..(62): /note="This region represents a CpG dinucleotide"
  misc_feature (61)..(61): /note="Nucleotide may be methylated to form 5-methylcytosine"
tgatccacctgccttggcctcccaaagtacagggattacaggtgtgagccactgacctggcggatgaatttttaagactgttgtatgaatgcctgtggggtattgcccaagaataaggtgct

SEQ ID NO: 17643 - DNA, 122 bp, Homo sapiens
  misc_feature (61)..(62): /note="This region represents a CpG dinucleotide"
  misc_feature (61)..(61): /note="Nucleotide may be methylated to form 5-methylcytosine"
tccataatcatgtcatctgtcattccaaatgtcacatgcaggatgtttcgaaatgcattacgatccagtccaacaaccagaccttgcctctctactcctcccaccaagtcataaaaaagctt

SEQ ID NO: 17644 - DNA, 122 bp, Homo sapiens
  misc_feature (61)..(62): /note="This region represents a CpG dinucleotide"
  misc_feature (61)..(61): /note="Nucleotide may be methylated to form 5-methylcytosine"
tgtccaagtctcccaaagctgtttcttctgtggtgctgtccgtggtgctgagctctggtgcgtctgggcctgtatttgcaagtgaggggccaataagacagaattaacagagaaattttttg

SEQ ID NO: 17645 - DNA, 122 bp, Homo sapiens
  misc_feature (61)..(62): /note="This region represents a CpG dinucleotide"
  misc_feature (61)..(61): /note="Nucleotide may be methylated to form 5-methylcytosine"
ggccttcctcaatggggaaaaggtattcccaaatccattttctgcagggaatccacggagcgagagcggtgaaactgatgacaggaaagccctgccttcatgttcatgcttgtattttaact

SEQ ID NO: 17646 - DNA, 122 bp, Homo sapiens
  misc_feature (61)..(62): /note="This region represents a CpG dinucleotide"
  misc_feature (61)..(61): /note="Nucleotide may be methylated to form 5-methylcytosine"
atgggtgggagaacacgccccgaggtgctgctttggcagagaagccctgtctgcgagccccgaggcggagatggctccccaagcctgatgcagacaagagagcccgcccctcccctgtcccg

SEQ ID NO: 17647 - DNA, 122 bp, Homo sapiens
  misc_feature (61)..(62): /note="This region represents a CpG dinucleotide"
  misc_feature (61)..(61): /note="Nucleotide may be methylated to form 5-methylcytosine"
tggtaggagagagcagaagttttaaacctcatttgaccttcatgaagttgtcaaaatcaccgtggctccgtaagaatgtgagtgcatgttcttattgcaagcctgttttaccaggccacacc

SEQ ID NO: 17648 - DNA, 122 bp, Homo sapiens
  misc_feature (61)..(62): /note="This region represents a CpG dinucleotide"
  misc_feature (61)..(61): /note="Nucleotide may be methylated to form 5-methylcytosine"
ctggagactatgtgctgagattcttcccaggtttgcctccccagctgcatgtggcacacacgaggcatggttagatgatctattttctatgtatgtttgtagccagttgttcagctccactg

SEQ ID NO: 17649 - DNA, 122 bp, Homo sapiens
  misc_feature (61)..(62): /note="This region represents a CpG dinucleotide"
  misc_feature (61)..(61): /note="Nucleotide may be methylated to form 5-methylcytosine"
gaatttcaaagtctacaagttttgagatgagttgagtattaattcacctgccacaagagccgtgaggtgtagagcaagcttgtccaacctgcggttcatgcggcccaggatggctttgaata

SEQ ID NO: 17650 - DNA, 122 bp, Homo sapiens
  misc_feature (61)..(62): /note="This region represents a CpG dinucleotide"
  misc_feature (61)..(61): /note="Nucleotide may be methylated to form 5-methylcytosine"
tgggtctatgcttccatagagcagtggcttcgggcacaggcctgagacccagcctgcctgcgggctgctagctgccagctacctctgcactaggaaggtttttaaacagctgaatgcaagct

SEQ ID NO: 17651 - DNA, 122 bp, Homo sapiens
  misc_feature (61)..(62): /note="This region represents a CpG dinucleotide"
  misc_feature (61)..(61): /note="Nucleotide may be methylated to form 5-methylcytosine"
aacatatgggaaaatacaagcacaggacactcaggacaatgtgatgtgctgaagacacagcggcaaacaaaagagaccggatgccactgacctgtccaagaagaagaacaggaagtattaca

SEQ ID NO: 17652 - DNA, 122 bp, Homo sapiens
  misc_feature (61)..(62): /note="This region represents a CpG dinucleotide"
  misc_feature (61)..(61): /note="Nucleotide may be methylated to form 5-methylcytosine"
aggactggcattcgctcactcattcaacaaatattaattgagtgaacgtgtgactttccacgtagataacatggagatctgcaaagtgactaataggcatctgaaggctaacgtagttgaag

SEQ ID NO: 17653 - DNA, 122 bp, Homo sapiens
  misc_feature (61)..(62): /note="This region represents a CpG dinucleotide"
  misc_feature (61)..(61): /note="Nucleotide may be methylated to form 5-methylcytosine"
ccctaggcagggctagtgtttggggaccaagccctgcttaagactatctctgtgttcaagcgtagcagcagggagcagtggcacaaagtggacggagacctcaccgctacttcctgtacaac

SEQ ID NO: 17654 - DNA, 122 bp, Homo sapiens
  misc_feature (61)..(62): /note="This region represents a CpG dinucleotide"
  misc_feature (61)..(61): /note="Nucleotide may be methylated to form 5-methylcytosine"
agcataaactgaggcagctgttaagcagttcgaaagctgaaagcgatttaagtctgcccccgcccccccccgccctccgccccgcccccgccctccgccccgcgtgtagggtcttgttgctc

SEQ ID NO: 17655 - DNA, 122 bp, Homo sapiens
  misc_feature (61)..(62): /note="This region represents a CpG dinucleotide"
  misc_feature (61)..(61): /note="Nucleotide may be methylated to form 5-methylcytosine"
agcctgggtatcagggaaggcataagacaggtaggagttgggtgggggaagcattagtgacgagtgggaaggacactccaggcagagaaacaagttctggagtcattctgcagcatatgggt

SEQ ID NO: 17656 - DNA, 122 bp, Homo sapiens
  misc_feature (61)..(62): /note="This region represents a CpG dinucleotide"
  misc_feature (61)..(61): /note="Nucleotide may be methylated to form 5-methylcytosine"
ccttggagaaagtgaaataagacattagactttcagtaatctcatatggtgatgatcaatcgaaacctggagaagaaggccaatttatagaaattgtatctgcttcactgggtggctggaac

SEQ ID NO: 17657 - DNA, 122 bp, Homo sapiens
  misc_feature (61)..(62): /note="This region represents a CpG dinucleotide"
  misc_feature (61)..(61): /note="Nucleotide may be methylated to form 5-methylcytosine"
tccgcgctggagcggattgctggcatgtgacttctgacagccggaaatttgtaggtgtcccgcgagtttaaaacaagccatatggaagcacaagtgcttaaaaataatctcctgccagccca

SEQ ID NO: 17658 - DNA, 122 bp, Homo sapiens
  misc_feature (61)..(62): /note="This region represents a CpG dinucleotide"
  misc_feature (61)..(61): /note="Nucleotide may be methylated to form 5-methylcytosine"
ttctcttcctcctctttttgtcagaatatttaccttagaaaacttgtgagtactttctcccgaaatgtttatttttagaaactaaataaaccttttgtcagcataatgacctagggatatct

SEQ ID NO: 17659 - DNA, 122 bp, Homo sapiens
  misc_feature (61)..(62): /note="This region represents a CpG dinucleotide"
  misc_feature (61)..(61): /note="Nucleotide may be methylated to form 5-methylcytosine"
agctcttgtctggagggacagagggaggagggcctggggttaaccaggggaaggtggaaccggagcaggctggagccacagcctgcaaagagacgcagccactgaagacaggggaggagggg

SEQ ID NO: 17660 - DNA, 122 bp, Homo sapiens
  misc_feature (61)..(62): /note="This region represents a CpG dinucleotide"
  misc_feature (61)..(61): /note="Nucleotide may be methylated to form 5-methylcytosine"
agaaacctgtggttccagggagcctgcagccgaggggtggtgcaggtcaggcaagactaccgtgtccagttgggctggttgttcactccactagggtgactgggcaagcagtaagtgagctg

SEQ ID NO: 17661 - DNA, 122 bp, Homo sapiens
  misc_feature (61)..(62): /note="This region represents a CpG dinucleotide"
  misc_feature (61)..(61): /note="Nucleotide may be methylated to form 5-methylcytosine"
tgacctcgtgatctgcccgcctcagcctcccaaagtgctgggattacagacgtgagccaccgtgcccggccatgaattcttaaaagtgtaaaggactgtttttattagagcaaatgcaaatt

SEQ ID NO: 17662 - DNA, 122 bp, Homo sapiens
  misc_feature (61)..(62): /note="This region represents a CpG dinucleotide"
  misc_feature (61)..(61): /note="Nucleotide may be methylated to form 5-methylcytosine"
gctggttaaaatgccgttctgcggccctctttaattaaggccgagatgtaataaccaatccgctgctgcgaacttgtttttaaccatcagaacgcgaggtgaatgacatggagttgggttga

SEQ ID NO: 17663 - DNA, 122 bp, Homo sapiens
  misc_feature (61)..(62): /note="This region represents a CpG dinucleotide"
  misc_feature (61)..(61): /note="Nucleotide may be methylated to form 5-methylcytosine"
aagacactgcctagccctctcactcagcagtgagtcgtagatgattcctccagatcttgacgaggcccacaggcccttgtttaagaacgtcgcttgctgctttgctgcttctatggggcaca

SEQ ID NO: 17664 - DNA, 122 bp, Homo sapiens
  misc_feature (61)..(62): /note="This region represents a CpG dinucleotide"
  misc_feature (61)..(61): /note="Nucleotide may be methylated to form 5-methylcytosine"
acaacaaatagctgttgagatcgcatcaaaccctgaacaataaggagcaatataaccttacgtgctaggtgtcatgtgcctgatatgagaagcatctggtgacatgggtgaaggagtgtcag

SEQ ID NO: 17665 - DNA, 122 bp, Homo sapiens
  misc_feature (61)..(62): /note="This region represents a CpG dinucleotide"
  misc_feature (61)..(61): /note="Nucleotide may be methylated to form 5-methylcytosine"
tactaaatgttctagcctatagtaaaaatccatatgttgcctccggccaaaactcaacatcgctctttttcctcgaatctttcacaaaaacataatcctaaaaattaaaacatctttacaat

SEQ ID NO: 17666 - DNA, 122 bp, Homo sapiens
  misc_feature (61)..(62): /note="This region represents a CpG dinucleotide"
  misc_feature (61)..(61): /note="Nucleotide may be methylated to form 5-methylcytosine"
gctgggatgacaggctgagccacctcaccggcctcttatgtgccttttaatctgcaggttcgccctccctctctctttctgtggtttgtttttgtttttttttttctttttttcttttgtat

SEQ ID NO: 17667 - DNA, 122 bp, Homo sapiens
  misc_feature (61)..(62): /note="This region represents a CpG dinucleotide"
  misc_feature (61)..(61): /note="Nucleotide may be methylated to form 5-methylcytosine"
tttatgagtttatttttatgctgcgaaaggcctttcctacacttggttcagataaatgtgcgcatcttcttattcctttattcattgatttcagtttagttccttagttcagttggaatttt

SEQ ID NO: 17668 - DNA, 122 bp, Homo sapiens
  misc_feature (61)..(62): /note="This region represents a CpG dinucleotide"
  misc_feature (61)..(61): /note="Nucleotide may be methylated to form 5-methylcytosine"
gtgcagtaactgccattttgtgaggagctcagtttatttctgtctcgaccacaaagctcacgagaagcacagagcatgcataagctggaggtatgcaaaaagctcataaacactgacttcct

SEQ ID NO: 17669 - DNA, 122 bp, Homo sapiens
  misc_feature (61)..(62): /note="This region represents a CpG dinucleotide"
  misc_feature (61)..(61): /note="Nucleotide may be methylated to form 5-methylcytosine"
atttatctttctagtcctgctcactccctgctgtgcttgttcagccttaaaggctattagcggatttctcccaaccaccttccctgccctcagcacatacagagtgccagggcccttctggg

SEQ ID NO: 17670 - DNA, 122 bp, Homo sapiens
  misc_feature (61)..(62): /note="This region represents a CpG dinucleotide"
  misc_feature (61)..(61): /note="Nucleotide may be methylated to form 5-methylcytosine"
ctttcccaagggccagcttcttcctggtagtgcttttgtgtacttgtctggttgggacttcgtgtttctttcttgggattgttgtctgggactgcaagcagggtatgtttttatctactgtg

SEQ ID NO: 17671 - DNA, 122 bp, Homo sapiens
  misc_feature (61)..(62): /note="This region represents a CpG dinucleotide"
  misc_feature (61)..(61): /note="Nucleotide may be methylated to form 5-methylcytosine"
gctggcttgaaggaacaaagatttctttctgtccattgctggtcaggtgcagctctgatccgtgtcatcctcactctgaaaccagggtggatggagcctccttctagaacactacaagttgt

SEQ ID NO: 17672 - DNA, 122 bp, Homo sapiens
  misc_feature (61)..(62): /note="This region represents a CpG dinucleotide"
  misc_feature (61)..(61): /note="Nucleotide may be methylated to form 5-methylcytosine"
ggaaacttggcaacatctagagacatttttgtttgtcacctgactggggtgtgctactgacgtctagtggatagaggccaggaatgctactaaacatcaatgcatagaaaagtccccacaac

SEQ ID NO: 17673 - DNA, 122 bp, Homo sapiens
  misc_feature (61)..(62): /note="This region represents a CpG dinucleotide"
  misc_feature (61)..(61): /note="Nucleotide may be methylated to form 5-methylcytosine"
gattgtattacgctctgcacatagagcaggaaaatcccacttatcatgtaatcatacacacgtgttatcccatgtgtgtgaagctcagcctacagcctgagattccacagctaaaatcaaag

SEQ ID NO: 17674 - DNA, 122 bp, Homo sapiens
  misc_feature (61)..(62): /note="This region represents a CpG dinucleotide"
  misc_feature (61)..(61): /note="Nucleotide may be methylated to form 5-methylcytosine"
ataaaaagggtaatgcaacagagaaagaaggtagggtccttgcagccaaagggagcagtacggtcagcagcatacagaggcatgatggcatgatgaggcatgatgagtcatggtgcggcatg

SEQ ID NO: 17675 - DNA, 122 bp, Homo sapiens
  misc_feature (61)..(62): /note="This region represents a CpG dinucleotide"
  misc_feature (61)..(61): /note="Nucleotide may be methylated to form 5-methylcytosine"
tcgaaccggggaactctgcatattttcctcctgggtttgtggggtgtggacagcacggagcgtgatgaaaggatacaggcggctgggcgtggtggctcacgcctgtaatcccagcactttgg

SEQ ID NO: 17676 - DNA, 122 bp, Homo sapiens
  misc_feature (61)..(62): /note="This region represents a CpG dinucleotide"
  misc_feature (61)..(61): /note="Nucleotide may be methylated to form 5-methylcytosine"
tcatcatgtctgtctctagctcacaagggtgatgtgatcatcttacgtgtaaaagaaaaccgaatttcacttctggtggtgactattgtctgattcatcattacagtaaccacccaaggaaa

SEQ ID NO: 17677 - DNA, 122 bp, Homo sapiens
  misc_feature (61)..(62): /note="This region represents a CpG dinucleotide"
  misc_feature (61)..(61): /note="Nucleotide may be methylated to form 5-methylcytosine"
gccccccgatagcacccaacccgcacccccacccccgccactggcagtccgccccgataacgccccaacacgctcctggctgtaggcagtgtagcccatagatagagcccccaaccagcccc

SEQ ID NO: 17678 - DNA, 122 bp, Homo sapiens
  misc_feature (61)..(62): /note="This region represents a CpG dinucleotide"
  misc_feature (61)..(61): /note="Nucleotide may be methylated to form 5-methylcytosine"
ggcccgcctctctgatctcacaactggacacacagtgcctggcatggttcctggccatagcgggccctcacatcctagcttttaaaggagtatatggtggccactaggtttcaagcaccagg

SEQ ID NO: 17679 - DNA, 122 bp, Homo sapiens
  misc_feature (61)..(62): /note="This region represents a CpG dinucleotide"
  misc_feature (61)..(61): /note="Nucleotide may be methylated to form 5-methylcytosine"
ctaagatagggaagctaaaagcagactcaggggacatgcctgcagctgcagaaagatgtacgggaacagacaactctcccgcccaggtaagcacaacgaagagacacagaagcagtcgaagc

SEQ ID NO: 17680 - DNA, 122 bp, Homo sapiens
  misc_feature (61)..(62): /note="This region represents a CpG dinucleotide"
  misc_feature (61)..(61): /note="Nucleotide may be methylated to form 5-methylcytosine"
gctgcacatgctccaggcgccccacgggctccagtctccgtccacatgctccgggatgggcgtcttgctcacgcactcccccgcgcggcaccactgaaacacagcggggagggtcggggccc

SEQ ID NO: 17681 - DNA, 122 bp, Homo sapiens
  misc_feature (61)..(62): /note="This region represents a CpG dinucleotide"
  misc_feature (61)..(61): /note="Nucleotide may be methylated to form 5-methylcytosine"
gtgataggcaggtttgtggagtttctatcaggcctgcaggctgccctgggacattgctcacgggtgtggagactgtcaagatagcctgaatattaaccaagttgatcatccaagtccatact

SEQ ID NO: 17682 - DNA, 122 bp, Homo sapiens
  misc_feature (61)..(62): /note="This region represents a CpG dinucleotide"
  misc_feature (61)..(61): /note="Nucleotide may be methylated to form 5-methylcytosine"
aaaattccaccaaatttccaggatgcaaaagcacgactcgcagctcccaagagcctaacccgtggatttaaacggtaaacatcacaagttagggtctcagggactgagaggagcgcaacaat

SEQ ID NO: 17683 - DNA, 122 bp, Homo sapiens
  misc_feature (61)..(62): /note="This region represents a CpG dinucleotide"
  misc_feature (61)..(61): /note="Nucleotide may be methylated to form 5-methylcytosine"
agacctggccctgccaccaactagcaagtatgaccttgagtgagtcaccttaatttgggccgtagtttcctcatgtgtaaaaataggtataatcacatctgctcagctctaccacaggattg

SEQ ID NO: 17684 - DNA, 122 bp, Homo sapiens
  misc_feature (61)..(62): /note="This region represents a CpG dinucleotide"
  misc_feature (61)..(61): /note="Nucleotide may be methylated to form 5-methylcytosine"
caggtcaccattacaaccagatttgctgcaatagcctcctcactaccttctgcattcactcgctctcctctactccattctccacgtctgctcacagtgatctctccaaaaacacaacctga

SEQ ID NO: 17685 - DNA, 122 bp, Homo sapiens
  misc_feature (61)..(62): /note="This region represents a CpG dinucleotide"
  misc_feature (61)..(61): /note="Nucleotide may be methylated to form 5-methylcytosine"
actggttatagcctttattctggttgattaaaaatttacatataaggctttcccaaaagacgtgtgttgtaatagaataaattacagtcatttgtaattgagtagatatatctgtatttggt

SEQ ID NO: 17686 - DNA, 122 bp, Homo sapiens
  misc_feature (61)..(62): /note="This region represents a CpG dinucleotide"
  misc_feature (61)..(61): /note="Nucleotide may be methylated to form 5-methylcytosine"
cattaataacatacaaggtttctttattgtgtctgaccctggcataaaagttttagaggccgggcatggtggctcacacctgtaatcctagcactttgggaggccaaggcaggtggattgcc

SEQ ID NO: 17687 - DNA, 122 bp, Homo sapiens
  misc_feature (61)..(62): /note="This region represents a CpG dinucleotide"
  misc_feature (61)..(61): /note="Nucleotide may be methylated to form 5-methylcytosine"
aggctacaatagacaagtcacagaagaggatcacaagtgtccaatagacattttaaaagacgttcaatctcattagtgatcaggaaaatctaagcagaaataacagtgagatataatttgat

SEQ ID NO: 17688 - DNA, 122 bp, Homo sapiens
  misc_feature (61)..(62): /note="This region represents a CpG dinucleotide"
  misc_feature (61)..(61): /note="Nucleotide may be methylated to form 5-methylcytosine"
cgttccgccgtggcgggaacccttttagggtcacgtcttcccccacgtcccctgtctgtgcgttccgccgtggtgggaaccctgttagggccacgtcaactgctcttcccacctccagtgtc

SEQ ID NO: 17689 - DNA, 122 bp, Homo sapiens
  misc_feature (61)..(62): /note="This region represents a CpG dinucleotide"
  misc_feature (61)..(61): /note="Nucleotide may be methylated to form 5-methylcytosine"
gagatacttttggagaaacacaaattctgtaacatcaaggtgagaggctgcaggggtggacgtgagcaataatgcctgccccaaccaaaggaaatgaagtctttgcctttaaggaggggctg

SEQ ID NO: 17690 - DNA, 122 bp, Homo sapiens
  misc_feature (61)..(62): /note="This region represents a CpG dinucleotide"
  misc_feature (61)..(61): /note="Nucleotide may be methylated to form 5-methylcytosine"
ttctaggaggatgacctagcaagcaacaggctcccattggctggcatgggttttatctcacggaattatgtgagattgcaccactaaaatgctgctgccaggtggagtttaggatgactatt

SEQ ID NO: 17691 - DNA, 122 bp, Homo sapiens
  misc_feature (61)..(62): /note="This region represents a CpG dinucleotide"
  misc_feature (61)..(61): /note="Nucleotide may be methylated to form 5-methylcytosine"
gtctgctgcatctggcgcctgttgcacctggcctcttggctgcaactggcctctcagctgcgcctctttgttgcctctgcaaactcgggtgccctggagcttcctacccagaagtgagtgcc

SEQ ID NO: 17692 - DNA, 122 bp, Homo sapiens
  misc_feature (61)..(62): /note="This region represents a CpG dinucleotide"
  misc_feature (61)..(61): /note="Nucleotide may be methylated to form 5-methylcytosine"
taaaatacttttgtacagctctgattcgtagcttcctttttcctagtcagcaagcaatttcgcattaggatatgactcaaggacatacggttcattgcaatgatcatcaaatcacatagtgg

SEQ ID NO: 17693 - DNA, 122 bp, Homo sapiens
  misc_feature (61)..(62): /note="This region represents a CpG dinucleotide"
  misc_feature (61)..(61): /note="Nucleotide may be methylated to form 5-methylcytosine"
cccggaccccaggaccactccccacagagccgaggcccaccggggggtgcgtgtggggtgcgtgtggggtgctgcccaagaaaaccccagaacgcaggaaacaaaccaccccaggtccacac

SEQ ID NO: 17694 - DNA, 122 bp, Homo sapiens
  misc_feature (61)..(62): /note="This region represents a CpG dinucleotide"
  misc_feature (61)..(61): /note="Nucleotide may be methylated to form 5-methylcytosine"
aattaaatcgggaagagaattattatgaaattaatgatcttaggtataataattgtactgcggttatgtagcagaacatctattcttaggagatacatgctgcaatgttaaagggttaagtg

SEQ ID NO: 17695 - DNA, 122 bp, Homo sapiens
  misc_feature (61)..(62): /note="This region represents a CpG dinucleotide"
  misc_feature (61)..(61): /note="Nucleotide may be methylated to form 5-methylcytosine"
atgtctatatatctttcaacattttagtcatacctcttcatcttggaatcctggttcttccgccacaacttgatcctccttcatattgaaaagtgggcaacagaaaaataatcacttctggg

SEQ ID NO: 17696 - DNA, 122 bp, Homo sapiens
  misc_feature (61)..(62): /note="This region represents a CpG dinucleotide"
  misc_feature (61)..(61): /note="Nucleotide may be methylated to form 5-methylcytosine"
gacggtgcgtgcgtgtaggggagggaaattccagggtttcatatatcaagatgacacacccgctgcacacttctcttagaaagtcacgacgcacagtactgtgcgtcacaggtattgagaaa

SEQ ID NO: 17697 - DNA, 122 bp, Homo sapiens
  misc_feature (61)..(62): /note="This region represents a CpG dinucleotide"
  misc_feature (61)..(61): /note="Nucleotide may be methylated to form 5-methylcytosine"
tccattctggggtggggtagtagacctagaggcctgggtttccagttcccgtagtctgagcgtgggtgtgcatatataagtgagtgaggtgtcagtggactcgggtcctgaggctgtgaggt

SEQ ID NO: 17698 - DNA, 122 bp, Homo sapiens
  misc_feature (61)..(62): /note="This region represents a CpG dinucleotide"
  misc_feature (61)..(61): /note="Nucleotide may be methylated to form 5-methylcytosine"
tggaaggcagcgccacctgctgcccatcatattatggctcacatacccataatttccttgcggtgctgaattccaagtggggattattagagacccctcagagccaaaaggggaccttagag

SEQ ID NO: 17699 - DNA, 122 bp, Homo sapiens
  misc_feature (61)..(62): /note="This region represents a CpG dinucleotide"
  misc_feature (61)..(61): /note="Nucleotide may be methylated to form 5-methylcytosine"
acaatctaaataagattttattcttcctttacagataccttgacatctcttattcttccacgtcttcataaattgtatgtctaactttctctgttgggatgtttgcaccaataacacaacag

SEQ ID NO: 17700 - DNA, 122 bp, Homo sapiens
  misc_feature (61)..(62): /note="This region represents a CpG dinucleotide"
  misc_feature (61)..(61): /note="Nucleotide may be methylated to form 5-methylcytosine"
aagaacttgacacgtgttgtcttattcagtcctcaccaaaactctacgagcaggaattaccgttatccccattttatagataaggtgacagagagcattgccatggtcaagatcctgtggtt

SEQ ID NO: 17701 - DNA, 122 bp, Homo sapiens
  misc_feature (61)..(62): /note="This region represents a CpG dinucleotide"
  misc_feature (61)..(61): /note="Nucleotide may be methylated to form 5-methylcytosine"
aaagatccagttatgactggaactgtcctggcctgagtattgtcctggacccagagggagcgaaggagggagggagggagggagggagaaagagagagagagaggggagaaatatgagagga

SEQ ID NO: 17702 - DNA, 122 bp, Homo sapiens
  misc_feature (61)..(62): /note="This region represents a CpG dinucleotide"
  misc_feature (61)..(61): /note="Nucleotide may be methylated to form 5-methylcytosine"
attgagagaccgggctacacacgtgtggatgtcccccgtgcatacacacaagcacccatccgataggctgggatccagctgcaagtttggacactgacaagtctcaagtctaacaggaaata

SEQ ID NO: 17703 - DNA, 122 bp, Homo sapiens
  misc_feature (61)..(62): /note="This region represents a CpG dinucleotide"
  misc_feature (61)..(61): /note="Nucleotide may be methylated to form 5-methylcytosine"
tgttttatcttgttatatgtacccatttgcacttttccctttatcttgattattttaacccgtgggcgaaatggtaactgtaaagagaacaacctggcggaaaccagtggaaacttgatttc

SEQ ID NO: 17704 - DNA, 122 bp, Homo sapiens
  misc_feature (61)..(62): /note="This region represents a CpG dinucleotide"
  misc_feature (61)..(61): /note="Nucleotide may be methylated to form 5-methylcytosine"
gcttttgtccaaggcttgtgctattcctcaaacactcttcattgctgttccaatggttgacgtgtaggagatccatcatactccctgctgcctttgctgctgtgtttgcttaaagctaaccc

SEQ ID NO: 17705 - DNA, 122 bp, Homo sapiens
  misc_feature (61)..(62): /note="This region represents a CpG dinucleotide"
  misc_feature (61)..(61): /note="Nucleotide may be methylated to form 5-methylcytosine"
tgttaaaaaacctaacccctcacaaaattagcaagagaaataagtatatcatgttagaaacggtgcatgatgacatacgcaaaagagacaatacaggactgtgagtaatagcacatgctttg

SEQ ID NO: 17706 - DNA, 122 bp, Homo sapiens
  misc_feature (61)..(62): /note="This region represents a CpG dinucleotide"
  misc_feature (61)..(61): /note="Nucleotide may be methylated to form 5-methylcytosine"
gctattaacaattcacaagcctacagctggaacttatgtgacagagcccaagggattttacggcacaggaatgagatgaatcactgtgaacacaggacaactgagacatgtgaaatcaaact

SEQ ID NO: 17707 - DNA, 122 bp, Homo sapiens
  misc_feature (61)..(62): /note="This region represents a CpG dinucleotide"
  misc_feature (61)..(61): /note="Nucleotide may be methylated to form 5-methylcytosine"
ttgtaaatatgacttattctagctgatggtcaaaatccgcagtgttagcagttagtatgacgtcataccttctgatacatcttctttaatgccacagctccaatagggataatattgaaaca

SEQ ID NO: 17708 - DNA, 122 bp, Homo sapiens
  misc_feature (61)..(62): /note="This region represents a CpG dinucleotide"
  misc_feature (61)..(61): /note="Nucleotide may be methylated to form 5-methylcytosine"
ccttccagcgatgatcccaccagccacatgaggtcaccaagctcttgaaaaccctggcaacgtgcattaagtgtgaaatgcacatgaggtttcaaagactgggaacaagagaagacatacgg

SEQ ID NO: 17709 - DNA, 122 bp, Homo sapiens
  misc_feature (61)..(62): /note="This region represents a CpG dinucleotide"
  misc_feature (61)..(61): /note="Nucleotide may be methylated to form 5-methylcytosine"
aaaaagtgttggatctcacactttaaacacgtacagcttcttgcctgttgattatacctccgtaatgctgtttttatttttatttttttaccattaatagcccaagtgggccccctcacact

SEQ ID NO: 17710 - DNA, 122 bp, Homo sapiens
  misc_feature (61)..(62): /note="This region represents a CpG dinucleotide"
  misc_feature (61)..(61): /note="Nucleotide may be methylated to form 5-methylcytosine"
gaatctcttcatacatacagcaaggctagtttttttgagtgtttttgtgagactgaaatacgatgagatttatgaatctactttggtaagccagaccaatgctttgtggaagttagtcattt

SEQ ID NO: 17711 - DNA, 122 bp, Homo sapiens
  misc_feature (61)..(62): /note="This region represents a CpG dinucleotide"
  misc_feature (61)..(61): /note="Nucleotide may be methylated to form 5-methylcytosine"
ctttcaacaccatcaatgttacaaaatgcctttccccactgactagtgtaggttgttccccgcatcgtaatctcaccacagttcattcagtcacttgctccttcattcattcacacgcgttt

SEQ ID NO: 17712 - DNA, 122 bp, Homo sapiens
  misc_feature (61)..(62): /note="This region represents a CpG dinucleotide"
  misc_feature (61)..(61): /note="Nucleotide may be methylated to form 5-methylcytosine"
agccactgagcccggcccagtctttttcttaaaaaatctgctcacaattccaattatttgcgcaatgctgtactaagtacaagagaaaggtgtttcctctcagccaggacagaaggtaggaa

SEQ ID NO: 17713 - DNA, 122 bp, Homo sapiens
  misc_feature (61)..(62): /note="This region represents a CpG dinucleotide"
  misc_feature (61)..(61): /note="Nucleotide may be methylated to form 5-methylcytosine"
tcaaaaagtagacaagcatcatgacatgcaccactacctgttattagttggctgctcttccgttttaatttctcttgttgctcttgtgtaggaggctggatcaagttgggggatgagtaagc

SEQ ID NO: 17714 - DNA, 122 bp, Homo sapiens
  misc_feature (61)..(62): /note="This region represents a CpG dinucleotide"
  misc_feature (61)..(61): /note="Nucleotide may be methylated to form 5-methylcytosine"
tgtgcaagagaatgtgcactgaagtatcgtgaatagaagccaaagactggaaacaacctccgtgcccattagaagaaacagatcaatgaattacatgcatgcatgcagtgggtaccagacag

SEQ ID NO: 17715 - DNA, 122 bp, Homo sapiens
  misc_feature (61)..(62): /note="This region represents a CpG dinucleotide"
  misc_feature (61)..(61): /note="Nucleotide may be methylated to form 5-methylcytosine"
gtctttcctccctaaaggctgaagcttagtgttacctagtccaaagttcagacgactggccgggtgcagtggctcatacctataatcccagcactctgggaggccacggcaggcagatcacc

SEQ ID NO: 17716 - DNA, 122 bp, Homo sapiens
  misc_feature (61)..(62): /note="This region represents a CpG dinucleotide"
  misc_feature (61)..(61): /note="Nucleotide may be methylated to form 5-methylcytosine"
gagagggacgggctgcatgtgctccccgcccccgagaggcctgcgtcatgcggtctcgcccgctctgcgccaggcgtcctgctaacgtgtcctggagggactctcagttcctcccgcccgca

SEQ ID NO: 17717 - DNA, 122 bp, Homo sapiens
  misc_feature (61)..(62): /note="This region represents a CpG dinucleotide"
  misc_feature (61)..(61): /note="Nucleotide may be methylated to form 5-methylcytosine"
ggccacctgcctgtgtgacacagggagccctcataggtgacaggccctgagaggttgtaccggcccagggcaggtggccggtggggggcagagggcatgggtgatttgcatccagagccctt

SEQ ID NO: 17718 - DNA, 122 bp, Homo sapiens
  misc_feature (61)..(62): /note="This region represents a CpG dinucleotide"
  misc_feature (61)..(61): /note="Nucleotide may be methylated to form 5-methylcytosine"
gtccccggggaccaacgacctcctttgccccagcactgccaaggagatgagctcctggatcgcgcgcatcaacttggctgcggccacgcactccgcgccgcccttccccgccgctgtgggct

SEQ ID NO: 17719 - DNA, 122 bp, Homo sapiens
  misc_feature (61)..(62): /note="This region represents a CpG dinucleotide"
  misc_feature (61)..(61): /note="Nucleotide may be methylated to form 5-methylcytosine"
gcgtctgcgtcctcagtttccccaggacgcgtaaggagaaaaccgggggagggccccgcacgccgctgcccccccacgtccaagagcccgaccgttcgcccgcgcccctcgaggagtctgcc

SEQ ID NO: 17720 - DNA, 122 bp, Homo sapiens
  misc_feature (61)..(62): /note="This region represents a CpG dinucleotide"
  misc_feature (61)..(61): /note="Nucleotide may be methylated to form 5-methylcytosine"
gcacctgctcccacagaagggggaacgcaaggggcgtcccaagacctcatctgcctgcagcgtcacaccgatggcctggcctcggcttctcattatttgcaactgccatggatgtttacagg

SEQ ID NO: 17721 - DNA, 122 bp, Homo sapiens
  misc_feature (61)..(62): /note="This region represents a CpG dinucleotide"
  misc_feature (61)..(61): /note="Nucleotide may be methylated to form 5-methylcytosine"
tgattaactaaaatgaaagccccgggcatttaaaaataagattcctccctcttgctgtttcgccaggaattgtccttcaggtctttgtgtcctgagatcattaaaccaaggatgactcaaaa

SEQ ID NO: 17722 - DNA, 122 bp, Homo sapiens
  misc_feature (61)..(62): /note="This region represents a CpG dinucleotide"
  misc_feature (61)..(61): /note="Nucleotide may be methylated to form 5-methylcytosine"
gtgagaactgctcgagggttttggctctcagaaaagccaagctccattcttcttgacttacgccaaaggccccagtccccacccataggtaaatcaaagccttaaatcatctatttaagaga

SEQ ID NO: 17723 - DNA, 122 bp, Homo sapiens
  misc_feature (61)..(62): /note="This region represents a CpG dinucleotide"
  misc_feature (61)..(61): /note="Nucleotide may be methylated to form 5-methylcytosine"
gaaaactctagcccctgggtggtccagatggtcagaggcctttgcacaatgaacagaggccgctgctccatatgtgacttctttgccacggaagtcatcccatgaaaaactacaagcaggaa

SEQ ID NO: 17724 - DNA, 122 bp, Homo sapiens
  misc_feature (61)..(62): /note="This region represents a CpG dinucleotide"
  misc_feature (61)..(61): /note="Nucleotide may be methylated to form 5-methylcytosine"
gctggggacgaaactgcagtgaccagtgggtgtggctgggtccagcctccagatctggcccgcacgatgccttgcaggatggacaggatgacagacagggacgaagcagagacctctacaga

SEQ ID NO: 17725 - DNA, 122 bp, Homo sapiens
  misc_feature (61)..(62): /note="This region represents a CpG dinucleotide"
  misc_feature (61)..(61): /note="Nucleotide may be methylated to form 5-methylcytosine"
aaagggctggtggcagggatcaggggacatgactggaagcaaagaagtcagttaggatgccgtggtgttcatctacacaatggatgacagtgacctgagttaaggaaaggaaagtggagagg

SEQ ID NO: 17726 - DNA, 122 bp, Homo sapiens
  misc_feature (61)..(62): /note="This region represents a CpG dinucleotide"
  misc_feature (61)..(61): /note="Nucleotide may be methylated to form 5-methylcytosine"
caaagggtttcatctacatgcaaaaccaacaccgtaggaactactttccgcatgcggagccgggtacagagggaaggggcgcgtccgggaactacttgccgcatgcggagcggggtacagag

SEQ ID NO: 17727 - DNA, 122 bp, Homo sapiens
  misc_feature (61)..(62): /note="This region represents a CpG dinucleotide"
  misc_feature (61)..(61): /note="Nucleotide may be methylated to form 5-methylcytosine"
gagacccccggacttaggctccggccccttgtctcatccccctcccaggtcttctcattgcgggggggactttccctaacaatggggctcagtgaggcctctgtgtctcacagctccccttc

SEQ ID NO: 17728 - DNA, 122 bp, Homo sapiens
  misc_feature (61)..(62): /note="This region represents a CpG dinucleotide"
  misc_feature (61)..(61): /note="Nucleotide may be methylated to form 5-methylcytosine"
tgacacaaggaaagaaccattttgcaaaaggaaacaagacaagctgccgtcagctagatacgtttcgattgttcaggaaagtctgtacaggaactttgattggcatcctgcttgtctacctt

SEQ ID NO: 17729 - DNA, 122 bp, Homo sapiens
  misc_feature (61)..(62): /note="This region represents a CpG dinucleotide"
  misc_feature (61)..(61): /note="Nucleotide may be methylated to form 5-methylcytosine"
atctatagacagaggtcgcaacaatcctatgattcacatggtgaacaagatatctaccagcgaacattatttaggcaaaatattggaaggttcatgtcttcagataaagtgactgcctggat

SEQ ID NO: 17730 - DNA, 122 bp, Homo sapiens
  misc_feature (61)..(62): /note="This region represents a CpG dinucleotide"
  misc_feature (61)..(61): /note="Nucleotide may be methylated to form 5-methylcytosine"
atatgggatgtgctgtgggcctcctaggtgggaataccccataaggctcaaagagcaggtcgtatttgagaggagtattgaaaggtgaaaggaatgtcatgtacttaaaaccaatggaagct

SEQ ID NO: 17731 - DNA, 122 bp, Homo sapiens
  misc_feature (61)..(62): /note="This region represents a CpG dinucleotide"
  misc_feature (61)..(61): /note="Nucleotide may be methylated to form 5-methylcytosine"
gtgtctatgcccaatggcactttcctcctgaagctttgtaacagcagagaacaatgaacacgtacagctgaggcaacaaggaacctaaagaaactcctcctcaaatccctccagccccagtg

SEQ ID NO: 17732 - DNA, 122 bp, Homo sapiens
  misc_feature (61)..(62): /note="This region represents a CpG dinucleotide"
  misc_feature (61)..(61): /note="Nucleotide may be methylated to form 5-methylcytosine"
gtgggcagtctcgaccttcattgcaagttcctgctccagctcctctgcttctgccatctccgtggcactaccacaagcccagggccagaaattttaacaatcacagcattgtttatgatggt

SEQ ID NO: 17733 - DNA, 122 bp, Homo sapiens
  misc_feature (61)..(62): /note="This region represents a CpG dinucleotide"
  misc_feature (61)..(61): /note="Nucleotide may be methylated to form 5-methylcytosine"
aatattgatgcaaaaatcctcaacaaaatatagcaaacagaattcaacactacattagaacgatcattcatcatgacctagtaggatgtttttcccgggatgcaaggatggttcaacatata

SEQ ID NO: 17734 - DNA, 122 bp, Homo sapiens
  misc_feature (61)..(62): /note="This region represents a CpG dinucleotide"
  misc_feature (61)..(61): /note="Nucleotide may be methylated to form 5-methylcytosine"
gactcactgattacatccggcattcctctgactttgcagttagttaagtgaacataagcacgtcaccccctatacctttgccctagatctactactttttttctgtttgaatcatggatttg

SEQ ID NO: 17735 - DNA, 122 bp, Homo sapiens
  misc_feature (61)..(62): /note="This region represents a CpG dinucleotide"
  misc_feature (61)..(61): /note="Nucleotide may be methylated to form 5-methylcytosine"
ggccaagtttggcttcagctgtggccaagggcagcacagaaatacccagattagaccaggcgccatgtggcacgcctataatcccagcactttgagaggccaaggtgggcggatcacctgag

SEQ ID NO: 17736 - DNA, 122 bp, Homo sapiens
  misc_feature (61)..(62): /note="This region represents a CpG dinucleotide"
  misc_feature (61)..(61): /note="Nucleotide may be methylated to form 5-methylcytosine"
tggctcacaccagtgagtccactctcaaagcccacccttgttcttcccactggaatcacacgaccattggtacaatgccatgggctgtaaaatgccattgcttcagcattaaaagagttaac

SEQ ID NO: 17737 - DNA, 122 bp, Homo sapiens
  misc_feature (61)..(62): /note="This region represents a CpG dinucleotide"
  misc_feature (61)..(61): /note="Nucleotide may be methylated to form 5-methylcytosine"
taactatgacaagatacaaaagcatgtgtttgccataaatagccctggctaacagcaaaccgctcacactgagcagatcaaattctctataaggagcacagtctggaccatagccaaatccc

SEQ ID NO: 17738 - DNA, 122 bp, Homo sapiens
  misc_feature (61)..(62): /note="This region represents a CpG dinucleotide"
  misc_feature (61)..(61): /note="Nucleotide may be methylated to form 5-methylcytosine"
aattcctagaaagacacaaataaagctgccgtgatcattcatgtgcaagtctttggttgacgtgttttcatttctcttgagtaaatatctaagagtcaagttacaatgtaatgtgtgagagt

SEQ ID NO: 17739 - DNA, 122 bp, Homo sapiens
  misc_feature (61)..(62): /note="This region represents a CpG dinucleotide"
  misc_feature (61)..(61): /note="Nucleotide may be methylated to form 5-methylcytosine"
tgagaaatacacccaggcagggccagatactgcgtagcaggcggggcacagaggagggaacgcttgtgtctaactgatgctcctaatgcggaagcccctgaaaggcggttgtggtgcaaagg

SEQ ID NO: 17740 - DNA, 122 bp, Homo sapiens
  misc_feature (61)..(62): /note="This region represents a CpG dinucleotide"
  misc_feature (61)..(61): /note="Nucleotide may be methylated to form 5-methylcytosine"
ttatgggcctttccatcctaaggaatggctgctgagcaaagcaatgcaacttgcttagagcgttgtaggtttctttttttaattgccattttaatttaaattcaggggtacacgtgcacgtt

SEQ ID NO: 17741 - DNA, 122 bp, Homo sapiens
  misc_feature (61)..(62): /note="This region represents a CpG dinucleotide"
  misc_feature (61)..(61): /note="Nucleotide may be methylated to form 5-methylcytosine"
caataaacctctctcttttgtaaattgcccagtcttgggtgtgtcttaccagcagcatgacgatgaactaatccagtaaattggtactagtagagtcaggcgctactgaaaagataccaaaa

SEQ ID NO: 17742 - DNA, 122 bp, Homo sapiens
  misc_feature (61)..(62): /note="This region represents a CpG dinucleotide"
  misc_feature (61)..(61): /note="Nucleotide may be methylated to form 5-methylcytosine"
aaagacttcttaggaacacataattcatttgagtatggaactcatggtattaaacaattacgggattaatgtttccacaacagaatgtgaatattataagcaaagatattgtaaaaataata

SEQ ID NO: 17743 - DNA, 122 bp, Homo sapiens
  misc_feature (61)..(62): /note="This region represents a CpG dinucleotide"
  misc_feature (61)..(61): /note="Nucleotide may be methylated to form 5-methylcytosine"
agaataatctaaaaataaaggctgattacctcatgtggtataaacttaccaatgactccccgttgcctagaggctcaaattgctagcatggcctggcgtgtggccctggtcaaccaagtctc

SEQ ID NO: 17744 - DNA, 122 bp, Homo sapiens
  misc_feature (61)..(62): /note="This region represents a CpG dinucleotide"
  misc_feature (61)..(61): /note="Nucleotide may be methylated to form 5-methylcytosine"
ggggctgctgggcgggtgctgtactactgaataactatgaggttcttctaaaacatcctccgaacactctgagtttactctgaatgctaatgggattaatctgatcattttaaaggtgcatg

SEQ ID NO: 17745 - DNA, 122 bp, Homo sapiens
  misc_feature (61)..(62): /note="This region represents a CpG dinucleotide"
  misc_feature (61)..(61): /note="Nucleotide may be methylated to form 5-methylcytosine"
ctcagcaggcttgaacccaaactgggccttgaacattcccaagcactgagaaaggtatttcggttgttgctcaaaacactgaaactggcccccagccctgagccaaatttctcaaactgtca

SEQ ID NO: 17746 - DNA, 122 bp, Homo sapiens
  misc_feature (61)..(62): /note="This region represents a CpG dinucleotide"
  misc_feature (61)..(61): /note="Nucleotide may be methylated to form 5-methylcytosine"
aaacaaatttctaagattagtcagtttccccttgcaactatgaagttggttcagggcctccggctgacccttctctcagtatttccctctcagagctcagctttacatcataggcaagataa

SEQ ID NO: 17747 - DNA, 122 bp, Homo sapiens
  misc_feature (61)..(62): /note="This region represents a CpG dinucleotide"
  misc_feature (61)..(61): /note="Nucleotide may be methylated to form 5-methylcytosine"
gcacatgtgtcaatattctcaacagtggagcagttagggttaaccctaggcagagttcatcgttggtgcactccctgttccccgaaatactacatttccattctttattcaaccatttcttt

SEQ ID NO: 17748 - DNA, 122 bp, Homo sapiens
  misc_feature (61)..(62): /note="This region represents a CpG dinucleotide"
  misc_feature (61)..(61): /note="Nucleotide may be methylated to form 5-methylcytosine"
ctagagtattgtctggcagcaagttattatctgccagtgaaaaaagctttaacgtgccttcggttaagccacacagaagtgccaggcaaggagaggcacggaccacagcatctgttttacaa

SEQ ID NO: 17749 - DNA, 122 bp, Homo sapiens
  misc_feature (61)..(62): /note="This region represents a CpG dinucleotide"
  misc_feature (61)..(61): /note="Nucleotide may be methylated to form 5-methylcytosine"
tgggttccagtgccacctcaccaccgtgtgaccctggacaggtgacttctctctgagtctcgatttcttgatgtgttaggtgggtgatgatagtgcctgccctgcagccaccttgtgagtgt

SEQ ID NO: 17750 - DNA, 122 bp, Homo sapiens
  misc_feature (61)..(62): /note="This region represents a CpG dinucleotide"
  misc_feature (61)..(61): /note="Nucleotide may be methylated to form 5-methylcytosine"
ttctagatattggtctccaaggatccttacatagcggaatgaggatggcagttacagcatcgcagtcctgttatttcctggcgcttggaggattgtgctctggtgaactttctgagtcaccc

SEQ ID NO: 17751 - DNA, 122 bp, Homo sapiens
  misc_feature (61)..(62): /note="This region represents a CpG dinucleotide"
  misc_feature (61)..(61): /note="Nucleotide may be methylated to form 5-methylcytosine"
catatgtggaacactgttagtcccggtcagtcccatggttctctcagagtgtatggtctacgctaagagaactgcggcccccacacatcactccccgcattggttcctcctggaaccgcctc

SEQ ID NO: 17752 - DNA, 122 bp, Homo sapiens
  misc_feature (61)..(62): /note="This region represents a CpG dinucleotide"
  misc_feature (61)..(61): /note="Nucleotide may be methylated to form 5-methylcytosine"
gccagggtttgccactggcaagttggattttgtgttacgtgcctaaccaggagttgtcaccgcttgaggcttaacctggttctgggcggctcggtgtgtgtgtcccaaggccatgccacaca

SEQ ID NO: 17753 - DNA, 122 bp, Homo sapiens
  misc_feature (61)..(62): /note="This region represents a CpG dinucleotide"
  misc_feature (61)..(61): /note="Nucleotide may be methylated to form 5-methylcytosine"
aaattttttattcacctggttatgactcaaaagtataaattgccattttatgttttactacgtatttttataagcagcattattaacttctaaagattaaaaaagcataccactcagaaata

SEQ ID NO: 17754 - DNA, 122 bp, Homo sapiens
  misc_feature (61)..(62): /note="This region represents a CpG dinucleotide"
  misc_feature (61)..(61): /note="Nucleotide may be methylated to form 5-methylcytosine"
ttgaaaatgtacaaaaggaaatgtcaagaggcctaggttccctctcatgacagaaacagacgtcagcagagcaggtcgctcagcccagttcagctctgtgtatgaaacagagattctagccc

SEQ ID NO: 17755 - DNA, 122 bp, Homo sapiens
  misc_feature (61)..(62): /note="This region represents a CpG dinucleotide"
  misc_feature (61)..(61): /note="Nucleotide may be methylated to form 5-methylcytosine"
atgttaggagacaaaggacaatgaggaaaacaattcatatttcctatcacagacaaacggcgaatctccctgaggtaggctaacaatgctcaatgtttaagcaaagatgtctatatcctaat

SEQ ID NO: 17756 - DNA, 122 bp, Homo sapiens
  misc_feature (61)..(62): /note="This region represents a CpG dinucleotide"
  misc_feature (61)..(61): /note="Nucleotide may be methylated to form 5-methylcytosine"
gtcttgaactcctgacctcaagtgaccctctcacttcggcctccctaagtgctgggattacgggcatgagccaccacaccggccccatgtgtgcttttcatgtgttatagataacccgattt

SEQ ID NO: 17757 - DNA, 122 bp, Homo sapiens
  misc_feature (61)..(62): /note="This region represents a CpG dinucleotide"
  misc_feature (61)..(61): /note="Nucleotide may be methylated to form 5-methylcytosine"
tcttcctttcctctcctctcccacttatgaagggagtccagtcagaaacatgtttgtctacgaggtagtatatctggtatttctgaggaattcggttattatataggattatagaatattca

SEQ ID NO: 17758 - DNA, 122 bp, Homo sapiens
  misc_feature (61)..(62): /note="This region represents a CpG dinucleotide"
  misc_feature (61)..(61): /note="Nucleotide may be methylated to form 5-methylcytosine"
gaaacagcattgctaccctccaagacttatgcttagaatgaaaaacttttactgtggtgtcgcaacatgaataattttccttcagactttcatgaggccaagaccatgtttacatttaattc

SEQ ID NO: 17759 - DNA, 122 bp, Homo sapiens
  misc_feature (61)..(62): /note="This region represents a CpG dinucleotide"
  misc_feature (61)..(61): /note="Nucleotide may be methylated to form 5-methylcytosine"
aggagtggttacagtaggtagggtcttttgaatatcatctcatggcctcattctcaccagcgcaggttttcctgactatcctcatattagcacagagcaccttacctccatcatagcctcat

SEQ ID NO: 17760 - DNA, 122 bp, Homo sapiens
  misc_feature (61)..(62): /note="This region represents a CpG dinucleotide"
  misc_feature (61)..(61): /note="Nucleotide may be methylated to form 5-methylcytosine"
gaaccattcacccttgcatctggctgtgcaccttactcacacgtccctttcatatgtctgcgttggctgttgaagagctcctactgcaagtatgcaagtgtggggagaaaagaaagaaaatg

SEQ ID NO: 17761 - DNA, 122 bp, Homo sapiens
  misc_feature (61)..(62): /note="This region represents a CpG dinucleotide"
  misc_feature (61)..(61): /note="Nucleotide may be methylated to form 5-methylcytosine"
gaaagtattgtggagaatatagtccccaaatttggcaaatccttaggagtcagtaatccacgtggttagttggctacttataaaaagaaagaatgaacaagaaaagtttagaactgatctga

SEQ ID NO: 17762 - DNA, 122 bp, Homo sapiens
  misc_feature (61)..(62): /note="This region represents a CpG dinucleotide"
  misc_feature (61)..(61): /note="Nucleotide may be methylated to form 5-methylcytosine"
gatttcgggttctttaaatgccatgtgctgttcatgtggagtccacatgttcagcttgcacgttggctgtctgcttgtatagggtggctaggaaggaaaagagcctagtggttgccctcagg

SEQ ID NO: 17763 - DNA, 122 bp, Homo sapiens
  misc_feature (61)..(62): /note="This region represents a CpG dinucleotide"
  misc_feature (61)..(61): /note="Nucleotide may be methylated to form 5-methylcytosine"
catcccctcttttgctcccacaagagcacatcatgttctgcaaggagatggctgccaaaccgcctggaagagggaagcaaacactcatccaccccgagcctcaccccagggagaccagctga

SEQ ID NO: 17764 - DNA, 122 bp, Homo sapiens
  misc_feature (61)..(62): /note="This region represents a CpG dinucleotide"
  misc_feature (61)..(61): /note="Nucleotide may be methylated to form 5-methylcytosine"
gttaactttgctcctttttatggctaaagctctggtgaaagacttcataagcatacatctcgcaatcgcatgtatttagttgtcaggcacagaaagctggactacaaatcacaaatctgtta

SEQ ID NO: 17765 - DNA, 122 bp, Homo sapiens
  misc_feature (61)..(62): /note="This region represents a CpG dinucleotide"
  misc_feature (61)..(61): /note="Nucleotide may be methylated to form 5-methylcytosine"
ggagactagagtgagttcagcagggctgcctaacctgggaatgcaccctggaagcagctgcgatccacatggtgaaggaacatcaggaagactcaaaaaggacaaaaacaccaatatcagcc

SEQ ID NO: 17766 - DNA, 122 bp, Homo sapiens
  misc_feature (61)..(62): /note="This region represents a CpG dinucleotide"
  misc_feature (61)..(61): /note="Nucleotide may be methylated to form 5-methylcytosine"
gactgaatgagggaatggaaagtcttaccgtggaggcctgaccagttaacagagccccagcgtgcctctgactccttagagaaaggaccaactgcagcaagaggggttgaagctagatgtga

SEQ ID NO: 17767 - DNA, 122 bp, Homo sapiens
  misc_feature (61)..(62): /note="This region represents a CpG dinucleotide"
  misc_feature (61)..(61): /note="Nucleotide may be methylated to form 5-methylcytosine"
agaaatttaaggtcgctgtaggtattgtgcgtttctacatcaaagcttcaaaaatagttccggggtgtggaggtgcacatagcttctactagcaatacacacactctggagcactcccggga

SEQ ID NO: 17768 - DNA, 122 bp, Homo sapiens
  misc_feature (61)..(62): /note="This region represents a CpG dinucleotide"
  misc_feature (61)..(61): /note="Nucleotide may be methylated to form 5-methylcytosine"
atttgccagtaaatttgctgagtctcaactgctctccacacattctggtgagtgcaggaacgcatgagctctgcttcccttcagctgagtcacttcagagggcagggctcctttgttggaga

SEQ ID NO: 17769 - DNA, 122 bp, Homo sapiens
  misc_feature (61)..(62): /note="This region represents a CpG dinucleotide"
  misc_feature (61)..(61): /note="Nucleotide may be methylated to form 5-methylcytosine"
agaaacattttacagcctcttctctctgaagcctgctaccctatccgaatacttcatctgcgtgataaaacacattggtctccacaacctcttaacccagacattcctttctttaatcccag

SEQ ID NO: 17770 - DNA, 122 bp, Homo sapiens
  misc_feature (61)..(62): /note="This region represents a CpG dinucleotide"
  misc_feature (61)..(61): /note="Nucleotide may be methylated to form 5-methylcytosine"
ccagcagagggggcaggaggctggccagcccagtcctccctccaggagctggaaccatcccgcagacacagtccactcctgcccactccgaaacacctctgagggtattctctcagcagtag

SEQ ID NO: 17771 - DNA, 122 bp, Homo sapiens
  misc_feature (61)..(62): /note="This region represents a CpG dinucleotide"
  misc_feature (61)..(61): /note="Nucleotide may be methylated to form 5-methylcytosine"
atgaaatgataggacagcagtctaagattcttaggctttttgtgtgttggcccctgcctacgtttccagtctcattcctttttagtttttatttattgttttgagacagggacttgctctgt

SEQ ID NO: 17772 - DNA, 122 bp, Homo sapiens
  misc_feature (61)..(62): /note="This region represents a CpG dinucleotide"
  misc_feature (61)..(61): /note="Nucleotide may be methylated to form 5-methylcytosine"
acctaatttgtataaaattcaagcagatcactaacctgtctggatctgagtttccctcctcgtgagctcaggatgactgctcccatcttcttagccctctctgctccctgcagcctactgga

SEQ ID NO: 17773 - DNA, 122 bp, Homo sapiens
  misc_feature (61)..(62): /note="This region represents a CpG dinucleotide"
  misc_feature (61)..(61): /note="Nucleotide may be methylated to form 5-methylcytosine"
ctggactagtacatgtccgcagcgggccctgggaggctgcagaatgggaagttgttaaaacgtcaactgcagcagagattccaaagtgacctaaaggaaattcgaatttcttctgccccatt

SEQ ID NO: 17774 - DNA, 122 bp, Homo sapiens
  misc_feature (61)..(62): /note="This region represents a CpG dinucleotide"
  misc_feature (61)..(61): /note="Nucleotide may be methylated to form 5-methylcytosine"
gaccactttacactcacgtggaacctttcactcaacaaaatgctttaacatcctccttcccgtttacactcacaacacccccctgtgagaaaggcaggtcagagagatttgttaccctcacc

SEQ ID NO: 17775 - DNA, 122 bp, Homo sapiens
  misc_feature (61)..(62): /note="This region represents a CpG dinucleotide"
  misc_feature (61)..(61): /note="Nucleotide may be methylated to form 5-methylcytosine"
agcccagggtgtggacgagtgggctgggcttggtcgtcagagccaaggcggctgcagcagcgtcttcctcctcctaagaggcggctgtagtggccatgcgggacgagggacttccttgctgc

SEQ ID NO: 17776 - DNA, 122 bp, Homo sapiens
  misc_feature (61)..(62): /note="This region represents a CpG dinucleotide"
  misc_feature (61)..(61): /note="Nucleotide may be methylated to form 5-methylcytosine"
cctagctgcaggcaaaagccttgaggctgagtcccttctgtggcatggtggacagactctcgctcatcacagccgggcttgtcacgggagctcctcctccacacccctccctaagctgcctg

SEQ ID NO: 17777 - DNA, 122 bp, Homo sapiens
  misc_feature (61)..(62): /note="This region represents a CpG dinucleotide"
  misc_feature (61)..(61): /note="Nucleotide may be methylated to form 5-methylcytosine"
agctttgataattgctgttcttgtcattgcggtaaatgaggaaacaggcatgaaaggttacgtgctcagccacagccacagagctagtcagtagctggaagagctatgactcaaacatgttt

SEQ ID NO: 17778 - DNA, 122 bp, Homo sapiens
  misc_feature (61)..(62): /note="This region represents a CpG dinucleotide"
  misc_feature (61)..(61): /note="Nucleotide may be methylated to form 5-methylcytosine"
aactggaattgaagcatcaactgaagatttctgtgcaactgtggtttaaattgaatgctgcgctttgtataaacataattttttgtggtttaactttaggctgttctctgcggtcttcccat

SEQ ID NO: 17779 - DNA, 122 bp, Homo sapiens
  misc_feature (61)..(62): /note="This region represents a CpG dinucleotide"
  misc_feature (61)..(61): /note="Nucleotide may be methylated to form 5-methylcytosine"
ttcactttcaaacctgtccacgttgtttccctgtcagagccaatgtttgcttacaagtctcgtctcatcagtacgagaaaggcaatccttaacttttacctaaccccggagaaagtttcatt

SEQ ID NO: 17780 - DNA, 122 bp, Homo sapiens
  misc_feature (61)..(62): /note="This region represents a CpG dinucleotide"
  misc_feature (61)..(61): /note="Nucleotide may be methylated to form 5-methylcytosine"
gctttgcaaaattttagtatagctcaggcctcatgtggaacaggtgggggcggggagacgcggggttgaataaagcagcccagtggatcctggttgcaaaaatacattttctttagtaaact

SEQ ID NO: 17781 - DNA, 122 bp, Homo sapiens
  misc_feature (61)..(62): /note="This region represents a CpG dinucleotide"
  misc_feature (61)..(61): /note="Nucleotide may be methylated to form 5-methylcytosine"
tgagatcgtgccactacactccagtcaccactgggtgacagctgagccagagcgaaactccgtctcaaaaaaaaaaaaaaaatttttttttctttcccttagttattccctagtgatccctt

SEQ ID NO: 17782 - DNA, 122 bp, Homo sapiens
  misc_feature (61)..(62): /note="This region represents a CpG dinucleotide"
  misc_feature (61)..(61): /note="Nucleotide may be methylated to form 5-methylcytosine"
aatctcctggatagtgtttctttaactgggctcgagccccacagtaaagtcttggtcctccgccggccagagcccacatctctgattcagcaacaggggcaggtgttcagggcaatctgggt

SEQ ID NO: 17783 - DNA, 122 bp, Homo sapiens
  misc_feature (61)..(62): /note="This region represents a CpG dinucleotide"
  misc_feature (61)..(61): /note="Nucleotide may be methylated to form 5-methylcytosine"
tgacaagtgctcctccagccgtgagatgagccagaggatggaatgccacaggccccacttcgtctcccagcccttcatctttcttccatgtccaaaggcggctccccagaggccaagggctc

SEQ ID NO: 17784 - DNA, 122 bp, Homo sapiens
  misc_feature (61)..(62): /note="This region represents a CpG dinucleotide"
  misc_feature (61)..(61): /note="Nucleotide may be methylated to form 5-methylcytosine"
atcaacacaacaggtgcattaaattttttgaatcagaactctgtttgctgattcataaaccggccagtatgcaacaagaatatgatgcatcagataaagcattctgtaatcttcatgcagta

SEQ ID NO: 17785 - DNA, 122 bp, Homo sapiens
  misc_feature (61)..(62): /note="This region represents a CpG dinucleotide"
  misc_feature (61)..(61): /note="Nucleotide may be methylated to form 5-methylcytosine"
gtgccattgaaaacaaaaacaaaaaccaaccaacaaacaaaaaaacaaacaaaaagaaaacgatactcagtctttatagggaggttggccagtcaataggttactttatgagttgctaaccc

SEQ ID NO: 17786 - DNA, 122 bp, Homo sapiens
  misc_feature (61)..(62): /note="This region represents a CpG dinucleotide"
  misc_feature (61)..(61): /note="Nucleotide may be methylated to form 5-methylcytosine"
gatcccactcctgtgggacctgagggtgggagatggggtgccaggcagccagtggtagaacgtttaagactcaggcattcaatggagaccaagccttggcctattagggccaccggaccctg

SEQ ID NO: 17787 - DNA, 122 bp, Homo sapiens
  misc_feature (61)..(62): /note="This region represents a CpG dinucleotide"
  misc_feature (61)..(61): /note="Nucleotide may be methylated to form 5-methylcytosine"
ctcacagtcccagcactacctcgtggaagacgatgagaaacacagatgacagttcgggagcggggttctgccacataacagacactgaagagagtctctgtaatttctttaattattcaaac

SEQ ID NO: 17788 - DNA, 122 bp, Homo sapiens
  misc_feature (61)..(62): /note="This region represents a CpG dinucleotide"
  misc_feature (61)..(61): /note="Nucleotide may be methylated to form 5-methylcytosine"
aaggaaggaaggaaggaaggaaacaagtgttggtgaggatgtggagaaattggaaccttgcgtctgctggtgggaatgtgaaatgttagagcctctgtggaaaacagtgtggtggttcctaa

SEQ ID NO: 17789 - DNA, 122 bp, Homo sapiens
  misc_feature (61)..(62): /note="This region represents a CpG dinucleotide"
  misc_feature (61)..(61): /note="Nucleotide may be methylated to form 5-methylcytosine"
gtaatcttaatgctgcttaatgtccataacacgctaaataagcctcattccggttgatatcgaagttcagaatgattggctgatgtcatagttgctcatgctacctagtggattttcactga

SEQ ID NO: 17790 - DNA, 122 bp, Homo sapiens
  misc_feature (61)..(62): /note="This region represents a CpG dinucleotide"
  misc_feature (61)..(61): /note="Nucleotide may be methylated to form 5-methylcytosine"
gtcttaagggaacgcagcagtgctaggatgctggcaaggcattgtcccttattacccccacggaggcttctgagagcagttgcatagcagcagttttatttcagttaccactcattcacagc

SEQ ID NO: 17791 - DNA, 122 bp, Homo sapiens
  misc_feature (61)..(62): /note="This region represents a CpG dinucleotide"
  misc_feature (61)..(61): /note="Nucleotide may be methylated to form 5-methylcytosine"
gaggggtggccctgccgcattcactttctttttccccagagccagtttcttctggtcctgcgccttcctctcccttctgccttgtgtttccttctggggaactcgacttcttttgactctta

SEQ ID NO: 17792 - DNA, 122 bp, Homo sapiens
  misc_feature (61)..(62): /note="This region represents a CpG dinucleotide"
  misc_feature (61)..(61): /note="Nucleotide may be methylated to form 5-methylcytosine"
tcaatttacatgaccatgaggaaactgaaacctagcgaagttaaatgacttgcccggggacggacagctagctagttcctgcttgaactgaggaccatctatttggttaccgggagtgtggc

SEQ ID NO: 17793 - DNA, 122 bp, Homo sapiens
  misc_feature (61)..(62): /note="This region represents a CpG dinucleotide"
  misc_feature (61)..(61): /note="Nucleotide may be methylated to form 5-methylcytosine"
tgtccaccccccaccaattcatatgctgaaaccctaattcccaatgtgactatatttggacgtagggcctttaaggaagtagttaaggttaaataaggtcatacgggtgagccctattccaa

SEQ ID NO: 17794 - DNA, 122 bp, Homo sapiens
  misc_feature (61)..(62): /note="This region represents a CpG dinucleotide"
  misc_feature (61)..(61): /note="Nucleotide may be methylated to form 5-methylcytosine"
agataagtatcggaatctgtcattttctgctttggatgtatgcctaaacagccaaagaagcgcatcaaaaccaaggaaaaaaatgtggaaaggccaacctaaatgtatatagggtatagtcc

SEQ ID NO: 17795 - DNA, 122 bp, Homo sapiens
  misc_feature (61)..(62): /note="This region represents a CpG dinucleotide"
  misc_feature (61)..(61): /note="Nucleotide may be methylated to form 5-methylcytosine"
agtgtacacacatatctgaaacatgcaccaagagctgagccagcaacaccagtgccaccccgagcagcagccaggggcctcactctcctggtgagagctgacctgtccctgctgggtattcc

SEQ ID NO: 17796 - DNA, 122 bp, Homo sapiens
  misc_feature (61)..(62): /note="This region represents a CpG dinucleotide"
  misc_feature (61)..(61): /note="Nucleotide may be methylated to form 5-methylcytosine"
ctctgcaatggctgctggggactgtgtctgttgcaaggaggctcccctgcagtgaggagccggggcactgcaagtctgttccatagcagccctttttgcaaatggtagttgatttttgcaga

SEQ ID NO: 17797 - DNA, 122 bp, Homo sapiens
  misc_feature (61)..(62): /note="This region represents a CpG dinucleotide"
  misc_feature (61)..(61): /note="Nucleotide may be methylated to form 5-methylcytosine"
atctcacattggtgtaatcataccatgtctgtctctttttgaatgtcttattttactcaacgtaatgtttgcaggctttgtctttattgtaagatgagtgacacccactttcatttcctgtt

SEQ ID NO: 17798 - DNA, 122 bp, Homo sapiens
  misc_feature (61)..(62): /note="This region represents a CpG dinucleotide"
  misc_feature (61)..(61): /note="Nucleotide may be methylated to form 5-methylcytosine"
gtcactgagccagcagacagtctggcttcagagcttgtgttcccagctcctgtgggaagccgttctcactacccccaccagaaggttcgtgaaggtttatggaagaccagacaggctgggag

SEQ ID NO: 17799 - DNA, 122 bp, Homo sapiens
  misc_feature (61)..(62): /note="This region represents a CpG dinucleotide"
  misc_feature (61)..(61): /note="Nucleotide may be methylated to form 5-methylcytosine"
ttttgctgaagccaccttgagttgatttctgttccttgcaaccacaagaatcctaacttacgagtagcaaaactatgattagagttataaacaatccttacatgcgtttaacactgtgcaca

SEQ ID NO: 17800 - DNA, 122 bp, Homo sapiens
  misc_feature (61)..(62): /note="This region represents a CpG dinucleotide"
  misc_feature (61)..(61): /note="Nucleotide may be methylated to form 5-methylcytosine"
tacaaacagcttgtacatacccttaagcactacaaaagcatccctgtcttatgactaatacgtaaagccattcttgtttaactgaaggcaatctaagggtgccttctctcatggcagtacca

SEQ ID NO: 17801 - DNA, 122 bp, Homo sapiens
  misc_feature (61)..(62): /note="This region represents a CpG dinucleotide"
  misc_feature (61)..(61): /note="Nucleotide may be methylated to form 5-methylcytosine"
tcctgctccattgatgagccaatgaccttgctatcaactcagaagttgatcctgtcacctcgctcttacctcacctacaaaatgcactcagtcactaaggcctgctaatccaacctcttaaa

SEQ ID NO: 17802 - DNA, 122 bp, Homo sapiens
  misc_feature (61)..(62): /note="This region represents a CpG dinucleotide"
  misc_feature (61)..(61): /note="Nucleotide may be methylated to form 5-methylcytosine"
gctggtgccagcctggcggcccttccctgctattagagttatcttatttcaggagaacttcgaattacaatacacttatcttcattgcagcactgttaatggaagacattttcaggaactgg

SEQ ID NO: 17803 - DNA, 122 bp, Homo sapiens
  misc_feature (61)..(62): /note="This region represents a CpG dinucleotide"
  misc_feature (61)..(61): /note="Nucleotide may be methylated to form 5-methylcytosine"
ttgccagcagacctccaataaaggaattctaagttcagagagaaggaaattattttcaaacggaaggtctgagaagctagaaggaatgaagaacaaaaagtgttaaatatgtatgtacatgt

SEQ ID NO: 17804 - DNA, 122 bp, Homo sapiens
  misc_feature (61)..(62): /note="This region represents a CpG dinucleotide"
  misc_feature (61)..(61): /note="Nucleotide may be methylated to form 5-methylcytosine"
acagaataacgtgacagtggaattgcagaaggtcaggggtggttgtttcaatgagagaatcgtcaaatattaattctggaacgtccagatgagtaggcattgagggggattagctggctgct

SEQ ID NO: 17805 - DNA, 122 bp, Homo sapiens
  misc_feature (61)..(62): /note="This region represents a CpG dinucleotide"
  misc_feature (61)..(61): /note="Nucleotide may be methylated to form 5-methylcytosine"
aaatgaaggaacactttttttaatgctggagagtggccacatctcccagggaagcaggaacgcagggccgggaaggagccgcagcagcttcagagtccgggggggtttccatagattaagag

SEQ ID NO: 17806 - DNA, 122 bp, Homo sapiens
  misc_feature (61)..(62): /note="This region represents a CpG dinucleotide"
  misc_feature (61)..(61): /note="Nucleotide may be methylated to form 5-methylcytosine"
ggatgccccctgcactctgcacagtgcagggagcaaggaatgagtgaggaggggtgagagcgcagtcacacaattgttgcctggctgttctgtgagcaactgactcagacatttatttgtgt

SEQ ID NO: 17807 - DNA, 122 bp, Homo sapiens
  misc_feature (61)..(62): /note="This region represents a CpG dinucleotide"
  misc_feature (61)..(61): /note="Nucleotide may be methylated to form 5-methylcytosine"
tgtggctccccaagtcccgcctctcttctcagagctcacctgtgtccctccttaggatggcgccgccttttcaagggctgagcactggctcccctccaggccccgcccccggtcccctggcc

SEQ ID NO: 17808 - DNA, 122 bp, Homo sapiens
  misc_feature (61)..(62): /note="This region represents a CpG dinucleotide"
  misc_feature (61)..(61): /note="Nucleotide may be methylated to form 5-methylcytosine"
gacttccacacagggtgatgtaaatatcgcacggggcaatgggtgagaaagtacctggaacgctttagggtgtgccataggtgcactgagtcatgctggtctccacccaactcctctcgggg

SEQ ID NO: 17809 - DNA, 122 bp, Homo sapiens
  misc_feature (61)..(62): /note="This region represents a CpG dinucleotide"
  misc_feature (61)..(61): /note="Nucleotide may be methylated to form 5-methylcytosine"
tggtgtgcattttaattttaacacaccagaagatatgctatgtgaacctagtaagcttaccgcaactgcaatgttccaaagttaagagacaataatttcaacaaaaacaaggaaaaggaggt

SEQ ID NO: 17810 - DNA, 122 bp, Homo sapiens
  misc_feature (61)..(62): /note="This region represents a CpG dinucleotide"
  misc_feature (61)..(61): /note="Nucleotide may be methylated to form 5-methylcytosine"
aatctagagatcaagaaaaaagtccacagccttacagaaaaatgggcaaagaacaaccaacggtgtacagaaatggaaatacccaatggttcttaaatatatgaaaagatgttcaactctca

SEQ ID NO: 17811 - DNA, 122 bp, Homo sapiens
  misc_feature (61)..(62): /note="This region represents a CpG dinucleotide"
  misc_feature (61)..(61): /note="Nucleotide may be methylated to form 5-methylcytosine"
agccttcacttcctctggtcgaggtctagaatctgagacctaaatgaatttggttgacaccgtctctgtggctggtggaattttggggaaggtgggcagggccaagtggatatcgctgccgc

SEQ ID NO: 17812 - DNA, 122 bp, Homo sapiens
  misc_feature (61)..(62): /note="This region represents a CpG dinucleotide"
  misc_feature (61)..(61): /note="Nucleotide may be methylated to form 5-methylcytosine"
tgtggtgattaattatctgtgtacagtgacaacagcttcccctgcaggagagattgtcaccgtcacagtggggatggagatagaaacatttccagagcttcagaggcagctcgagggagccc

SEQ ID NO: 17813 - DNA, 122 bp, Homo sapiens
  misc_feature (61)..(62): /note="This region represents a CpG dinucleotide"
  misc_feature (61)..(61): /note="Nucleotide may be methylated to form 5-methylcytosine"
ccagaggattggctcacagtcctttcctttgtcttcctttgtcttagctgggattataggcgtgcactaccacgcccggctaatttttgtatttttagtagagacagggttttgccatgttg

SEQ ID NO: 17814 - DNA, 122 bp, Homo sapiens
  misc_feature (61)..(62): /note="This region represents a CpG dinucleotide"
  misc_feature (61)..(61): /note="Nucleotide may be methylated to form 5-methylcytosine"
ttcactgaggtcttgtgtataagatttaattcctacttacttcatgggagaagtaagatgcgaagctgttattagtcacatttaccttggtgtgaataagtacccagctggcttggagaaag

SEQ ID NO: 17815 - DNA, 122 bp, Homo sapiens
  misc_feature (61)..(62): /note="This region represents a CpG dinucleotide"
  misc_feature (61)..(61): /note="Nucleotide may be methylated to form 5-methylcytosine"
aagtgaatcaccctgtccctgtatggcctctgagagatggtgctgctgctatgtgtctttcgaattgtatttgcagggttcatgggggttgaccttttcctctcaggaactgtatctgaaac

SEQ ID NO: 17816 - DNA, 122 bp, Homo sapiens
  misc_feature (61)..(62): /note="This region represents a CpG dinucleotide"
  misc_feature (61)..(61): /note="Nucleotide may be methylated to form 5-methylcytosine"
agcaatcttttcgtgagtcagatgattaaggaatcgacaggcagcctcctctgccagcaccgcccagtgcccgtgggccaatgcgtgtgccttcgtctctgacgtcacttgtttttcaccag

SEQ ID NO: 17817 - DNA, 122 bp, Homo sapiens
  misc_feature (61)..(62): /note="This region represents a CpG dinucleotide"
  misc_feature (61)..(61): /note="Nucleotide may be methylated to form 5-methylcytosine"
gtgatttaagaaacaatgtggattattgatgaaatcttaaagtgatttggaggtgaaatgcgtcagtggtttgtagtgactttgaaacactatacagtaggttcacatggtttaagaagcat

SEQ ID NO: 17818 - DNA, 122 bp, Homo sapiens
  misc_feature (61)..(62): /note="This region represents a CpG dinucleotide"
  misc_feature (61)..(61): /note="Nucleotide may be methylated to form 5-methylcytosine"
tttgactccaggggccctggccttagcagtgcatacactgcttctgactgcagctagagacgaatgagaaacgggagggtgcgtccctgggtatccccctcacccctccccagcctgcctaa

SEQ ID NO: 17819 - DNA, 122 bp, Homo sapiens
  misc_feature (61)..(62): /note="This region represents a CpG dinucleotide"
  misc_feature (61)..(61): /note="Nucleotide may be methylated to form 5-methylcytosine"
agctttggggagactttaaaggctttagggatccccaaagatcctacctctctcaccatccgtcaactctgctatgccctccctgagccacaccccctaagaggtacccacttctggatggg

SEQ ID NO: 17820 - DNA, 122 bp, Homo sapiens
  misc_feature (61)..(62): /note="This region represents a CpG dinucleotide"
  misc_feature (61)..(61): /note="Nucleotide may be methylated to form 5-methylcytosine"
taaatggaaaagaatttagtataaaggtcagtccagagtaggaacaattaaaaagagggacgcaagctgttgccaactgtgaaaactaaaactcacattaaaaactaggcctttgcttagaa

SEQ ID NO: 17821 - DNA, 122 bp, Homo sapiens
  misc_feature (61)..(62): /note="This region represents a CpG dinucleotide"
  misc_feature (61)..(61): /note="Nucleotide may be methylated to form 5-methylcytosine"
ggcaccatccaaaaaggcaaataaatgccgaggtcacataagtgtcatacatctctggggcgatacactgcttaacagcaagtgagatcaagtttcaggttggatttgggcgagtgtgtgtg

SEQ ID NO: 17822 - DNA, 122 bp, Homo sapiens
  misc_feature (61)..(62): /note="This region represents a CpG dinucleotide"
  misc_feature (61)..(61): /note="Nucleotide may be methylated to form 5-methylcytosine"
ggtcccgccggtggctgccctctgcctcccccgcacactccgcgcattgtttgggactgtcgggaagacgcctcgcacctcacaaatcatttaagcacctcagtctgacgcctgcagtcatt

SEQ ID NO: 17823 - DNA, 122 bp, Homo sapiens
  misc_feature (61)..(62): /note="This region represents a CpG dinucleotide"
  misc_feature (61)..(61): /note="Nucleotide may be methylated to form 5-methylcytosine"
atgccatgttcttctttacttcttattcgaattcttatattgttgaatgaaagaaacaaacgtggcatcttttagctgtgtagggaattattgggaagacaaagcaatttactggttttgtt

SEQ ID NO: 17824 - DNA, 122 bp, Homo sapiens
  misc_feature (61)..(62): /note="This region represents a CpG dinucleotide"
  misc_feature (61)..(61): /note="Nucleotide may be methylated to form 5-methylcytosine"
ctgattgtgccccatcccactccttctcttcctttctctgtgccaccaggaagctgattacgacagaatatactgccacatcacccacgctcccgtgtcagaggcttaccaccattgctggt

SEQ ID NO: 17825 - DNA, 122 bp, Homo sapiens
  misc_feature (61)..(62): /note="This region represents a CpG dinucleotide"
  misc_feature (61)..(61): /note="Nucleotide may be methylated to form 5-methylcytosine"
caccccccactctcgcttcccctctcaaacttctcggactcaggtggaattctgctcctgcgctctgccctagggttggggggggagctggttgtggagctggggggaggcggagcctgggc

SEQ ID NO: 17826 - DNA, 122 bp, Homo sapiens
  misc_feature (61)..(62): /note="This region represents a CpG dinucleotide"
  misc_feature (61)..(61): /note="Nucleotide may be methylated to form 5-methylcytosine"
aatctaggtgatgccctggacagcagcaactccatgcaaaccatcaaaaagaccaccacccgccagagaatggatggcaaagtgctgtctgagaccaatgacaccaaattgagacattaagc

SEQ ID NO: 17827 - DNA, 122 bp, Homo sapiens
  misc_feature (61)..(62): /note="This region represents a CpG dinucleotide"
  misc_feature (61)..(61): /note="Nucleotide may be methylated to form 5-methylcytosine"
attcagaccttattaggtgtattacatcaaaatccctgtcaccttttcactaccaccccccgcccccgccgacccagccccaaatcccctatccaaccccaaatccccgatccaacccccaa

SEQ ID NO: 17828 - DNA, 122 bp, Homo sapiens
  misc_feature (61)..(62): /note="This region represents a CpG dinucleotide"
  misc_feature (61)..(61): /note="Nucleotide may be methylated to form 5-methylcytosine"
ggagaaagggtcgcgccgggcagccgcgaaagcaaggcttccccacgtctgttgacaggacggccgcctctctacttccgctggctacggcctctacgcagtagaggtaccgcgtctgtggg

SEQ ID NO: 17829 - DNA, 122 bp, Homo sapiens
  misc_feature (61)..(62): /note="This region represents a CpG dinucleotide"
  misc_feature (61)..(61): /note="Nucleotide may be methylated to form 5-methylcytosine"
ccgattctcttctgcccagctctctcccctctacttcagactcccatttcaactgccttccgagcatttccacctggaagtcctcaagcacctggaactcaacatccaaaacagaaaactca

SEQ ID NO: 17830 - DNA, 122 bp, Homo sapiens
  misc_feature (61)..(62): /note="This region represents a CpG dinucleotide"
  misc_feature (61)..(61): /note="Nucleotide may be methylated to form 5-methylcytosine"
ttgtgtcttcattctcaagttgacagccttgaacactgatgctgctgctttctcatttctcgtatagttctaggacattatatgtattgtgcatgtatgtatgctgttaaacatatgtatgt

SEQ ID NO: 17831 - DNA, 122 bp, Homo sapiens
  misc_feature (61)..(62): /note="This region represents a CpG dinucleotide"
  misc_feature (61)..(61): /note="Nucleotide may be methylated to form 5-methylcytosine"
ctctgtgatgttcacacaatgatgaaattgcctaatgatgcactgctcaggatgtatccccgtcattaagcaacgatgactgtatttcccattatccttgtcagtgcttggtaataccataa

SEQ ID NO: 17832 - DNA, 122 bp, Homo sapiens
  misc_feature (61)..(62): /note="This region represents a CpG dinucleotide"
  misc_feature (61)..(61): /note="Nucleotide may be methylated to form 5-methylcytosine"
tgtttaaaagaaatctgcaaaaagcctgggagtggggatgcctgtgggcagttcttccagcgcagtgttcctctgtttcctgattgcagggagcattgagtcatcatctgacaggcataaat

SEQ ID NO: 17833 - DNA, 122 bp, Homo sapiens
  misc_feature (61)..(62): /note="This region represents a CpG dinucleotide"
  misc_feature (61)..(61): /note="Nucleotide may be methylated to form 5-methylcytosine"
cctcttcaaacaggacagagctcacacccctttccaggtaaaggtgtgtgtgtgtgtgtacgtgcacgcacgcgcgcgctgatggcaatgtcggctgcctcactcattctattcctagtcca

SEQ ID NO: 17834 - DNA, 122 bp, Homo sapiens
  misc_feature (61)..(62): /note="This region represents a CpG dinucleotide"
  misc_feature (61)..(61): /note="Nucleotide may be methylated to form 5-methylcytosine"
ctcggaacaggataatacaagaaggaaccactgcaagtgaaatccagccaccagtaatgccgagaggccaggcctgtgcctcccaaaacctgctcctccgcaggcttccccggcccatctcc

SEQ ID NO: 17835 - DNA, 122 bp, Homo sapiens
  misc_feature (61)..(62): /note="This region represents a CpG dinucleotide"
  misc_feature (61)..(61): /note="Nucleotide may be methylated to form 5-methylcytosine"
cctttttggggtcatttcaaaatcagtcaagagaattattagtctgttagacttcctctacggttaggattatttttataggtgttcgaacaggaaaggacatagaataaaatctcctcccc

SEQ ID NO: 17836 - DNA, 122 bp, Homo sapiens
  misc_feature (61)..(62): /note="This region represents a CpG dinucleotide"
  misc_feature (61)..(61): /note="Nucleotide may be methylated to form 5-methylcytosine"
cttcctccactgaacaataaccatgtcgaccggcaatatcagaaaggtcatccggtgaagcgttcactctgcagttgtgcaccactgggttttgagagtgctggctaaatattttaagtgat

SEQ ID NO: 17837 - DNA, 122 bp, Homo sapiens
  misc_feature (61)..(62): /note="This region represents a CpG dinucleotide"
  misc_feature (61)..(61): /note="Nucleotide may be methylated to form 5-methylcytosine"
gcagtctgagttccgagctagcgtcctgctgagctgaaggagcatctccagtggagaagacggcccgatggcaccgttccatttcagcagcagcaaaagaagctctgattggtataatgcac

SEQ ID NO: 17838 - DNA, 122 bp, Homo sapiens
  misc_feature (61)..(62): /note="This region represents a CpG dinucleotide"
  misc_feature (61)..(61): /note="Nucleotide may be methylated to form 5-methylcytosine"
tcagacacaatctaacccaatgagtcaaagcaacagagtggtgacagaggaaaagcctatcgagtgcacagatctctcagcaagagcaggcccaggaagtcagaaaagctgagtggtgggaa

SEQ ID NO: 17839 - DNA, 122 bp, Homo sapiens
  misc_feature (61)..(62): /note="This region represents a CpG dinucleotide"
  misc_feature (61)..(61): /note="Nucleotide may be methylated to form 5-methylcytosine"
tggactaacttttatgcaacacaggaggcctcagcctgacattcaaggctggactcagaccgcccaacccatttcctggactaacttttatgcaacacaagaggcctcagcctgacattcaa

SEQ ID NO: 17840 - DNA, 122 bp, Homo sapiens
  misc_feature (61)..(62): /note="This region represents a CpG dinucleotide"
  misc_feature (61)..(61): /note="Nucleotide may be methylated to form 5-methylcytosine"
tgaatcttctgatgccacctaagtgagcaccaacacaaaccaatgtcaaaaagtttctgccgagatgagtaaggaacaaaaattgcactgccaggaagggtaactatttttgaatagcaatt

SEQ ID NO: 17841 - DNA, 122 bp, Homo sapiens
  misc_feature (61)..(62): /note="This region represents a CpG dinucleotide"
  misc_feature (61)..(61): /note="Nucleotide may be methylated to form 5-methylcytosine"
agcgttttagtctgttctgctaacaatcggtgtttctcagtgccaaccagtcacagcacgcgcggcgcccagcccctggtttctaaaccccattctgtcgtcccgggacgaatgtcttggga

SEQ ID NO: 17842 - DNA, 122 bp, Homo sapiens
  misc_feature (61)..(62): /note="This region represents a CpG dinucleotide"
  misc_feature (61)..(61): /note="Nucleotide may be methylated to form 5-methylcytosine"
gacagccctcacaccacactcagcccctcactcacgcatacatcccaacaagtcacggagcgggaggacgccttttcacatagattcctcgcaggcacgcacatttcacacacaggcccaca

SEQ ID NO: 17843 - DNA, 122 bp, Homo sapiens
  misc_feature (61)..(62): /note="This region represents a CpG dinucleotide"
  misc_feature (61)..(61): /note="Nucleotide may be methylated to form 5-methylcytosine"
gataaatgctttatttggtcaaaaactggaagctgacgctccacttaagagtctaggtcacgcggcaagccagacacttgaaggagcttaaagctttctgttcttaatagtattttagacac

SEQ ID NO: 17844 - DNA, 122 bp, Homo sapiens
  misc_feature (61)..(62): /note="This region represents a CpG dinucleotide"
  misc_feature (61)..(61): /note="Nucleotide may be methylated to form 5-methylcytosine"
cagccccttcaacctcccacactacagcccctcctacccgcccatcacccgctcacagtacgactacaccgaccaccagaactccagctcctactacagccacgcggcaggccagggcaccg

SEQ ID NO: 17845 - DNA, 122 bp, Homo sapiens
  misc_feature (61)..(62): /note="This region represents a CpG dinucleotide"
  misc_feature (61)..(61): /note="Nucleotide may be methylated to form 5-methylcytosine"
aggttaaggaagcttgccatttcccttttcagagcagtcctttcaacaataccaagaattcgcactttggtagataatgacaagaaatacgacagcccagccgttagtaaacaagcaaatca

SEQ ID NO: 17846 - DNA, 122 bp, Homo sapiens
  misc_feature (61)..(62): /note="This region represents a CpG dinucleotide"
  misc_feature (61)..(61): /note="Nucleotide may be methylated to form 5-methylcytosine"
aagatagaagaggaagtcagctgtagcaagcaaacacatagacctgggctgtgggaccctcggaagggatatggagccaagctcttggagtgcctgaggaattagcccaaggagctttggct

SEQ ID NO: 17847 - DNA, 122 bp, Homo sapiens
  misc_feature (61)..(62): /note="This region represents a CpG dinucleotide"
  misc_feature (61)..(61): /note="Nucleotide may be methylated to form 5-methylcytosine"
gtctgaggccagggttgtcatctgatgctgggtcacaatctctagatccccttggggtcccgcccaacagtgacatactcatgccctattctttctctttattgagaaggaaatagtataag

SEQ ID NO: 17848 - DNA, 122 bp, Homo sapiens
  misc_feature (61)..(62): /note="This region represents a CpG dinucleotide"
  misc_feature (61)..(61): /note="Nucleotide may be methylated to form 5-methylcytosine"
acacatttgagccagtgggtaggatgaaacagaaaagcagcctgggattcaacattttcccgaatggaatatattctaattgggctttcctgccacagagagcctaagagacgatttttgct

SEQ ID NO: 17849 - DNA, 122 bp, Homo sapiens
  misc_feature (61)..(62): /note="This region represents a CpG dinucleotide"
  misc_feature (61)..(61): /note="Nucleotide may be methylated to form 5-methylcytosine"
cctttggcacaatctagaagtaagcagagaagggggttaagatgcctttcattatgttaacgtttaatcctgagagtttacataaaaagccagatttctgggtctttgagaaaaatgagatc

SEQ ID NO: 17850 - DNA, 122 bp, Homo sapiens
  misc_feature (61)..(62): /note="This region represents a CpG dinucleotide"
  misc_feature (61)..(61): /note="Nucleotide may be methylated to form 5-methylcytosine"
tcgcttttccctcctgaattcttggagatctgtccttggggcaggttgagccaccagcttcgtgtgtgtgtgtgtgtgtgtgtgtgtgtgtgttcgtgtttgtgtgggtgtttgtgttcgtg

SEQ ID NO: 17851 - DNA, 122 bp, Homo sapiens
  misc_feature (61)..(62): /note="This region represents a CpG dinucleotide"
  misc_feature (61)..(61): /note="Nucleotide may be methylated to form 5-methylcytosine"
tatttccttgtattctgtcaaacaactgtctcttggtttaaatacttttctgctggtcttcgctctctctctctcctcttctggtttattttcatccagatgtggattttccccaaagtttc

SEQ ID NO: 17852 - DNA, 122 bp, Homo sapiens
  misc_feature (61)..(62): /note="This region represents a CpG dinucleotide"
  misc_feature (61)..(61): /note="Nucleotide may be methylated to form 5-methylcytosine"
ctgtggttttttgcccttcctcctttttccttcttccagtttgtaccacagatatggatacgatgtttggaatgatagagctatcctgagatcatgaagatgacatgaacacacattaaagt

SEQ ID NO: 17853 - DNA, 122 bp, Homo sapiens
  misc_feature (61)..(62): /note="This region represents a CpG dinucleotide"
  misc_feature (61)..(61): /note="Nucleotide may be methylated to form 5-methylcytosine"
tgatgggactcttctgattacctttctctccatagtcaactttggatagggtgctcaggacgttactttttagtttaataaacctttaggtttagttaaccatcttcattttttattaagat

SEQ ID NO: 17854 - DNA, 122 bp, Homo sapiens
  misc_feature (61)..(62): /note="This region represents a CpG dinucleotide"
  misc_feature (61)..(61): /note="Nucleotide may be methylated to form 5-methylcytosine"
ttcacgtttgccatcgcctctttattcctctttactttcctccacagtccccacccctgacgtaactgtatttacttgactcctgtcatgagagagcaagctcaggggagcatagactctta

SEQ ID NO: 17855 - DNA, 122 bp, Homo sapiens
  misc_feature (61)..(62): /note="This region represents a CpG dinucleotide"
  misc_feature (61)..(61): /note="Nucleotide may be methylated to form 5-methylcytosine"
gtaaatgtcccattcttaaacactgagagaagaaagagtgggaggagaatggaagaaatacgctgtcaacagggaacgtgatttcttactcaggctaaaggtatccagggatgaagccaatc

SEQ ID NO: 17856 - DNA, 122 bp, Homo sapiens
  misc_feature (61)..(62): /note="This region represents a CpG dinucleotide"
  misc_feature (61)..(61): /note="Nucleotide may be methylated to form 5-methylcytosine"
aggaaggctgcttcagaatttgacacaaaccatgccactggtttccacaggtatgagttgcgtttccccaattactatagttttgttccgtttgcctatgttattctttgctttatacacat

SEQ ID NO: 17857 - DNA, 122 bp, Homo sapiens
  misc_feature (61)..(62): /note="This region represents a CpG dinucleotide"
  misc_feature (61)..(61): /note="Nucleotide may be methylated to form 5-methylcytosine"
agccatgggccttgttttctgatgggtgatatgcccttgagcagactatctccaggccagcgttaatactcaacacctgtcagctcatggcttctccttattacactgcattcatttcaacg

SEQ ID NO: 17858 - DNA, 122 bp, Homo sapiens
  misc_feature (61)..(62): /note="This region represents a CpG dinucleotide"
  misc_feature (61)..(61): /note="Nucleotide may be methylated to form 5-methylcytosine"
ctctctcttacaaacaaatctgccttttccagatactaaatctaacgagatgacacactacgttctcttgtcaaatacaagtgttgtggattttaatcttaatgtttagcctcaaataatgt

SEQ ID NO: 17859 - DNA, 122 bp, Homo sapiens
  misc_feature (61)..(62): /note="This region represents a CpG dinucleotide"
  misc_feature (61)..(61): /note="Nucleotide may be methylated to form 5-methylcytosine"
ctttgtgcaaagccctgaagatttcccaaaaggaatcagacagtctctgccctctagaaccgtggttgtaggagaagagataaacacaaaacaccacctaaaatatggcaagatgaagtggg

SEQ ID NO: 17860 - DNA, 122 bp, Homo sapiens
  misc_feature (61)..(62): /note="This region represents a CpG dinucleotide"
  misc_feature (61)..(61): /note="Nucleotide may be methylated to form 5-methylcytosine"
ttaagtcggtggatcagtgtcacacaagatgtagtcaggaccagggactttgatggtcctcgatacctggaaggaggaggaggaggacttgctccaggccttagctactgtcaatcttagac

SEQ ID NO: 17861 - DNA, 122 bp, Homo sapiens
  misc_feature (61)..(62): /note="This region represents a CpG dinucleotide"
  misc_feature (61)..(61): /note="Nucleotide may be methylated to form 5-methylcytosine"
aaacatgtagaagggtgaattatttcagcaaagttctactcatccagatgccctaggctacgggcttctgtaggctgctctaatgtgttacaaaaccctcttgggtgaactgggtgtggacg

SEQ ID NO: 17862 - DNA, 122 bp, Homo sapiens
  misc_feature (61)..(62): /note="This region represents a CpG dinucleotide"
  misc_feature (61)..(61): /note="Nucleotide may be methylated to form 5-methylcytosine"
caagactggaggaactacttcagattaaagcaaactaaagagagacacaactaaatgcaacgtgcagtcctggattggacaattggcaaaaagggaacatggagggtggattaaatcgtact

SEQ ID NO: 17863 - DNA, 122 bp, Homo sapiens
  misc_feature (61)..(62): /note="This region represents a CpG dinucleotide"
  misc_feature (61)..(61): /note="Nucleotide may be methylated to form 5-methylcytosine"
cttccttccttctatgacttatctcagaatgacgttacaattgttattgtgtttgagtgccgacgctgaggcattggctagaaacttctataattaggtgttttctgacactagacaaaatt

SEQ ID NO: 17864 - DNA, 122 bp, Homo sapiens
  misc_feature (61)..(62): /note="This region represents a CpG dinucleotide"
  misc_feature (61)..(61): /note="Nucleotide may be methylated to form 5-methylcytosine"
accaccggcatctcttacctctgaataaggcttcctgcaattctcactcaacagagaagccggtttgatctatttaaatccttccatgcttaaaaccagtctaccaagtcccattgtttagg

SEQ ID NO: 17865 - DNA, 122 bp, Homo sapiens
  misc_feature (61)..(62): /note="This region represents a CpG dinucleotide"
  misc_feature (61)..(61): /note="Nucleotide may be methylated to form 5-methylcytosine"
ctggggccgagtggcgggaagccccctctcatttccaattatcaggcagcagaggcttgacgcacagccagcactgaaggccagagtaggcctggctgtcaccagcattgtttggctccatt

SEQ ID NO: 17866 - DNA, 122 bp, Homo sapiens
  misc_feature (61)..(62): /note="This region represents a CpG dinucleotide"
  misc_feature (61)..(61): /note="Nucleotide may be methylated to form 5-methylcytosine"
gcattttatgaaatcagtgagaaactccagaaaaaggcttctgcctctttttacgagggtcgtatttggagcaaaggagggaagaaaagcatctgtcaatttgataaatcattttcaggaaa

SEQ ID NO: 17867 - DNA, 122 bp, Homo sapiens
  misc_feature (61)..(62): /note="This region represents a CpG dinucleotide"
  misc_feature (61)..(61): /note="Nucleotide may be methylated to form 5-methylcytosine"
ctgggttgagttttggacacataagatttaagttgcctagcgaacatccagcatcagagccgctgagtgatggtgaggtgtatgagggtggagacataaatcatatgacggtatctaaagcc

SEQ ID NO: 17868 - DNA, 122 bp, Homo sapiens
  misc_feature (61)..(62): /note="This region represents a CpG dinucleotide"
  misc_feature (61)..(61): /note="Nucleotide may be methylated to form 5-methylcytosine"
taggggcatcatggatacctggtagcatcaagggctagggttaaaacccgtggagtaatacgccctcctattgtgttcctctcctctaaaaatgaaggtgaaactgtttcaggtgagcgctg

SEQ ID NO: 17869 - DNA, 122 bp, Homo sapiens
  misc_feature (61)..(62): /note="This region represents a CpG dinucleotide"
  misc_feature (61)..(61): /note="Nucleotide may be methylated to form 5-methylcytosine"
gagggaattgaaaggaggtgaacttgcctctctgagccagctctttggctgtctccttcccgatacctgtattagctcctgtgaccacaactactttcccaggaagctgaacagttgatgta

SEQ ID NO: 17870 - DNA, 122 bp, Homo sapiens
  misc_feature (61)..(62): /note="This region represents a CpG dinucleotide"
  misc_feature (61)..(61): /note="Nucleotide may be methylated to form 5-methylcytosine"
tcagtggtttggagattgtaaaatgatgatgttgataatgttgatgtcatttttagctgtcgtaagtgaaacgtgatgttaaatagtgatattatcatgcttactctctcagctactttata

SEQ ID NO: 17871 - DNA, 122 bp, Homo sapiens
  misc_feature (61)..(62): /note="This region represents a CpG dinucleotide"
  misc_feature (61)..(61): /note="Nucleotide may be methylated to form 5-methylcytosine"
tttttccgctgagttctgtccgcagaaaccgttctctggaacagtgcagattgcagattacgtttactacctccgccatgtcccgcccttcagatgtttgaagatgactcttagattccagt

SEQ ID NO: 17872 - DNA, 122 bp, Homo sapiens
  misc_feature (61)..(62): /note="This region represents a CpG dinucleotide"
  misc_feature (61)..(61): /note="Nucleotide may be methylated to form 5-methylcytosine"
attacatttcagagaacaatgtttaggttataaggttcccgtcagagctgtttcacaacacgtgtttacataatctgaagtgaaggcagcagtggactgtaaaaccggccagccaggccagt

SEQ ID NO: 17873 - DNA, 122 bp, Homo sapiens
  misc_feature (61)..(62): /note="This region represents a CpG dinucleotide"
  misc_feature (61)..(61): /note="Nucleotide may be methylated to form 5-methylcytosine"
actctgttaaccccttttctcatctcaacacagtgtaatttagccttctgataatttactcgttcacccacatcatctgagcacccactgtgcaacaggcagcgggccagacactagggaca

SEQ ID NO: 17874 - DNA, 122 bp, Homo sapiens
  misc_feature (61)..(62): /note="This region represents a CpG dinucleotide"
  misc_feature (61)..(61): /note="Nucleotide may be methylated to form 5-methylcytosine"
ataagttccctgacagagggagtcacttgtgtgtgtatgtggtatcctttcccatacctgcggtgttgggctcatggcatccacttaatgaacgcttgctgtcagtcattgatttggagtct

SEQ ID NO: 17875 - DNA, 122 bp, Homo sapiens
  misc_feature (61)..(62): /note="This region represents a CpG dinucleotide"
  misc_feature (61)..(61): /note="Nucleotide may be methylated to form 5-methylcytosine"
aagggagtaatctagccactctggctttctttgcatgcaaaatgtaacagttccttctttcgtctttcagataaaggcagtcttggggaggggaagagaaaagtgcctggcttctccaaatt

SEQ ID NO: 17876 - DNA, 122 bp, Homo sapiens
  misc_feature (61)..(62): /note="This region represents a CpG dinucleotide"
  misc_feature (61)..(61): /note="Nucleotide may be methylated to form 5-methylcytosine"
tctgacttcctacctgcatggaactcaaacatctgctatcaagagattaaactgctctgacgtaggcatcaccctgccctgaggcctggtgctctaaggtgtcctggttacccacagcgctc

SEQ ID NO: 17877 - DNA, 122 bp, Homo sapiens
  misc_feature (61)..(62): /note="This region represents a CpG dinucleotide"
  misc_feature (61)..(61): /note="Nucleotide may be methylated to form 5-methylcytosine"
tttgttcagagataaggagtagtcaagtggcccaggcatgctcctaaacatcctgcaatacgcaggagtccaaaatgtcaatggtgctgagattgagagaaaccctgggctagatgatctct

SEQ ID NO: 17878 - DNA, 122 bp, Homo sapiens
  misc_feature (61)..(62): /note="This region represents a CpG dinucleotide"
  misc_feature (61)..(61): /note="Nucleotide may be methylated to form 5-methylcytosine"
actgcagaggaattgcccatcttaagggcaaaggccatcctatttggtttcaccaaatgccgggcattgatccccaggactggcaagagttggagaagtctagtttccataaatctagaata

SEQ ID NO: 17879 - DNA, 122 bp, Homo sapiens
  misc_feature (61)..(62): /note="This region represents a CpG dinucleotide"
  misc_feature (61)..(61): /note="Nucleotide may be methylated to form 5-methylcytosine"
ctaaaaccaatccaagtctcagttccacccacaggagaagcacagacactgacactgaatcgagctgcaacacggatgaacctgggaaaatgactcatgccacaacatggatgaacctgctg

SEQ ID NO: 17880 - DNA, 122 bp, Homo sapiens
  misc_feature (61)..(62): /note="This region represents a CpG dinucleotide"
  misc_feature (61)..(61): /note="Nucleotide may be methylated to form 5-methylcytosine"
gataatctgtgtgccactatgaaaaggaaataggcagatagccaacacttctttatcaaacgggctggagctgagactgtcagacggagacatggacactacttggtcacagagactagccc

SEQ ID NO: 17881 - DNA, 122 bp, Homo sapiens
  misc_feature (61)..(62): /note="This region represents a CpG dinucleotide"
  misc_feature (61)..(61): /note="Nucleotide may be methylated to form 5-methylcytosine"
ggaggctggaggtaaccagggctgcatttcactacagaggccacccaggacctggcctggcgcctgccccagcacccaggcttatccaatgcccacagggccaacagtgcagaggcattcct

SEQ ID NO: 17882 - DNA, 122 bp, Homo sapiens
  misc_feature (61)..(62): /note="This region represents a CpG dinucleotide"
  misc_feature (61)..(61): /note="Nucleotide may be methylated to form 5-methylcytosine"
gacaggatctgacagctttgtattgctggcatccctgggggcatgagctgttcagtgacacgtcagcctccatctgcctctgtgcagcactagatttgggagggaggcttctcagatctcag

SEQ ID NO: 17883 - DNA, 122 bp, Homo sapiens
  misc_feature (61)..(62): /note="This region represents a CpG dinucleotide"
  misc_feature (61)..(61): /note="Nucleotide may be methylated to form 5-methylcytosine"
tttgagcaccatgagcctgagatagacaagcaggaggagtgaaggcacatgtgatgcactcgtagtctgcataggccattgccacccagtatggctggtggaataggaaactaagctgtttg

SEQ ID NO: 17884 - DNA, 122 bp, Homo sapiens
  misc_feature (61)..(62): /note="This region represents a CpG dinucleotide"
  misc_feature (61)..(61): /note="Nucleotide may be methylated to form 5-methylcytosine"
atttactcagcgctagtcaccatagtatcaaagcatttaacaaaacagttcagcaaatggcgggaagccagaaataggcagcacatggaaactgggaagggaagacctttctcaattgacct

SEQ ID NO: 17885 - DNA, 122 bp, Homo sapiens
  misc_feature (61)..(62): /note="This region represents a CpG dinucleotide"
  misc_feature (61)..(61): /note="Nucleotide may be methylated to form 5-methylcytosine"
gcatttctgacaagttctcaggtgctgctgctgctgattagagaccttatgagttacatccgttctgttgttggtaagaaaaggctggaggggtagatcagaggactttcagataaaaagaa

SEQ ID NO: 17886 - DNA, 122 bp, Homo sapiens
  misc_feature (61)..(62): /note="This region represents a CpG dinucleotide"
  misc_feature (61)..(61): /note="Nucleotide may be methylated to form 5-methylcytosine"
tcacagcatcccaaatgccaaattaatgacattccgccctgcagacaggatgactcagtccgtgccgcagcgatggcttggtgggaggagaggccttgagcgtggtgtcttgttgggatatg

SEQ ID NO: 17887 - DNA, 122 bp, Homo sapiens
  misc_feature (61)..(62): /note="This region represents a CpG dinucleotide"
  misc_feature (61)..(61): /note="Nucleotide may be methylated to form 5-methylcytosine"
gcctgaattaatgaatgctttcaaagttttgcaacagttgaatcaccagttcccatcaagcgtgactgaagcagaattagctcattctgaatgctgaagccatctacacacacacacacaca

SEQ ID NO: 17888 - DNA, 122 bp, Homo sapiens
  misc_feature (61)..(62): /note="This region represents a CpG dinucleotide"
  misc_feature (61)..(61): /note="Nucleotide may be methylated to form 5-methylcytosine"
catgtgctctcccagcacgccctttagttctcctccaatttacagccttgctttttaattcgtttgaaatggtgggctttaaaaataaatttatttttaccctgaatatgctgtgaatgtaa

SEQ ID NO: 17889 - DNA, 122 bp, Homo sapiens
  misc_feature (61)..(62): /note="This region represents a CpG dinucleotide"
  misc_feature (61)..(61): /note="Nucleotide may be methylated to form 5-methylcytosine"
gtttagcactctgccttgaaaataaactgcaactgatgaatattttggtgatcaattatacggggaattcttacagagcctgttttttgtttaaagatcttggaatttctggaaaagattgg

SEQ ID NO: 17890 - DNA, 122 bp, Homo sapiens
  misc_feature (61)..(62): /note="This region represents a CpG dinucleotide"
  misc_feature (61)..(61): /note="Nucleotide may be methylated to form 5-methylcytosine"
gggtcttagaagtaaggtattctataagaaacaagtccctacttcctgatacaaccatcccgtgggagagaaagcagagaaagcaaactgtgctctgttgaatagaactgggagcagaggag

SEQ ID NO: 17891 - DNA, 122 bp, Homo sapiens
  misc_feature (61)..(62): /note="This region represents a CpG dinucleotide"
  misc_feature (61)..(61): /note="Nucleotide may be methylated to form 5-methylcytosine"
gcaacttcctccacaaggtctcccaggagctgaatggaaaagccgagaggaagcaaagggcgtctgaaatctagacagagccagagtagtcacctagactgtctgggatgaaccatcccttg

SEQ ID NO: 17892 - DNA, 122 bp, Homo sapiens
  misc_feature (61)..(62): /note="This region represents a CpG dinucleotide"
  misc_feature (61)..(61): /note="Nucleotide may be methylated to form 5-methylcytosine"
ctgtctattaatctatccaatgaaaccacagtgctggacatcaataaaggaatcacagagcgtgaaatacatgctggtagaaagaaagcagatggacaaatatgaaaagcaaacaaaagtaa

SEQ ID NO: 17893 - DNA, 122 bp, Homo sapiens
  misc_feature (61)..(62): /note="This region represents a CpG dinucleotide"
  misc_feature (61)..(61): /note="Nucleotide may be methylated to form 5-methylcytosine"
aaaagctgtttggttcagcctagaaaggctagtaaacaactctgggtggtgcagggcctacggaaccaccctcacttcccctagcctgaatttgcacgtaaatccagcaggagacaaagtta

SEQ ID NO: 17894 - DNA, 122 bp, Homo sapiens
  misc_feature (61)..(62): /note="This region represents a CpG dinucleotide"
  misc_feature (61)..(61): /note="Nucleotide may be methylated to form 5-methylcytosine"
caaattcttccagtggttggtccctgtgcatctgttaatcagttcactcacagcagagcacgtagttacactgtctctttgtcctccacctgacattttatagaagtgaacaatcgaaagaa

SEQ ID NO: 17895 - DNA, 122 bp, Homo sapiens
  misc_feature (61)..(62): /note="This region represents a CpG dinucleotide"
  misc_feature (61)..(61): /note="Nucleotide may be methylated to form 5-methylcytosine"
tttcctctctttgaccccagctgcctgcatctcctccccgcagatgcccaagggagttggcgtgattaccagaaggaagcagaatgtggccaaaggccaaggcaactctagtggcaggaacc

SEQ ID NO: 17896 - DNA, 122 bp, Homo sapiens
  misc_feature (61)..(62): /note="This region represents a CpG dinucleotide"
  misc_feature (61)..(61): /note="Nucleotide may be methylated to form 5-methylcytosine"
ttagcagaggaaaaggaaagttttcacgttgagatcgagaaggaagatgattcatggtcacgaagggaaaggtcccctgaagtcttgagagatggctcaccactgctccactttcctttggg

SEQ ID NO: 17897 - DNA, 122 bp, Homo sapiens
  misc_feature (61)..(62): /note="This region represents a CpG dinucleotide"
  misc_feature (61)..(61): /note="Nucleotide may be methylated to form 5-methylcytosine"
ttgctaagggaaatgaaaagcttacaagaaaacacattttggttgtgtaacagacacggacgatgccagacaactgtctgggttcatgtaaagtcagagggggaattacacaaacagggata

SEQ ID NO: 17898 - DNA, 122 bp, Homo sapiens
  misc_feature (61)..(62): /note="This region represents a CpG dinucleotide"
  misc_feature (61)..(61): /note="Nucleotide may be methylated to form 5-methylcytosine"
ttctgagcctgtttcctcatctataaagtggcaatcacaatcccggttttaaaaagcggccgtgaggctatgaaccagtgcatgttcggtgccctgtaggtgcttactaaagctagtgaatg

SEQ ID NO: 17899 - DNA, 122 bp, Homo sapiens
  misc_feature (61)..(62): /note="This region represents a CpG dinucleotide"
  misc_feature (61)..(61): /note="Nucleotide may be methylated to form 5-methylcytosine"
acaagattcaatctctgtccattaacctcttgaacccaggaaacacatctactccaaacacgtctttctccacacaggacagatgactgtcaaataagttcaactgaaaaagatctcttctt

SEQ ID NO: 17900 - DNA, 122 bp, Homo sapiens
  misc_feature (61)..(62): /note="This region represents a CpG dinucleotide"
  misc_feature (61)..(61): /note="Nucleotide may be methylated to form 5-methylcytosine"
ggctggtcaggagaacaacagtggacttcatgggagctgaactcattggcaaagtgcccccggagagtgctggccaccccacaaacacacacaccccatgcacaccctcactatgcaccctc

SEQ ID NO: 17901 - DNA, 122 bp, Homo sapiens
  misc_feature (61)..(62): /note="This region represents a CpG dinucleotide"
  misc_feature (61)..(61): /note="Nucleotide may be methylated to form 5-methylcytosine"
aaaatagcaacttgaaatttaaactcctgacttacacaaatcaaaagcatctgatataaccgtgaatcctgtaaacattattatattgtcacattcacaaataaaaataaattttccttctc

SEQ ID NO: 17902 - DNA, 122 bp, Homo sapiens
  misc_feature (61)..(62): /note="This region represents a CpG dinucleotide"
  misc_feature (61)..(61): /note="Nucleotide may be methylated to form 5-methylcytosine"
tcagtcttcatggtcatgtgacctgccctatctccaaaccacaaccttgggagctaaaggcgttcaaatcaaggacttcaccagagcctgtgaggtgggcagacagggtacgaatagcgccc

SEQ ID NO: 17903 - DNA, 122 bp, Homo sapiens
  misc_feature (61)..(62): /note="This region represents a CpG dinucleotide"
  misc_feature (61)..(61): /note="Nucleotide may be methylated to form 5-methylcytosine"
cattctgcaaccaggaagctggcagcccatacaactatgcagaaggtgaaagagagaaggcgggaccatgaacacgcgttttaattactgcatgtttgtttctgacagagagaggtcagtgt

SEQ ID NO: 17904 - DNA, 122 bp, Homo sapiens
  misc_feature (61)..(62): /note="This region represents a CpG dinucleotide"
  misc_feature (61)..(61): /note="Nucleotide may be methylated to form 5-methylcytosine"
gagaagaaagtctgcatattattcatattttcttcttgttactgatgctccactgcaaagcgaaagagactgcaataaatataagccttaactcaccaaatatgtattaagctctaaccaag

SEQ ID NO: 17905 - DNA, 122 bp, Homo sapiens
  misc_feature (61)..(62): /note="This region represents a CpG dinucleotide"
  misc_feature (61)..(61): /note="Nucleotide may be methylated to form 5-methylcytosine"
atgcaaacaatatttgtccagtggttgtttgtggaaactcctgtgccgggtgactgctaacgtgggtgatagtagggcttcaaggataagtaaacattagcctcgcctttaattactttcca

SEQ ID NO: 17906 - DNA, 122 bp, Homo sapiens
  misc_feature (61)..(62): /note="This region represents a CpG dinucleotide"
  misc_feature (61)..(61): /note="Nucleotide may be methylated to form 5-methylcytosine"
gagtgtttagtcatattcctcaacaatttcactaatgacctgcacctgacttgaaaggctcggttctctaaaccagcttcatcttcccgttatcaagcctcagttcccaacatttgcaatgc

SEQ ID NO: 17907 - DNA, 122 bp, Homo sapiens
  misc_feature (61)..(62): /note="This region represents a CpG dinucleotide"
  misc_feature (61)..(61): /note="Nucleotide may be methylated to form 5-methylcytosine"
gcttttcccaacagtgttcctttgcccataatagccttgtctccctaacaaagtctaaatcgtgtactttaagacccacctgagatttcacggtcttagctaagaagacttcaccaccaccc

SEQ ID NO: 17908 - DNA, 122 bp, Homo sapiens
  misc_feature (61)..(62): /note="This region represents a CpG dinucleotide"
  misc_feature (61)..(61): /note="Nucleotide may be methylated to form 5-methylcytosine"
aaccaccccagaacaacaatgaaggaaaattccagaatgacaactgtacagcaagtctagcgagcagccagtccagattgaaataagaggaaggaaggctctgggacaaaaactccaaagaa

SEQ ID NO: 17909 - DNA, 122 bp, Homo sapiens
  misc_feature (61)..(62): /note="This region represents a CpG dinucleotide"
  misc_feature (61)..(61): /note="Nucleotide may be methylated to form 5-methylcytosine"
gaaacacccttttctacttcaaaggaactgagagaaagtggctgggcagataaaaccctgcggaatgtcccataaatcagcaggctgttgagttacccaaacaaactgcaggggcaggggag

SEQ ID NO: 17910 - DNA, 122 bp, Homo sapiens
  misc_feature (61)..(62): /note="This region represents a CpG dinucleotide"
  misc_feature (61)..(61): /note="Nucleotide may be methylated to form 5-methylcytosine"
tcattattgggatttagagctctggatatagttgtattaaccagagaagatataggataacgttcagaagattttacatgtacgtgtcttagagaatgagccagcagctctctgtaacttca

SEQ ID NO: 17911 - DNA, 122 bp, Homo sapiens
  misc_feature (61)..(62): /note="This region represents a CpG dinucleotide"
  misc_feature (61)..(61): /note="Nucleotide may be methylated to form 5-methylcytosine"
cgggctgaaagaggtgatcccgagggtgctgtgcttgtgtgacgaagtgtttgtctcctgcgatcctcagcagacgctgctccggtgacccggagatccggacgcctcgacccctccctcag

SEQ ID NO: 17912 - DNA, 122 bp, Homo sapiens
  misc_feature (61)..(62): /note="This region represents a CpG dinucleotide"
  misc_feature (61)..(61): /note="Nucleotide may be methylated to form 5-methylcytosine"
attcttactagaaaagaaaccccggccctttagctcatcaccctctgctctggctttccccgagttggtacagagctgatgccgttggtatttttaagaaataatcttgagtcagaaggaat

SEQ ID NO: 17913 - DNA, 122 bp, Homo sapiens
  misc_feature (61)..(62): /note="This region represents a CpG dinucleotide"
  misc_feature (61)..(61): /note="Nucleotide may be methylated to form 5-methylcytosine"
cctcattcctcgtggcctccttttcattgctgttgcttcctcaatcggtccttagtgaaacgccaatctcagtggtgtgggaacgagtatgagagacctcgctctaggtgctcgcacggaac

SEQ ID NO: 17914 - DNA, 122 bp, Homo sapiens
  misc_feature (61)..(62): /note="This region represents a CpG dinucleotide"
  misc_feature (61)..(61): /note="Nucleotide may be methylated to form 5-methylcytosine"
tcacaaatttataagttatttttcattgattactaatcaaaatatataccgaactatcttcgtactctgctatatgtattaagacactcccttctgacaattttaaccacttctttcttgaa

SEQ ID NO: 17915 - DNA, 122 bp, Homo sapiens
  misc_feature (61)..(62): /note="This region represents a CpG dinucleotide"
  misc_feature (61)..(61): /note="Nucleotide may be methylated to form 5-methylcytosine"
tggaaagctttatgtggtggattccataaatgacttaaacaaactaaacctctgtccagccggatcgcagcatctgttccgtatgtgtgctggggaaggcacagcagcccttcctagcttct

SEQ ID NO: 17916 - DNA, 122 bp, Homo sapiens
  misc_feature (61)..(62): /note="This region represents a CpG dinucleotide"
  misc_feature (61)..(61): /note="Nucleotide may be methylated to form 5-methylcytosine"
atgaggatgaaatggagttcctctctctctctttgtatgaacagtaatccttagtcactgcgaattctgaaatttttttggcctggtgccttgtgttatagttaatttgtggctgggcagag

SEQ ID NO: 17917 - DNA, 122 bp, Homo sapiens
  misc_feature (61)..(62): /note="This region represents a CpG dinucleotide"
  misc_feature (61)..(61): /note="Nucleotide may be methylated to form 5-methylcytosine"
gaaaaatctggattcttgtaggaactctatcatggtccacgggtgtaatcttgggcaagccgcttaatctctccatctgctacaaaaaacaggtccttttatattcactcaccaattagtga

SEQ ID NO: 17918 - DNA, 122 bp, Homo sapiens
  misc_feature (61)..(62): /note="This region represents a CpG dinucleotide"
  misc_feature (61)..(61): /note="Nucleotide may be methylated to form 5-methylcytosine"
gtgcgacaagcactacatatacgaaaatagaaaatacaagagtgtaaatgtaagatggtgcgatacagtgtataatttgctaatggagtacggaggacatacaggtcagcatgagagactac

SEQ ID NO: 17919 - DNA, 122 bp, Homo sapiens
  misc_feature (61)..(62): /note="This region represents a CpG dinucleotide"
  misc_feature (61)..(61): /note="Nucleotide may be methylated to form 5-methylcytosine"
aaattgtcgccaagcccattaggctacctgaactgtctcagaaagtgcgggtggctgcgtcgaacggtggtggctcagaggaagagattggggccggcagcgacctaggtacctcactctgg

SEQ ID NO: 17920 - DNA, 122 bp, Homo sapiens
  misc_feature (61)..(62): /note="This region represents a CpG dinucleotide"
  misc_feature (61)..(61): /note="Nucleotide may be methylated to form 5-methylcytosine"
aggacagagcacaaagcaatcaaaataatccaatggaaataagcaatcaaccctcttgcccgttatcctagcagagcctgtgggagacttgctgagagcctatttacacaaaggcagccctg

SEQ ID NO: 17921 - DNA, 122 bp, Homo sapiens
  misc_feature (61)..(62): /note="This region represents a CpG dinucleotide"
  misc_feature (61)..(61): /note="Nucleotide may be methylated to form 5-methylcytosine"
ataagctgctgactcataaactgctataattcaaggggcaaggttaaaacagttttggttcggtatttttaaaagcagttggtcatgaccaccatgggtcatgtcacaaatctacatactta

SEQ ID NO: 17922 - DNA, 122 bp, Homo sapiens
  misc_feature (61)..(62): /note="This region represents a CpG dinucleotide"
  misc_feature (61)..(61): /note="Nucleotide may be methylated to form 5-methylcytosine"
atcctccacaccttttctgaaaccctttctagaataagcctctgattaaagcagcctcaacgtcccatggctatccacatggataccaagcaattttctttaggaagattcaggtctcactg

SEQ ID NO: 17923 - DNA, 122 bp, Homo sapiens
  misc_feature (61)..(62): /note="This region represents a CpG dinucleotide"
  misc_feature (61)..(61): /note="Nucleotide may be methylated to form 5-methylcytosine"
gcagaactgtgcatacagtacatgtggtggcccaaacctggttctgagactattcactcacgtccagagtataatagagaatgttaatgatttacagtgagaaaaagattgaggatttatca

SEQ ID NO: 17924 - DNA, 122 bp, Homo sapiens
  misc_feature (61)..(62): /note="This region represents a CpG dinucleotide"
  misc_feature (61)..(61): /note="Nucleotide may be methylated to form 5-methylcytosine"
gtggaaagccaggcctccagggcctctgacaccaccatgaggacactggcttttagccatcgcagggttttgggcagaggagtcatacatgactaatgttttaaaaggaccactgttggtgc

SEQ ID NO: 17925 - DNA, 122 bp, Homo sapiens
  misc_feature (61)..(62): /note="This region represents a CpG dinucleotide"
  misc_feature (61)..(61): /note="Nucleotide may be methylated to form 5-methylcytosine"
gaaacaaaaagataaaactccacaagcttcgcctagccatatagtgaggactgtgtggcacgttccctggcagcccatatgataggctcaagtgtgtcacctactgccatggaatgtcatct

SEQ ID NO: 17926 - DNA, 122 bp, Homo sapiens
  misc_feature (61)..(62): /note="This region represents a CpG dinucleotide"
  misc_feature (61)..(61): /note="Nucleotide may be methylated to form 5-methylcytosine"
cagtaagattatagtcttacttcaatacatccaatccataataaaatacaatctcacaaacgatccagaggacccgtttaggggttccttaagaattcatgtctgtcatatgtaaggattct

SEQ ID NO: 17927 - DNA, 122 bp, Homo sapiens
  misc_feature (61)..(62): /note="This region represents a CpG dinucleotide"
  misc_feature (61)..(61): /note="Nucleotide may be methylated to form 5-methylcytosine"
agccggagccagggagggcggctctgggaaccacactggataggactccttcctctctgacgttgtggggaatccactgttgcctgctcctgcccttgctgactaaaggcctcttgtgtgtg

SEQ ID NO: 17928 - DNA, 122 bp, Homo sapiens
  misc_feature (61)..(62): /note="This region represents a CpG dinucleotide"
  misc_feature (61)..(61): /note="Nucleotide may be methylated to form 5-methylcytosine"
gctctgtggacatcactgcccatgaagccagaaaattcatgtctaagccatgtgaggtcacgctgaagaaacaactcatggtcagaacaataggagaggttattaagagatattaactgcct

SEQ ID NO: 17929 - DNA, 122 bp, Homo sapiens
  misc_feature (61)..(62): /note="This region represents a CpG dinucleotide"
  misc_feature (61)..(61): /note="Nucleotide may be methylated to form 5-methylcytosine"
aagatatcctttttggtgtctgtcctgtgagatgaacaataatttagtcatgtcacttaacgatgtggacattttgtgagaaatgcattgttaggtgatttcatcatcatgtggacatcata

SEQ ID NO: 17930 - DNA, 122 bp, Homo sapiens
  misc_feature (61)..(62): /note="This region represents a CpG dinucleotide"
  misc_feature (61)..(61): /note="Nucleotide may be methylated to form 5-methylcytosine"
gatgaacggagatgattcattaggccattctagcttaatggatgcatcactgtgcaaccacgcaaatgcctcatttctgattcactcatttaatatttattgaggagtgctgggtactaggc

SEQ ID NO: 17931 - DNA, 122 bp, Homo sapiens
  misc_feature (61)..(62): /note="This region represents a CpG dinucleotide"
  misc_feature (61)..(61): /note="Nucleotide may be methylated to form 5-methylcytosine"
tctgtgtctctgtgcatgcctgtgtctctgtgtgtgcccgtgtgcctgtgtgtctgttagcgtgtctctgtgtgcgtgcctgtgcgtgcctgtgtctgcatgtctgtgcctgtgtgcatgcc

SEQ ID NO: 17932 - DNA, 122 bp, Homo sapiens
  misc_feature (61)..(62): /note="This region represents a CpG dinucleotide"
  misc_feature (61)..(61): /note="Nucleotide may be methylated to form 5-methylcytosine"
tcagagtgagttgaggcgagcctgcaggactgtgttccctctgcaggctgtaggggaggacgtgtttccttgccttctccactggtaaaggccacccacatttctcagctcatgccccttcg

SEQ ID NO: 17933 - DNA, 122 bp, Homo sapiens
  misc_feature (61)..(62): /note="This region represents a CpG dinucleotide"
  misc_feature (61)..(61): /note="Nucleotide may be methylated to form 5-methylcytosine"
agatttttttctagcctgaaataagtgagctgtcatccagttctggcacttttgtgcttccgttagtactgcagggagtcatcctcaaagagcattatcaccactgacctgtcaccagaaag

SEQ ID NO: 17934 - DNA, 122 bp, Homo sapiens
  misc_feature (61)..(62): /note="This region represents a CpG dinucleotide"
  misc_feature (61)..(61): /note="Nucleotide may be methylated to form 5-methylcytosine"
agagaaacctattaatgggtctgacttgatttaaattagccacagcaagatcaaaccaatcggaagatcacattccttccattaagtactgatgactaactcccaagacaaaacacttctaa

SEQ ID NO: 17935 - DNA, 122 bp, Homo sapiens
  misc_feature (61)..(62): /note="This region represents a CpG dinucleotide"
  misc_feature (61)..(61): /note="Nucleotide may be methylated to form 5-methylcytosine"
atgttgtggtggggtcattcagacaggacctgagtgccgctcttcatttggtcctgaattcgggtgtgcggtgaggctgcgcctggcaccccggatccctccacggcttcccccttatctag

SEQ ID NO: 17936 - DNA, 122 bp, Homo sapiens
  misc_feature (61)..(62): /note="This region represents a CpG dinucleotide"
  misc_feature (61)..(61): /note="Nucleotide may be methylated to form 5-methylcytosine"
tacaccattcaagaatagtaaacatttacaccctagatttttaatgatctgagacagcaccgaagtatataaaaaagttaggctcctgagcacttaattcttcaaggaaggggatggaggaa

SEQ ID NO: 17937 - DNA, 122 bp, Homo sapiens
  misc_feature (61)..(62): /note="This region represents a CpG dinucleotide"
  misc_feature (61)..(61): /note="Nucleotide may be methylated to form 5-methylcytosine"
ctaaaagatcccacctactccatcattttactacttgtgtctacctcagtctctgtaatacgtgctcactaaaagttgattaatttacactcatagattaaagcttcttcatttaatagatc

SEQ ID NO: 17938 - DNA, 122 bp, Homo sapiens
  misc_feature (61)..(62): /note="This region represents a CpG dinucleotide"
  misc_feature (61)..(61): /note="Nucleotide may be methylated to form 5-methylcytosine"
tctgggagagggaggggccaggcccaaatggtggctgcagaggtatttaccagctggttccgtgctctgcagaaggttggtgaacatgtaaatgcgggtagtaggctcacatctgcttctgt

SEQ ID NO: 17939 - DNA, 122 bp, Homo sapiens
  misc_feature (61)..(62): /note="This region represents a CpG dinucleotide"
  misc_feature (61)..(61): /note="Nucleotide may be methylated to form 5-methylcytosine"
attacctggcccaaaatgtcattagctaccaggctgagaaacctgccctcctaggccgggcgctgtggctcacgcccgtaatctcagcatattgggaggccgaggtgggcggatcctgaggt

SEQ ID NO: 17940 - DNA, 122 bp, Homo sapiens
  misc_feature (61)..(62): /note="This region represents a CpG dinucleotide"
  misc_feature (61)..(61): /note="Nucleotide may be methylated to form 5-methylcytosine"
gtgagctcctcgaggaaggtacttgtgcctcgatcatcctagaaccctccacgcccagtacgcacagggccagcacctagcagacattcagtgtgtatgtaagcctctgtcctggtctgaac

SEQ ID NO: 17941 - DNA, 122 bp, Homo sapiens
  misc_feature (61)..(62): /note="This region represents a CpG dinucleotide"
  misc_feature (61)..(61): /note="Nucleotide may be methylated to form 5-methylcytosine"
ctaaggagagccatttacattatagtgtacatgaatgctgacccccctggagttgtgcagcgcacaacactcacaactgcatacatgatccttttaagccctttacatctacttctgtactt

SEQ ID NO: 17942 - DNA, 122 bp, Homo sapiens
  misc_feature (61)..(62): /note="This region represents a CpG dinucleotide"
  misc_feature (61)..(61): /note="Nucleotide may be methylated to form 5-methylcytosine"
cacacctcatgtgtggaccacatcattcagcaaagcttccttaactgtgagctattagagcgctactattttttttttcaggctctgaatagttctagggatctcaccaggggttggaggaa

SEQ ID NO: 17943 - DNA, 122 bp, Homo sapiens
  misc_feature (61)..(62): /note="This region represents a CpG dinucleotide"
  misc_feature (61)..(61): /note="Nucleotide may be methylated to form 5-methylcytosine"
caacccacaagtctatccattttaaaatgccatttattcaacacttatggggccctgactcgtggccgggcaatgtaggcactgcgaatatagcaatgaacaaatcgcataccgtgtgctaa

SEQ ID NO: 17944 - DNA, 122 bp, Homo sapiens
  misc_feature (61)..(62): /note="This region represents a CpG dinucleotide"
  misc_feature (61)..(61): /note="Nucleotide may be methylated to form 5-methylcytosine"
tacgtaagtttacttgctggctcagtcatcatttattagtcgtaggaagcctttattgagcgcctaccataatgtgccaggcattggcctaagcataatcctgctgctgctttagatttacg

SEQ ID NO: 17945 - DNA, 122 bp, Homo sapiens
  misc_feature (61)..(62): /note="This region represents a CpG dinucleotide"
  misc_feature (61)..(61): /note="Nucleotide may be methylated to form 5-methylcytosine"
tcttcaaagccacatcatcgctgtcaaagtagtaagccacgcacaggtaaatggaggaggcgtagagctccaggttgatctggcggttgatggcggcctctgagtcttggtggtagttctgg

SEQ ID NO: 17946 - DNA, 122 bp, Homo sapiens
  misc_feature (61)..(62): /note="This region represents a CpG dinucleotide"
  misc_feature (61)..(61): /note="Nucleotide may be methylated to form 5-methylcytosine"
caatctttctaggactttcttcacttcaagttattctcacataacttctcttcaaactttcgtcattgctatgtctgatctataggaataatagtgggacaagaggataattaactttcttc

SEQ ID NO: 17947 - DNA, 122 bp, Homo sapiens
  misc_feature (61)..(62): /note="This region represents a CpG dinucleotide"
  misc_feature (61)..(61): /note="Nucleotide may be methylated to form 5-methylcytosine"
catctacaaaatagaggagattctgcccacttaggggcttattgtagagcagtattacaccgaggtgctcccagaagctcctccctgcccctaggcctgtgagtgatttcatgagtcagagg

SEQ ID NO: 17948 - DNA, 122 bp, Homo sapiens
  misc_feature (61)..(62): /note="This region represents a CpG dinucleotide"
  misc_feature (61)..(61): /note="Nucleotide may be methylated to form 5-methylcytosine"
agtaaggtcaggaaatgatgcagaagccaggctcccagaccagtttaaagtgtgggcagacgcagggctgccattttaaaattctgctgcaaaagggccttagaagatacatcatctactac

SEQ ID NO: 17949 - DNA, 122 bp, Homo sapiens
  misc_feature (61)..(62): /note="This region represents a CpG dinucleotide"
  misc_feature (61)..(61): /note="Nucleotide may be methylated to form 5-methylcytosine"
ttctctcatttccttatctttgtgtatgctgtattgcagcacacgtcacatggagatgggcgtcaagaagttacctctcgtaccagccgctcaggagctcggtgtagaaactctatagcctc

SEQ ID NO: 17950 - DNA, 122 bp, Homo sapiens
  misc_feature (61)..(62): /note="This region represents a CpG dinucleotide"
  misc_feature (61)..(61): /note="Nucleotide may be methylated to form 5-methylcytosine"
ggacagaacgtgggggacattatgtcccagctggtcctgggagggtcccatggggagacccgctggtcatgtgctttgcatgtcctgactgtaggcagagcagacctccagggacttccttc

SEQ ID NO: 17951 - DNA, 122 bp, Homo sapiens
  misc_feature (61)..(62): /note="This region represents a CpG dinucleotide"
  misc_feature (61)..(61): /note="Nucleotide may be methylated to form 5-methylcytosine"
ccagtcagcctacagcacgatgcaccgatgcgtccagtcagcagatgtgtgtcaccatgacgcaggctgaggctggttaaacagtaacagagctcagtgacctaatgctcacactcagccct

SEQ ID NO: 17952 - DNA, 122 bp, Homo sapiens
  misc_feature (61)..(62): /note="This region represents a CpG dinucleotide"
  misc_feature (61)..(61): /note="Nucleotide may be methylated to form 5-methylcytosine"
atctatcattgctaatccctgcaaccctacaagatagaacttattgtcctattttacagacgaacctggagcttaaggaagttaaataacctgtctgatactgcagatctagccatggcaat

SEQ ID NO: 17953 - DNA, 122 bp, Homo sapiens
  misc_feature (61)..(62): /note="This region represents a CpG dinucleotide"
  misc_feature (61)..(61): /note="Nucleotide may be methylated to form 5-methylcytosine"
agaaacattattgcccagaaggattatgtgtttatggattattttgccccgcctcaggagcgcaggaagtcactaccatttatattctaaaacagacctatctatgttcataggacttctga

SEQ ID NO: 17954 - DNA, 122 bp, Homo sapiens
  misc_feature (61)..(62): /note="This region represents a CpG dinucleotide"
  misc_feature (61)..(61): /note="Nucleotide may be methylated to form 5-methylcytosine"
catagagtgctttgcatctggacactttcacagaagttccttggtgaaattttatatttacgtgaactgttgtttctttgtgccaaacctgctttttcctccctccactcccacctctgtac

SEQ ID NO: 17955 - DNA, 122 bp, Homo sapiens
  misc_feature (61)..(62): /note="This region represents a CpG dinucleotide"
  misc_feature (61)..(61): /note="Nucleotide may be methylated to form 5-methylcytosine"
gcaaatcccagggtaggtgctactttcctgtccctgctgttctaccttatagctggcacacgatgaagttggagataggacttgatgagcctaattgttctcctcagcctccttttgttttg

SEQ ID NO: 17956 - DNA, 122 bp, Homo sapiens
  misc_feature (61)..(62): /note="This region represents a CpG dinucleotide"
  misc_feature (61)..(61): /note="Nucleotide may be methylated to form 5-methylcytosine"
aacttccctggtggctgacagctgcgtggacattcagcggccctacctttttccgtcaggcgccagcagcccctctgtgtagaggtgagacaggccaagctgcagcttctagacgagacgcc

SEQ ID NO: 17957 - DNA, 122 bp, Homo sapiens
  misc_feature (61)..(62): /note="This region represents a CpG dinucleotide"
  misc_feature (61)..(61): /note="Nucleotide may be methylated to form 5-methylcytosine"
tttttcagaaattattataaacagttctgtgccacagcacaaaggtaaatctgtcactgacgtgtcaggtctgtcctccaactgattctttggtacggaatggaactgatctcaaacatgca

SEQ ID NO: 17958 - DNA, 122 bp, Homo sapiens
  misc_feature (61)..(62): /note="This region represents a CpG dinucleotide"
  misc_feature (61)..(61): /note="Nucleotide may be methylated to form 5-methylcytosine"
ggtctgggacatcccaaactcgaagcttctgtgtctggaggacatgtcatccttgtggtacgtaaaaggtgtgtcactaaccagtaatctgcctcaagcttcagatatttagagtttttatt

SEQ ID NO: 17959 - DNA, 122 bp, Homo sapiens
  misc_feature (61)..(62): /note="This region represents a CpG dinucleotide"
  misc_feature (61)..(61): /note="Nucleotide may be methylated to form 5-methylcytosine"
gcctggctcacaagatttaacagatttcctaggaactcaattgatttcctctttctcagccgcatttgccctccctggagaggataaaagctatttaacttgatgggtggagatctgagcaa

SEQ ID NO: 17960 - DNA, 122 bp, Homo sapiens
  misc_feature (61)..(62): /note="This region represents a CpG dinucleotide"
  misc_feature (61)..(61): /note="Nucleotide may be methylated to form 5-methylcytosine"
ttccaacaaacatgttataatcttctcttcccctgtctctgtttgggctggcattggcagcgtggtattgccaattgggttctgtgttggggacagcttctgccctggctctattattagga

SEQ ID NO: 17961 - DNA, 122 bp, Homo sapiens
  misc_feature (61)..(62): /note="This region represents a CpG dinucleotide"
  misc_feature (61)..(61): /note="Nucleotide may be methylated to form 5-methylcytosine"
ttgaaatcacacctatactaacagcttgcacatatgggtacttaataaacaactgttgaacgaataaatggctgaatgcacaaataaatgcataaaggaaggcacaggcagataaatagatt

SEQ ID NO: 17962 - DNA, 122 bp, Homo sapiens
  misc_feature (61)..(62): /note="This region represents a CpG dinucleotide"
  misc_feature (61)..(61): /note="Nucleotide may be methylated to form 5-methylcytosine"
gtttaattgtacctgttccaggttctgtttctttacctctcaccttgtctgctaaggggacgtttttctccactaatataagaagaggaagaattttcttaatccatttacaattcttcctt

SEQ ID NO: 17963 - DNA, 122 bp, Homo sapiens
  misc_feature (61)..(62): /note="This region represents a CpG dinucleotide"
  misc_feature (61)..(61): /note="Nucleotide may be methylated to form 5-methylcytosine"
ctggaaaacacaaacccgaagggaagtttgggctgtaactctggtggcagggtgaccaagcgcagctgcttgaggaagccctgctgtgcctcaacaggatgtaaactcattgtgagcaacac

SEQ ID NO: 17964 - DNA, 122 bp, Homo sapiens
  misc_feature (61)..(62): /note="This region represents a CpG dinucleotide"
  misc_feature (61)..(61): /note="Nucleotide may be methylated to form 5-methylcytosine"
tggtttgaattgcttgacaggacaggtattggaaacttgcccactccatttgagtggacgcgtggcctgatcacccatggtgtgcctgtaccggcacttcggtttttgtttttgacttgact

SEQ ID NO: 17965 - DNA, 122 bp, Homo sapiens
  misc_feature (61)..(62): /note="This region represents a CpG dinucleotide"
  misc_feature (61)..(61): /note="Nucleotide may be methylated to form 5-methylcytosine"
tggtctggcagctgtggcaagatgacttgaaaggaacggaaaccagagatagggaaccagcgtcgtagttcagatgggaactaataaaggcctgatgagggaagtaacaatgagatagaaaa

SEQ ID NO: 17966 - DNA, 122 bp, Homo sapiens
  misc_feature (61)..(62): /note="This region represents a CpG dinucleotide"
  misc_feature (61)..(61): /note="Nucleotide may be methylated to form 5-methylcytosine"
caccacccccgcccccatctccactctcagtagcccgagccctcccattctccactccttcgacccaattccactaagtcaagaaccgtggtcggtctcagccactcactcagcgccactct

SEQ ID NO: 17967 - DNA, 122 bp, Homo sapiens
  misc_feature (61)..(62): /note="This region represents a CpG dinucleotide"
  misc_feature (61)..(61): /note="Nucleotide may be methylated to form 5-methylcytosine"
acctcaggtgatctgcctgcgtcggcctcccaaagtgtggagatgacaggtgtgagccaccggcctggccagaactaaccacaaatcttgagtttaggatttgggtgtcatagagagaaggt

SEQ ID NO: 17968 - DNA, 122 bp, Homo sapiens
  misc_feature (61)..(62): /note="This region represents a CpG dinucleotide"
  misc_feature (61)..(61): /note="Nucleotide may be methylated to form 5-methylcytosine"
aaagtgtaaatgatccttaaactaaaaacaccgtagaaatacaaagatccaggccgggtgcggtggctcatgcctgtaatcccagctacttgggaggctgaggcaggagaatcacttaaacc

SEQ ID NO: 17969 - DNA, 122 bp, Homo sapiens
  misc_feature (61)..(62): /note="This region represents a CpG dinucleotide"
  misc_feature (61)..(61): /note="Nucleotide may be methylated to form 5-methylcytosine"
tctttctttctttctttttctttcctccttctctctttcaacagagcctcactcagtcatcgaggctggagcgcagtgctacaatcatagcttactgtgcctcaaactcctgggcccaagca

SEQ ID NO: 17970 - DNA, 122 bp, Homo sapiens
  misc_feature (61)..(62): /note="This region represents a CpG dinucleotide"
  misc_feature (61)..(61): /note="Nucleotide may be methylated to form 5-methylcytosine"
cccaggaaactgcatcaccccccacactgcaaggcaggaagtctgcacaccaggaatcagcgttaaccgcacattaataaaatgcagtggttttgattggcatcccattttcctattcacat

SEQ ID NO: 17971 - DNA, 122 bp, Homo sapiens
  misc_feature (61)..(62): /note="This region represents a CpG dinucleotide"
  misc_feature (61)..(61): /note="Nucleotide may be methylated to form 5-methylcytosine"
gtccccaccctggcccctaggattccaaatggtgcagcaaaatacgacaatcctaaggttcgtaaaataagcaatggatagtgaaggaaagcctttaaatgttagtgttttaaaacatcaga

SEQ ID NO: 17972 - DNA, 122 bp, Homo sapiens
  misc_feature (61)..(62): /note="This region represents a CpG dinucleotide"
  misc_feature (61)..(61): /note="Nucleotide may be methylated to form 5-methylcytosine"
tggcagcagtccagtgggggcgggacactaagattctcacattaacaatgcacagacatccgtccatccggcactcctgggtcatgtccctgagagtgacacagggctgcccctggggcaga

SEQ ID NO: 17973 - DNA, 122 bp, Homo sapiens
  misc_feature (61)..(62): /note="This region represents a CpG dinucleotide"
  misc_feature (61)..(61): /note="Nucleotide may be methylated to form 5-methylcytosine"
gcacagccatctctccaacacccacgataatgttctggcccaaaatgtgagtcatgccaacgctaagaaactctgcataatgcagtaagcattttaaaggccaagcctgttattaacagctt

SEQ ID NO: 17974 - DNA, 122 bp, Homo sapiens
  misc_feature (61)..(62): /note="This region represents a CpG dinucleotide"
  misc_feature (61)..(61): /note="Nucleotide may be methylated to form 5-methylcytosine"
tgacaaaatgaagatcaatatgcctgtttcctattctgagttagtcactgtccacagcaccgccttccccaccaccaaggggaagagaggctgcaggacaaggtgagcgcacccatgtcctt

SEQ ID NO: 17975 - DNA, 122 bp, Homo sapiens
  misc_feature (61)..(62): /note="This region represents a CpG dinucleotide"
  misc_feature (61)..(61): /note="Nucleotide may be methylated to form 5-methylcytosine"
attaattgaccacccactgtgtagccagctatgtgctaaatgctgaaaaaaataagaatacgttgcaaccctgtcattgaggaggcatattagttagatttctgctgtgacaatattgcata

SEQ ID NO: 17976 - DNA, 122 bp, Homo sapiens
  misc_feature (61)..(62): /note="This region represents a CpG dinucleotide"
  misc_feature (61)..(61): /note="Nucleotide may be methylated to form 5-methylcytosine"
cactctgacctctcccttttctagtgattcttgcacttgctggcagttctgtgtctgcatcgcacagatatgcctgtggcccttattatttcaggtacattgatcttttcttcccaagtaga

SEQ ID NO: 17977 - DNA, 122 bp, Homo sapiens
  misc_feature (61)..(62): /note="This region represents a CpG dinucleotide"
  misc_feature (61)..(61): /note="Nucleotide may be methylated to form 5-methylcytosine"
agagtggaagcggcaggtgatggtgcggaagctgcaggcgcgcctgggcgcagagagctccgcagaggcccaggtaggcccccggcaggggcgggaccagtgggcggggcggggccttttcc

SEQ ID NO: 17978 - DNA, 122 bp, Homo sapiens
  misc_feature (61)..(62): /note="This region represents a CpG dinucleotide"
  misc_feature (61)..(61): /note="Nucleotide may be methylated to form 5-methylcytosine"
gctgtgagtgggcgacaaggaacctcgtggtctccgtgtgctttgcggggaccacctcttcgcaggggccgccacctgcctctccggcgctgcatccttagcatccccactgcccccggatc

SEQ ID NO: 17979 - DNA, 122 bp, Homo sapiens
  misc_feature (61)..(62): /note="This region represents a CpG dinucleotide"
  misc_feature (61)..(61): /note="Nucleotide may be methylated to form 5-methylcytosine"
aggaaaatgggcaggccccgcgcgcgcacgcaccctgcgcacacaccacacacacacacacgatcacacacacacccgcgcgctcgctcccacccggcagtcatccatcaatcgaaaagcac

SEQ ID NO: 17980 - DNA, 122 bp, Homo sapiens
  misc_feature (61)..(62): /note="This region represents a CpG dinucleotide"
  misc_feature (61)..(61): /note="Nucleotide may be methylated to form 5-methylcytosine"
ggaaaatgaacacaccctgtatgacaagcaccagtggtactccccgacttgaaagagatgcgtctcatcggagccatggcctttacggctttggctttgatgtcatgtttgaagacactttg

SEQ ID NO: 17981 - DNA, 122 bp, Homo sapiens
  misc_feature (61)..(62): /note="This region represents a CpG dinucleotide"
  misc_feature (61)..(61): /note="Nucleotide may be methylated to form 5-methylcytosine"
atgtgaaagccatgagcaagggcttggtgcattccacagaggaggcacagtgttagttgacggaaagaaagaggggagggtgggtctcatctgagctgagcaactgaatacaaccagacgtg

SEQ ID NO: 17982 - DNA, 122 bp, Homo sapiens
  misc_feature (61)..(62): /note="This region represents a CpG dinucleotide"
  misc_feature (61)..(61): /note="Nucleotide may be methylated to form 5-methylcytosine"
cagggtcagatctgataggggattagctcagttccaaatactgcgtatactgactcaacacgagaatgaaagccagaatatgagaaatgacagagatgtgcaggcttgaaataatgttttca

SEQ ID NO: 17983 - DNA, 122 bp, Homo sapiens
  misc_feature (61)..(62): /note="This region represents a CpG dinucleotide"
  misc_feature (61)..(61): /note="Nucleotide may be methylated to form 5-methylcytosine"
ctgtgtgggaacccctcgcagcccagctctctgctaggcctgtgtatcacaatctgagctcgccttgtattcctacgttggttctgccccaaggcacaaagccttgcctgccacagggtgct

SEQ ID NO: 17984 - DNA, 122 bp, Homo sapiens
  misc_feature (61)..(62): /note="This region represents a CpG dinucleotide"
  misc_feature (61)..(61): /note="Nucleotide may be methylated to form 5-methylcytosine"
ggaaacacaagagaagaaagtcaattccccttagggcctccttcctccagtagctcacttcgtagtgcagtctctcttggatacggcctatcttgtgataggcaaaatttgggttacatgcc

SEQ ID NO: 17985 - DNA, 122 bp, Homo sapiens
  misc_feature (61)..(62): /note="This region represents a CpG dinucleotide"
  misc_feature (61)..(61): /note="Nucleotide may be methylated to form 5-methylcytosine"
tagagacgggctttcatcatgttgcccaggctggtcttgaactccttagctcaggcaatccgcccaccttggcatgctgctctcagcgcacacaatgggcatgggagaacaatgacgaggag

SEQ ID NO: 17986 - DNA, 122 bp, Homo sapiens
  misc_feature (61)..(62): /note="This region represents a CpG dinucleotide"
  misc_feature (61)..(61): /note="Nucleotide may be methylated to form 5-methylcytosine"
ggccactagcccagcggattaatatccaaaggctgagccccaaacagagacagggcttgacgtttatacatgcaaccaaagggagttggtcagtcagtggtgcgaaacctgtaaggcgggta

SEQ ID NO: 17987 - DNA, 122 bp, Homo sapiens
  misc_feature (61)..(62): /note="This region represents a CpG dinucleotide"
  misc_feature (61)..(61): /note="Nucleotide may be methylated to form 5-methylcytosine"
ctgctcttctgttacctctgactagactgttccgctgaatcactgaatggcttaatccctcgcttccttcaagtcttcattgaaaaggtgacacttgtgtaaagtcctccctgataaccaag

SEQ ID NO: 17988 - DNA, 122 bp, Homo sapiens
  misc_feature (61)..(62): /note="This region represents a CpG dinucleotide"
  misc_feature (61)..(61): /note="Nucleotide may be methylated to form 5-methylcytosine"
attttgtgtctttacccacatggaaattcaacaaataatttagttcaattcagtaagtgccgatttattgagctcttaatatatgctagacacgtgggacatagagatgaaagagcctgttc

SEQ ID NO: 17989 - DNA, 122 bp, Homo sapiens
  misc_feature (61)..(62): /note="This region represents a CpG dinucleotide"
  misc_feature (61)..(61): /note="Nucleotide may be methylated to form 5-methylcytosine"
tcctgttagcaaatgtttacctgtgccacacaccgtgttaagacttctataattgcctggcgcggtggttcacgcctgtaatcccagcactttgggaggctgaggcaggcagatcgcttgag

SEQ ID NO: 17990 - DNA, 122 bp, Homo sapiens
  misc_feature (61)..(62): /note="This region represents a CpG dinucleotide"
  misc_feature (61)..(61): /note="Nucleotide may be methylated to form 5-methylcytosine"
tgactcccagcctgtcactccctgaggtcaggagctgagttccatggtttccaagccccacggtctggctagttaggagcccagttaagcaggctcatgactccaccccaggcttccaggct

SEQ ID NO: 17991 - DNA, 122 bp, Homo sapiens
  misc_feature (61)..(62): /note="This region represents a CpG dinucleotide"
  misc_feature (61)..(61): /note="Nucleotide may be methylated to form 5-methylcytosine"
ttttttatattgagatattcaaataccacaaaattaatcattttaaattcagtggtttctcgtatattggtagatttgttgaaccatcaccactatctaattccagaacatttttgtcaccc

SEQ ID NO: 17992 - DNA, 122 bp, Homo sapiens
  misc_feature (61)..(62): /note="This region represents a CpG dinucleotide"
  misc_feature (61)..(61): /note="Nucleotide may be methylated to form 5-methylcytosine"
gtgtttccagtagtcatccaggctgtggtggacgaaggagatggtgagtgcgtcctcttccgtcctcctgggcgtgcaggccgtgcagggaggaagcacgtcttgagggaggagtgcttgca

SEQ ID NO: 17993 - DNA, 122 bp, Homo sapiens
  misc_feature (61)..(62): /note="This region represents a CpG dinucleotide"
  misc_feature (61)..(61): /note="Nucleotide may be methylated to form 5-methylcytosine"
cagttgtttgttacgtaggacaagagacttcgctggccactttttttttggttgtaaaatcggggtaagggttctctgcaaatgactgaagtattaaatgactgaaatattcttagttgatt

SEQ ID NO: 17994 - DNA, 122 bp, Homo sapiens
  misc_feature (61)..(62): /note="This region represents a CpG dinucleotide"
  misc_feature (61)..(61): /note="Nucleotide may be methylated to form 5-methylcytosine"
gttttaacttgttcttgtttttcctcttgtgcaaggcaagctgcaatttcttcacatggtcgttcccttatagaagatgaggatgcttcttctgaaagtgcaggtgtgggttttccttcatc

SEQ ID NO: 17995 - DNA, 122 bp, Homo sapiens
  misc_feature (61)..(62): /note="This region represents a CpG dinucleotide"
  misc_feature (61)..(61): /note="Nucleotide may be methylated to form 5-methylcytosine"
ctccctatgaagcttattgcacattttcaggtatttccagtttactcacacatgcacatacgtattaagcaaacggtaagaattataaagaaatctgcatgtaaacagaattccccaagaat

SEQ ID NO: 17996 - DNA, 122 bp, Homo sapiens
  misc_feature (61)..(62): /note="This region represents a CpG dinucleotide"
  misc_feature (61)..(61): /note="Nucleotide may be methylated to form 5-methylcytosine"
gcagtgtgtccaatgcccaccctttttcttgcaggtgctccgaaccctgggttatgtggacgaggcgggcactgtgaagctggcagggcgggtggcttgtgccatgagcagccatgagttgc

SEQ ID NO: 17997 - DNA, 122 bp, Homo sapiens
  misc_feature (61)..(62): /note="This region represents a CpG dinucleotide"
  misc_feature (61)..(61): /note="Nucleotide may be methylated to form 5-methylcytosine"
ggaacactgcaaaactgttcccaaaactgcaccctaagtgtggttatttcacacccatggcggcgggcttagaacgaggttttatttcttctcctcctttctctgtggcaccaattgtgttg

SEQ ID NO: 17998 - DNA, 122 bp, Homo sapiens
  misc_feature (61)..(62): /note="This region represents a CpG dinucleotide"
  misc_feature (61)..(61): /note="Nucleotide may be methylated to form 5-methylcytosine"
aggatgatgtttggcagatgataagcaccatatttgttatgggaaggtaactatctaaaccgcaaatcacactctgccacctaaaccagaagtaaggcagagcatatttctccacagttaat

SEQ ID NO: 17999 - DNA, 122 bp, Homo sapiens
  misc_feature (61)..(62): /note="This region represents a CpG dinucleotide"
  misc_feature (61)..(61): /note="Nucleotide may be methylated to form 5-methylcytosine"
aggttggaggtcagcaggggccagattgctataggccactgaccttcttggctcaacctacggcactgtaaagccatgcttttggaggtagaacactgttaaccagcccttatcttcaatca

SEQ ID NO: 18000 - DNA, 122 bp, Homo sapiens
  misc_feature (61)..(62): /note="This region represents a CpG dinucleotide"
  misc_feature (61)..(61): /note="Nucleotide may be methylated to form 5-methylcytosine"
atgagcaggaagctgtgcgctgagcatccttctgattaacttctctcttttctagaactgcgtaacatgtcaggttaagctctgggttatatcggatagctttagttcaagcgtctgagaga

SEQ ID NO: 18001 - DNA, 122 bp, Homo sapiens
  misc_feature (61)..(62): /note="This region represents a CpG dinucleotide"
  misc_feature (61)..(61): /note="Nucleotide may be methylated to form 5-methylcytosine"
cagatctggctgatggccaaactgtccgtagggcagagttcacattcttcttgttcactgcgctgtttgcagcacaaagcacagagcctgggacccatgagtgcccagttaaacattcactg

SEQ ID NO: 18002 - DNA, 122 bp, Homo sapiens
  misc_feature (61)..(62): /note="This region represents a CpG dinucleotide"
  misc_feature (61)..(61): /note="Nucleotide may be methylated to form 5-methylcytosine"
ttacactgccagccaatgtggaggcagtgatcacggacaagacaaacatggttcttccctcgtgcagtttattgtccaatgggggaaatagtaaacagtaaagaaacaattatataaaatat

SEQ ID NO: 18003 - DNA, 122 bp, Homo sapiens
  misc_feature (61)..(62): /note="This region represents a CpG dinucleotide"
  misc_feature (61)..(61): /note="Nucleotide may be methylated to form 5-methylcytosine"
tgtttgactaaaattaagatcttaatacccactgtgtgctttgactttcattttagctaccgtgaattgatgagcaaatctaacataggaggcatcctcttgagtccctgctggatagtaag

SEQ ID NO: 18004 - DNA, 122 bp, Homo sapiens
  misc_feature (61)..(62): /note="This region represents a CpG dinucleotide"
  misc_feature (61)..(61): /note="Nucleotide may be methylated to form 5-methylcytosine"
gaacacccaggctcagaggcatggcaggagctggctgtcagggcccttatcagcaggccccgcctctcctccagtttcagctcagttagccctggaaggggaaagaccttgctgggggcaga

SEQ ID NO: 18005 - DNA, 122 bp, Homo sapiens
  misc_feature (61)..(62): /note="This region represents a CpG dinucleotide"
  misc_feature (61)..(61): /note="Nucleotide may be methylated to form 5-methylcytosine"
atctcaagggaggaagtgaacaattacctaatgagcttgctgtgccttaagaagagggagcggtaactggcactgagatctggggcttgacgttgactcctagccctcccactcagtacatg

SEQ ID NO: 18006 - DNA, 122 bp, Homo sapiens
  misc_feature (61)..(62): /note="This region represents a CpG dinucleotide"
  misc_feature (61)..(61): /note="Nucleotide may be methylated to form 5-methylcytosine"
ttatgctttatttgctcatgtttctcccctgtagaagagcttataatagtgcctgcctcacggggttgttagaagtattgattgttaatatgtgtaaaccatcagtgcatgtaaagtgttat

SEQ ID NO: 18007 - DNA, 122 bp, Homo sapiens
  misc_feature (61)..(62): /note="This region represents a CpG dinucleotide"
  misc_feature (61)..(61): /note="Nucleotide may be methylated to form 5-methylcytosine"
aagccgcaggaatctcaaacacagcctcatcagccctgcctaactcctttggtggcttgacgtggttaatttcaaacaccttagcagggcttaggctgaacgggcccctcgttgccctccta

SEQ ID NO: 18008 - DNA, 122 bp, Homo sapiens
  misc_feature (61)..(62): /note="This region represents a CpG dinucleotide"
  misc_feature (61)..(61): /note="Nucleotide may be methylated to form 5-methylcytosine"
ttgtgtatttatgtgcatatttttatttgcaaaacagccagagatcaatccagtattcagcgttgcaaagtatgtgggtgaaattaatgaaaggattaatgaaagctattgctataaagttt

SEQ ID NO: 18009 - DNA, 122 bp, Homo sapiens
  misc_feature (61)..(62): /note="This region represents a CpG dinucleotide"
  misc_feature (61)..(61): /note="Nucleotide may be methylated to form 5-methylcytosine"
tccctggaagcagctcccatggaagagtaggaagcgatgtcatgatctcacctaagaggacgttgaatttggacctggtttgcgtcccgcctctgaggctccccataccttctgaccattgg

SEQ ID NO: 18010 - DNA, 122 bp, Homo sapiens
  misc_feature (61)..(62): /note="This region represents a CpG dinucleotide"
  misc_feature (61)..(61): /note="Nucleotide may be methylated to form 5-methylcytosine"
gtcaagcgatcctcccaccttggcctcctaagatgattacaggccataagccactgcgcccggcccaagcagttctgaataatgatgaaatgggctcagttgagagaagctgaagattaact

SEQ ID NO: 18011 - DNA, 122 bp, Homo sapiens
  misc_feature (61)..(62): /note="This region represents a CpG dinucleotide"
  misc_feature (61)..(61): /note="Nucleotide may be methylated to form 5-methylcytosine"
caaggctattaacttgaaccttcaaataccaacagtcacaagttgtccctttgatatattcgcatctgttctgtgttgaattgaaaaaggttttcttgctacaaaatgtgtaaaggagaaaa

SEQ ID NO: 18012 - DNA, 122 bp, Homo sapiens
  misc_feature (61)..(62): /note="This region represents a CpG dinucleotide"
  misc_feature (61)..(61): /note="Nucleotide may be methylated to form 5-methylcytosine"
tcattgtaaaatatctttctttctagtcatacttcctgatgtgtagtttttaaataaacccgctcctgctttcctgtgcttacatatgtatgttatctcatttttcatccttttactattat

SEQ ID NO: 18013 - DNA, 122 bp, Homo sapiens
  misc_feature (61)..(62): /note="This region represents a CpG dinucleotide"
  misc_feature (61)..(61): /note="Nucleotide may be methylated to form 5-methylcytosine"
gggcttgggtagagcatgtgccctaaaaagcctgcatagagaagaagcatttcttgcctacgaaaaatccagcctgagtcacagccccaggaaggcccctgctgtcttgggtggcaataatg

SEQ ID NO: 18014 - DNA, 122 bp, Homo sapiens
  misc_feature (61)..(62): /note="This region represents a CpG dinucleotide"
  misc_feature (61)..(61): /note="Nucleotide may be methylated to form 5-methylcytosine"
cgagtcacgctgactcagcacattgcctctgcctccccgccgcgcccgcactccctggcccgccagccaacagcgccccacgagagccgcagcccccagcctggccaatagcaggtgagggc

SEQ ID NO: 18015 - DNA, 122 bp, Homo sapiens
  misc_feature (61)..(62): /note="This region represents a CpG dinucleotide"
  misc_feature (61)..(61): /note="Nucleotide may be methylated to form 5-methylcytosine"
tatggctgcagtggcttttcctcttggctattgagctcttggctgtgactctgggttttccggtctctcaggattttgtagtcatagtttgtcttgcaaccttagttttatgatgagtccaa

SEQ ID NO: 18016 - DNA, 122 bp, Homo sapiens
  misc_feature (61)..(62): /note="This region represents a CpG dinucleotide"
  misc_feature (61)..(61): /note="Nucleotide may be methylated to form 5-methylcytosine"
aaattacttctcagtgatgagagcctgacaaagcaattgtgccctgagaattggctgtgccgcagagagacaggctggcctcctaatctcaagaagcttgggtctttgtccctggatcctgg

SEQ ID NO: 18017 - DNA, 122 bp, Homo sapiens
  misc_feature (61)..(62): /note="This region represents a CpG dinucleotide"
  misc_feature (61)..(61): /note="Nucleotide may be methylated to form 5-methylcytosine"
tggttaccatttaataactccatattagcagaattcaggccactctcataatcctaacctcgtgggctttcattagttttatgaaggcagtttagttttgggaagggctagtatcacccttg

SEQ ID NO: 18018 - DNA, 122 bp, Homo sapiens
  misc_feature (61)..(62): /note="This region represents a CpG dinucleotide"
  misc_feature (61)..(61): /note="Nucleotide may be methylated to form 5-methylcytosine"
cattttttagcccatgcaggattgcctctcagtactgctgcagatgctgcagctgggatgcgtcatttgggtcccaattggggtctgtttcagggaactggccctgcgcatatgcctgggca

SEQ ID NO: 18019 - DNA, 122 bp, Homo sapiens
  misc_feature (61)..(62): /note="This region represents a CpG dinucleotide"
  misc_feature (61)..(61): /note="Nucleotide may be methylated to form 5-methylcytosine"
ctgactcctgatcttttagtagggaggaggaggagagtgaggtggtttagcttaagatgacgtatatgaatcatcaagttagagataccttgaagatctcttgcaaaattacccttctcata

SEQ ID NO: 18020 - DNA, 122 bp, Homo sapiens
  misc_feature (61)..(62): /note="This region represents a CpG dinucleotide"
  misc_feature (61)..(61): /note="Nucleotide may be methylated to form 5-methylcytosine"
tagtcatgcccgcccttgtagccaccgcttcacccaccttctccggcctgcccccagccccgccacttttcaagttgggcaacttaatggaaaaaaatgaaataaaaagaagagcgagacca

SEQ ID NO: 18021 - DNA, 122 bp, Homo sapiens
  misc_feature (61)..(62): /note="This region represents a CpG dinucleotide"
  misc_feature (61)..(61): /note="Nucleotide may be methylated to form 5-methylcytosine"
ggctctcagtattttaatctgcaaaacagggatgaccggtaaggtgatctctaagaggaccgtacagctcccaaatgctttaatcctgctagatcctcagaatacttgagtatgaaatcttc

SEQ ID NO: 18022 - DNA, 122 bp, Homo sapiens
  misc_feature (61)..(62): /note="This region represents a CpG dinucleotide"
  misc_feature (61)..(61): /note="Nucleotide may be methylated to form 5-methylcytosine"
gtgccttgggtgaagaatttaaggaggcatttactaagttctccaggtctccttcacttacgtgccctaagcacctcccctacccaccctggtcccagctctgtgcagtgccctcctcgccc

SEQ ID NO: 18023 - DNA, 122 bp, Homo sapiens
  misc_feature (61)..(62): /note="This region represents a CpG dinucleotide"
  misc_feature (61)..(61): /note="Nucleotide may be methylated to form 5-methylcytosine"
cctggaactgaaggtccctccccttttaggggactatttagggtaacttcccaaggttgccgtggcatttgtaaactgtcatggtggtggtgggagtgtcttttagcatgctgatgcattat

SEQ ID NO: 18024 - DNA, 122 bp, Homo sapiens
  misc_feature (61)..(62): /note="This region represents a CpG dinucleotide"
  misc_feature (61)..(61): /note="Nucleotide may be methylated to form 5-methylcytosine"
attgggtctcaaattagaacaagggccaggatttgaggtgttcaaggaattcaaaatagacgtgattggatttgaatggttgacagctttcttgaatatgcagtatgacgccactgggattt

SEQ ID NO: 18025 - DNA, 122 bp, Homo sapiens
  misc_feature (61)..(62): /note="This region represents a CpG dinucleotide"
  misc_feature (61)..(61): /note="Nucleotide may be methylated to form 5-methylcytosine"
aaaacaagggtttggggaaaactgtgcaaaaaatacttcacaacaagagaagacaaaaaacgaagcagagatggactgaataacagaagtgcccttctgcaaatatgactgtgttgcttttc

SEQ ID NO: 18026 - DNA, 122 bp, Homo sapiens
  misc_feature (61)..(62): /note="This region represents a CpG dinucleotide"
  misc_feature (61)..(61): /note="Nucleotide may be methylated to form 5-methylcytosine"
gctctgtagcatcagacatcgatgagtcatcagtgatgcagctggccgagatgggtttcccgctggaagcatgtcgcaaggctgtgtacttcactggaaatatgggcgccgaggtggccttc

SEQ ID NO: 18027 - DNA, 122 bp, Homo sapiens
  misc_feature (61)..(62): /note="This region represents a CpG dinucleotide"
  misc_feature (61)..(61): /note="Nucleotide may be methylated to form 5-methylcytosine"
cagcctccaccaagctctacccctggcctcagaacctcagggggcaaaagtggccagtcacgtcctctgtctgagaaactagccatgagtctcttgcaggagggaggaaatcattgcttact

SEQ ID NO: 18028 - DNA, 122 bp, Homo sapiens
  misc_feature (61)..(62): /note="This region represents a CpG dinucleotide"
  misc_feature (61)..(61): /note="Nucleotide may be methylated to form 5-methylcytosine"
acagctacagtgatgaacttgatagcatttcatatttgcaactgttaacacgtttctgcacgggcatctttgcaaggaacctgcacactgtatctgaaaggatgatgtcttgttcagataaa

SEQ ID NO: 18029 - DNA, 122 bp, Homo sapiens
  misc_feature (61)..(62): /note="This region represents a CpG dinucleotide"
  misc_feature (61)..(61): /note="Nucleotide may be methylated to form 5-methylcytosine"
gcagaggatatctgccttatctgacaaacatcatctcagctcaggaagccatgtacaatccgtctatcagatctgacattggtggtatctacgcagcccttcccagcacacaccctgccttt

SEQ ID NO: 18030 - DNA, 122 bp, Homo sapiens
  misc_feature (61)..(62): /note="This region represents a CpG dinucleotide"
  misc_feature (61)..(61): /note="Nucleotide may be methylated to form 5-methylcytosine"
aaatgtatggctttcttctgatctctagccaagttctctgtgtttatcctttttgagtgacgcacccttcaaccagttactcagatctgacaagctctgagtaaaataagaaattcctaatg

SEQ ID NO: 18031 - DNA, 122 bp, Homo sapiens
  misc_feature (61)..(62): /note="This region represents a CpG dinucleotide"
  misc_feature (61)..(61): /note="Nucleotide may be methylated to form 5-methylcytosine"
gggacccggcctcgttaaatggggagtgaccagaggtggaaggggcaggaccagaaccttcgcaaaagaaagagctagacctagagctctggtcctggcttggcgaagaatgggagaggtca

SEQ ID NO: 18032 - DNA, 122 bp, Homo sapiens
  misc_feature (61)..(62): /note="This region represents a CpG dinucleotide"
  misc_feature (61)..(61): /note="Nucleotide may be methylated to form 5-methylcytosine"
tgagactacaggtgcccgccaccacgcccggctatttatctccattcttatggagcacagcgtggtggagttcagtccacacgcttacaggtggcttatctgcaaaatgtgtctaaaaagaa

SEQ ID NO: 18033 - DNA, 122 bp, Homo sapiens
  misc_feature (61)..(62): /note="This region represents a CpG dinucleotide"
  misc_feature (61)..(61): /note="Nucleotide may be methylated to form 5-methylcytosine"
gagctaacctcttctttctaaaattattaactttgactactagtttgcatataaccattacgtatgatttacagtgttgggcttttacaaagtgacttgggcattacttccatcctggagtt

SEQ ID NO: 18034 - DNA, 122 bp, Homo sapiens
  misc_feature (61)..(62): /note="This region represents a CpG dinucleotide"
  misc_feature (61)..(61): /note="Nucleotide may be methylated to form 5-methylcytosine"
aaccaccggctggtcctgaagctagtgtatttccttttttcatttggaaaatgtggccaccgtatgaaaaccttaccttttttacattccaaacttctgccaaacctttgtatctttcacat

SEQ ID NO: 18035 - DNA, 122 bp, Homo sapiens
  misc_feature (61)..(62): /note="This region represents a CpG dinucleotide"
  misc_feature (61)..(61): /note="Nucleotide may be methylated to form 5-methylcytosine"
tttacagggatcaagtaattcttatacctccaaatgctatccttgttatcctttcactgacgttttctagccacaaacttaatttctatgtgtctcattgatctccattattaagtagaaag

SEQ ID NO: 18036 - DNA, 122 bp, Homo sapiens
  misc_feature (61)..(62): /note="This region represents a CpG dinucleotide"
  misc_feature (61)..(61): /note="Nucleotide may be methylated to form 5-methylcytosine"
gaggtgataggaggaaatctagtcaggctgatggaacttggtgcacagtatgtgtgcttacgggcaacaggtatcagtgatatccaaaaaagaagttctcgacaagccattggtcaaatggc

SEQ ID NO: 18037 - DNA, 122 bp, Homo sapiens
  misc_feature (61)..(62): /note="This region represents a CpG dinucleotide"
  misc_feature (61)..(61): /note="Nucleotide may be methylated to form 5-methylcytosine"
cttggaagctgccttctcttgtttgcatatgttttacagtgtcctaaccgctttggagagcgataacttgagttaaagcacctgtctgtgcctggcctccagcagatcttggtccagtgtga

SEQ ID NO: 18038 - DNA, 122 bp, Homo sapiens
  misc_feature (61)..(62): /note="This region represents a CpG dinucleotide"
  misc_feature (61)..(61): /note="Nucleotide may be methylated to form 5-methylcytosine"
ttgggatcccatggagcccaactcccttgtactaggggcaagaaaactgagtctcagagacggtgagtgatttgtttgagatcacacagcacaactcaagctgcttagccacaatgagacaa

SEQ ID NO: 18039 - DNA, 122 bp, Homo sapiens
  misc_feature (61)..(62): /note="This region represents a CpG dinucleotide"
  misc_feature (61)..(61): /note="Nucleotide may be methylated to form 5-methylcytosine"
caataaataaaaacatctttaaaagtatttaagagactttttttgttcaaacttggataacgcacacccttctcattgagatgctgcttcctcattggtttgtgctgaaatatgagtgcaat

SEQ ID NO: 18040 - DNA, 122 bp, Homo sapiens
  misc_feature (61)..(62): /note="This region represents a CpG dinucleotide"
  misc_feature (61)..(61): /note="Nucleotide may be methylated to form 5-methylcytosine"
caaccacgcccagcctgtatttcacaatctccagtttctttgaggtccacagaccttttgcggaataattcctccctcaacattagctcatagcttctatcttcttttctgcatctaactct

SEQ ID NO: 18041 - DNA, 122 bp, Homo sapiens
  misc_feature (61)..(62): /note="This region represents a CpG dinucleotide"
  misc_feature (61)..(61): /note="Nucleotide may be methylated to form 5-methylcytosine"
gcttctgccagaacaacagactgaggggccaagagggagagaggaggtaggaggccaggtcggaggctgctgcaggatccaagcaagggcatgatgtgactgtgacctgcatagatgggcat

SEQ ID NO: 18042 - DNA, 122 bp, Homo sapiens
  misc_feature (61)..(62): /note="This region represents a CpG dinucleotide"
  misc_feature (61)..(61): /note="Nucleotide may be methylated to form 5-methylcytosine"
taggaacgaatctagatggtgtaacaactactcactttatttgatggaagtcagaagtaacgatgagtgatttgcttagggaatcattttacattctatttgggaagcagctgacagttcaa

SEQ ID NO: 18043 - DNA, 122 bp, Homo sapiens
  misc_feature (61)..(62): /note="This region represents a CpG dinucleotide"
  misc_feature (61)..(61): /note="Nucleotide may be methylated to form 5-methylcytosine"
tttcaggtattttaacctccagattttaccagaaacccacagaatgagttgttatgctttcggtatcccgtgactgaaaataaaacccatcacaacaaaatgaccaaaaactgctatgaatt

SEQ ID NO: 18044 - DNA, 122 bp, Homo sapiens
  misc_feature (61)..(62): /note="This region represents a CpG dinucleotide"
  misc_feature (61)..(61): /note="Nucleotide may be methylated to form 5-methylcytosine"
ttttctttacatttgtgttgtgttttctaactcactgtaatgctttagctctcagtcatacgtgaaacccaatttccataagcaattaataataggaaaactcaaggatgttactttaaaat

SEQ ID NO: 18045 - DNA, 122 bp, Homo sapiens
  misc_feature (61)..(62): /note="This region represents a CpG dinucleotide"
  misc_feature (61)..(61): /note="Nucleotide may be methylated to form 5-methylcytosine"
tttccaatctgtatgactttcattaaattttatttccctgtttgacaagataggtcttcccgtgcaatgttgagtaggaggggtgaggtggagttccttgccttgttcctgatcttagaggg

SEQ ID NO: 18046 - DNA, 122 bp, Homo sapiens
  misc_feature (61)..(62): /note="This region represents a CpG dinucleotide"
  misc_feature (61)..(61): /note="Nucleotide may be methylated to form 5-methylcytosine"
ccacagatgactcaaataagacattgagagcctatgacagaattttcactttcttgaaaacgcccttgcataaggatgtggtgatgttagaaacccagtgttttcattgtccttcacatatg

SEQ ID NO: 18047 - DNA, 122 bp, Homo sapiens
  misc_feature (61)..(62): /note="This region represents a CpG dinucleotide"
  misc_feature (61)..(61): /note="Nucleotide may be methylated to form 5-methylcytosine"
cgcagatgtgttcccagatggtgcctggcctggtgttctgagtcatgggtctacagaggccgccacaccttgacacctggtgaaaggtcgccacagtgccctcgcttgtgattagccctttg

SEQ ID NO: 18048 - DNA, 122 bp, Homo sapiens
  misc_feature (61)..(62): /note="This region represents a CpG dinucleotide"
  misc_feature (61)..(61): /note="Nucleotide may be methylated to form 5-methylcytosine"
cctggctgagcttcggaaccccgaggagatgactcgctgtggcttctcgttggccttgggcgcccttccaggcttccttctgaaaggccggctccagcaggtgaggctggccacgcgcagtg

SEQ ID NO: 18049 - DNA, 122 bp, Homo sapiens
  misc_feature (61)..(62): /note="This region represents a CpG dinucleotide"
  misc_feature (61)..(61): /note="Nucleotide may be methylated to form 5-methylcytosine"
atgcctggtgtcctgccaccaatggctccaggaaccccaagttctctcccacaccctgggcgtgattaaaactagtaacacctttctgttagaaaccacagcgggtgaggacacagctgttt

SEQ ID NO: 18050 - DNA, 122 bp, Homo sapiens
  misc_feature (61)..(62): /note="This region represents a CpG dinucleotide"
  misc_feature (61)..(61): /note="Nucleotide may be methylated to form 5-methylcytosine"
tgggattagaggtgtgagccaccacacccagcccaggtgggacacatttattcttcaacacgcctgctgggggcagtacagcatggtgatttagaacaagagttcatccacaactacagccc

SEQ ID NO: 18051 - DNA, 122 bp, Homo sapiens
  misc_feature (61)..(62): /note="This region represents a CpG dinucleotide"
  misc_feature (61)..(61): /note="Nucleotide may be methylated to form 5-methylcytosine"
cacttgagtccattaatttcagtgatgttcatacactgttacaagattcactcattcacacgcagggcagttgttggagatgttggcaatgatttcctgggtgtgcagggtgggcaaatctt

SEQ ID NO: 18052 - DNA, 122 bp, Homo sapiens
  misc_feature (61)..(62): /note="This region represents a CpG dinucleotide"
  misc_feature (61)..(61): /note="Nucleotide may be methylated to form 5-methylcytosine"
cttaccacatgcaccaaacagactgcaactggcagcccttgcctctttccacacccacagcgagacgccctatgaggaggccaccttgagaagagtcaactctcaactcttcatgccagtaa

SEQ ID NO: 18053 - DNA, 122 bp, Homo sapiens
  misc_feature (61)..(62): /note="This region represents a CpG dinucleotide"
  misc_feature (61)..(61): /note="Nucleotide may be methylated to form 5-methylcytosine"
tgagtggtcagagcaccttgaagtctgtgtagcacttgcatgtacagtgtcccttttcatcgtcacagccctgagaggtaaatggtgtgactcttcccattttgcaaatgagaaaagagaaa

SEQ ID NO: 18054 - DNA, 122 bp, Homo sapiens
  misc_feature (61)..(62): /note="This region represents a CpG dinucleotide"
  misc_feature (61)..(61): /note="Nucleotide may be methylated to form 5-methylcytosine"
gggctaagatgcctacctccatattagcattttatatgctatgctttaattgttgatttacgtctctatcttctccatcagaggttgtgcctacaatttttctgtgcctaacatataataga

SEQ ID NO: 18055 - DNA, 122 bp, Homo sapiens
  misc_feature (61)..(62): /note="This region represents a CpG dinucleotide"
  misc_feature (61)..(61): /note="Nucleotide may be methylated to form 5-methylcytosine"
tttttgcaaggcccgagatggcgggccctgcgcaggccgccctattccgcgccctcagggcgtcagtatccgcctgaggccggatacccactctgggctcggatacccgcgctgggcccgga

SEQ ID NO: 18056 - DNA, 122 bp, Homo sapiens
  misc_feature (61)..(62): /note="This region represents a CpG dinucleotide"
  misc_feature (61)..(61): /note="Nucleotide may be methylated to form 5-methylcytosine"
gaaaaacagacccaaaacagagctggggaactgccgacaagcttcccaaagccccagaaacgccccagggcagcaggagacaaatgctttcaggcctgaaaatctccacggcctcagacttc

SEQ ID NO: 18057 - DNA, 122 bp, Homo sapiens
  misc_feature (61)..(62): /note="This region represents a CpG dinucleotide"
  misc_feature (61)..(61): /note="Nucleotide may be methylated to form 5-methylcytosine"
gcctcagatgtctcatctctaaatgaagaatgacctcatagggatgataagaggaatacacgaagtcatagctgtaaacttcttagtacagtgtctaacagaaatggttcactagcactcaa

SEQ ID NO: 18058 - DNA, 122 bp, Homo sapiens
  misc_feature (61)..(62): /note="This region represents a CpG dinucleotide"
  misc_feature (61)..(61): /note="Nucleotide may be methylated to form 5-methylcytosine"
gactgaacgagacttcatctaaaaaaaaaaaatagagaaaccctgagttagatagacctacgttcaaatcttaacttagcaaccacttcccagctgcgtgaccttgagtaagatgcttcacc

SEQ ID NO: 18059 - DNA, 122 bp, Homo sapiens
  misc_feature (61)..(62): /note="This region represents a CpG dinucleotide"
  misc_feature (61)..(61): /note="Nucleotide may be methylated to form 5-methylcytosine"
ccaggaagcaaagtcaagcttgtttctgccaacgtggtgcatgagagcacatgctgcttccgccccggaacctgagcacgctgagacgccccagcccatcccccatctctgctgtcatcacc

SEQ ID NO: 18060 - DNA, 122 bp, Homo sapiens
  misc_feature (61)..(62): /note="This region represents a CpG dinucleotide"
  misc_feature (61)..(61): /note="Nucleotide may be methylated to form 5-methylcytosine"
tctccacaacaaagaatatccagcccaaaatgtcagtagtgccactgttgataaaccctacgtagatacaaacttgaataagactcttggcttcctcagtgacttaacgttcatcctgtgta

SEQ ID NO: 18061 - DNA, 122 bp, Homo sapiens
  misc_feature (61)..(62): /note="This region represents a CpG dinucleotide"
  misc_feature (61)..(61): /note="Nucleotide may be methylated to form 5-methylcytosine"
tccagacttgaagaaatttccattctgttaaatttctagccaactcatcacaatcaactacgcaagcaaacaataccccataagaacaacaataagtaatcacatattgctggctccaggaa

SEQ ID NO: 18062 - DNA, 122 bp, Homo sapiens
  misc_feature (61)..(62): /note="This region represents a CpG dinucleotide"
  misc_feature (61)..(61): /note="Nucleotide may be methylated to form 5-methylcytosine"
ttttacatgaaagaaaattgaaacttcaaatgtttaaatactctaggttaaataacttgccgaatcacttaactaataagcagtagagtttttattcagagcccaagctatggtttccactt

SEQ ID NO: 18063 - DNA, 122 bp, Homo sapiens
  misc_feature (61)..(62): /note="This region represents a CpG dinucleotide"
  misc_feature (61)..(61): /note="Nucleotide may be methylated to form 5-methylcytosine"
caaataacactatctttaatacagcttacatatcctcatttaagtattcaataatcacaacggttcattatgtgaacagcagtgaaaaggtttaatcactggatatgaagttactagaagaa

SEQ ID NO: 18064 - DNA, 122 bp, Homo sapiens
  misc_feature (61)..(62): /note="This region represents a CpG dinucleotide"
  misc_feature (61)..(61): /note="Nucleotide may be methylated to form 5-methylcytosine"
cacagagattgggagatacagaactgacgcatcagaaatgtggtgatgcaggaccatgggcgtgagttaccaaagcccatggccatcagcaggaactgtgaccggccaaacaaagacaaatg

SEQ ID NO: 18065 - DNA, 122 bp, Homo sapiens
  misc_feature (61)..(62): /note="This region represents a CpG dinucleotide"
  misc_feature (61)..(61): /note="Nucleotide may be methylated to form 5-methylcytosine"
acttgctcttgtgggaaacagggattactaacaagttttccgattgaggactacctgacacggcagatttgtgatttagaaagattacaagtctgggcactgtggctcaagtctgtaatccc

SEQ ID NO: 18066 - DNA, 122 bp, Homo sapiens
  misc_feature (61)..(62): /note="This region represents a CpG dinucleotide"
  misc_feature (61)..(61): /note="Nucleotide may be methylated to form 5-methylcytosine"
tcaaggtttctaagatttactattcatacaattacaattgtcattaagagttttcgctggcgtaagtggcacaacacctttgcaatgagcaaacatagtacttatgcatgagttcagggtac

SEQ ID NO: 18067 - DNA, 122 bp, Homo sapiens
  misc_feature (61)..(62): /note="This region represents a CpG dinucleotide"
  misc_feature (61)..(61): /note="Nucleotide may be methylated to form 5-methylcytosine"
atgaagggagagagagacacaagctgagaactggctgtgccttgaagctagcagagaagacgaaggacacgctggcagggaggtgggaggagcccctgggggaagacagcatcaccgcaagt

SEQ ID NO: 18068 - DNA, 122 bp, Homo sapiens
  misc_feature (61)..(62): /note="This region represents a CpG dinucleotide"
  misc_feature (61)..(61): /note="Nucleotide may be methylated to form 5-methylcytosine"
tatatgccctgagggaactaacacagttgcataggatggcaagaaacctatacatttttgcggaatgaattaataaaatctattgacttttgtgctctgcttttctcccttaactttattgc

SEQ ID NO: 18069 - DNA, 122 bp, Homo sapiens
  misc_feature (61)..(62): /note="This region represents a CpG dinucleotide"
  misc_feature (61)..(61): /note="Nucleotide may be methylated to form 5-methylcytosine"
tacatgtgactgtatgaatggcatgttacggggcaatgtgaatgtgcactgggtttgtaccggcctctaacctgggtttcgtatgtgccatcaaagtcatccaggaggcgagtcaggccaaa

SEQ ID NO: 18070 - DNA, 122 bp, Homo sapiens
  misc_feature (61)..(62): /note="This region represents a CpG dinucleotide"
  misc_feature (61)..(61): /note="Nucleotide may be methylated to form 5-methylcytosine"
atgtacctgcctcagccacccaaagtgctaggattacaggcatgagccacagtgaccagccgggactggaatttgaacttaggcttgatgactaacttttgcatttgcttttctcactggct

SEQ ID NO: 18071 - DNA, 122 bp, Homo sapiens
  misc_feature (61)..(62): /note="This region represents a CpG dinucleotide"
  misc_feature (61)..(61): /note="Nucleotide may be methylated to form 5-methylcytosine"
cagttcccactttcctgcattctctgggcccatggtggcatcttttgcttgcggtgcattcgtaactttccaacagcctgcctgtcatgtggattagcggttgtgtttttgtatatccgagt

SEQ ID NO: 18072 - DNA, 122 bp, Homo sapiens
  misc_feature (61)..(62): /note="This region represents a CpG dinucleotide"
  misc_feature (61)..(61): /note="Nucleotide may be methylated to form 5-methylcytosine"
ccgccgcacccaccccgttggcctcaccctggctcgggcccctttatcatcctgcagctacgctccgaccaggaggcacagccagtccccacagccggctctaccgctctgctcgcaggttt

SEQ ID NO: 18073 - DNA, 122 bp, Homo sapiens
  misc_feature (61)..(62): /note="This region represents a CpG dinucleotide"
  misc_feature (61)..(61): /note="Nucleotide may be methylated to form 5-methylcytosine"
ttatcacactaataaaatcaactgtaatgaactagtacccagtttataatcagattccctcggaaaggaatttcctttttgaaagactaaaatatgcctttcaaaaattcttttcagagttg

SEQ ID NO: 18074 - DNA, 122 bp, Homo sapiens
  misc_feature (61)..(62): /note="This region represents a CpG dinucleotide"
  misc_feature (61)..(61): /note="Nucleotide may be methylated to form 5-methylcytosine"
cgtgtgtctctgtgcttatgcatggccccatttgcctgctgctgtgagcaagtgtgtgtgcgtgcatctgtgtgtgtgtctctgtgcgtgtgcacgggcgtgtgcatgtgcgtctgtgtatc

SEQ ID NO: 18075 - DNA, 122 bp, Homo sapiens
  misc_feature (61)..(62): /note="This region represents a CpG dinucleotide"
  misc_feature (61)..(61): /note="Nucleotide may be methylated to form 5-methylcytosine"
catactgggaagccagggtagacaggccagaaggcaggctctttcattgcaaaacagcagcgtgtcttctgggtggatccccaagggataaaggtctggccatatgggaatccaggtgttag

SEQ ID NO: 18076 - DNA, 122 bp, Homo sapiens
  misc_feature (61)..(62): /note="This region represents a CpG dinucleotide"
  misc_feature (61)..(61): /note="Nucleotide may be methylated to form 5-methylcytosine"
gtcaaggttacaaaaggatcttatagtcttatctgcttcctgtctgtgctttgtaaaatccgctaccaccactacccccaacccagctcgtgaactctgataatggcctaatattggccttt

SEQ ID NO: 18077 - DNA, 122 bp, Homo sapiens
  misc_feature (61)..(62): /note="This region represents a CpG dinucleotide"
  misc_feature (61)..(61): /note="Nucleotide may be methylated to form 5-methylcytosine"
tttaatccgtatcacaccactgcactgagcattgtacttcattgaggaatgtgctccaaccgtgacacacttaggtgaactttcatcatcatgtgataggcacatctatttccaaacacatc

SEQ ID NO: 18078 - DNA, 122 bp, Homo sapiens
  misc_feature (61)..(62): /note="This region represents a CpG dinucleotide"
  misc_feature (61)..(61): /note="Nucleotide may be methylated to form 5-methylcytosine"
cattagccagaacttgtaagtagaaaatagtgagaagtcaggcagtcaacagtcctgaaacgttctcttccaactgaccagccaggaagccaaacaactaaagtgagaaaacctcctgccac

SEQ ID NO: 18079 - DNA, 122 bp, Homo sapiens
  misc_feature (61)..(62): /note="This region represents a CpG dinucleotide"
  misc_feature (61)..(61): /note="Nucleotide may be methylated to form 5-methylcytosine"
gcatctccagctcccagcaacctagcagtgcctctacgaaagtcccagtcccctactccacgaaaacacatcaaagcctcaggggaattgaatgccacaccatacgccgaggcacacacatg

SEQ ID NO: 18080 - DNA, 122 bp, Homo sapiens
  misc_feature (61)..(62): /note="This region represents a CpG dinucleotide"
  misc_feature (61)..(61): /note="Nucleotide may be methylated to form 5-methylcytosine"
agaaagataatgcagagctgtataggcacgcactccatcccgaatgcttcctgctgcttccgtccatgtgaccttttctggtttatgaactatcataaagaacaagaagaaacaatctgtta

SEQ ID NO: 18081 - DNA, 122 bp, Homo sapiens
  misc_feature (61)..(62): /note="This region represents a CpG dinucleotide"
  misc_feature (61)..(61): /note="Nucleotide may be methylated to form 5-methylcytosine"
ttcttgccttgctaacacttactggcctagtattttttgacattttcattctcagtggggcggaatggctaagtgtgtaggtggtggaatcagaatgcctgggttttaatcccagctctgct

SEQ ID NO: 18082 - DNA, 122 bp, Homo sapiens
  misc_feature (61)..(62): /note="This region represents a CpG dinucleotide"
  misc_feature (61)..(61): /note="Nucleotide may be methylated to form 5-methylcytosine"
atgttctgaaatgtttagatggctgctttcttccagagtcccaaagcttaactgtgccatcgtcactgctagtgcaaacaaggtggctagataacaggaattcacaaaggaagtatgtccct

SEQ ID NO: 18083 - DNA, 122 bp, Homo sapiens
  misc_feature (61)..(62): /note="This region represents a CpG dinucleotide"
  misc_feature (61)..(61): /note="Nucleotide may be methylated to form 5-methylcytosine"
gctcgatcattttgcaaggcccacatcatgtgcctgagaagtcaactactccaggtttatcgcctgcagcctccaaggcttcctgaaaagcaaacttctgctcaatttgcttcaccattttg

SEQ ID NO: 18084 - DNA, 122 bp, Homo sapiens
  misc_feature (61)..(62): /note="This region represents a CpG dinucleotide"
  misc_feature (61)..(61): /note="Nucleotide may be methylated to form 5-methylcytosine"
agagggaaggagatcccggttcaaacagcataagtgactcacccagcatcacagagctagcgtgtgggtggaactgagagtcatgcatcagctcctgcaccacagctgcctccctggcaggg

SEQ ID NO: 18085 - DNA, 122 bp, Homo sapiens
  misc_feature (61)..(62): /note="This region represents a CpG dinucleotide"
  misc_feature (61)..(61): /note="Nucleotide may be methylated to form 5-methylcytosine"
agccaacaccttggggtagcttttacctttactaacagatctcagcatggtatgctactccgtaccatgagtggctgttaccaatgccatgggttcttgtaatcacccaggatagaaatcaa

SEQ ID NO: 18086 - DNA, 122 bp, Homo sapiens
  misc_feature (61)..(62): /note="This region represents a CpG dinucleotide"
  misc_feature (61)..(61): /note="Nucleotide may be methylated to form 5-methylcytosine"
ccgtgaccagccagtctcctgttccatgtaaactctgtatcctttactaaggtgtggcaccgtgcacaacagggcaagtggtcaccctcagagagtggtcctgaagtcctcctccgggcagc

SEQ ID NO: 18087 - DNA, 122 bp, Homo sapiens
  misc_feature (61)..(62): /note="This region represents a CpG dinucleotide"
  misc_feature (61)..(61): /note="Nucleotide may be methylated to form 5-methylcytosine"
gatgacgtcaaacccccggcattcaaaccttcccaagttctggctgcagctgtccctttccggggaaacaaaggcacctccagcgcccccacccccagccagcctcaccgatcaaggaggcc

SEQ ID NO: 18088 - DNA, 122 bp, Homo sapiens
  misc_feature (61)..(62): /note="This region represents a CpG dinucleotide"
  misc_feature (61)..(61): /note="Nucleotide may be methylated to form 5-methylcytosine"
gctctgtttggttttctccttcctgccctggaacctcagacgccagtctggctgtgaaggcgcccatatactggggaaagtacaaagcccctacacagctggctgcagagaaccgcgcgcag

SEQ ID NO: 18089 - DNA, 122 bp, Homo sapiens
  misc_feature (61)..(62): /note="This region represents a CpG dinucleotide"
  misc_feature (61)..(61): /note="Nucleotide may be methylated to form 5-methylcytosine"
taggattgcaaaagcaatgatcttgcaagaaacgggaccttcactgcaaatgggatacaccgttaaaatacacaagagaaagcattttactttctttgttttctttttaagcttttatcata

SEQ ID NO: 18090 - DNA, 122 bp, Homo sapiens
  misc_feature (61)..(62): /note="This region represents a CpG dinucleotide"
  misc_feature (61)..(61): /note="Nucleotide may be methylated to form 5-methylcytosine"
gctttgaggagtgatttccagtgcccataggccagcagaccactcagacaagggcaatttcgagatttctaatctaggcaagggccgtgccaagcaccacactgacagctatcatttgaggc

SEQ ID NO: 18091 - DNA, 122 bp, Homo sapiens
  misc_feature (61)..(62): /note="This region represents a CpG dinucleotide"
  misc_feature (61)..(61): /note="Nucleotide may be methylated to form 5-methylcytosine"
ttaaaaggccatgaccaggaaatagccgtaactggcctttaaaagataagtaaccaaaagcgtttattattttgtaaggacaaaaggcagggaaagaatgttgacttcatgccaagagaagt

SEQ ID NO: 18092 - DNA, 122 bp, Homo sapiens
  misc_feature (61)..(62): /note="This region represents a CpG dinucleotide"
  misc_feature (61)..(61): /note="Nucleotide may be methylated to form 5-methylcytosine"
cctcctggccgcctgacgcccgctttcccaggcagagctggtgcacgaggacatcgagagcgcgttggccgactgccggctgggcaagaagatgcggccgcagaccctgaagtagggcagcg

SEQ ID NO: 18093 - DNA, 122 bp, Homo sapiens
  misc_feature (61)..(62): /note="This region represents a CpG dinucleotide"
  misc_feature (61)..(61): /note="Nucleotide may be methylated to form 5-methylcytosine"
caggacaagtgttcttaacctttttgaggtgttgggccttttcgagactctgatggaagccgtggaggaatgttctcagtgcgtcactcaaaatgatgcacacaacttcaacccaatttcag

SEQ ID NO: 18094 - DNA, 122 bp, Homo sapiens
  misc_feature (61)..(62): /note="This region represents a CpG dinucleotide"
  misc_feature (61)..(61): /note="Nucleotide may be methylated to form 5-methylcytosine"
aagggaagcaacagggctggctcatacacccactttccctttggttgatatcaggttttgcgttagttttgagagtctgttttgccgtagtgcacttccccttgggtttttctgaaatgttt

SEQ ID NO: 18095 - DNA, 122 bp, Homo sapiens
  misc_feature (61)..(62): /note="This region represents a CpG dinucleotide"
  misc_feature (61)..(61): /note="Nucleotide may be methylated to form 5-methylcytosine"
tgaactcctggcctcaaaccatcctcccgccgcagcctcccaaagtgctggtattacaggcgtgagccactacacctgaccgaaattttcattttataaggagggacgcttcaggcctggag

SEQ ID NO: 18096 - DNA, 122 bp, Homo sapiens
  misc_feature (61)..(62): /note="This region represents a CpG dinucleotide"
  misc_feature (61)..(61): /note="Nucleotide may be methylated to form 5-methylcytosine"
cttctgccccgccctgccggccgtggtggccctgctgctgcactacagcatcgacgaggccgagtgcttcgagaaggcctgccgcatcctggcctgcaatgaccccggcaggaggctgatcg

SEQ ID NO: 18097 - DNA, 122 bp, Homo sapiens
  misc_feature (61)..(62): /note="This region represents a CpG dinucleotide"
  misc_feature (61)..(61): /note="Nucleotide may be methylated to form 5-methylcytosine"
tttgcatctaaaatgttacaatgaaaccacataactccctcctcaaaatgtttcatgtgacgtctccttgaagtggctttcactttagctatgtgtggcttcctttatttgcttcagcaaca

SEQ ID NO: 18098 - DNA, 122 bp, Homo sapiens
  misc_feature (61)..(62): /note="This region represents a CpG dinucleotide"
  misc_feature (61)..(61): /note="Nucleotide may be methylated to form 5-methylcytosine"
tcttggcacatccctggcctcaggccctcacctaacagtgaggcagcagctgcccagccccgcaatgtgcctgctgtcaggcagctcttgcctgaaacttacttccacattctttcctgatg

SEQ ID NO: 18099 - DNA, 122 bp, Homo sapiens
  misc_feature (61)..(62): /note="This region represents a CpG dinucleotide"
  misc_feature (61)..(61): /note="Nucleotide may be methylated to form 5-methylcytosine"
tactgaaaatgacaagttaattggcagagaaattaatctataaaagggttgtgtccagagcggaggagcctcattagcaactgaacagaacccactcagaagacgcactcacccacacgtgc

SEQ ID NO: 18100 - DNA, 122 bp, Homo sapiens
  misc_feature (61)..(62): /note="This region represents a CpG dinucleotide"
  misc_feature (61)..(61): /note="Nucleotide may be methylated to form 5-methylcytosine"
aatatatctggaaccttcatgggagtagcatgttatctgttgttttcagtgggatcttgtcgggtgactaagaattgaattataagagagactttctaagtttcttcttccaatgtcattgc

SEQ ID NO: 18101 - DNA, 122 bp, Homo sapiens
  misc_feature (61)..(62): /note="This region represents a CpG dinucleotide"
  misc_feature (61)..(61): /note="Nucleotide may be methylated to form 5-methylcytosine"
tcactagattagaaaatgccacatatgactaacaggtgatttcagtttcattttagtattcgatcttaaaggtttacacatcctttaattatacttgtttttagtgaagaagaagtaaaata

SEQ ID NO: 18102 - DNA, 122 bp, Homo sapiens
  misc_feature (61)..(62): /note="This region represents a CpG dinucleotide"
  misc_feature (61)..(61): /note="Nucleotide may be methylated to form 5-methylcytosine"
acatccttctctgcagccacaccccaacacacggagcaagaatggagagatggctcctagcgaaaactagactactgagaggaggggaaagaatgctgagcaggcaaaacaacagatgatcc

SEQ ID NO: 18103 - DNA, 122 bp, Homo sapiens
  misc_feature (61)..(62): /note="This region represents a CpG dinucleotide"
  misc_feature (61)..(61): /note="Nucleotide may be methylated to form 5-methylcytosine"
cgtcgcaggcctcggggccatgctcctctttgctctcggcctcggcgtcgctctcaccctcgctgggacataaatctaccacaggcgaaggaaaaaaccaaggcagaagggcgttatctcca

SEQ ID NO: 18104 - DNA, 122 bp, Homo sapiens
  misc_feature (61)..(62): /note="This region represents a CpG dinucleotide"
  misc_feature (61)..(61): /note="Nucleotide may be methylated to form 5-methylcytosine"
tatacctacatacccacaaagaatctatttcctctcaattaggagtgatatcacctccaacgagaatgacggatcacagagaacagagtgttctgttccaactagccagttagggaaaacta

SEQ ID NO: 18105 - DNA, 122 bp, Homo sapiens
  misc_feature (61)..(62): /note="This region represents a CpG dinucleotide"
  misc_feature (61)..(61): /note="Nucleotide may be methylated to form 5-methylcytosine"
tgtctttgctgatctctttattatgatgaaaattctctggatggaagggtcatcagctgccgtctcctttgctactctgctagatatccttacaatttggtttagaattttagtaccactaa

SEQ ID NO: 18106 - DNA, 122 bp, Homo sapiens
  misc_feature (61)..(62): /note="This region represents a CpG dinucleotide"
  misc_feature (61)..(61): /note="Nucleotide may be methylated to form 5-methylcytosine"
tttcccaagatgctcagggttgctggcttctgcactcaccatctcactttctggttgctgcgtggagataagctatcgacttctgcacaggatcaaccaaggaagtcaggagggtggggagg

SEQ ID NO: 18107 - DNA, 122 bp, Homo sapiens
  misc_feature (61)..(62): /note="This region represents a CpG dinucleotide"
  misc_feature (61)..(61): /note="Nucleotide may be methylated to form 5-methylcytosine"
cagtaaaatagatcttaaagtaattctctctaaaatgttgatattttgatattttaaatgcgacctgaagatcagcagcattgttatcacctacaaacctcttagaaatgcagaatttcagg

SEQ ID NO: 18108 - DNA, 122 bp, Homo sapiens
  misc_feature (61)..(62): /note="This region represents a CpG dinucleotide"
  misc_feature (61)..(61): /note="Nucleotide may be methylated to form 5-methylcytosine"
cagtctccctccctctgcaaaccagactcctcctttgcctaactcctttttttattcctgcgtcacaaatacaaaatggagttagctgggagcaaaaacaatctgtctaaaatggctgaatg

SEQ ID NO: 18109 - DNA, 122 bp, Homo sapiens
  misc_feature (61)..(62): /note="This region represents a CpG dinucleotide"
  misc_feature (61)..(61): /note="Nucleotide may be methylated to form 5-methylcytosine"
ttcgttgttctgaaatacaacgatggtttttcatatcattggtcgtggttgtagcccgtgcgagaataatgatgtatgctttccctggaaatcagctagatccagagttcccaaatggtggt

SEQ ID NO: 18110 - DNA, 122 bp, Homo sapiens
  misc_feature (61)..(62): /note="This region represents a CpG dinucleotide"
  misc_feature (61)..(61): /note="Nucleotide may be methylated to form 5-methylcytosine"
cagactggaggtgagccctttatcagttatgtcttctccctgtatgtgagctctctgaatcgtgtcctttggtaaacagaaggtcttaatttttacatagtcttatttattattaatctttt

SEQ ID NO: 18111 - DNA, 122 bp, Homo sapiens
  misc_feature (61)..(62): /note="This region represents a CpG dinucleotide"
  misc_feature (61)..(61): /note="Nucleotide may be methylated to form 5-methylcytosine"
ctgtccaaggtcccatgtgagcatcacaaacaatctctgagtgacacaagggatgacgggcgcaaccaaaccttgttttaacaaggcattctacccctcctgccctcactcagagaagtaaa

SEQ ID NO: 18112 - DNA, 122 bp, Homo sapiens
  misc_feature (61)..(62): /note="This region represents a CpG dinucleotide"
  misc_feature (61)..(61): /note="Nucleotide may be methylated to form 5-methylcytosine"
ctgtggcaaaaggaaatgcttaaacactccagcagcatctttagaggctggctctaaaagcggagtttggatatttaccagaaacatgcaaactgctgtggaaaaggaacggaaagagctgc

SEQ ID NO: 18113 - DNA, 122 bp, Homo sapiens
  misc_feature (61)..(62): /note="This region represents a CpG dinucleotide"
  misc_feature (61)..(61): /note="Nucleotide may be methylated to form 5-methylcytosine"
ggacctggtggaaggcctcgctgaagtgctgcatggagctgagcaccatgccctgcatgacgtcgggcagggcgcggctctcgtcgcccacgcccacgaccgcgccccgcgagctgttctcg

SEQ ID NO: 18114 - DNA, 122 bp, Homo sapiens
  misc_feature (61)..(62): /note="This region represents a CpG dinucleotide"
  misc_feature (61)..(61): /note="Nucleotide may be methylated to form 5-methylcytosine"
tcattgctggcaggaatgtaaaagagtacagccactgtggaaaccagtatggcagttcctcgaaaatgaaacacaggattatcctatgatccagcagttaagcaggtctcaatagggatttt

SEQ ID NO: 18115 - DNA, 122 bp, Homo sapiens
  misc_feature (61)..(62): /note="This region represents a CpG dinucleotide"
  misc_feature (61)..(61): /note="Nucleotide may be methylated to form 5-methylcytosine"
cggagggggacccaagagccgagcgccccacccttcccgggatggttggaatagttggagcgggagactagggcctccgctggcggcgggagcgggacgggcggaggaatgcgagctgagga

SEQ ID NO: 18116 - DNA, 122 bp, Homo sapiens
  misc_feature (61)..(62): /note="This region represents a CpG dinucleotide"
  misc_feature (61)..(61): /note="Nucleotide may be methylated to form 5-methylcytosine"
gtagaaacttcaatttaaagagatgtacaaatggccaataggcacatggaaaatgttctacgtcatcaatcaccagggaaataattacaaaatggctaaaatccagagacttgtacctgagt

SEQ ID NO: 18117 - DNA, 122 bp, Homo sapiens
  misc_feature (61)..(62): /note="This region represents a CpG dinucleotide"
  misc_feature (61)..(61): /note="Nucleotide may be methylated to form 5-methylcytosine"
gctcccggaggccctgggactgcacccagcgcaggtgccggccctggagctggagatggacgagcagacccaggccccaggccgagcctctgagccctgacaccccttacgattcatccaaa

SEQ ID NO: 18118 - DNA, 122 bp, Homo sapiens
  misc_feature (61)..(62): /note="This region represents a CpG dinucleotide"
  misc_feature (61)..(61): /note="Nucleotide may be methylated to form 5-methylcytosine"
ttgaccaagcaagatgactgttaggcagatggacagatgctctgaggtgcctatcttgtacgtttttggtgctgccaacggccaccagctcctggcaatcctatgggcagcactcatcgcct

SEQ ID NO: 18119 - DNA, 122 bp, Homo sapiens
  misc_feature (61)..(62): /note="This region represents a CpG dinucleotide"
  misc_feature (61)..(61): /note="Nucleotide may be methylated to form 5-methylcytosine"
tattatgaggatggtcttttccttatgtttcgctttagaaattcagtctataggactgggcgcagtggctcacacctataaccccagccctttgggaggctgaggggggcagattacctgag

SEQ ID NO: 18120 - DNA, 122 bp, Homo sapiens
  misc_feature (61)..(62): /note="This region represents a CpG dinucleotide"
  misc_feature (61)..(61): /note="Nucleotide may be methylated to form 5-methylcytosine"
tacagttccttaaacttccagtgggcagactaccaaaccagggttgatcatacctgggaccgtaggtcagtaacatcccttacttgtaaccatttctccctagagtccagactagtggacat

SEQ ID NO: 18121 - DNA, 122 bp, Homo sapiens
  misc_feature (61)..(62): /note="This region represents a CpG dinucleotide"
  misc_feature (61)..(61): /note="Nucleotide may be methylated to form 5-methylcytosine"
gtgaaggaaggcctcccccttttactgggaggcacctgggtgagtggtggcactgtagaccgagactggagttcaggaggaggaggagctggtctaatgggaaggctgagaagtttaatttc

SEQ ID NO: 18122 - DNA, 122 bp, Homo sapiens
  misc_feature (61)..(62): /note="This region represents a CpG dinucleotide"
  misc_feature (61)..(61): /note="Nucleotide may be methylated to form 5-methylcytosine"
tgtgattggctgacaaagggtctttgcccccagtgctaaagatggtcctgctcattcgcacgggaggtgctggaggcttgtcttccagttctctgttatcacacatgattcagaaatatgaa

SEQ ID NO: 18123 - DNA, 122 bp, Homo sapiens
  misc_feature (61)..(62): /note="This region represents a CpG dinucleotide"
  misc_feature (61)..(61): /note="Nucleotide may be methylated to form 5-methylcytosine"
ccacagggctgggcctgcccctgcgaggcatgttttttttctggaaggaggaagcggcaacgggttacaggctggaggctgtccctgtgctcagatcccacacacgtccccagcaagcccca

SEQ ID NO: 18124 - DNA, 122 bp, Homo sapiens
  misc_feature (61)..(62): /note="This region represents a CpG dinucleotide"
  misc_feature (61)..(61): /note="Nucleotide may be methylated to form 5-methylcytosine"
gcccgccccgtgttgggaaaactgcttgggccagcagtccatggccctaggagagagaatcggctggccgctgctggagccgcagagcagctgccaaactgcagtccttcgagtccctgcga

SEQ ID NO: 18125 - DNA, 122 bp, Homo sapiens
  misc_feature (61)..(62): /note="This region represents a CpG dinucleotide"
  misc_feature (61)..(61): /note="Nucleotide may be methylated to form 5-methylcytosine"
agggcttcacaacctcctctttgggttttatataccattttgacaaaggacaatatattgcggagaactgcctagacaaaagaaagaggggtttggactcctggggcagtaaattgtaggaa

SEQ ID NO: 18126 - DNA, 122 bp, Homo sapiens
  misc_feature (61)..(62): /note="This region represents a CpG dinucleotide"
  misc_feature (61)..(61): /note="Nucleotide may be methylated to form 5-methylcytosine"
cctcagaagtggatgtggttaaaggatggaacaatgaagggtttgatggctgcaataaggcgtacaagacaatgagatgagtaataagctgacagaatgcttgctgaataatcctgatttaa

SEQ ID NO: 18127 - DNA, 122 bp, Homo sapiens
  misc_feature (61)..(62): /note="This region represents a CpG dinucleotide"
  misc_feature (61)..(61): /note="Nucleotide may be methylated to form 5-methylcytosine"
cagtccttagtttttgctttctatctcattttcattgagaatttaaagtggaatttataacgaatttgtcagacctggtaagcatttgatatatgctagtttagtgactaaccaaacccaac

SEQ ID NO: 18128 - DNA, 122 bp, Homo sapiens
  misc_feature (61)..(62): /note="This region represents a CpG dinucleotide"
  misc_feature (61)..(61): /note="Nucleotide may be methylated to form 5-methylcytosine"
cagtcagcgaacaatgctatctgcacgtggtggcgcccaaaatacggctgtcatttatttcgttatatgaaattagagcacgccttgtagccataatgaatcatttccttcctgcctgggcc

SEQ ID NO: 18129 - DNA, 122 bp, Homo sapiens
  misc_feature (61)..(62): /note="This region represents a CpG dinucleotide"
  misc_feature (61)..(61): /note="Nucleotide may be methylated to form 5-methylcytosine"
gcgggcaccctcccaccttacccccttggtcctatgtggcgcagcgccctcctgccctcccggccctttcagctgtgaggttcccccaggccgtttctttgtaccacccgccccccaccccc

SEQ ID NO: 18130 - DNA, 122 bp, Homo sapiens
  misc_feature (61)..(62): /note="This region represents a CpG dinucleotide"
  misc_feature (61)..(61): /note="Nucleotide may be methylated to form 5-methylcytosine"
cccgcctggcttaggttcggatgcccaacccagttgccccgtgagtcacatcaaacgtcccgtccctcccaacccacagccagactcccaggaggctccgcagcacctgaagctgcggctgg

SEQ ID NO: 18131 - DNA, 122 bp, Homo sapiens
  misc_feature (61)..(62): /note="This region represents a CpG dinucleotide"
  misc_feature (61)..(61): /note="Nucleotide may be methylated to form 5-methylcytosine"
gggttcagctgacccaggccctacccagctttgctccctatagccactttggtagcagaacgtgagatgggatccctgaaagccccatgccctgcccattaccagggacacataccccgtta

SEQ ID NO: 18132 - DNA, 122 bp, Homo sapiens
  misc_feature (61)..(62): /note="This region represents a CpG dinucleotide"
  misc_feature (61)..(61): /note="Nucleotide may be methylated to form 5-methylcytosine"
ctacatgatgaatgtgtcggccactgaccaggccccgcccttcaaccagggcttctgcagcgtctacatcactctgctcaacgagctggacgaggccgtgcagttctccaatgcctcatacg

SEQ ID NO: 18133 - DNA, 122 bp, Homo sapiens
  misc_feature (61)..(62): /note="This region represents a CpG dinucleotide"
  misc_feature (61)..(61): /note="Nucleotide may be methylated to form 5-methylcytosine"
cccgtctttttcacaagccattcaaagtggaaggaatcatatgttaacagcccagagatgcgaaatattcacaaggaacagtagtggcagtaaagatgacctgggaagaataattagggtca

SEQ ID NO: 18134 - DNA, 122 bp, Homo sapiens
  misc_feature (61)..(62): /note="This region represents a CpG dinucleotide"
  misc_feature (61)..(61): /note="Nucleotide may be methylated to form 5-methylcytosine"
agtggggacagtagctgaaagtgtcagtcaagaggtgtcctctctgggtggaaaccctctcgttttcagtgaaatctctcaggaactgcttcatggcagcagattttgagaaccagtgaaag

SEQ ID NO: 18135 - DNA, 122 bp, Homo sapiens
  misc_feature (61)..(62): /note="This region represents a CpG dinucleotide"
  misc_feature (61)..(61): /note="Nucleotide may be methylated to form 5-methylcytosine"
aagatgggaatgatttagactttggtaaacacagaagggtgtgggaggtgagagaagaaacgcaagagggtaccaggtcataaggagactcacacatcaagctgaagaatttaaacttaatc

SEQ ID NO: 18136 - DNA, 122 bp, Homo sapiens
  misc_feature (61)..(62): /note="This region represents a CpG dinucleotide"
  misc_feature (61)..(61): /note="Nucleotide may be methylated to form 5-methylcytosine"
tgcagacagttcgttggctgcccaacaaccagccatcccacttcttccctgctaacagaacgtccatcagtagaaatccattcgcctcagggagggaggcatccactcctgtagcaggagtg

SEQ ID NO: 18137 - DNA, 122 bp, Homo sapiens
  misc_feature (61)..(62): /note="This region represents a CpG dinucleotide"
  misc_feature (61)..(61): /note="Nucleotide may be methylated to form 5-methylcytosine"
ctccagctgtgaaacactttagaagatatatcattaccaacacggttctccagcctggtacgcagagtaaggaatgcataacttggatctaatgataagtgaataccagaaaaacccaaatt

SEQ ID NO: 18138 - DNA, 122 bp, Homo sapiens
  misc_feature (61)..(62): /note="This region represents a CpG dinucleotide"
  misc_feature (61)..(61): /note="Nucleotide may be methylated to form 5-methylcytosine"
cctcacttcacagacattcctaccatgtgaagtcacacacacaagctcgggtcaaggctacgtgtccagtcacttatgtatgcatcagaagggggagatagacacacactcaaacacacaga

SEQ ID NO: 18139 - DNA, 122 bp, Homo sapiens
  misc_feature (61)..(62): /note="This region represents a CpG dinucleotide"
  misc_feature (61)..(61): /note="Nucleotide may be methylated to form 5-methylcytosine"
caatgggtaccagatatcaccttcttcctacatgcctgccagagccaacatatacagatacgcagattttgaacttcagaattcagcaaggcaccttcagacagactactcacagagtttta

SEQ ID NO: 18140 - DNA, 122 bp, Homo sapiens
  misc_feature (61)..(62): /note="This region represents a CpG dinucleotide"
  misc_feature (61)..(61): /note="Nucleotide may be methylated to form 5-methylcytosine"
acacacacaccactcacacgcactcgccgcccgcccgctcgcacagcgctggaacacgcgcgcccagacacgcacacacgcacgcacacacactcgcacacacgcagaggcacgggagggaa

SEQ ID NO: 18141 - DNA, 122 bp, Homo sapiens
  misc_feature (61)..(62): /note="This region represents a CpG dinucleotide"
  misc_feature (61)..(61): /note="Nucleotide may be methylated to form 5-methylcytosine"
aatgagatggacagacctgggctgtgggctaggagggcagtcagctggcctagggtagcccgggctggtgtcagggtaaggagaggaagggagggatgagggctgattaatttttttcaccc

SEQ ID NO: 18142 - DNA, 122 bp, Homo sapiens
  misc_feature (61)..(62): /note="This region represents a CpG dinucleotide"
  misc_feature (61)..(61): /note="Nucleotide may be methylated to form 5-methylcytosine"
tcccttgccagcttccctggtgaccagccaggacccaaatcacctgggtcccctcccctacgccctcctgcaaagaggaagtgctcatgaacttcggccctgccagggccttatcagagccc

SEQ ID NO: 18143 - DNA, 122 bp, Homo sapiens
  misc_feature (61)..(62): /note="This region represents a CpG dinucleotide"
  misc_feature (61)..(61): /note="Nucleotide may be methylated to form 5-methylcytosine"
cattttctcatagtcttggtctcttggccacatagctgtcatctttgtgcatcagtcaggcgctcccttcgtcactagcactgaactgctcatggaagaaaatttagtgccttgcgattggg

SEQ ID NO: 18144 - DNA, 122 bp, Homo sapiens
  misc_feature (61)..(62): /note="This region represents a CpG dinucleotide"
  misc_feature (61)..(61): /note="Nucleotide may be methylated to form 5-methylcytosine"
tcagcatctccatgactcactactgcaggatgctacacttattcagaaagcccagtcaagcgtgcaccaaagactgtgcactcagcaggaagggagtccttttagcattatgaactcagcgg

SEQ ID NO: 18145 - DNA, 122 bp, Homo sapiens
  misc_feature (61)..(62): /note="This region represents a CpG dinucleotide"
  misc_feature (61)..(61): /note="Nucleotide may be methylated to form 5-methylcytosine"
aattcctaatgctctcctttttttattctccacagtgacagttgtcataactatatctaacgattgtgggacttggagaaaaatgcagagtggaagcaggaggaggtgagaataaggaggcc

SEQ ID NO: 18146 - DNA, 122 bp, Homo sapiens
  misc_feature (61)..(62): /note="This region represents a CpG dinucleotide"
  misc_feature (61)..(61): /note="Nucleotide may be methylated to form 5-methylcytosine"
ccgcccacctcggcctcccacagtgctgggactccaggcgtgagccaccgcgcccggccacgtgtgtgtgtgtgttttcacccaggtttcacagtggctctcagcaggagagctggtctgac

SEQ ID NO: 18147 - DNA, 122 bp, Homo sapiens
  misc_feature (61)..(62): /note="This region represents a CpG dinucleotide"
  misc_feature (61)..(61): /note="Nucleotide may be methylated to form 5-methylcytosine"
tattctcatgctgctgcaaacagcgggtctccctccacattgccctccctgatcctaccacgcacaggaaaggattaatccatccctgtggtttgaagccaatgatctggaagtgggtggca

SEQ ID NO: 18148 - DNA, 122 bp, Homo sapiens
  misc_feature (61)..(62): /note="This region represents a CpG dinucleotide"
  misc_feature (61)..(61): /note="Nucleotide may be methylated to form 5-methylcytosine"
gatgctggcaacagtctcttggaacaggttgtcatcagcatcccgatttgaggaggaggacgttacggcttagagagagaggtttgtaacttgcccaagtcccacagctagtaagttcaggg

SEQ ID NO: 18149 - DNA, 122 bp, Homo sapiens
  misc_feature (61)..(62): /note="This region represents a CpG dinucleotide"
  misc_feature (61)..(61): /note="Nucleotide may be methylated to form 5-methylcytosine"
gccccaaaaagcccatggtcttgtgtatcttgtatggagggagggatgtaaacaatataacgtgataaatatgctggcctagaagtggcaactcattcatacgtggagattctagaaaggct

SEQ ID NO: 18150 - DNA, 122 bp, Homo sapiens
  misc_feature (61)..(62): /note="This region represents a CpG dinucleotide"
  misc_feature (61)..(61): /note="Nucleotide may be methylated to form 5-methylcytosine"
aagccctggcaggcagtgggtcacacgtgtaatctcagcacttttggaggccaaggcaggcggcctcacttgagcccagcagtttgagaccggcctgggcaacatgacaaaaccccatctct

SEQ ID NO: 18151 - DNA, 122 bp, Homo sapiens
  misc_feature (61)..(62): /note="This region represents a CpG dinucleotide"
  misc_feature (61)..(61): /note="Nucleotide may be methylated to form 5-methylcytosine"
tagtgtcccctgggcttgagaagaggtggtgaaccgtctgcagggccagaccttggagcacgcctccactgccctcccggaactggatgtgctgagcaggagacagaagcattccccaagct

SEQ ID NO: 18152 - DNA, 122 bp, Homo sapiens
  misc_feature (61)..(62): /note="This region represents a CpG dinucleotide"
  misc_feature (61)..(61): /note="Nucleotide may be methylated to form 5-methylcytosine"
ctttaacactgctcagaaatactgtatgagttcagggaaaacagctgggttggggttttgcgaggctgtcactatggaaggaaatacaggtttaaagatactgacaaaacaaaggatgaagt

SEQ ID NO: 18153 - DNA, 122 bp, Homo sapiens
  misc_feature (61)..(62): /note="This region represents a CpG dinucleotide"
  misc_feature (61)..(61): /note="Nucleotide may be methylated to form 5-methylcytosine"
attagtgttcttcttcctatattcccatgataataaagaatgtttacagagtgcttaatgcgtgccagaaattgtcctaagctctttacacacattagctaatttaatcctcacaacattcc

SEQ ID NO: 18154 - DNA, 122 bp, Homo sapiens
  misc_feature (61)..(62): /note="This region represents a CpG dinucleotide"
  misc_feature (61)..(61): /note="Nucleotide may be methylated to form 5-methylcytosine"
agttttcccccaccctcttgggtgactggttttcctacagcctaaatctggtgctgaaaacgtcaccgcttctcacttttactttgttagctcatatggtgccaccttaagaagacctactg

SEQ ID NO: 18155 - DNA, 122 bp, Homo sapiens
  misc_feature (61)..(62): /note="This region represents a CpG dinucleotide"
  misc_feature (61)..(61): /note="Nucleotide may be methylated to form 5-methylcytosine"
tgttggggtcagaaccagagggagaaaggctggggacagggatgggcggagggatccacgcgcagagaatgagattgcttaactccagatcatggtgaggctgcacctctgaaactggaatg

SEQ ID NO: 18156 - DNA, 122 bp, Homo sapiens
  misc_feature (61)..(62): /note="This region represents a CpG dinucleotide"
  misc_feature (61)..(61): /note="Nucleotide may be methylated to form 5-methylcytosine"
gtgatggtatttacatagtgtgctgtagaaacacaaaggaagggaacctagttcaccttacgggttcctctggtagggatttggttcacttaagagttttatgccactgtcgtagaactgaa

SEQ ID NO: 18157 - DNA, 122 bp, Homo sapiens
  misc_feature (61)..(62): /note="This region represents a CpG dinucleotide"
  misc_feature (61)..(61): /note="Nucleotide may be methylated to form 5-methylcytosine"
aatgttctcaaaagtaattaagaaactttaagacacagcttctactttttccccgtttagcgtagctgtttctctctgctagtcagagtttggatctgcctctgggagcccaagtgcaattg

SEQ ID NO: 18158 - DNA, 122 bp, Homo sapiens
  misc_feature (61)..(62): /note="This region represents a CpG dinucleotide"
  misc_feature (61)..(61): /note="Nucleotide may be methylated to form 5-methylcytosine"
agttaattaatttcaggcaagagggtcctcttttgcgtcagtggtggtgggcacgagccccgaagaacatgccaggcaggcgaaggactgagcaggggtgtccacacgctgctgaatggagc

SEQ ID NO: 18159 - DNA, 122 bp, Homo sapiens
  misc_feature (61)..(62): /note="This region represents a CpG dinucleotide"
  misc_feature (61)..(61): /note="Nucleotide may be methylated to form 5-methylcytosine"
cctttttaggaagccctgttaatatgctcattgaaaacatggcattgaagcaggcacttgcgtggatgtttctcacttgagcacgatatttaggctctcttccaactcactctattctgtcc

SEQ ID NO: 18160 - DNA, 122 bp, Homo sapiens
  misc_feature (61)..(62): /note="This region represents a CpG dinucleotide"
  misc_feature (61)..(61): /note="Nucleotide may be methylated to form 5-methylcytosine"
ttcaaaaactcttctgctctttgtttcgccagagttgagttgagagctcagactgagttccgtctggcctctgcccctattgcagtcaccttccttgcctgtttaactttgtcaagtgcaat

SEQ ID NO: 18161 - DNA, 122 bp, Homo sapiens
  misc_feature (61)..(62): /note="This region represents a CpG dinucleotide"
  misc_feature (61)..(61): /note="Nucleotide may be methylated to form 5-methylcytosine"
tgatgtgcagaggtgaagtttctgttcccctttgggtacttccttctttctctttctattcgcattctttgccactgccccagctgttccctgccgtggcattaaactatcaaaggatgaag

SEQ ID NO: 18162 - DNA, 122 bp, Homo sapiens
  misc_feature (61)..(62): /note="This region represents a CpG dinucleotide"
  misc_feature (61)..(61): /note="Nucleotide may be methylated to form 5-methylcytosine"
gattcagagaagttgacgaaggaaatcctgcacaagctgaaggagaggtaggcttggcagcggcactatgccaagatcatgagtgacgacagtgcctaatgatatgactcttaacttccaaa

SEQ ID NO: 18163 - DNA, 122 bp, Homo sapiens
  misc_feature (61)..(62): /note="This region represents a CpG dinucleotide"
  misc_feature (61)..(61): /note="Nucleotide may be methylated to form 5-methylcytosine"
gaggctgtggttattcacctttgccactgtcttccggtgtgcccagtcacaggagctgcacggcaatgcatctgagaccatgcggtgtcaccttcacagaagtgctctggcacagagactcc

SEQ ID NO: 18164 - DNA, 122 bp, Homo sapiens
  misc_feature (61)..(62): /note="This region represents a CpG dinucleotide"
  misc_feature (61)..(61): /note="Nucleotide may be methylated to form 5-methylcytosine"
ttctccaccctgcaattgtcttacatacggaatagttcctggagaaagatctaacatctgcgcaggtctatcctgttctgtggctgtgtttactaaagtgagttctgcgcttacattcacac

SEQ ID NO: 18165 - DNA, 122 bp, Homo sapiens
  misc_feature (61)..(62): /note="This region represents a CpG dinucleotide"
  misc_feature (61)..(61): /note="Nucleotide may be methylated to form 5-methylcytosine"
ctttcttactatttttgccgctgccttataggatgatttgtacccaacacagtggatatccgagtatcttttatcagatttcaaatctccagtaaggaatgttgttggtgcagtttggatca

SEQ ID NO: 18166 - DNA, 122 bp, Homo sapiens
  misc_feature (61)..(62): /note="This region represents a CpG dinucleotide"
  misc_feature (61)..(61): /note="Nucleotide may be methylated to form 5-methylcytosine"
ttcagctccagcgcctcctccacacgtccatgccttccaccttgccacatggagcacagccgtgcccccacaagccagagggaacaacgaagctggcaagaaagaacagcagttagagcagg

SEQ ID NO: 18167 - DNA, 122 bp, Homo sapiens
  misc_feature (61)..(62): /note="This region represents a CpG dinucleotide"
  misc_feature (61)..(61): /note="Nucleotide may be methylated to form 5-methylcytosine"
cttccccgggtctgccgcctaagcagccctgtccctgatctctgtctcagaggctgctcccggcccagcttcccacaaccatcagcaggacctaaactgccacatatgcgcgccatggaata

SEQ ID NO: 18168 - DNA, 122 bp, Homo sapiens
  misc_feature (61)..(62): /note="This region represents a CpG dinucleotide"
  misc_feature (61)..(61): /note="Nucleotide may be methylated to form 5-methylcytosine"
actgttgatatgtaatgatgtccacagtattttattaagtgacaaagacaaatcagtctacgtcctagttaatgtttagctttgggcaacagaatgacagaaggaagagacaagggcacttg

SEQ ID NO: 18169 - DNA, 122 bp, Homo sapiens
  misc_feature (61)..(62): /note="This region represents a CpG dinucleotide"
  misc_feature (61)..(61): /note="Nucleotide may be methylated to form 5-methylcytosine"
taaattattcttctgggttcaggctgactgtctcgctatctcttaaaatctgtgttgttacgaacaaacaatcatctaaggcatttatgagtcgtgagctgtaatgttgttaaaactgaatc

SEQ ID NO: 18170 - DNA, 122 bp, Homo sapiens
  misc_feature (61)..(62): /note="This region represents a CpG dinucleotide"
  misc_feature (61)..(61): /note="Nucleotide may be methylated to form 5-methylcytosine"
cctgtccacacggttggctttgtaagccggattgttctccccaaatgtgtggctcagccacgtctcaaagtcatgaggcttgaatgaagattcagcatatgaaggaggatgtatggagacag

SEQ ID NO: 18171 - DNA, 122 bp, Homo sapiens
  misc_feature (61)..(62): /note="This region represents a CpG dinucleotide"
  misc_feature (61)..(61): /note="Nucleotide may be methylated to form 5-methylcytosine"
tcattattctattccctctgccaattttgtcaactcaatacttaaaggtggaatttgagacgtagatgtttgaccagtccagttgagtaattggtgcagtgcctgtctattcacagagaggt

SEQ ID NO: 18172 - DNA, 122 bp, Homo sapiens
  misc_feature (61)..(62): /note="This region represents a CpG dinucleotide"
  misc_feature (61)..(61): /note="Nucleotide may be methylated to form 5-methylcytosine"
aaaagagcttggagaaccccctctcctcttctgccaggtgaggccacagcaagaagactgcggtctacgaaccaggaagaggccttcaccagtcaccaaatatgctggcgccttaattttag

SEQ ID NO: 18173 - DNA, 122 bp, Homo sapiens
  misc_feature (61)..(62): /note="This region represents a CpG dinucleotide"
  misc_feature (61)..(61): /note="Nucleotide may be methylated to form 5-methylcytosine"
tggcctccgttgtgagaataacaccacacaggcagcatgatctggggaaagaagaaactccgtactttgtgagtgaccagctcttgggccactgctgagattctggagggctttgggccatt

SEQ ID NO: 18174 - DNA, 122 bp, Homo sapiens
  misc_feature (61)..(62): /note="This region represents a CpG dinucleotide"
  misc_feature (61)..(61): /note="Nucleotide may be methylated to form 5-methylcytosine"
gaggcggacttcagagaagcgggtcttgaaccccagctgcaggcaggacgggattatctgcgcagggtagacccccagattcctgccagagcaaaggagcaactgctactccaggctttgcc

SEQ ID NO: 18175 - DNA, 122 bp, Homo sapiens
  misc_feature (61)..(62): /note="This region represents a CpG dinucleotide"
  misc_feature (61)..(61): /note="Nucleotide may be methylated to form 5-methylcytosine"
ggtagatggatccaaaaatatgttgaatcaaaaaatgcagaatgtgctgtgtgcaaaaaccggagaaggaataaataacccaccctgagggagattcattcagatgtttcctctccaagaaa

SEQ ID NO: 18176 - DNA, 122 bp, Homo sapiens
  misc_feature (61)..(62): /note="This region represents a CpG dinucleotide"
  misc_feature (61)..(61): /note="Nucleotide may be methylated to form 5-methylcytosine"
tcatgtcctaatgcaatattataagacattgtaccacaacattccaatctaggctgctaacgcaatatgacatttctgtattatttgaatgcaattctaatacgacactctaaaataactaa

SEQ ID NO: 18177 - DNA, 122 bp, Homo sapiens
  misc_feature (61)..(62): /note="This region represents a CpG dinucleotide"
  misc_feature (61)..(61): /note="Nucleotide may be methylated to form 5-methylcytosine"
agttctgggagagcctgctctgggagagtagtcacctgaatactgccatggacatgaagacgcagcacttggaggttgtccactaactacactccttgcagcaggttctcttggagggaggt

SEQ ID NO: 18178 - DNA, 122 bp, Homo sapiens
  misc_feature (61)..(62): /note="This region represents a CpG dinucleotide"
  misc_feature (61)..(61): /note="Nucleotide may be methylated to form 5-methylcytosine"
aaaaaagtaagctgagggctcaagggccacacaggtcttcaagaggcccagcccgggatccgcacacccgagaaccctgtgctgagtcaggatccccttctgtggacacaagataggagtgg

SEQ ID NO: 18179 - DNA, 122 bp, Homo sapiens
  misc_feature (61)..(62): /note="This region represents a CpG dinucleotide"
  misc_feature (61)..(61): /note="Nucleotide may be methylated to form 5-methylcytosine"
atgaaggtctgctttgccagtacgcagcaggtcccagtctctacgccgtcccgaacacctcgtagaaatacggggcatgcacaacgttgtacctgctccaatctaagcagcaatccagccct

SEQ ID NO: 18180 - DNA, 122 bp, Homo sapiens
  misc_feature (61)..(62): /note="This region represents a CpG dinucleotide"
  misc_feature (61)..(61): /note="Nucleotide may be methylated to form 5-methylcytosine"
ttccaggagggccagggaggctctgtatatacgtagaggtcacccaggcgtgtgtgtgtgcgcgcccccacgcccctgcccacaggcctgcattgaaggcgcttccgctccccggagagccc

SEQ ID NO: 18181 - DNA, 122 bp, Homo sapiens
  misc_feature (61)..(62): /note="This region represents a CpG dinucleotide"
  misc_feature (61)..(61): /note="Nucleotide may be methylated to form 5-methylcytosine"
ctaattcctgccttgtgagtggtcctgatgctgacagatgcagtaggtatcttgcagccacgaggaagaaaacagcatgactaaggacaggaggagctgaaagggggatgacacgtgatttc

SEQ ID NO: 18182 - DNA, 122 bp, Homo sapiens
  misc_feature (61)..(62): /note="This region represents a CpG dinucleotide"
  misc_feature (61)..(61): /note="Nucleotide may be methylated to form 5-methylcytosine"
ctaatcgcttggcttcttttaactccttttatttttgacaatgtgagaaccaggcctggccggctggagtcggagagagggacagactgctctctggaaggctggccagacacgggaagata

SEQ ID NO: 18183 - DNA, 122 bp, Homo sapiens
  misc_feature (61)..(62): /note="This region represents a CpG dinucleotide"
  misc_feature (61)..(61): /note="Nucleotide may be methylated to form 5-methylcytosine"
tttaaccattcttttggctatgcttatgttgtactgcttcagcctcacattctcatagaccgctttggatttcccagtgtgttcccacctcattcaagtgacatgccttcctccaatctagc

SEQ ID NO: 18184 - DNA, 122 bp, Homo sapiens
  misc_feature (61)..(62): /note="This region represents a CpG dinucleotide"
  misc_feature (61)..(61): /note="Nucleotide may be methylated to form 5-methylcytosine"
catcttgggctcatgttaggtgcaattaaacccatgagtgagggccacaactgtgcaccccgctgctgatctaagtggaataaacctccttggcccaacctgctctaatctccattcctgct

SEQ ID NO: 18185 - DNA, 122 bp, Homo sapiens
  misc_feature (61)..(62): /note="This region represents a CpG dinucleotide"
  misc_feature (61)..(61): /note="Nucleotide may be methylated to form 5-methylcytosine"
tccaaaagaaacaaacatcttaaactcatgaagacattgtctgaacgcctgtttgaataacgttacagatggagaaaaggggacaagctgactatgcatgccaacaattcaagtgcaaaacc

SEQ ID NO: 18186 - DNA, 122 bp, Homo sapiens
  misc_feature (61)..(62): /note="This region represents a CpG dinucleotide"
  misc_feature (61)..(61): /note="Nucleotide may be methylated to form 5-methylcytosine"
gccaccatgctggccaggccttagcttttaatgctgagattttgccacttggaggctgtgcgactctagacaagtgattagcttttaatgctgagcttagcttttaatagacaagtgaatag

SEQ ID NO: 18187 - DNA, 122 bp, Homo sapiens
  misc_feature (61)..(62): /note="This region represents a CpG dinucleotide"
  misc_feature (61)..(61): /note="Nucleotide may be methylated to form 5-methylcytosine"
ccagtctctactaggggctttataaccacactcactggaacaaatgtgtattcagagacccgcttcacaacaccgttcaaataacacatcagtgaggccttcagcaagaaaaacacttcgct

SEQ ID NO: 18188 - DNA, 122 bp, Homo sapiens
  misc_feature (61)..(62): /note="This region represents a CpG dinucleotide"
  misc_feature (61)..(61): /note="Nucleotide may be methylated to form 5-methylcytosine"
agctgtgggaatttaggaagttatttaatctctcattgagcccaggaataaaactgggaacgtacctactttggtgtgttttggagatggctgatgtagtaacaatatacggtccaagcata

SEQ ID NO: 18189 - DNA, 122 bp, Homo sapiens
  misc_feature (61)..(62): /note="This region represents a CpG dinucleotide"
  misc_feature (61)..(61): /note="Nucleotide may be methylated to form 5-methylcytosine"
ccccggctggaccaccaggtcttcctgaagagcgacagcctgtgtctgatggaagggcggcgcttccgggcgcagcccaccctgccctcggcccacctcctggccatgcacatccagcagct

SEQ ID NO: 18190 - DNA, 122 bp, Homo sapiens
  misc_feature (61)..(62): /note="This region represents a CpG dinucleotide"
  misc_feature (61)..(61): /note="Nucleotide may be methylated to form 5-methylcytosine"
tcaattttgagatgtaacaaaaatggcatcttatctaggtttgactatttgttgagcacacgctgtgtgttgcatcttgggctacacgtgccacacaggaagcaatttataagatgcaggct

SEQ ID NO: 18191 - DNA, 122 bp, Homo sapiens
  misc_feature (61)..(62): /note="This region represents a CpG dinucleotide"
  misc_feature (61)..(61): /note="Nucleotide may be methylated to form 5-methylcytosine"
ttctctccacaggccactctgcctccttgtgcccccgacctgcacctggaaggccttctacggcacccaggggaccaggctggcctaaggcagcacacatcagacatccaaggcatgctgcg

SEQ ID NO: 18192 - DNA, 122 bp, Homo sapiens
  misc_feature (61)..(62): /note="This region represents a CpG dinucleotide"
  misc_feature (61)..(61): /note="Nucleotide may be methylated to form 5-methylcytosine"
cttccaatatagctgtttcctcttctcttgtctaacaacttttcatccacctccactgtccggtaaaaatgaactcagtttccaaggaactctaaggaccttaaataagcatttggagccat

SEQ ID NO: 18193 - DNA, 122 bp, Homo sapiens
  misc_feature (61)..(62): /note="This region represents a CpG dinucleotide"
  misc_feature (61)..(61): /note="Nucleotide may be methylated to form 5-methylcytosine"
tcttgcttcaggctttgttctatagaaaacccagttacaacaacatccaaacaaagatatcgagtaagaagttcaaagcctagaactcaagagcaaagtcaggattggagctatcagtatgg

SEQ ID NO: 18194 - DNA, 122 bp, Homo sapiens
  misc_feature (61)..(62): /note="This region represents a CpG dinucleotide"
  misc_feature (61)..(61): /note="Nucleotide may be methylated to form 5-methylcytosine"
taaatgctttatttggtcaaaaactggaagctgacgctccacttaagagtctaggtcacgcggcaagccagacacttgaaggagcttaaagctttctgttcttaatagtattttagacactt

SEQ ID NO: 18195 - DNA, 122 bp, Homo sapiens
  misc_feature (61)..(62): /note="This region represents a CpG dinucleotide"
  misc_feature (61)..(61): /note="Nucleotide may be methylated to form 5-methylcytosine"
agtggtggagcctgtgcagcggggtctttgttcacgggctaatgcttctcctaagcacctcgtgtgtgttcttcggcctcactgctctgtggcttaggtatctgtgctgtggggtttgagaa

SEQ ID NO: 18196 - DNA, 122 bp, Homo sapiens
  misc_feature (61)..(62): /note="This region represents a CpG dinucleotide"
  misc_feature (61)..(61): /note="Nucleotide may be methylated to form 5-methylcytosine"
gccattcttgttttcaggctccatttacccgtttctcagagaggccctggtgtgagtggccgggccacatatgactcgcccgtagcacctgtgggtctggcacgaccacacgccaggctgac

SEQ ID NO: 18197 - DNA, 122 bp, Homo sapiens
  misc_feature (61)..(62): /note="This region represents a CpG dinucleotide"
  misc_feature (61)..(61): /note="Nucleotide may be methylated to form 5-methylcytosine"
ttgaggtttgttgatgaacttcctcgttgcactgaggtgaaatgttgaatgtcatgtggacgcaagtaggaacgtaattggtaggttgtgttctcatcttgtttgtcacaacatttttgact

SEQ ID NO: 18198 - DNA, 122 bp, Homo sapiens
  misc_feature (61)..(62): /note="This region represents a CpG dinucleotide"
  misc_feature (61)..(61): /note="Nucleotide may be methylated to form 5-methylcytosine"
tcactgacacaggtttataaaacatctgatatagaaagatactctctaaatacaggcattcgaacaagtatttacctaaagtttaactttgggcacatcattttaacctattatgtagtttc

SEQ ID NO: 18199 - DNA, 122 bp, Homo sapiens
  misc_feature (61)..(62): /note="This region represents a CpG dinucleotide"
  misc_feature (61)..(61): /note="Nucleotide may be methylated to form 5-methylcytosine"
tggcttcctgtgcccctctttacagaacacctttctgcaatgattgtgctttcctcctgccgtgctgcccagctcaccatgactcactgctggttggtataccaaagaggacttgcaaagca

SEQ ID NO: 18200 - DNA, 122 bp, Homo sapiens
  misc_feature (61)..(62): /note="This region represents a CpG dinucleotide"
  misc_feature (61)..(61): /note="Nucleotide may be methylated to form 5-methylcytosine"
gccccatcacatcaggaacttcagcagttccttccaccaaagctcaactattgctgcaagcgctttggtaatcacgagcattatctatgaagctactgctgtggtcagggccccagtcgtcc

SEQ ID NO: 18201 - DNA, 122 bp, Homo sapiens
  misc_feature (61)..(62): /note="This region represents a CpG dinucleotide"
  misc_feature (61)..(61): /note="Nucleotide may be methylated to form 5-methylcytosine"
acgtgggggaagaagggggttacgccatcaagtcctgaagcccgtcggaccacccatcgccgcctgcgcagacccaaatcttggtcccgccgtaaggtgccgcagtcccgaatgttccagaa

SEQ ID NO: 18202 - DNA, 122 bp, Homo sapiens
  misc_feature (61)..(62): /note="This region represents a CpG dinucleotide"
  misc_feature (61)..(61): /note="Nucleotide may be methylated to form 5-methylcytosine"
cattcctgtataaagtgtctggtgacccctgctggggggctctcacccaggcaggaggcacgggatcccagacctgtgtaatgaagcactctagctgccccttggcagagggggtgtgttgt

SEQ ID NO: 18203 - DNA, 122 bp, Homo sapiens
  misc_feature (61)..(62): /note="This region represents a CpG dinucleotide"
  misc_feature (61)..(61): /note="Nucleotide may be methylated to form 5-methylcytosine"
actatatgttacacagcatggtgaatatagtaaataataatgtattatacagttcaaaatcgctaagagtacatttcaaaagttctcaccatgaaaactgagaagtatttgaggtggatatg

SEQ ID NO: 18204 - DNA, 122 bp, Homo sapiens
  misc_feature (61)..(62): /note="This region represents a CpG dinucleotide"
  misc_feature (61)..(61): /note="Nucleotide may be methylated to form 5-methylcytosine"
ttgcctaattttaagttacttaacttctctgtatctccattgcttcatctgtaaaacgggcgtaattacagaaccagcctcacaagggttgtgaaaatgtaatgagtaactacataaaaagc

SEQ ID NO: 18205 - DNA, 122 bp, Homo sapiens
  misc_feature (61)..(62): /note="This region represents a CpG dinucleotide"
  misc_feature (61)..(61): /note="Nucleotide may be methylated to form 5-methylcytosine"
gccactttcttctctggaatgttaatctgctcttattggagttagcaaccccaggaggatcgcttcctgatttgtcttatccagaaaaaaaaaaaacaaaaaaacctcctctttcccacctc

SEQ ID NO: 18206 - DNA, 122 bp, Homo sapiens
  misc_feature (61)..(62): /note="This region represents a CpG dinucleotide"
  misc_feature (61)..(61): /note="Nucleotide may be methylated to form 5-methylcytosine"
tgccacggtcgtgtatgtgtcttccttcttgtggtaagcatcaaagcatcccatcacttccggcttcagcctttcattgattcaaaccctctcatccccaaatcctgttaactagcatggca

SEQ ID NO: 18207 - DNA, 122 bp, Homo sapiens
  misc_feature (61)..(62): /note="This region represents a CpG dinucleotide"
  misc_feature (61)..(61): /note="Nucleotide may be methylated to form 5-methylcytosine"
tgcttcgaaaagcctggaaagagcaactcagttgtaacttggggaagttaacgatccgcccgagtgcagaggaaaaccagaaacgccttgccttcagctgaaccaccgtttgtgcgagctgg

SEQ ID NO: 18208 - DNA, 122 bp, Homo sapiens
  misc_feature (61)..(62): /note="This region represents a CpG dinucleotide"
  misc_feature (61)..(61): /note="Nucleotide may be methylated to form 5-methylcytosine"
cacagagcctgagtgcttgggcccctgtgaacctggaactagcgtcaaccttgaaggcatcgtgtggcaggaaacagaagatggtaagtgtgatatgtggctttcccctcccttctcaacct

SEQ ID NO: 18209 - DNA, 122 bp, Homo sapiens
  misc_feature (61)..(62): /note="This region represents a CpG dinucleotide"
  misc_feature (61)..(61): /note="Nucleotide may be methylated to form 5-methylcytosine"
tattttaaaggtttcaaatcatacttaagctcagcgtactattgcttttgagagatagttcgaatataacaaggttttaaagcagaaacagaacccagtttgcccacacccctgcagggctg

SEQ ID NO: 18210 - DNA, 122 bp, Homo sapiens
  misc_feature (61)..(62): /note="This region represents a CpG dinucleotide"
  misc_feature (61)..(61): /note="Nucleotide may be methylated to form 5-methylcytosine"
tattgttcttcttctaacaaggaagaaacagagtgactctacagggtcatgcagttttcacgtggcctctagacacccactcgacagtggcatagatgctagatgcccactcgccagtggtg

SEQ ID NO: 18211 - DNA, 122 bp, Homo sapiens
  misc_feature (61)..(62): /note="This region represents a CpG dinucleotide"
  misc_feature (61)..(61): /note="Nucleotide may be methylated to form 5-methylcytosine"
tgagtcatttccccaatcctggaggcaggtttatccttagagcatctggagttccctgcccgctaggaactccagcccacactggtaagaagcattggtagatttagcaaccagcacctcag

SEQ ID NO: 18212 - DNA, 122 bp, Homo sapiens
  misc_feature (61)..(62): /note="This region represents a CpG dinucleotide"
  misc_feature (61)..(61): /note="Nucleotide may be methylated to form 5-methylcytosine"
ggaaatgaaagagataagtatgaaaaaatccatgctcatagtagctgtggtttccaactgcgtgataaaactttaaaatctgcattcaaataagaacaactatgtcgacgtaaggttacaag

SEQ ID NO: 18213 - DNA, 122 bp, Homo sapiens
  misc_feature (61)..(62): /note="This region represents a CpG dinucleotide"
  misc_feature (61)..(61): /note="Nucleotide may be methylated to form 5-methylcytosine"
ctggtcccaggtgcctccgttttacaaataggaggataacagctgtggaaataaagcccacgcaaatgagaacaaaagacgatttattcaggacttgctgtacaagggagtcgccgtcctct

SEQ ID NO: 18214 - DNA, 122 bp, Homo sapiens
  misc_feature (61)..(62): /note="This region represents a CpG dinucleotide"
  misc_feature (61)..(61): /note="Nucleotide may be methylated to form 5-methylcytosine"
gaaatttttactaggtttgcagcctgagcatcatctttcttaatccctttttccttctggcgcgccccccccttttttttttttaaacctgggaagttgctggctataaatagggtatatct

SEQ ID NO: 18215 - DNA, 122 bp, Homo sapiens
  misc_feature (61)..(62): /note="This region represents a CpG dinucleotide"
  misc_feature (61)..(61): /note="Nucleotide may be methylated to form 5-methylcytosine"
caatttcctgaatgtctgctaggatggtgcataattaatgcatggatcttgttataactgcggatcaccagcatgcacataaatcaacagaaaacatgcaaatgtgcattttaaaaatgctt

SEQ ID NO: 18216 - DNA, 122 bp, Homo sapiens
  misc_feature (61)..(62): /note="This region represents a CpG dinucleotide"
  misc_feature (61)..(61): /note="Nucleotide may be methylated to form 5-methylcytosine"
ggatgctctttcattcctttatgctgcttgggacaggtgcgctcccagaagggatcctgtcgccagttctgggggagcccagccatgctctccccctgcccaccccacagagccctctctgg

SEQ ID NO: 18217 - DNA, 122 bp, Homo sapiens
  misc_feature (61)..(62): /note="This region represents a CpG dinucleotide"
  misc_feature (61)..(61): /note="Nucleotide may be methylated to form 5-methylcytosine"
agagctctaaacctggcttcaaggagttctttcattcttcattagataccacccaccatacgtcattttataaagccggaaactacatttcccaaaaggcctttatttttcctcgcgggaaa

SEQ ID NO: 18218 - DNA, 122 bp, Homo sapiens
  misc_feature (61)..(62): /note="This region represents a CpG dinucleotide"
  misc_feature (61)..(61): /note="Nucleotide may be methylated to form 5-methylcytosine"
ggaactggcagaggaaggtctcgaacccacacccgtgggaactccaagtctttgaaagtccgtcccgcccctgcgtgaagaatgggcgcgcggctggactcgtcaccgggggttttagggaa

SEQ ID NO: 18219 - DNA, 122 bp, Homo sapiens
  misc_feature (61)..(62): /note="This region represents a CpG dinucleotide"
  misc_feature (61)..(61): /note="Nucleotide may be methylated to form 5-methylcytosine"
ctgctttgtaggggcaccccactggctgatggaaaaacttgctgaaggacgcaggttggccgtagctggtcagtaaaagcaacctgctaggtagcagagaaatatgctaaaggatgcagggc

SEQ ID NO: 18220 - DNA, 122 bp, Homo sapiens
  misc_feature (61)..(62): /note="This region represents a CpG dinucleotide"
  misc_feature (61)..(61): /note="Nucleotide may be methylated to form 5-methylcytosine"
cttagaaaatggacacagagcttgtccagctaaataaacctgcctgatttggagccatttcgtgttggggattgtttgctactacaccacaccctgggtgatctggcgggtgcattgcctta

SEQ ID NO: 18221 - DNA, 122 bp, Homo sapiens
  misc_feature (61)..(62): /note="This region represents a CpG dinucleotide"
  misc_feature (61)..(61): /note="Nucleotide may be methylated to form 5-methylcytosine"
tacacactaagcactgggcacactgtccgcccaggtccagtgagcagtaattgtcagctacgactgttgttataattgtcatcataaaggcactcaacagacacgtgcccaataccgagccc

SEQ ID NO: 18222 - DNA, 122 bp, Homo sapiens
  misc_feature (61)..(62): /note="This region represents a CpG dinucleotide"
  misc_feature (61)..(61): /note="Nucleotide may be methylated to form 5-methylcytosine"
gtgattacagaataaaaagatcctttaggaatgcagtcatctgtttattcagtaaatttccgtatcttactaatcacaacagcatccacgtacacttaaaatagtgcctatatgtatgtgtg

SEQ ID NO: 18223 - DNA, 122 bp, Homo sapiens
  misc_feature (61)..(62): /note="This region represents a CpG dinucleotide"
  misc_feature (61)..(61): /note="Nucleotide may be methylated to form 5-methylcytosine"
tggtcactggaggaaaataagatgatgtgacaattggaaggaaactcatattttagtcctcggtatctaacacagtgcatcataaaaaaggacttcaatatttgttgaagattcaagaaatt

SEQ ID NO: 18224 - DNA, 122 bp, Homo sapiens
  misc_feature (61)..(62): /note="This region represents a CpG dinucleotide"
  misc_feature (61)..(61): /note="Nucleotide may be methylated to form 5-methylcytosine"
cacatgaatttgacttgcaaaaagtgcaaaagggaatggtagaaccagaattactaagtacggcatcagtgtgaatgtgggggaaatttgtgtataacttgctttgttctgctgagctgata

SEQ ID NO: 18225 - DNA, 122 bp, Homo sapiens
  misc_feature (61)..(62): /note="This region represents a CpG dinucleotide"
  misc_feature (61)..(61): /note="Nucleotide may be methylated to form 5-methylcytosine"
ggcagttaagaaaatgttagttaaaccactgtgtttggatctttgttaaatgcagctgaacgcatgagctaattcactggcctggagagagaaagagcgataagttaatacacagtggctgc

SEQ ID NO: 18226 - DNA, 122 bp, Homo sapiens
  misc_feature (61)..(62): /note="This region represents a CpG dinucleotide"
  misc_feature (61)..(61): /note="Nucleotide may be methylated to form 5-methylcytosine"
gtgtggtgctgataatgttgatgggtcacaggcatgggtactcaagttcctgcccaaaaccgcatgaaggagtgggttaggggagccagtcacctcacatcactggagaacaggcaagggtc

SEQ ID NO: 18227 - DNA, 122 bp, Homo sapiens
  misc_feature (61)..(62): /note="This region represents a CpG dinucleotide"
  misc_feature (61)..(61): /note="Nucleotide may be methylated to form 5-methylcytosine"
tgtggggcagaagatcccaggtcaggggctccttcaaggacagggccagcatggaaaagccgctgttactattttcaagacaacagggccactgagaaatgtttagaacaaagctttggtga

SEQ ID NO: 18228 - DNA, 122 bp, Homo sapiens
  misc_feature (61)..(62): /note="This region represents a CpG dinucleotide"
  misc_feature (61)..(61): /note="Nucleotide may be methylated to form 5-methylcytosine"
ttctcctactttccgcgccttcttcgtttggggtgtggtttgagtgctttggttttatttcgttttgttctagttttgagctctgggaacagaaaaaggcagtgcgagtctgttcttgggat

SEQ ID NO: 18229 - DNA, 122 bp, Homo sapiens
  misc_feature (61)..(62): /note="This region represents a CpG dinucleotide"
  misc_feature (61)..(61): /note="Nucleotide may be methylated to form 5-methylcytosine"
gtgtcggctgagaccaaggtggccgactggctggtgcagaatgacccgagcctgctgcaccgggttggccctggggatgaccgccacagcaccaagagcgacctgcctgtccacacccgcac

SEQ ID NO: 18230 - DNA, 122 bp, Homo sapiens
  misc_feature (61)..(62): /note="This region represents a CpG dinucleotide"
  misc_feature (61)..(61): /note="Nucleotide may be methylated to form 5-methylcytosine"
taatgttcgtctcccccatcagactctgagctgcacgaaggtagaggccacacccagcaccgcatatccagagctcacagccgggcccgcacagagctgcccagcagtgagctgtgtggtgg

SEQ ID NO: 18231 - DNA, 122 bp, Homo sapiens
  misc_feature (61)..(62): /note="This region represents a CpG dinucleotide"
  misc_feature (61)..(61): /note="Nucleotide may be methylated to form 5-methylcytosine"
tttagtagccatgactaagcaactcatctttcagttacagaatagcctatgttggccgggcgcagtggctcaccctccgtaatctcagcactttgggaggccgaggtgggtgaatcacctga

SEQ ID NO: 18232 - DNA, 122 bp, Homo sapiens
  misc_feature (61)..(62): /note="This region represents a CpG dinucleotide"
  misc_feature (61)..(61): /note="Nucleotide may be methylated to form 5-methylcytosine"
catctcaactcttatgataaattagtacagtgcctagaacaagaaaaagcacttaataagcggtatctaattttactaggatgtgaacgtcagcaaggttaaaggatgatttaagggatgtt

SEQ ID NO: 18233 - DNA, 122 bp, Homo sapiens
  misc_feature (61)..(62): /note="This region represents a CpG dinucleotide"
  misc_feature (61)..(61): /note="Nucleotide may be methylated to form 5-methylcytosine"
gagattagaatgtctacctcagtaactttgattcatcttaagccatcagatgtctcttgacgtttagataataatctactaccaaagtactacaggagttcaaaaacattcatcacccttca

SEQ ID NO: 18234 - DNA, 122 bp, Homo sapiens
  misc_feature (61)..(62): /note="This region represents a CpG dinucleotide"
  misc_feature (61)..(61): /note="Nucleotide may be methylated to form 5-methylcytosine"
cctcagagcttcagtgtaactggagcaataccagctgattctaacagtgtggcccagcagcgcctgctggctgggagcagggacagaaaatgcctgaggctccgaggtgggagcccaggctg

SEQ ID NO: 18235 - DNA, 122 bp, Homo sapiens
  misc_feature (61)..(62): /note="This region represents a CpG dinucleotide"
  misc_feature (61)..(61): /note="Nucleotide may be methylated to form 5-methylcytosine"
agtagaggtggggcctgatgctgtgattgacagcctggttaatcggctaaactcagtaggcgtgtcccatgcaccacaaggaattggggaggaacaattcccaaaggaaggaggttgctgtt

SEQ ID NO: 18236 - DNA, 122 bp, Homo sapiens
  misc_feature (61)..(62): /note="This region represents a CpG dinucleotide"
  misc_feature (61)..(61): /note="Nucleotide may be methylated to form 5-methylcytosine"
tatactggttcggagagttccccttctgcccatgactaggaagctggagagagtgctgcccgaacctaacaatacgaaaaggcctgtctcatcagacagctgaagcgtcagggccatggagt

SEQ ID NO: 18237 - DNA, 122 bp, Homo sapiens
  misc_feature (61)..(62): /note="This region represents a CpG dinucleotide"
  misc_feature (61)..(61): /note="Nucleotide may be methylated to form 5-methylcytosine"
gatgggcgagagccagctgtccaggatcagcagtaaggatccttttgcttatcactcaggcgctgctggctgccacatgggtgcattctggacctgaatgcctgcgtgtgcatgtgtgcgtg

SEQ ID NO: 18238 - DNA, 122 bp, Homo sapiens
  misc_feature (61)..(62): /note="This region represents a CpG dinucleotide"
  misc_feature (61)..(61): /note="Nucleotide may be methylated to form 5-methylcytosine"
gaggaggaagagagatcaccctaaagttcttccagttgcacagaaccgcccccgaggcaccgctgcaccggctctttggttcagagaccctacatcacatcccactgatggagtgatagaat

SEQ ID NO: 18239 - DNA, 122 bp, Homo sapiens
  misc_feature (61)..(62): /note="This region represents a CpG dinucleotide"
  misc_feature (61)..(61): /note="Nucleotide may be methylated to form 5-methylcytosine"
gaatttctgaggcaattgagagataaaatatcaagtttttttttttttaagaaaaccttgcggttttaaataacatagcaaacaccaacaaacattaaggaggttgaaccactcagttcatg

SEQ ID NO: 18240 - DNA, 122 bp, Homo sapiens
  misc_feature (61)..(62): /note="This region represents a CpG dinucleotide"
  misc_feature (61)..(61): /note="Nucleotide may be methylated to form 5-methylcytosine"
ggacatttaaaggattcgacatccttgaccaaaaaggtttagccctttcagaggacagaacgtggaaatcccataccctagtaagagagaattagcctccaggcctggaaccattagagtat

SEQ ID NO: 18241 - DNA, 122 bp, Homo sapiens
  misc_feature (61)..(62): /note="This region represents a CpG dinucleotide"
  misc_feature (61)..(61): /note="Nucleotide may be methylated to form 5-methylcytosine"
aaacaaccaaatgggataatacactagcacatactttgtgctgtctgaaattaagtagcacggtgtggcaatcaaatgcgcaagacttagccggtttagcaagtatcagaaacttaggtgaa

SEQ ID NO: 18242 - DNA, 122 bp, Homo sapiens
  misc_feature (61)..(62): /note="This region represents a CpG dinucleotide"
  misc_feature (61)..(61): /note="Nucleotide may be methylated to form 5-methylcytosine"
ccctccctcagtcaaatcagtgtagcaaaatgtattacccagtcacaacacaggatgttgcgaggaaacaagggtggtagcaacaaatgcagcctattctgaacactgcaaggtgcatgcac

SEQ ID NO: 18243 - DNA, 122 bp, Homo sapiens
  misc_feature (61)..(62): /note="This region represents a CpG dinucleotide"
  misc_feature (61)..(61): /note="Nucleotide may be methylated to form 5-methylcytosine"
cagcctggacaagatgaggagacccccccatctacaaaaaatttaaaaattagggttggccgggtgtggtggctcacgcctgtaatcccagcaccttggaaggctgaggcggtggatcacct

SEQ ID NO: 18244 - DNA, 122 bp, Homo sapiens
  misc_feature (61)..(62): /note="This region represents a CpG dinucleotide"
  misc_feature (61)..(61): /note="Nucleotide may be methylated to form 5-methylcytosine"
catttgctagttttgtcttttcattgctctgtgcctcggtttctctaggcaataaagaaccgaataatagtatccacctcctaggattgttctgagtattcaaggagaaaatatatacaagg

SEQ ID NO: 18245 - DNA, 122 bp, Homo sapiens
  misc_feature (61)..(62): /note="This region represents a CpG dinucleotide"
  misc_feature (61)..(61): /note="Nucleotide may be methylated to form 5-methylcytosine"
ccactgagaagttgatcctgttattattattcgcagcgacatttcctggcttagacctagcgtactgggtaatgcccatatgttcagaacagtcaatactgcaacggcgaaagggaaaggct

SEQ ID NO: 18246 - DNA, 122 bp, Homo sapiens
  misc_feature (61)..(62): /note="This region represents a CpG dinucleotide"
  misc_feature (61)..(61): /note="Nucleotide may be methylated to form 5-methylcytosine"
tttttgataatctcgtcaataaattacagaacaattgttcctttcaagatttattcaaaacgtgtcaactctgcttaattaagcactttgatgatttaagaaatcttggtgagtagcttagt

SEQ ID NO: 18247 - DNA, 122 bp, Homo sapiens
  misc_feature (61)..(62): /note="This region represents a CpG dinucleotide"
  misc_feature (61)..(61): /note="Nucleotide may be methylated to form 5-methylcytosine"
acccaagacggaacccactcgcgttgcgcccgaggaggtgcgaggctggtccgccagacccgcccagcacgtcaccaacacacctaaggaagccggctccggtgccgcctccgtggggcgca

SEQ ID NO: 18248 - DNA, 122 bp, Homo sapiens
  misc_feature (61)..(62): /note="This region represents a CpG dinucleotide"
  misc_feature (61)..(61): /note="Nucleotide may be methylated to form 5-methylcytosine"
catgaatgaatgtgcctattagctcattctgttctaaaccctatgattccccggatgtcacgtgccacctgttcctactgactaggtaccaggcactgaaaccaccattgcaaaattataac

SEQ ID NO: 18249 - DNA, 122 bp, Homo sapiens
  misc_feature (61)..(62): /note="This region represents a CpG dinucleotide"
  misc_feature (61)..(61): /note="Nucleotide may be methylated to form 5-methylcytosine"
gatcaaagcatgacctaagtgataccaaattacaaaatcatgccatcaaactgcagcagccgccttctgacatctctggaatttagattctgaccttgagggtcttaggtggccatttatgg

SEQ ID NO: 18250 - DNA, 122 bp, Homo sapiens
  misc_feature (61)..(62): /note="This region represents a CpG dinucleotide"
  misc_feature (61)..(61): /note="Nucleotide may be methylated to form 5-methylcytosine"
tagcttgtgagatcagatgagattgggcacgttcagggtggtttggtggtagacacatgtcggggtttctatttcaatcagaagacagaaaaataagacagggagcatgggaaatcacctcc

SEQ ID NO: 18251 - DNA, 122 bp, Homo sapiens
  misc_feature (61)..(62): /note="This region represents a CpG dinucleotide"
  misc_feature (61)..(61): /note="Nucleotide may be methylated to form 5-methylcytosine"
ctgtgtccagttatctctaagataacctgataaacttagccaaatggtaagtgatccgcccgtctcaacctcccaaagtgcgagattgcaggtgtgagccactgcgccaaacggtatagtgt

SEQ ID NO: 18252 - DNA, 122 bp, Homo sapiens
  misc_feature (61)..(62): /note="This region represents a CpG dinucleotide"
  misc_feature (61)..(61): /note="Nucleotide may be methylated to form 5-methylcytosine"
gcttctgtgtgaaacttgggtggttcattcccactgatttcatagccagcttctttcattcgcagggctctccacctgcagaagccaccacaggcggtgccaaaagtgccaaaacatctcaa

SEQ ID NO: 18253 - DNA, 122 bp, Homo sapiens
  misc_feature (61)..(62): /note="This region represents a CpG dinucleotide"
  misc_feature (61)..(61): /note="Nucleotide may be methylated to form 5-methylcytosine"
ggcagtctgctcattgctagaaagggtgggtgtggtgtaattgtgcaaagtataatgtggcgtaatctgcttagtgttctatgcggattattctgtgataggatcttgacaattacttgctt

SEQ ID NO: 18254 - DNA, 122 bp, Homo sapiens
  misc_feature (61)..(62): /note="This region represents a CpG dinucleotide"
  misc_feature (61)..(61): /note="Nucleotide may be methylated to form 5-methylcytosine"
ccaaaatctgtcccctacgtaaaagaaactagaaacagatgtaaagttaatatcagcagacgtaacacaaggagaaaggggtataaaaacaggtcaacaagttgaaaattggcctgaatttt

SEQ ID NO: 18255 - DNA, 122 bp, Homo sapiens
  misc_feature (61)..(62): /note="This region represents a CpG dinucleotide"
  misc_feature (61)..(61): /note="Nucleotide may be methylated to form 5-methylcytosine"
gcacatgggccatacaaaacatcaggcaggctagggttttggctcatgggtcagaatgtacgtcaagtggttaaaactgtggttaggtctaagaagaggaagtagaacaaaagacaaggttt

SEQ ID NO: 18256 - DNA, 122 bp, Homo sapiens
  misc_feature (61)..(62): /note="This region represents a CpG dinucleotide"
  misc_feature (61)..(61): /note="Nucleotide may be methylated to form 5-methylcytosine"
atctcatgagaactcacccactaccacaagagcagcatggaggtaactgcccccatgattcggttatcacccactgggtccccacgttgggattatgggaactacaattcaagatgagattt

SEQ ID NO: 18257 - DNA, 122 bp, Homo sapiens
  misc_feature (61)..(62): /note="This region represents a CpG dinucleotide"
  misc_feature (61)..(61): /note="Nucleotide may be methylated to form 5-methylcytosine"
acatgggtgtggcctgtgttttctacatgtagtcatatccaactatatcccaatagcttccgcaagacagtcatatctgctatatccaattatctaatatccttcactagaggtaaacatgt

SEQ ID NO: 18258 - DNA, 122 bp, Homo sapiens
  misc_feature (61)..(62): /note="This region represents a CpG dinucleotide"
  misc_feature (61)..(61): /note="Nucleotide may be methylated to form 5-methylcytosine"
ttgagttttgtgctatgcttttcagcttccaggggacccaagtgttcattccaaagggatcgcttgaaaaatataatctcaggatttacaaatcaaacccaaaatacaaggataagcaggcc

SEQ ID NO: 18259 - DNA, 122 bp, Homo sapiens
  misc_feature (61)..(62): /note="This region represents a CpG dinucleotide"
  misc_feature (61)..(61): /note="Nucleotide may be methylated to form 5-methylcytosine"
ccatttgccattttcttctcttgctacagagcccacttcagaggattcaatgagtgaatacgacaacggtgcttggatcagtgcctgccatactgtcagcactagtcgttactattttcact

SEQ ID NO: 18260 - DNA, 122 bp, Homo sapiens
  misc_feature (61)..(62): /note="This region represents a CpG dinucleotide"
  misc_feature (61)..(61): /note="Nucleotide may be methylated to form 5-methylcytosine"
ggatccccaggttatgagtcagcacattgtcacccagaggcagggcaacattttcttcatcggagcctgaggtcagagggcctcttctctgtggggaaccttgacaaccttcttcaggttcc

SEQ ID NO: 18261 - DNA, 122 bp, Homo sapiens
  misc_feature (61)..(62): /note="This region represents a CpG dinucleotide"
  misc_feature (61)..(61): /note="Nucleotide may be methylated to form 5-methylcytosine"
ggtgtgtctctgtatgcaatttaattactgtactttggttctgtatcattccaacagatacgctttaatgtaacccatgtcctggggagtggagggccagagcaggtggctgctgcagttcc

SEQ ID NO: 18262 - DNA, 122 bp, Homo sapiens
  misc_feature (61)..(62): /note="This region represents a CpG dinucleotide"
  misc_feature (61)..(61): /note="Nucleotide may be methylated to form 5-methylcytosine"
gacagtcagcaggcaaatactttgctaaagctaagtggcattccaagtgtcagctagatccgaagagataattgtggcctatacatcagcagcaaatacatgtctgtttacttactgaccat

SEQ ID NO: 18263 - DNA, 122 bp, Homo sapiens
  misc_feature (61)..(62): /note="This region represents a CpG dinucleotide"
  misc_feature (61)..(61): /note="Nucleotide may be methylated to form 5-methylcytosine"
cataaggtcctggtgaggtcctgtcaagggtgctctgccctgtgctttgacaggtgtgtgcggagatgaaaggtaaatagccattcttgagcgtgtcctctgtgccagacactgttttaggt

SEQ ID NO: 18264 - DNA, 122 bp, Homo sapiens
  misc_feature (61)..(62): /note="This region represents a CpG dinucleotide"
  misc_feature (61)..(61): /note="Nucleotide may be methylated to form 5-methylcytosine"
gaaagagagaaaatgtttccaaatcatgtatctgagaatggatatccagaataaagaactcgaactcaacaacaaagaatcccaaacaattggatgttaaaatgagcaaaggacttgaatag

SEQ ID NO: 18265 - DNA, 122 bp, Homo sapiens
  misc_feature (61)..(62): /note="This region represents a CpG dinucleotide"
  misc_feature (61)..(61): /note="Nucleotide may be methylated to form 5-methylcytosine"
gaaggtagtaatagtcatacctgattcatacagttcttgtgaggattaattgggatactacgcatgaattacttagaatcatgcctagcgtctagcgacatgggtgagctggcagtcaccgc

SEQ ID NO: 18266 - DNA, 122 bp, Homo sapiens
  misc_feature (61)..(62): /note="This region represents a CpG dinucleotide"
  misc_feature (61)..(61): /note="Nucleotide may be methylated to form 5-methylcytosine"
caacctctcttgcagcatagtttccactggtagtaattccattcagctactcagacaacacgctcctcggccgaatgggacgacccttcttaagatggaaaatgttacaaaagaaaaaggat

SEQ ID NO: 18267 - DNA, 122 bp, Homo sapiens
  misc_feature (61)..(62): /note="This region represents a CpG dinucleotide"
  misc_feature (61)..(61): /note="Nucleotide may be methylated to form 5-methylcytosine"
ggaagacttacagtgagcaccagaacttaatgttgctccagaaatatattgctgctctgtcgttgttttccaggatggggaagaataagtgggcactggaacttaatcctgaccttttagtt

SEQ ID NO: 18268 - DNA, 122 bp, Homo sapiens
  misc_feature (61)..(62): /note="This region represents a CpG dinucleotide"
  misc_feature (61)..(61): /note="Nucleotide may be methylated to form 5-methylcytosine"
cctcctggtgggcaggcagggctggccgaggactcctgggctcactgcttcctggctccccgggataccagctctgcccttgtatttataagaagaggaggatccaggaagtcccagggcag

SEQ ID NO: 18269 - DNA, 122 bp, Homo sapiens
  misc_feature (61)..(62): /note="This region represents a CpG dinucleotide"
  misc_feature (61)..(61): /note="Nucleotide may be methylated to form 5-methylcytosine"
atatcatgtggcaaagaggagatgtcattagaccataagcaaaaaaaaaaaagcattgcacgggcattaacacaacatttaagtgtcctcctcaaggagccacaggcacagggagtggtgca

SEQ ID NO: 18270 - DNA, 122 bp, Homo sapiens
  misc_feature (61)..(62): /note="This region represents a CpG dinucleotide"
  misc_feature (61)..(61): /note="Nucleotide may be methylated to form 5-methylcytosine"
cccaagagggggatgaccaggcttctggaagtgatatatccagaatgtgacccagacgttcgtacttccttccatttgacaggaaatagaaggagagagagaagcaagttacacgaaatcac

SEQ ID NO: 18271 - DNA, 122 bp, Homo sapiens
  misc_feature (61)..(62): /note="This region represents a CpG dinucleotide"
  misc_feature (61)..(61): /note="Nucleotide may be methylated to form 5-methylcytosine"
cccaacttctaccacgcacagcaaggctgtgctatttaggcgtggatcacacgcacactgcgccaacttctaagctaacaatggacaaccaaagcctccggaactctgtcttgggtagagta

SEQ ID NO: 18272 - DNA, 122 bp, Homo sapiens
  misc_feature (61)..(62): /note="This region represents a CpG dinucleotide"
  misc_feature (61)..(61): /note="Nucleotide may be methylated to form 5-methylcytosine"
aataaagacataagcaccactaaatttttacattacaaaatacttgctgagctagttaaacgagagcatttaagtggaaataaatgatgtctctaaaatagaatgttcaaaataacaatgga

SEQ ID NO: 18273 - DNA, 122 bp, Homo sapiens
  misc_feature (61)..(62): /note="This region represents a CpG dinucleotide"
  misc_feature (61)..(61): /note="Nucleotide may be methylated to form 5-methylcytosine"
agttggctgaaagagataaaacaaaaaattgggtatgaaaaaagcaataaggataagttgcgtatgctgaaggaaggctcatttcactaaggaaggagggaggtaatttaagaaaaggtaaa

SEQ ID NO: 18274 - DNA, 122 bp, Homo sapiens
  misc_feature (61)..(62): /note="This region represents a CpG dinucleotide"
  misc_feature (61)..(61): /note="Nucleotide may be methylated to form 5-methylcytosine"
atgggcttttctgtggggtgaaaactcaggcctcaaatccctgcatccgtgaaccttgttcgcaccagcactgcggagagagggctccaggacatagaagggagaatgagggcgtggtgggt

SEQ ID NO: 18275 - DNA, 122 bp, Homo sapiens
  misc_feature (61)..(62): /note="This region represents a CpG dinucleotide"
  misc_feature (61)..(61): /note="Nucleotide may be methylated to form 5-methylcytosine"
ctttcactccctctctctccagcatttatttcgaccctaattggtttccctcttcttcgacgtatctagtggataatgcacaccttccctgagtcagagcctgcaaaaagcaaaggaacgaa

SEQ ID NO: 18276 - DNA, 122 bp, Homo sapiens
  misc_feature (61)..(62): /note="This region represents a CpG dinucleotide"
  misc_feature (61)..(61): /note="Nucleotide may be methylated to form 5-methylcytosine"
gctgggattatgggtgtgcactaccacgcccagccaaggcttagacattttagaatgaggcgatcctgatttcagttctaccagagtcatgaccccactatgctgctgatgaagactgggga

SEQ ID NO: 18277 - DNA, 122 bp, Homo sapiens
  misc_feature (61)..(62): /note="This region represents a CpG dinucleotide"
  misc_feature (61)..(61): /note="Nucleotide may be methylated to form 5-methylcytosine"
ccccaggttttgaacatcgtttttcctgtttatcagatctgctctgtctcctccaagcctcggcttattgttcctgcttctccacaacccttctggtctgagggggcaggccagatcccact

SEQ ID NO: 18278 - DNA, 122 bp, Homo sapiens
  misc_feature (61)..(62): /note="This region represents a CpG dinucleotide"
  misc_feature (61)..(61): /note="Nucleotide may be methylated to form 5-methylcytosine"
ggcacaataagagacatctgggttattactatggtttcaggacttttactctccaaaacccgtgttgaaatataatccccagtgtggcagcattgagaggtggggcctttaagagatgattg

SEQ ID NO: 18279 - DNA, 122 bp, Homo sapiens
  misc_feature (61)..(62): /note="This region represents a CpG dinucleotide"
  misc_feature (61)..(61): /note="Nucleotide may be methylated to form 5-methylcytosine"
gttctgaaacggactcagaataaacttgcatttcccacaactttgtcaagtattgacaaacgttgacaacatatataatgcccattatagggcagtatatacttattaaagtgtaaggagca

SEQ ID NO: 18280 - DNA, 122 bp, Homo sapiens
  misc_feature (61)..(62): /note="This region represents a CpG dinucleotide"
  misc_feature (61)..(61): /note="Nucleotide may be methylated to form 5-methylcytosine"
agcactcttgtcttaatcctctgttacgtaagtgccaagagaatacagaaatacaggaggcgagatctttgccctgaaggagtttgaaatcaagacaggaacttccgaaagaaggctcaaag

SEQ ID NO: 18281 - DNA, 122 bp, Homo sapiens
  misc_feature (61)..(62): /note="This region represents a CpG dinucleotide"
  misc_feature (61)..(61): /note="Nucleotide may be methylated to form 5-methylcytosine"
ctgacataatagttcatgaattattgtcagtacattactggacacccaaattccaaatctcgtttgcttttgaaactggaattagcaactaatgaatgctttttctttacagtggagaagaa

SEQ ID NO: 18282 - DNA, 122 bp, Homo sapiens
  misc_feature (61)..(62): /note="This region represents a CpG dinucleotide"
  misc_feature (61)..(61): /note="Nucleotide may be methylated to form 5-methylcytosine"
ctacttagtgttaagccacagtggccatcagtgacatgagctgcactttgggagcagggccgtctcctaggtggcactgtgcatgagcagtgaagctggaaggggggatttttgttgctttt

SEQ ID NO: 18283 - DNA, 122 bp, Homo sapiens
  misc_feature (61)..(62): /note="This region represents a CpG dinucleotide"
  misc_feature (61)..(61): /note="Nucleotide may be methylated to form 5-methylcytosine"
gggcagacgtgcacaggagtggtgggcagccttccaaggggcccagtgtgtgtatttctccgacttgcttctccttttgggtgctctgggttcaggaatatgtagatatgttttgtctcttc

SEQ ID NO: 18284 - DNA, 122 bp, Homo sapiens
  misc_feature (61)..(62): /note="This region represents a CpG dinucleotide"
  misc_feature (61)..(61): /note="Nucleotide may be methylated to form 5-methylcytosine"
cctgggcaacatggtgaaaccctgtctctacaaatacaaagccgggtgtggtggcacacacgtgtaatcccagttacttgggaagctgaggtaggaagattgcttgagcctgggacagcaaa

SEQ ID NO: 18285 - DNA, 122 bp, Homo sapiens
  misc_feature (61)..(62): /note="This region represents a CpG dinucleotide"
  misc_feature (61)..(61): /note="Nucleotide may be methylated to form 5-methylcytosine"
gatggctgcctgaggccttgcccagaggaagctgagagagaagagatggaagagagcccacggctctgggacccagcagagcacattcagatggaaaccagctatgactgggtgacacctct

SEQ ID NO: 18286 - DNA, 122 bp, Homo sapiens
  misc_feature (61)..(62): /note="This region represents a CpG dinucleotide"
  misc_feature (61)..(61): /note="Nucleotide may be methylated to form 5-methylcytosine"
ctaactgaggggccaacatcaggaataaggcacaggtgtggggacagtcagaggaggcagcggcggcggggggagaggggtctctgggtcatggctgcaggcgccaaccctgggctcagatg

SEQ ID NO: 18287 - DNA, 122 bp, Homo sapiens
  misc_feature (61)..(62): /note="This region represents a CpG dinucleotide"
  misc_feature (61)..(61): /note="Nucleotide may be methylated to form 5-methylcytosine"
agcacatgggaaaaataaaggtaatgatggggatcgttgcaattcataggaaaggaggcacgaggaaatgaaaatgaaagggagtaataactacgtaactagtcaatcttccttaaaaaaaa

SEQ ID NO: 18288 - DNA, 122 bp, Homo sapiens
  misc_feature (61)..(62): /note="This region represents a CpG dinucleotide"
  misc_feature (61)..(61): /note="Nucleotide may be methylated to form 5-methylcytosine"
gctagatttacccaggctatgtggtacagcctattgcttctaggctacaagcctgcatgtcgtgttactgtacagaatactgtaggcaattataacacaattgtaagtatttgtgtatctaa

SEQ ID NO: 18289 - DNA, 122 bp, Homo sapiens
  misc_feature (61)..(62): /note="This region represents a CpG dinucleotide"
  misc_feature (61)..(61): /note="Nucleotide may be methylated to form 5-methylcytosine"
tgtaccaatgggtggcaataatacattcacccagaataactccacaggagggccttatcccgcctcgccttgcatatgttgaaaccagggcatggtttcctataaaaatgcttactgtgcag

SEQ ID NO: 18290 - DNA, 122 bp, Homo sapiens
  misc_feature (61)..(62): /note="This region represents a CpG dinucleotide"
  misc_feature (61)..(61): /note="Nucleotide may be methylated to form 5-methylcytosine"
ttatcaacatgagtcacattttcactttcttgttcatttgcacactttagatctaaatgccgagaactaggtttttgtttatatagcctcggttgtctctggaaggaaaaatagttccacgt

SEQ ID NO: 18291 - DNA, 122 bp, Homo sapiens
  misc_feature (61)..(62): /note="This region represents a CpG dinucleotide"
  misc_feature (61)..(61): /note="Nucleotide may be methylated to form 5-methylcytosine"
gataagattctgaagactgagaaactaggccagagttagcctagttacgccatttgcaagcgcataatggggttgaacctgcaagacacattctcccatcgagctgggtacccccaaagtta

SEQ ID NO: 18292 - DNA, 122 bp, Homo sapiens
  misc_feature (61)..(62): /note="This region represents a CpG dinucleotide"
  misc_feature (61)..(61): /note="Nucleotide may be methylated to form 5-methylcytosine"
aaaacagaaaaagatttaaacaaggactgaactgtctttttaaatgcttgtcttgcacttcgaggcagctaagaggtatttttaccttttggtttgacttggttaaattgaggaagtagggg

SEQ ID NO: 18293 - DNA, 122 bp, Homo sapiens
  misc_feature (61)..(62): /note="This region represents a CpG dinucleotide"
  misc_feature (61)..(61): /note="Nucleotide may be methylated to form 5-methylcytosine"
ggaggcggagattgcagtgagccgagatcatgccactgtactccagcctaggtaacagagcgagactccatctcgaaaaaaggtggggggagtgctagaaaaaggggtaagagagtagttac

SEQ ID NO: 18294 - DNA, 122 bp, Homo sapiens
  misc_feature (61)..(62): /note="This region represents a CpG dinucleotide"
  misc_feature (61)..(61): /note="Nucleotide may be methylated to form 5-methylcytosine"
gatcacagtcatctcccttccactaatctcccatgttaagccagcacttgtcactgctatcgtgcattgttatattatccatctgtggtgtagggcttgtctctctaagctgcttaataata

SEQ ID NO: 18295 - DNA, 122 bp, Homo sapiens
  misc_feature (61)..(62): /note="This region represents a CpG dinucleotide"
  misc_feature (61)..(61): /note="Nucleotide may be methylated to form 5-methylcytosine"
agaaaaagaaaactattgtaagaaatggaatactaaaagcccttgtaacagatccatttccgtaggcaaaatgacagaggaagtcagataataatcaaagattgcctggagagcaggaaatc

SEQ ID NO: 18296 - DNA, 122 bp, Homo sapiens
  misc_feature (61)..(62): /note="This region represents a CpG dinucleotide"
  misc_feature (61)..(61): /note="Nucleotide may be methylated to form 5-methylcytosine"
gcaatttttaagctccactttcaaatagagacggggattgggatgggatttcaatgcaggcgaataacacaagacagatggaggaatatgtttatgatcagcaaagagatcactcatcttga

SEQ ID NO: 18297 - DNA, 122 bp, Homo sapiens
  misc_feature (61)..(62): /note="This region represents a CpG dinucleotide"
  misc_feature (61)..(61): /note="Nucleotide may be methylated to form 5-methylcytosine"
tgcctgacacctggtgtcgtaaccagaaggagcaaggccacggttgtactgtgataggaacgtgtcctacgggacctggaacagggagtaccggttgtggaggagagatgaggcttgatata

SEQ ID NO: 18298 - DNA, 122 bp, Homo sapiens
  misc_feature (61)..(62): /note="This region represents a CpG dinucleotide"
  misc_feature (61)..(61): /note="Nucleotide may be methylated to form 5-methylcytosine"
attttttcattaagcaagaatcaaccaaatctctaaaacatcatgaactagtactgtattcgtattaaagatacaatctctcagttcttttcgtttcttatggaaccaaaagaaaaagagac

SEQ ID NO: 18299 - DNA, 122 bp, Homo sapiens
  misc_feature (61)..(62): /note="This region represents a CpG dinucleotide"
  misc_feature (61)..(61): /note="Nucleotide may be methylated to form 5-methylcytosine"
aattttgaaattccccagttaatctctagaagcagttttgtgaacttacttgcagtatcacggcccacccagtggttaccaaaaatagaaattgaagtcagggaatatctgaggctaccaga

SEQ ID NO: 18300 - DNA, 122 bp, Homo sapiens
  misc_feature (61)..(62): /note="This region represents a CpG dinucleotide"
  misc_feature (61)..(61): /note="Nucleotide may be methylated to form 5-methylcytosine"
attcccatagggaactcccatagggaattccaaacttacaggccagtaaggtggcctggccgctcttccacctggaacacagctcactgaatacggcagatacctgcagactgggggcagaa

SEQ ID NO: 18301 - DNA, 122 bp, Homo sapiens
  misc_feature (61)..(62): /note="This region represents a CpG dinucleotide"
  misc_feature (61)..(61): /note="Nucleotide may be methylated to form 5-methylcytosine"
ggtttttttgtttttgtttttttttgttttttttttttcttacaaaatagccatagtttgcgcaacccgttttggagagggcaagtacaaacaatctgttgttactgccttatataacagca

SEQ ID NO: 18302 - DNA, 122 bp, Homo sapiens
  misc_feature (61)..(62): /note="This region represents a CpG dinucleotide"
  misc_feature (61)..(61): /note="Nucleotide may be methylated to form 5-methylcytosine"
tcttatttaccttatatcaatgtggcctagcacagtacctggcacatggtaagtaatgaacgggatggatgaggaagtgaatcaatgagtaagtgaattaataacacatggttttcagtttg

SEQ ID NO: 18303 - DNA, 122 bp, Homo sapiens
  misc_feature (61)..(62): /note="This region represents a CpG dinucleotide"
  misc_feature (61)..(61): /note="Nucleotide may be methylated to form 5-methylcytosine"
caaaaattgatgtttatctgggacagaaagaagcaattttggagcctacttctttgcttacgcctcctgatgcatggtgttgtgtattaatctactggtgattactttaagtcagctgtagc

SEQ ID NO: 18304 - DNA, 122 bp, Homo sapiens
  misc_feature (61)..(62): /note="This region represents a CpG dinucleotide"
  misc_feature (61)..(61): /note="Nucleotide may be methylated to form 5-methylcytosine"
gtggagctcagatattttaaaggatgagttacagtgtacttaagttctctagcacagttgcggttaaagagctatttgaaacagtaagaatgaaatccctgggtaaataggcttcagggagg

SEQ ID NO: 18305 - DNA, 122 bp, Homo sapiens
  misc_feature (61)..(62): /note="This region represents a CpG dinucleotide"
  misc_feature (61)..(61): /note="Nucleotide may be methylated to form 5-methylcytosine"
agttgtgtacatgcaagctattatcactgttacagttcttcctctgacttaacctgagaccggtatgtggagctatcttcattaagatatccattaagaaatttagtgaatgagaaagattt

SEQ ID NO: 18306 - DNA, 122 bp, Homo sapiens
  misc_feature (61)..(62): /note="This region represents a CpG dinucleotide"
  misc_feature (61)..(61): /note="Nucleotide may be methylated to form 5-methylcytosine"
caatgtaggtagttattcagaataatagactcaggaatttaataagggtgttgtttaaaacgcaaatatcaccaaccagtggtaaagcaaacacattctgtgtgaatgagtacagcccactg

SEQ ID NO: 18307 - DNA, 122 bp, Homo sapiens
  misc_feature (61)..(62): /note="This region represents a CpG dinucleotide"
  misc_feature (61)..(61): /note="Nucleotide may be methylated to form 5-methylcytosine"
tctattcatatctattctggctaacttccaatctgtttgctccagttttagtgattgttccgtaatgcaaacctgatcatgtcacccttgcttaaatatctttagtacagataaacccactt

SEQ ID NO: 18308 - DNA, 122 bp, Homo sapiens
  misc_feature (61)..(62): /note="This region represents a CpG dinucleotide"
  misc_feature (61)..(61): /note="Nucleotide may be methylated to form 5-methylcytosine"
tttcacgcaggctggagtgcagtggcgcgatcttgactcactgcaacctccgctccactccgcgccaccgcacccaacccgggtgcaagtgattctcctgcctaagcctcccaagtagctgg

SEQ ID NO: 18309 - DNA, 122 bp, Homo sapiens
  misc_feature (61)..(62): /note="This region represents a CpG dinucleotide"
  misc_feature (61)..(61): /note="Nucleotide may be methylated to form 5-methylcytosine"
ctttgttcaaatttctacccacaaatcaaaactgttttaatcttcattatctcagtaaagcgcatgtgacaaaagtaaatggagaagacgtctagaaatgttgtgagggttctctggggtta

SEQ ID NO: 18310 - DNA, 122 bp, Homo sapiens
  misc_feature (61)..(62): /note="This region represents a CpG dinucleotide"
  misc_feature (61)..(61): /note="Nucleotide may be methylated to form 5-methylcytosine"
cagaagcgctcccgctgttccctagttgagctggaaacagtggccaagcgtgttttaaatcgagtttccgtgtggctagatattatctgctggttactcttattttttttctccattcgttg

SEQ ID NO: 18311 - DNA, 122 bp, Homo sapiens
  misc_feature (61)..(62): /note="This region represents a CpG dinucleotide"
  misc_feature (61)..(61): /note="Nucleotide may be methylated to form 5-methylcytosine"
tggggtgggtggtccattcttggggacaaggcaggtcatcctgctgaatgtgtgtctctgcgatgtgccctttgggaaaaggaggaacaaggacagcaggatggctgcaggcacctgaccaa

SEQ ID NO: 18312 - DNA, 122 bp, Homo sapiens
  misc_feature (61)..(62): /note="This region represents a CpG dinucleotide"
  misc_feature (61)..(61): /note="Nucleotide may be methylated to form 5-methylcytosine"
agaaaggagcctcccaatagatatgctctgtgaaatgatcagtgctctctcattccatgccgatgaccaacacttattaaaaaacagttgatcaagtaattccagtgaaagaagaggatctc

SEQ ID NO: 18313 - DNA, 122 bp, Homo sapiens
  misc_feature (61)..(62): /note="This region represents a CpG dinucleotide"
  misc_feature (61)..(61): /note="Nucleotide may be methylated to form 5-methylcytosine"
gctctacttatatccacattgtcttgtgcaaggtagagagcaggcctagcaacctgggtgcggcaggattaattaagggcagctgaaaggcctatctgcacctatatatcttacttagctat

SEQ ID NO: 18314 - DNA, 122 bp, Homo sapiens
  misc_feature (61)..(62): /note="This region represents a CpG dinucleotide"
  misc_feature (61)..(61): /note="Nucleotide may be methylated to form 5-methylcytosine"
tttgaattgctttcacaaagctatacaatctttgatgtgggtacaccctctgcctcctggcggaagcataaacaaaaagaaaggatttccctcaaattaatcccactggattcctacaaatt

SEQ ID NO: 18315 - DNA, 122 bp, Homo sapiens
  misc_feature (61)..(62): /note="This region represents a CpG dinucleotide"
  misc_feature (61)..(61): /note="Nucleotide may be methylated to form 5-methylcytosine"
acctgcgtgacttttaacatccccttcatatcctcccactgggcgcattttaagcgccagcgctcaccacatccggctgccccaccgcccgcgcccggagccccaacattcccagtcctctc

SEQ ID NO: 18316 - DNA, 122 bp, Homo sapiens
  misc_feature (61)..(62): /note="This region represents a CpG dinucleotide"
  misc_feature (61)..(61): /note="Nucleotide may be methylated to form 5-methylcytosine"
ccaaaagtatttacaagtatggactcatgagctattgttggttgctaaatgtgaatcacgcgggagtgagtgtgcccttcacactgtgacattgtgacattgtgacaagctccatgtccttt

SEQ ID NO: 18317 - DNA, 122 bp, Homo sapiens
  misc_feature (61)..(62): /note="This region represents a CpG dinucleotide"
  misc_feature (61)..(61): /note="Nucleotide may be methylated to form 5-methylcytosine"
tttagatatctcagaggtaagaaagttatatctcagcagccaacagtaatatctagcaatcgcaaggaaaaaagccagtggatattagggagaaaaatgccttgaccagcatcattacctag

SEQ ID NO: 18318 - DNA, 122 bp, Homo sapiens
  misc_feature (61)..(62): /note="This region represents a CpG dinucleotide"
  misc_feature (61)..(61): /note="Nucleotide may be methylated to form 5-methylcytosine"
aaatggtccaaaggaattcaaagtcatatcttttatctgagggataagaaaaagagaatgcggacgttgttccttgtgaccacagccaccacccccatcaacttgccaagcacagagtaaat

SEQ ID NO: 18319 - DNA, 122 bp, Homo sapiens
  misc_feature (61)..(62): /note="This region represents a CpG dinucleotide"
  misc_feature (61)..(61): /note="Nucleotide may be methylated to form 5-methylcytosine"
catgcacacacccacacatgctcatagtcagacagcactgcatccctcacttccatgttacgacactttaatcaagttcacaagctcctccacaaccttggccagtcttccagagcctcatg

SEQ ID NO: 18320 - DNA, 122 bp, Homo sapiens
  misc_feature (61)..(62): /note="This region represents a CpG dinucleotide"
  misc_feature (61)..(61): /note="Nucleotide may be methylated to form 5-methylcytosine"
agtggtttttagctctttcctgctttttagctccttagcatttagccttgtttcacaggccgctgttacacatgaagaatgctgctgtgtggagtgcccttccttgtattacatgtccttca

SEQ ID NO: 18321 - DNA, 122 bp, Homo sapiens
  misc_feature (61)..(62): /note="This region represents a CpG dinucleotide"
  misc_feature (61)..(61): /note="Nucleotide may be methylated to form 5-methylcytosine"
caactagcagtgacggacacaaactcgatatataactgggaatcctgatgggcttcaaaccgcctggtttccaccacccccttcccttagggaagcctcctgggccacaccctaggccaccc

SEQ ID NO: 18322 - DNA, 122 bp, Homo sapiens
  misc_feature (61)..(62): /note="This region represents a CpG dinucleotide"
  misc_feature (61)..(61): /note="Nucleotide may be methylated to form 5-methylcytosine"
gtacaggtggtgagcagaagtagtcaaggcttataagccaggctgctcctcaaatgcagccgtaagaaaagaaatctgtggggtgttttaaatgcatgcctgatataaagataaacctcggg

SEQ ID NO: 18323 - DNA, 122 bp, Homo sapiens
  misc_feature (61)..(62): /note="This region represents a CpG dinucleotide"
  misc_feature (61)..(61): /note="Nucleotide may be methylated to form 5-methylcytosine"
ctccttgagatcacagcctggtaaacagatcagccattaacaattgaggcggcagggttccgtgcagaaggctgcatgactttgctgtctattgtgactgcgttttgatagttacctttgtc

SEQ ID NO: 18324 - DNA, 122 bp, Homo sapiens
  misc_feature (61)..(62): /note="This region represents a CpG dinucleotide"
  misc_feature (61)..(61): /note="Nucleotide may be methylated to form 5-methylcytosine"
gtgcatggcgttgttctctatttggttcttaagctgtaaacctggaaatcacccttgactcgtcctccttgtttatgactgacatctagtcattttttaggtcttccttaactatgtcttga

SEQ ID NO: 18325 - DNA, 122 bp, Homo sapiens
  misc_feature (61)..(62): /note="This region represents a CpG dinucleotide"
  misc_feature (61)..(61): /note="Nucleotide may be methylated to form 5-methylcytosine"
gagaatttgtgcaattcttgtcactgtcatcttctgagcttagtgctatttaatgcccatcgctcacagggagcagctgaggcccagagaaaagggagtagaaggcattgtctagtccaagg

SEQ ID NO: 18326 - DNA, 122 bp, Homo sapiens
  misc_feature (61)..(62): /note="This region represents a CpG dinucleotide"
  misc_feature (61)..(61): /note="Nucleotide may be methylated to form 5-methylcytosine"
agggttaggggtgggggaggtactgtaaaataggtgttattgtgccaaatgcttgagttacggctgttactccacaggagaaataccatgatttaattctggtgacttggcattagcctcta

SEQ ID NO: 18327 - DNA, 122 bp, Homo sapiens
  misc_feature (61)..(62): /note="This region represents a CpG dinucleotide"
  misc_feature (61)..(61): /note="Nucleotide may be methylated to form 5-methylcytosine"
ttttctcacgggcaaaatgcagttaatgccagggcatggctgggaggtcaaatgaggtgacggaggtaagtaatgcctgacagtgagaagctccatgatggttagctctattctcccacatg

SEQ ID NO: 18328 - DNA, 122 bp, Homo sapiens
  misc_feature (61)..(62): /note="This region represents a CpG dinucleotide"
  misc_feature (61)..(61): /note="Nucleotide may be methylated to form 5-methylcytosine"
agccaggaccacatacactcttgggggccctgctgagactgcaagagtcatgaattctaacgttccacaggtgaaagattccaagattctaggattgcaaaaccccatcattctaagattcc

SEQ ID NO: 18329 - DNA, 122 bp, Homo sapiens
  misc_feature (61)..(62): /note="This region represents a CpG dinucleotide"
  misc_feature (61)..(61): /note="Nucleotide may be methylated to form 5-methylcytosine"
ttgtgagtagcagagattaccttgtactgtgagaggattttaccttgatgtgtgtactggcggatgagagctacaaagttaaagctgactgaggacagtttacaggaagcagtcttcactgt

SEQ ID NO: 18330 - DNA, 122 bp, Homo sapiens
  misc_feature (61)..(62): /note="This region represents a CpG dinucleotide"
  misc_feature (61)..(61): /note="Nucleotide may be methylated to form 5-methylcytosine"
ttgcagtagaacgtatcccaaccccagagggtgggttctggcttccctgcctcagacctgcgggcaggtccgggaacccgacagggacagagaagcccgttttccagcctaaatagaagctc

SEQ ID NO: 18331 - DNA, 122 bp, Homo sapiens
  misc_feature (61)..(62): /note="This region represents a CpG dinucleotide"
  misc_feature (61)..(61): /note="Nucleotide may be methylated to form 5-methylcytosine"
agccattgactcatgtacaggacacattaagcctcatctctgctaacagatttacttacccgatgataacaactttctgcagcagtcagagtgagcatttagggcagctaaatgtaaaggga

SEQ ID NO: 18332 - DNA, 122 bp, Homo sapiens
  misc_feature (61)..(62): /note="This region represents a CpG dinucleotide"
  misc_feature (61)..(61): /note="Nucleotide may be methylated to form 5-methylcytosine"
ctccaggtctagtacacattgttaaatccatgttcacacccaagcccagcagccagagggcgtagaaatcctcaggggccacctggcttggccatataccatttcttcctcctgccactttg

SEQ ID NO: 18333 - DNA, 122 bp, Homo sapiens
  misc_feature (61)..(62): /note="This region represents a CpG dinucleotide"
  misc_feature (61)..(61): /note="Nucleotide may be methylated to form 5-methylcytosine"
gtgggtcagatagcaagatatgtagcatgaggcaggcatgacacatgcttcggtgttccgcgctgagtaccatgggaaggcacaagcgggcctgtactcttgcctcatgaggaagtggttat

SEQ ID NO: 18334 - DNA, 122 bp, Homo sapiens
  misc_feature (61)..(62): /note="This region represents a CpG dinucleotide"
  misc_feature (61)..(61): /note="Nucleotide may be methylated to form 5-methylcytosine"
atcagacacatctcatctctaaacctttccctgcagatcaccatctgagtcatgacttcccgtcgtttgtcttcagtgatctggttggtgcaaacgtatgaggtgactggaattccttagcc

SEQ ID NO: 18335 - DNA, 122 bp, Homo sapiens
  misc_feature (61)..(62): /note="This region represents a CpG dinucleotide"
  misc_feature (61)..(61): /note="Nucleotide may be methylated to form 5-methylcytosine"
cagagacagactcatgatagacagggcgacaggcataaccttcacaggggcgaagcgagacgcacacccgtctccagcagggagccacagtccacaggtggctactcctccctcccactgcc

SEQ ID NO: 18336 - DNA, 122 bp, Homo sapiens
  misc_feature (61)..(62): /note="This region represents a CpG dinucleotide"
  misc_feature (61)..(61): /note="Nucleotide may be methylated to form 5-methylcytosine"
atatgtgtgcatgtatcattttgatgtcgattccgcatgcagagcagtcgagttgccctacgtgtgccactcacgacagaagcccttttttgcatgtatcattttggtagaatgatttatat

SEQ ID NO: 18337 - DNA, 122 bp, Homo sapiens
  misc_feature (61)..(62): /note="This region represents a CpG dinucleotide"
  misc_feature (61)..(61): /note="Nucleotide may be methylated to form 5-methylcytosine"
tggggcttcttggctgtttgtatatcttctttgggaaaatgttgatccaagtcctttgtccgtgtttgaattgttgtcagagtgtttttctcttaactcctgtgttatgattacattgattg

SEQ ID NO: 18338 - DNA, 122 bp, Homo sapiens
  misc_feature (61)..(62): /note="This region represents a CpG dinucleotide"
  misc_feature (61)..(61): /note="Nucleotide may be methylated to form 5-methylcytosine"
cctaggggaccaaccaaccgaccaaagggactattgcttggatgcccaggtactgagacccgtgacttctgtggccagaggctgcgaggggccccaggagagaacacagcgccctaggattg

SEQ ID NO: 18339 - DNA, 122 bp, Homo sapiens
  misc_feature (61)..(62): /note="This region represents a CpG dinucleotide"
  misc_feature (61)..(61): /note="Nucleotide may be methylated to form 5-methylcytosine"
atacagaaatcggtgctgctcccaacagcagatcaaggcagtcgtcaggaactcaggatccggggtgagtgtcctcatcttgccttggggatgggtggcccaggtctttggcagaagtcaca

SEQ ID NO: 18340 - DNA, 122 bp, Homo sapiens
  misc_feature (61)..(62): /note="This region represents a CpG dinucleotide"
  misc_feature (61)..(61): /note="Nucleotide may be methylated to form 5-methylcytosine"
aagttccagtcttttcttcaaagcaagtaaacatgttttcaagaattctttaaataattgcgcttatgttttcaattgtgatgaactcagttgattctttgacttggcttggcagaaacctg

SEQ ID NO: 18341 - DNA, 122 bp, Homo sapiens
  misc_feature (61)..(62): /note="This region represents a CpG dinucleotide"
  misc_feature (61)..(61): /note="Nucleotide may be methylated to form 5-methylcytosine"
gggattataggtatgagccacccagaagctcttttgctatcatgggaccagcatgactggcgctaacagccgatcctctctcaggttttacaggtgtgactgtaccgtcgtaggacgggaat

SEQ ID NO: 18342 - DNA, 122 bp, Homo sapiens
  misc_feature (61)..(62): /note="This region represents a CpG dinucleotide"
  misc_feature (61)..(61): /note="Nucleotide may be methylated to form 5-methylcytosine"
tactcactaattccacaaacatttgctaagcatgtattcagtgttgggcaccatgcaagacgctgtagatacaatggtgaggaaagacaaatatggcatgtcttatcttggatctggtggtc

SEQ ID NO: 18343 - DNA, 122 bp, Homo sapiens
  misc_feature (61)..(62): /note="This region represents a CpG dinucleotide"
  misc_feature (61)..(61): /note="Nucleotide may be methylated to form 5-methylcytosine"
aggtaacatccacttgatcacagttagaagtatgctcctaactcacttacaggaagtaatcggttaaccgatcacaagttatcacaagcttacttcttaaaggggcctcttccttttccttt

SEQ ID NO: 18344 - DNA, 122 bp, Homo sapiens
  misc_feature (61)..(62): /note="This region represents a CpG dinucleotide"
  misc_feature (61)..(61): /note="Nucleotide may be methylated to form 5-methylcytosine"
gttaacaagttggctcctgctttactacggggggtccctggcagctcctctgttgaaggacgcatggggcatctgtgccgctctcgtagggacgtttgcagggccttgtgtgactgtgttca

SEQ ID NO: 18345 - DNA, 122 bp, Homo sapiens
  misc_feature (61)..(62): /note="This region represents a CpG dinucleotide"
  misc_feature (61)..(61): /note="Nucleotide may be methylated to form 5-methylcytosine"
atccaaccagttcaaacacacttctaggacaaaacctagaaatgagcatactgaccagaacgtcaaagtaaagttaaagtaaaaaatgaatgaggggtatggtagaatcatgagttagttaa

SEQ ID NO: 18346 - DNA, 122 bp, Homo sapiens
  misc_feature (61)..(62): /note="This region represents a CpG dinucleotide"
  misc_feature (61)..(61): /note="Nucleotide may be methylated to form 5-methylcytosine"
gcactgaaaaaagacagcgtgttcaccttttggaactctgtttctttcaagtcactaaaacgtcacttagaaaatgatctctcccaaaacctcagaggtatgaaagaactagtgttttcaaa

SEQ ID NO: 18347 - DNA, 122 bp, Homo sapiens
  misc_feature (61)..(62): /note="This region represents a CpG dinucleotide"
  misc_feature (61)..(61): /note="Nucleotide may be methylated to form 5-methylcytosine"
acagggaatcgtgtgtacactgggaccctcttgtcctctgagagttatttagcactgtgtcgaaggcctcttatgtggaaagcagtgcagggagccgtgccctctcacaaatgaagattaaa

SEQ ID NO: 18348 - DNA, 122 bp, Homo sapiens
  misc_feature (61)..(62): /note="This region represents a CpG dinucleotide"
  misc_feature (61)..(61): /note="Nucleotide may be methylated to form 5-methylcytosine"
ccaacaaatgctgtgtcactaatccacatgtcactgaacacatgggataccttacagtttcgcaaggcaaatgttgcaataaaaactgaaaaactgtcctggagttggattaggtaatacag

SEQ ID NO: 18349 - DNA, 122 bp, Homo sapiens
  misc_feature (61)..(62): /note="This region represents a CpG dinucleotide"
  misc_feature (61)..(61): /note="Nucleotide may be methylated to form 5-methylcytosine"
gcccccttgcccatcacaaaatgccttcctcttcctgggttcctgcaccctgcctgcccacgcctattgagaaagcctttccgccagggccaggactagagtgaaacatgtgaggcattcac

SEQ ID NO: 18350 - DNA, 122 bp, Homo sapiens
  misc_feature (61)..(62): /note="This region represents a CpG dinucleotide"
  misc_feature (61)..(61): /note="Nucleotide may be methylated to form 5-methylcytosine"
tggatggtccacaaatctcaatgtgattcctaacatgagttaagctgtccaaccctgtgacgttatcaggggatttgtgattaatacatagtgacaccatttaactgtggcagaggttctta

SEQ ID NO: 18351 - DNA, 122 bp, Homo sapiens
  misc_feature (61)..(62): /note="This region represents a CpG dinucleotide"
  misc_feature (61)..(61): /note="Nucleotide may be methylated to form 5-methylcytosine"
tctggaagatcatcgcagaaccagtaacatgacccatcgcctccacaaggcgcggcgtctcgactgttcttagagtgtatttctagtaaaatcagaagctcaccaaagcaacatgcttgaga

SEQ ID NO: 18352 - DNA, 122 bp, Homo sapiens
  misc_feature (61)..(62): /note="This region represents a CpG dinucleotide"
  misc_feature (61)..(61): /note="Nucleotide may be methylated to form 5-methylcytosine"
aatagtccattctcttggctgccttggcgaggcagaggctggtgttacaaacttttctttcgtccacgtgtcatcttggagacttggagagaggacaagatttgtttccttatttgctgcct

SEQ ID NO: 18353 - DNA, 122 bp, Homo sapiens
  misc_feature (61)..(62): /note="This region represents a CpG dinucleotide"
  misc_feature (61)..(61): /note="Nucleotide may be methylated to form 5-methylcytosine"
catctctcagaaaaaatgatgatgtggcaattctgtggataaaaaacatgggaagggaagcgtgttttcacccaggagaaacagttaaggaccatgcatttgcagtcttttccatgtcttta

SEQ ID NO: 18354 - DNA, 122 bp, Homo sapiens
  misc_feature (61)..(62): /note="This region represents a CpG dinucleotide"
  misc_feature (61)..(61): /note="Nucleotide may be methylated to form 5-methylcytosine"
cctcgcttcatatcaccttgaacacaagttgaaaacctaaacctttgcagcatgtgcttacgtagaaacttatgcaattcaaacagaagtcatgcagctgggacgggctcagattgcctgat

SEQ ID NO: 18355 - DNA, 122 bp, Homo sapiens
  misc_feature (61)..(62): /note="This region represents a CpG dinucleotide"
  misc_feature (61)..(61): /note="Nucleotide may be methylated to form 5-methylcytosine"
caaatcctgaaaagacacttttcaatcagaaaactgactttttcaaacaagttcagtaaacgtagctccattaagcttttcatagcctgacctatgcattctggaaatgttcgcttttagcc

SEQ ID NO: 18356 - DNA, 122 bp, Homo sapiens
  misc_feature (61)..(62): /note="This region represents a CpG dinucleotide"
  misc_feature (61)..(61): /note="Nucleotide may be methylated to form 5-methylcytosine"
ctctaaagaatagaagttgaggaaaaaattggagatgggggatgtagggggaaattagagcgatgaggaaactatacaagcttgagaaaagaatttctatttactagggaggaaatgagaga

SEQ ID NO: 18357 - DNA, 122 bp, Homo sapiens
  misc_feature (61)..(62): /note="This region represents a CpG dinucleotide"
  misc_feature (61)..(61): /note="Nucleotide may be methylated to form 5-methylcytosine"
tatttggtttcatttttgccatgcttctgagaatggttcttttgttcttccttcactcaccgcttagatcctccaaggcattccactcagaaaatcacacggctgctgcccccactccaaaa

SEQ ID NO: 18358 - DNA, 122 bp, Homo sapiens
  misc_feature (61)..(62): /note="This region represents a CpG dinucleotide"
  misc_feature (61)..(61): /note="Nucleotide may be methylated to form 5-methylcytosine"
ccctggccgccctcgccacgtgccgaggacacagggcacagtgtcgggcgtgtcaagcgtcgaggcctccctacagagcaggtctgcccacctgctttcttggcactcgtgggcatctaaga

SEQ ID NO: 18359 - DNA, 122 bp, Homo sapiens
  misc_feature (61)..(62): /note="This region represents a CpG dinucleotide"
  misc_feature (61)..(61): /note="Nucleotide may be methylated to form 5-methylcytosine"
tgcccttgtgcaagttacttaacatctctgagctacagttccctcttctataaaagggatcgtctctataccacatgattggcctgtataataaatatggtagcctagctcagtaccttcct

SEQ ID NO: 18360 - DNA, 122 bp, Homo sapiens
  misc_feature (61)..(62): /note="This region represents a CpG dinucleotide"
  misc_feature (61)..(61): /note="Nucleotide may be methylated to form 5-methylcytosine"
ggagtgaggaagcaggaggcagggaggctgccttccttcaggcagtgagtctactaagtgcgttcagtgtgacctccagaagcatagatagtgcactctttagaaaaaggtgggcgcacctg

SEQ ID NO: 18361 - DNA, 122 bp, Homo sapiens
  misc_feature (61)..(62): /note="This region represents a CpG dinucleotide"
  misc_feature (61)..(61): /note="Nucleotide may be methylated to form 5-methylcytosine"
atcacctgcatggcacatggtaagtaactacatcataagtggtaccttctattgctgctgcggctgcacgactactactcctgttaccaccaccaccaccaccatcgccaccaccatcatca

SEQ ID NO: 18362 - DNA, 122 bp, Homo sapiens
  misc_feature (61)..(62): /note="This region represents a CpG dinucleotide"
  misc_feature (61)..(61): /note="Nucleotide may be methylated to form 5-methylcytosine"
gaccccccagcccccaagcttgcctgccagtctatctctgcctaggtggggaggccccaacgttagttgggagtttgaagaagccttgttctgcagctcaggcatttccacatcaagcccat

SEQ ID NO: 18363 - DNA, 122 bp, Homo sapiens
  misc_feature (61)..(62): /note="This region represents a CpG dinucleotide"
  misc_feature (61)..(61): /note="Nucleotide may be methylated to form 5-methylcytosine"
tcataatcttattgaaatcctatatcttcccattgacttttatcgtttcaagccagttaccggagttgtcagtaccaacgcgcggacgccgcgcaaggccggggcgggggacttcccttggt

SEQ ID NO: 18364 - DNA, 122 bp, Homo sapiens
  misc_feature (61)..(62): /note="This region represents a CpG dinucleotide"
  misc_feature (61)..(61): /note="Nucleotide may be methylated to form 5-methylcytosine"
caatgtagaagtgccactgcgctcagttaacccaaagaattgcaagaaataacaaactgtcggctgggcacagtggctcacacctataatcccagcactttgaaaggccgaggcaggtggat

SEQ ID NO: 18365 - DNA, 122 bp, Homo sapiens
  misc_feature (61)..(62): /note="This region represents a CpG dinucleotide"
  misc_feature (61)..(61): /note="Nucleotide may be methylated to form 5-methylcytosine"
catactctgggagtgcaagtctggaaatgcattttcctcaggtgtttagctgcattaaaacgctttttaaaacgcttgagataatgtactcattttgttaggaaacttgtacctttcagata

SEQ ID NO: 18366 - DNA, 122 bp, Homo sapiens
  misc_feature (61)..(62): /note="This region represents a CpG dinucleotide"
  misc_feature (61)..(61): /note="Nucleotide may be methylated to form 5-methylcytosine"
agaactcatatcttggcaggaaacaggaaagagaatgagaatgtaagaacagaacattcacgttagagagaaaaagagaatttgggaagcttgaagtcatttctgagagtattagttaggat

SEQ ID NO: 18367 - DNA, 122 bp, Homo sapiens
  misc_feature (61)..(62): /note="This region represents a CpG dinucleotide"
  misc_feature (61)..(61): /note="Nucleotide may be methylated to form 5-methylcytosine"
caaactcctgggatcaagtgatctgcctgccttggccttccaaagtactgggattacaggcgtgagccactgcattgagccatcttaagcaatttgtttctgtttgtttaagacagagtctc

SEQ ID NO: 18368 - DNA, 122 bp, Homo sapiens
  misc_feature (61)..(62): /note="This region represents a CpG dinucleotide"
  misc_feature (61)..(61): /note="Nucleotide may be methylated to form 5-methylcytosine"
ctctttttcacttctgctcctcttgtcatgtgtgggtttggtgagccagtatctttaatgcgacttttttcagcactggagttttacaaagcctgggcccagtggtgccggaaacactaaga

SEQ ID NO: 18369 - DNA, 122 bp, Homo sapiens
  misc_feature (61)..(62): /note="This region represents a CpG dinucleotide"
  misc_feature (61)..(61): /note="Nucleotide may be methylated to form 5-methylcytosine"
aacctaaacaactatcagtgcctggggacattgaaagctccctctagaacacctggacaccgagtgcccgtcactggaaggacgaagaggtaataagtgtggatccacacaataacgtggag

SEQ ID NO: 18370 - DNA, 122 bp, Homo sapiens
  misc_feature (61)..(62): /note="This region represents a CpG dinucleotide"
  misc_feature (61)..(61): /note="Nucleotide may be methylated to form 5-methylcytosine"
ttcactcaccactcactcactgactcatctagagtaacttccagtcttgtaagttccattcgtggtaaatgccctatacagctataccattttcaaatcttttatatggtacttttaatata

SEQ ID NO: 18371 - DNA, 122 bp, Homo sapiens
  misc_feature (61)..(62): /note="This region represents a CpG dinucleotide"
  misc_feature (61)..(61): /note="Nucleotide may be methylated to form 5-methylcytosine"
gagtcttttgtatggtgctttgtgatctcactgtgcctttcactcatgtctctgggtgttcgtattctggaaagagagatttccaacctcttgcatcccctcctctagggctcatgggacct

SEQ ID NO: 18372 - DNA, 122 bp, Homo sapiens
  misc_feature (61)..(62): /note="This region represents a CpG dinucleotide"
  misc_feature (61)..(61): /note="Nucleotide may be methylated to form 5-methylcytosine"
caggctggcctcaagtgatcctcctgcctcacctcccaaagtgctgggattataggcgtgcgccaccatgcccggacaggatatttcttaaaaggagattgttagggaaaatgatgtgagca

SEQ ID NO: 18373 - DNA, 122 bp, Homo sapiens
  misc_feature (61)..(62): /note="This region represents a CpG dinucleotide"
  misc_feature (61)..(61): /note="Nucleotide may be methylated to form 5-methylcytosine"
ggtttccaacatgctcaggttaaccataatgattccaacttctgtttcatgtcacttcttcgtgtgtttacccaaaacacacagagttctattggaaagaaagtaaagcaaagtgtaaaatc

SEQ ID NO: 18374 - DNA, 122 bp, Homo sapiens
  misc_feature (61)..(62): /note="This region represents a CpG dinucleotide"
  misc_feature (61)..(61): /note="Nucleotide may be methylated to form 5-methylcytosine"
cgccccatcccctccctctccgcaggttacctgctcaactggtgcctcctgcaggcaggacgcaacctcagtgctggccccgggcatgcgggcctcgagagggcaggtggcagggccagccg

SEQ ID NO: 18375 - DNA, 122 bp, Homo sapiens
  misc_feature (61)..(62): /note="This region represents a CpG dinucleotide"
  misc_feature (61)..(61): /note="Nucleotide may be methylated to form 5-methylcytosine"
gtagggagtgaaacttgtagctcagtgactgagtattctaaaggacagggtaccaaaagacgggactgtgagagttcacaattgaccatgaccttcaattaaagccccaaagtcggcagctc

SEQ ID NO: 18376 - DNA, 122 bp, Homo sapiens
  misc_feature (61)..(62): /note="This region represents a CpG dinucleotide"
  misc_feature (61)..(61): /note="Nucleotide may be methylated to form 5-methylcytosine"
gccttattagtaaagctgctgtgtctctctattcttttactttcttctacacgtcttgatcgcaggattttatgctctgggtggacctgaacgtaaaagttggccagctgtggccttattta

SEQ ID NO: 18377 - DNA, 122 bp, Homo sapiens
  misc_feature (61)..(62): /note="This region represents a CpG dinucleotide"
  misc_feature (61)..(61): /note="Nucleotide may be methylated to form 5-methylcytosine"
caggctttcctgcagttttgctcatatacattctaagtttttctgatagctttcaacccacgtcttcttgtttgcaaacctatccagcctggaaggtccaactcatatcctgcctttcccat

SEQ ID NO: 18378 - DNA, 122 bp, Homo sapiens
  misc_feature (61)..(62): /note="This region represents a CpG dinucleotide"
  misc_feature (61)..(61): /note="Nucleotide may be methylated to form 5-methylcytosine"
cacaacaataattgtggtttagactctttacagcacactgatattggcatctcatttcaacgtaattttgaccacatagctccctaacaaataggtcagccagtttcaggagtttagatgct

SEQ ID NO: 18379 - DNA, 122 bp, Homo sapiens
  misc_feature (61)..(62): /note="This region represents a CpG dinucleotide"
  misc_feature (61)..(61): /note="Nucleotide may be methylated to form 5-methylcytosine"
taataactgctttacaggtatttactcatttactcattcatctgttcctttaaaactatacggaggcacatgtcctcagtacctcccgaggctgtgtcacaggcatgcatcctttaaaaaag

SEQ ID NO: 18380 - DNA, 122 bp, Homo sapiens
  misc_feature (61)..(62): /note="This region represents a CpG dinucleotide"
  misc_feature (61)..(61): /note="Nucleotide may be methylated to form 5-methylcytosine"
aaactacctgaagtcagtaggagggggttggtaacctgatctgtaacctttctctgcctgcgtaatcacagctgtcctatctggaaaatccttactaagagccaggaatgacaggggcctca

SEQ ID NO: 18381 - DNA, 122 bp, Homo sapiens
  misc_feature (61)..(62): /note="This region represents a CpG dinucleotide"
  misc_feature (61)..(61): /note="Nucleotide may be methylated to form 5-methylcytosine"
tattctctgcatctattctctgcctccatgcgtctcgggaatcatggattacgtgaccttcgtgctgtggcttctctcacgtagcacagtgtttgcggggctcacccacattgactcatgca

SEQ ID NO: 18382 - DNA, 122 bp, Homo sapiens
  misc_feature (61)..(62): /note="This region represents a CpG dinucleotide"
  misc_feature (61)..(61): /note="Nucleotide may be methylated to form 5-methylcytosine"
tagctatttgtttcctccccacaacaattagtgctaatgtgacatgtgctcatttttgtacgggataaaactgccatccagtgcgatttggtacaaatgagtcaaacaagacaggctcaccc

SEQ ID NO: 18383 - DNA, 122 bp, Homo sapiens
  misc_feature (61)..(62): /note="This region represents a CpG dinucleotide"
  misc_feature (61)..(61): /note="Nucleotide may be methylated to form 5-methylcytosine"
tctgggaatgaggcaactcaaggttctaggaggaaacacaaattatatttctgggtgactcgaattggccatgacctcactacaaatactgaggctttgaaggaactctggttcataagaga

SEQ ID NO: 18384 - DNA, 122 bp, Homo sapiens
  misc_feature (61)..(62): /note="This region represents a CpG dinucleotide"
  misc_feature (61)..(61): /note="Nucleotide may be methylated to form 5-methylcytosine"
atttaggaagaaaggaagacctaaccaccaaagtaacttttgaacacagtatttttactacgtattctcaggatgtaaacaaaagagaaccgtaagtaaacactgagttccagtaagtgggt

SEQ ID NO: 18385 - DNA, 122 bp, Homo sapiens
  misc_feature (61)..(62): /note="This region represents a CpG dinucleotide"
  misc_feature (61)..(61): /note="Nucleotide may be methylated to form 5-methylcytosine"
tttcgagaactcgcagcacctggattatatcaccgagaagctctggcgcaacgcgttgctcgctggggcggtgccggtggtgctgggcccagaccgtgccaactacgagcgctttgtgcccc

SEQ ID NO: 18386 - DNA, 122 bp, Homo sapiens
  misc_feature (61)..(62): /note="This region represents a CpG dinucleotide"
  misc_feature (61)..(61): /note="Nucleotide may be methylated to form 5-methylcytosine"
tttcattacatcctggttgaattaccaaatggaaactgatttaggaatactgagtgtgtacggcacagagaaaaaatatcactgcgaaatttataggcctgtgtaagactgtcagggccctg

SEQ ID NO: 18387 - DNA, 122 bp, Homo sapiens
  misc_feature (61)..(62): /note="This region represents a CpG dinucleotide"
  misc_feature (61)..(61): /note="Nucleotide may be methylated to form 5-methylcytosine"
agcagaggaatatcgtgcaacgtttaacaattcctgttattcttaagccagtatctacgtcgatctacatgcacccatgcatgatgtaaaacagagcttctttaggttggcaactggatgga

SEQ ID NO: 18388 - DNA, 122 bp, Homo sapiens
  misc_feature (61)..(62): /note="This region represents a CpG dinucleotide"
  misc_feature (61)..(61): /note="Nucleotide may be methylated to form 5-methylcytosine"
cgcgcctggtggaggggctggcccaggtgccgcagggccactgcgaggagcacctggacccgctgagcatctactgcgagcaggaccgcgcgctggtgtgcggagtgtgcgcctcactcggc

SEQ ID NO: 18389 - DNA, 122 bp, Homo sapiens
  misc_feature (61)..(62): /note="This region represents a CpG dinucleotide"
  misc_feature (61)..(61): /note="Nucleotide may be methylated to form 5-methylcytosine"
cacgactctgtttttcaagaattgtctcttcatataattgcctatggactttctattatccggtaggaatactgcaatattccaacagcctaatttagatttctcaccactccctaattcta

SEQ ID NO: 18390 - DNA, 122 bp, Homo sapiens
  misc_feature (61)..(62): /note="This region represents a CpG dinucleotide"
  misc_feature (61)..(61): /note="Nucleotide may be methylated to form 5-methylcytosine"
tccctttgtgcactctggtagaaaagcagcacattccatttagttatgcctctgtcagcacggcgagtgttatttaattgcagaaaacaatttggagataagagtgagattcaggaaggaaa

SEQ ID NO: 18391 - DNA, 122 bp, Homo sapiens
  misc_feature (61)..(62): /note="This region represents a CpG dinucleotide"
  misc_feature (61)..(61): /note="Nucleotide may be methylated to form 5-methylcytosine"
atttggtttattacattagtctcaccagaccagtacttgcaaaaccctgatggtgctgatcgtagcaggtgatgcatcaccaccaagcatttcaaaaactatttcagccattctaggctaga

SEQ ID NO: 18392 - DNA, 122 bp, Homo sapiens
  misc_feature (61)..(62): /note="This region represents a CpG dinucleotide"
  misc_feature (61)..(61): /note="Nucleotide may be methylated to form 5-methylcytosine"
acttgttatagtgcttagaactcagataactatggaataaagcatctatttcaccaggcacggtggctcactcctgcaatccctgtactttggaagggtaaggtgggaggactgcttgagcc

SEQ ID NO: 18393 - DNA, 122 bp, Homo sapiens
  misc_feature (61)..(62): /note="This region represents a CpG dinucleotide"
  misc_feature (61)..(61): /note="Nucleotide may be methylated to form 5-methylcytosine"
ccagccagggtccaggcccctccgtaaggcatctgttctgataggtcagtgcttgtgccacgttggttgacaaatacttgcacatcacccctgcttgactgaatttatggtaactggagttt

SEQ ID NO: 18394 - DNA, 122 bp, Homo sapiens
  misc_feature (61)..(62): /note="This region represents a CpG dinucleotide"
  misc_feature (61)..(61): /note="Nucleotide may be methylated to form 5-methylcytosine"
tacatttatctgcattttacggaaggcaaccgaggttcatagagatagtgatttggccagcgtcacaggcccagtaaaagggattgaaaatccaggtccgtccgaccctaaagcagggaact

SEQ ID NO: 18395 - DNA, 122 bp, Homo sapiens
  misc_feature (61)..(62): /note="This region represents a CpG dinucleotide"
  misc_feature (61)..(61): /note="Nucleotide may be methylated to form 5-methylcytosine"
aaattgttgatacaaggatcagggatgaatgctacttggaagagaagtttgagtgggaaccggtcaattcgctaatgaatagttatgatgactttgtttccttatgcaaattcaaaactgaa

SEQ ID NO: 18396 - DNA, 122 bp, Homo sapiens
  misc_feature (61)..(62): /note="This region represents a CpG dinucleotide"
  misc_feature (61)..(61): /note="Nucleotide may be methylated to form 5-methylcytosine"
gtcttctgtttctgaattccctcccattgcttccctctccggacaggcacacacacagagcgactccaggaagggctggaacaacgcctgcacgtgatcaacagcatccgcacacccggatc

SEQ ID NO: 18397 - DNA, 122 bp, Homo sapiens
  misc_feature (61)..(62): /note="This region represents a CpG dinucleotide"
  misc_feature (61)..(61): /note="Nucleotide may be methylated to form 5-methylcytosine"
ccagctggaccactcagtagataaggcgacacagtgagtcatgtagaccttgcacctgatcgctccctcccctgtgtgctgctcatgccaggttcctgtttaaaagccctgctttctgcaca

SEQ ID NO: 18398 - DNA, 122 bp, Homo sapiens
  misc_feature (61)..(62): /note="This region represents a CpG dinucleotide"
  misc_feature (61)..(61): /note="Nucleotide may be methylated to form 5-methylcytosine"
aagtcctttttatgtggtttctctgttccagtatctggcactgtcaccctgaagtggcagcgccagctttcagttatctagctacctaaactttgtgctgattgtgactttctcctctccct

SEQ ID NO: 18399 - DNA, 122 bp, Homo sapiens
  misc_feature (61)..(62): /note="This region represents a CpG dinucleotide"
  misc_feature (61)..(61): /note="Nucleotide may be methylated to form 5-methylcytosine"
ctacttatttacctggacttgcatgtgatgtgcctgaatacaatacattcccagcaggagcggcaaagggccagtgatgtgacaagagaaaggtgtattgagtttagctgaaactcacagag

SEQ ID NO: 18400 - DNA, 122 bp, Homo sapiens
  misc_feature (61)..(62): /note="This region represents a CpG dinucleotide"
  misc_feature (61)..(61): /note="Nucleotide may be methylated to form 5-methylcytosine"
cctgcagatatttgaaaggctgccatgaggaagaggaactaggcttttcccttgtggtttcggaaggcagtgctgaagctaacaacgtgaggctggcgtttccctaagactcacatggactg

SEQ ID NO: 18401 - DNA, 122 bp, Homo sapiens
  misc_feature (61)..(62): /note="This region represents a CpG dinucleotide"
  misc_feature (61)..(61): /note="Nucleotide may be methylated to form 5-methylcytosine"
caagggtaacaatgctatctttgaaaaatcattttagtccatttccatatgaaaagaatacgaaatgtcctgtcaaacaccagaggtggtatttactcagtgtgtatgcaccatatgcctgg

SEQ ID NO: 18402 - DNA, 122 bp, Homo sapiens
  misc_feature (61)..(62): /note="This region represents a CpG dinucleotide"
  misc_feature (61)..(61): /note="Nucleotide may be methylated to form 5-methylcytosine"
tcgtatagttcctccaagtgtcatttctttcataaagcattctctgaatactttaggccacgtaaaactctcccatctgtgtgcaaagataatacatgttatataattttgcaatctgggac

SEQ ID NO: 18403 - DNA, 122 bp, Homo sapiens
  misc_feature (61)..(62): /note="This region represents a CpG dinucleotide"
  misc_feature (61)..(61): /note="Nucleotide may be methylated to form 5-methylcytosine"
gccctggttcagggcgtaagggaccgaagaagcctccgaccctttaatgtgcatgatatccgggctgctgtagggattcctctgcaatagcggggtggcggacaggacttggacctgcccgc

SEQ ID NO: 18404 - DNA, 122 bp, Homo sapiens
  misc_feature (61)..(62): /note="This region represents a CpG dinucleotide"
  misc_feature (61)..(61): /note="Nucleotide may be methylated to form 5-methylcytosine"
cgcagcgcagtggcgaattcgatcttctgggtctccgggtggttcccactggggctctcgcgccgtctctctggagccaaaggcccccctcacacggctttcgccagtgcatcgcttttccc

SEQ ID NO: 18405 - DNA, 122 bp, Homo sapiens
  misc_feature (61)..(62): /note="This region represents a CpG dinucleotide"
  misc_feature (61)..(61): /note="Nucleotide may be methylated to form 5-methylcytosine"
tcgaaattacggaacatttttaacttctttactcagtggtaaagaatggaacatcttttacgtcaaactactgaagttgtgggcaaaattacaagcgatgattatgcaggataggttagttt

SEQ ID NO: 18406 - DNA, 122 bp, Homo sapiens
  misc_feature (61)..(62): /note="This region represents a CpG dinucleotide"
  misc_feature (61)..(61): /note="Nucleotide may be methylated to form 5-methylcytosine"
ttgacgttaaaattggtagctaaacagaactaggtctgcatgtgtctatttagcaggggacggggagatgaaagttgttaggataatttttactcttacttgttcaagattgttagcatata

SEQ ID NO: 18407 - DNA, 122 bp, Homo sapiens
  misc_feature (61)..(62): /note="This region represents a CpG dinucleotide"
  misc_feature (61)..(61): /note="Nucleotide may be methylated to form 5-methylcytosine"
acctcaaagcctgttaggggttgtggaggagggtggagggccgggctaggaatggaaatgcgtgagagacttttcagggtctactggatttttaaaatgcatggcgacattgtggaggtgcg

SEQ ID NO: 18408 - DNA, 122 bp, Homo sapiens
  misc_feature (61)..(62): /note="This region represents a CpG dinucleotide"
  misc_feature (61)..(61): /note="Nucleotide may be methylated to form 5-methylcytosine"
atctgttaaacagggagctcagtgtctgtttgtccagcttctcagagttgctgtgcagctcggatgtggcataggaaacagcagacacagggagagggcagcataaggcactgtagggagca

SEQ ID NO: 18409 - DNA, 122 bp, Homo sapiens
  misc_feature (61)..(62): /note="This region represents a CpG dinucleotide"
  misc_feature (61)..(61): /note="Nucleotide may be methylated to form 5-methylcytosine"
atgactgtttatttcagagcaagtagaaaggagaaattagagccatgaaagacaggacaacggaccaataaaaaccagctcccagaagagtcagaaggaggaagacaggcaaaactgtcacc

SEQ ID NO: 18410 - DNA, 122 bp, Homo sapiens
  misc_feature (61)..(62): /note="This region represents a CpG dinucleotide"
  misc_feature (61)..(61): /note="Nucleotide may be methylated to form 5-methylcytosine"
gtgcccctgcctggaaccagccatggcatttacatcatgatgtcagtttgactcaacgtccgtcactgcacttacatcacttcataagcaatttcccaacatttctgacgctgtagtcacaa

SEQ ID NO: 18411 - DNA, 122 bp, Homo sapiens
  misc_feature (61)..(62): /note="This region represents a CpG dinucleotide"
  misc_feature (61)..(61): /note="Nucleotide may be methylated to form 5-methylcytosine"
aagaggagccaaacgtcgcaggagcaatttcaaagacgtctggggaacgaaaagggtcttcgatccaaggaccagcctaggggccatcgggaaccaaggctctgggggatcccagcagggcc

SEQ ID NO: 18412 - DNA, 122 bp, Homo sapiens
  misc_feature (61)..(62): /note="This region represents a CpG dinucleotide"
  misc_feature (61)..(61): /note="Nucleotide may be methylated to form 5-methylcytosine"
attttaagccttccagtattttattcctattatcactcattcacttaagaagtagctacccgtccatactggtaattttgctattgtttgtgtgtgtgtgtgtgtgtgtgtgtgtgtgtgtg

SEQ ID NO: 18413 - DNA, 122 bp, Homo sapiens
  misc_feature (61)..(62): /note="This region represents a CpG dinucleotide"
  misc_feature (61)..(61): /note="Nucleotide may be methylated to form 5-methylcytosine"
ggacttcactttcttttcttttcttctttttaacctttgcctcttcttctaggagaacttcgctttctacactgattataatttagacatcttcccagtagggctgaatcctagaccaatct

SEQ ID NO: 18414 - DNA, 122 bp, Homo sapiens
  misc_feature (61)..(62): /note="This region represents a CpG dinucleotide"
  misc_feature (61)..(61): /note="Nucleotide may be methylated to form 5-methylcytosine"
tggcgcgggatggttgcctcgagaaggtcgcagccaggagcaaagctttggggctcacaacggactgggcattccaaacggtgtaatcttcggcacatttcacccgctcccattccaccttc

SEQ ID NO: 18415 - DNA, 122 bp, Homo sapiens
  misc_feature (61)..(62): /note="This region represents a CpG dinucleotide"
  misc_feature (61)..(61): /note="Nucleotide may be methylated to form 5-methylcytosine"
gcccagtaggtctcagccttattttacccaacctctatccaagatggagtcactctcgttcgaatgtctctgacaaaaccattgcgaaagaatgagatcaccctgggagtaagcctagaaaa

SEQ ID NO: 18416 - DNA, 122 bp, Homo sapiens
  misc_feature (61)..(62): /note="This region represents a CpG dinucleotide"
  misc_feature (61)..(61): /note="Nucleotide may be methylated to form 5-methylcytosine"
gggggaaatgacttcatgggcttgctgttgagctgcttccctttgcatctccgggaaaggcgtggttcacccgcagcaggtccggttaaggaagcacgtgtgtgctttcagcatcgctgcgt

SEQ ID NO: 18417 - DNA, 122 bp, Homo sapiens
  misc_feature (61)..(62): /note="This region represents a CpG dinucleotide"
  misc_feature (61)..(61): /note="Nucleotide may be methylated to form 5-methylcytosine"
gctctgctggtcactgcagttgtcaggaatgtttcgcctcagaggcaaacggcttagggccgtctcaacttggagacagaaaaacccacctcctactcctggctcagacctttgctttctta

SEQ ID NO: 18418 - DNA, 122 bp, Homo sapiens
  misc_feature (61)..(62): /note="This region represents a CpG dinucleotide"
  misc_feature (61)..(61): /note="Nucleotide may be methylated to form 5-methylcytosine"
ggaatgaccctcaccctggtgccttctcatcctgccagaaattttacttcctcagagtggcgtttcctgaccatcaatcttgaaggaggttcataccattattctctctttcaggctttgtt

SEQ ID NO: 18419 - DNA, 122 bp, Homo sapiens
  misc_feature (61)..(62): /note="This region represents a CpG dinucleotide"
  misc_feature (61)..(61): /note="Nucleotide may be methylated to form 5-methylcytosine"
tgagtcagaggacatgaaaatcctcactgtgcatccttcagagatctgccagaacgacttcgtggccagcagtctcttatctaactactccgcagctagtagtcctcttaagcaaggatgcc

SEQ ID NO: 18420 - DNA, 122 bp, Homo sapiens
  misc_feature (61)..(62): /note="This region represents a CpG dinucleotide"
  misc_feature (61)..(61): /note="Nucleotide may be methylated to form 5-methylcytosine"
gctatttattttaatgctgtttaaaatttttatgttttagatatgcagaagttccccttgcgaatgaaagataatgatcttcttgtaactgaactgtatcatgatccttcaaatgatgctat

SEQ ID NO: 18421 - DNA, 122 bp, Homo sapiens
  misc_feature (61)..(62): /note="This region represents a CpG dinucleotide"
  misc_feature (61)..(61): /note="Nucleotide may be methylated to form 5-methylcytosine"
acttagcctgggtcagttgctaactgaggtctgctctatgaccccatttcctggcctggccgctgctcagatcctggcctctaagggaacatttaaattcttaatcctaagtctccctgcct

SEQ ID NO: 18422 - DNA, 122 bp, Homo sapiens
  misc_feature (61)..(62): /note="This region represents a CpG dinucleotide"
  misc_feature (61)..(61): /note="Nucleotide may be methylated to form 5-methylcytosine"
agtccactcctttctttccagaggatctccctctgtcacacagtctgtagcacagtgacacgatctcaccaccgattccattccattccattccattccattccattccattccattccatt

SEQ ID NO: 18423 - DNA, 122 bp, Homo sapiens
  misc_feature (61)..(62): /note="This region represents a CpG dinucleotide"
  misc_feature (61)..(61): /note="Nucleotide may be methylated to form 5-methylcytosine"
tgcttttaatgacatctaactccacacaaagagtcatcatttttatctagacgtgtgtgacgtgcttgattgcaatgtgttttttttttgtgtgtgtgtgttgttgtttttctctttatcat

SEQ ID NO: 18424 - DNA, 122 bp, Homo sapiens
  misc_feature (61)..(62): /note="This region represents a CpG dinucleotide"
  misc_feature (61)..(61): /note="Nucleotide may be methylated to form 5-methylcytosine"
caggaaagagcaatggggccaggcaggcacgcttcaggagtaagcaccgtgtgcatggcacgctgtcaagctcagacctattactgaataccaaggaagaggctcccgcgattgagacggcg

SEQ ID NO: 18425 - DNA, 122 bp, Homo sapiens
  misc_feature (61)..(62): /note="This region represents a CpG dinucleotide"
  misc_feature (61)..(61): /note="Nucleotide may be methylated to form 5-methylcytosine"
ggtatattccgtggcggtcccctggcatgttagtggtagtttttacccttttctagacaacgtctgtttcatagtccatgtctgtcactgacctaactaatggctgactcatgctatgattt

SEQ ID NO: 18426 - DNA, 122 bp, Homo sapiens
  misc_feature (61)..(62): /note="This region represents a CpG dinucleotide"
  misc_feature (61)..(61): /note="Nucleotide may be methylated to form 5-methylcytosine"
ggcaattattctacttgtggccaattcaagcctcattcagaggtctgaagtgtttccccacggtacttacctggcaggaagtaaagtggccaaagccagaagtccattgtcccttctagagt

SEQ ID NO: 18427 - DNA, 122 bp, Homo sapiens
  misc_feature (61)..(62): /note="This region represents a CpG dinucleotide"
  misc_feature (61)..(61): /note="Nucleotide may be methylated to form 5-methylcytosine"
gacaatgactgaaactattactactcagtctctgcttcttccggaacagctgagcaaaagcgttctgacattgagtcttttaagcctagatcggcattatttcgtctaactgatcaagaagt

SEQ ID NO: 18428 - DNA, 122 bp, Homo sapiens
  misc_feature (61)..(62): /note="This region represents a CpG dinucleotide"
  misc_feature (61)..(61): /note="Nucleotide may be methylated to form 5-methylcytosine"
gcattataaattttgagctcaagagaaaggcctgggctggaaatacagatcagggaatcacggccataaagactggggacttgtcatcatagagattaggaagttatcctcatagagactag

SEQ ID NO: 18429 - DNA, 122 bp, Homo sapiens
  misc_feature (61)..(62): /note="This region represents a CpG dinucleotide"
  misc_feature (61)..(61): /note="Nucleotide may be methylated to form 5-methylcytosine"
gacgttctgaacaatactattaaccaccatgacctaattgacattctagaacactgcacccgaccagtttcagaatacacattctttccttgtgcatatgctacatccgccaaggtagactg

SEQ ID NO: 18430 - DNA, 122 bp, Homo sapiens
  misc_feature (61)..(62): /note="This region represents a CpG dinucleotide"
  misc_feature (61)..(61): /note="Nucleotide may be methylated to form 5-methylcytosine"
ttatttattcagcaagtactgagtgctgtcctaggggctggggaaacacaggagaacaaacgagaagtccatgctcttaagcagtttacattctagtggggaaggaagacaaacaaagtaaa

SEQ ID NO: 18431 - DNA, 122 bp, Homo sapiens
  misc_feature (61)..(62): /note="This region represents a CpG dinucleotide"
  misc_feature (61)..(61): /note="Nucleotide may be methylated to form 5-methylcytosine"
gttgacaccaaaaacagcatcacaaatttctggctcattacccttaaagacttgtctttgcggctgtttacagaagctttagagaaggatgaggattagagaattaaaattcataaagggac

SEQ ID NO: 18432 - DNA, 122 bp, Homo sapiens
  misc_feature (61)..(62): /note="This region represents a CpG dinucleotide"
  misc_feature (61)..(61): /note="Nucleotide may be methylated to form 5-methylcytosine"
ggaagaaagaggaaaagagagagagaaagtgtgcacgcacaggcgcacaaacacaaaatccggcttccacggaggacagcagcagcctgctgcacagtggggaccaagagatacaaggctgc

SEQ ID NO: 18433 - DNA, 122 bp, Homo sapiens
  misc_feature (61)..(62): /note="This region represents a CpG dinucleotide"
  misc_feature (61)..(61): /note="Nucleotide may be methylated to form 5-methylcytosine"
tactgtgagtatcaggatgtttacagttaacccaaggaccttgctggaccagaaggattacgctttgatagattagcatgggaagaaagtgacaggtggaaactgatgttctggagagagat

SEQ ID NO: 18434 - DNA, 122 bp, Homo sapiens
  misc_feature (61)..(62): /note="This region represents a CpG dinucleotide"
  misc_feature (61)..(61): /note="Nucleotide may be methylated to form 5-methylcytosine"
aagagagtatctatgccactggtagcccccaaataatatagctcagtgtctcaagatattcgccacttgctcatgctagaaacaagaggtctttacattttcacagttagagggattttttt

SEQ ID NO: 18435 - DNA, 122 bp, Homo sapiens
  misc_feature (61)..(62): /note="This region represents a CpG dinucleotide"
  misc_feature (61)..(61): /note="Nucleotide may be methylated to form 5-methylcytosine"
aaatctacagaatgaatgacctggtctcttcgacaaataaattgcagaggcacagccaggcgtggtgactcatgcctgtaatcttagcactctgggaggccgagggggcggatcacttgagg

SEQ ID NO: 18436 - DNA, 122 bp, Homo sapiens
  misc_feature (61)..(62): /note="This region represents a CpG dinucleotide"
  misc_feature (61)..(61): /note="Nucleotide may be methylated to form 5-methylcytosine"
ctttacacctgttaggatggccatcaaaaagtcaaaagataataggagttggagaggatgcgaagaaaaaggaaccctgttacactgttggtgggactgtacattcgggcagcctctctggg

SEQ ID NO: 18437 - DNA, 122 bp, Homo sapiens
  misc_feature (61)..(62): /note="This region represents a CpG dinucleotide"
  misc_feature (61)..(61): /note="Nucleotide may be methylated to form 5-methylcytosine"
attatcacaagaacagcatgggggaactgcccccatgatccaattacctccacctggtcccgcccttgacccgtgggaattatggggattatattcaaggtgagatttggatggggacacag

SEQ ID NO: 18438 - DNA, 122 bp, Homo sapiens
  misc_feature (61)..(62): /note="This region represents a CpG dinucleotide"
  misc_feature (61)..(61): /note="Nucleotide may be methylated to form 5-methylcytosine"
agaataagtcataagaatagtgggctttttttctttttttcagatgtagtcttgctctgtcgcccaggctggagtgcagtgtcatgatttcagctcactgcaacctcgcctcccgggttcaa

SEQ ID NO: 18439 - DNA, 122 bp, Homo sapiens
  misc_feature (61)..(62): /note="This region represents a CpG dinucleotide"
  misc_feature (61)..(61): /note="Nucleotide may be methylated to form 5-methylcytosine"
ttatctaggttttttttttgtttgcttgttttttttttttacaggagtgtcaggcagatgcgtttgttttggtaatggttgcacaactctgtgccggtagctaaaagccattaaattatgta

SEQ ID NO: 18440 - DNA, 122 bp, Homo sapiens
  misc_feature (61)..(62): /note="This region represents a CpG dinucleotide"
  misc_feature (61)..(61): /note="Nucleotide may be methylated to form 5-methylcytosine"
tcctttaagtcagggatcagctgtggactagtaataaactccctatccgttctgctaatccgcaagtcttcaagtgtcacagtgtctgataaactctggttgagacacttgagcactgagcc

SEQ ID NO: 18441 - DNA, 122 bp, Homo sapiens
  misc_feature (61)..(62): /note="This region represents a CpG dinucleotide"
  misc_feature (61)..(61): /note="Nucleotide may be methylated to form 5-methylcytosine"
cctgcatatagcaccagtctcattaacacaccctaatactggcctttcctccttgcctgtcgcactcttcctgcttcctctctccggcttctagggatcaccctaaatacaccaccagcagg

SEQ ID NO: 18442 - DNA, 122 bp, Homo sapiens
  misc_feature (61)..(62): /note="This region represents a CpG dinucleotide"
  misc_feature (61)..(61): /note="Nucleotide may be methylated to form 5-methylcytosine"
cccacctcccatctatagtacagctttctcttccccactctgtggtcagaggctgctctacgtagacagcatcatctcggctccccaccctctggcttcctgtcgggttgggccatgagagg

SEQ ID NO: 18443 - DNA, 122 bp, Homo sapiens
  misc_feature (61)..(62): /note="This region represents a CpG dinucleotide"
  misc_feature (61)..(61): /note="Nucleotide may be methylated to form 5-methylcytosine"
aaagttgagacactccagggtagttactaatcaaaccacaacaacaaaactcaccagactcgccaaacattacaggcgctgcacttgccagtgcgctgattaagaatcactgagaactccac

SEQ ID NO: 18444 - DNA, 122 bp, Homo sapiens
  misc_feature (61)..(62): /note="This region represents a CpG dinucleotide"
  misc_feature (61)..(61): /note="Nucleotide may be methylated to form 5-methylcytosine"
ccaaagggcgtgggttgccaaatgcttaggaacttccgctttcagtgtttagcaggttagcggggaaatattagtcccattatttaagctgagatttgcgaggcctacacgttttttttttc

SEQ ID NO: 18445 - DNA, 122 bp, Homo sapiens
  misc_feature (61)..(62): /note="This region represents a CpG dinucleotide"
  misc_feature (61)..(61): /note="Nucleotide may be methylated to form 5-methylcytosine"
tcgtgccaggattggaccttgtagcaggtcactctagccacagaatcctggacctaaccacgggccagcctccaggaacacaccctgcaggtgtccaccagacagtcccataccccttactc

SEQ ID NO: 18446 - DNA, 122 bp, Homo sapiens
  misc_feature (61)..(62): /note="This region represents a CpG dinucleotide"
  misc_feature (61)..(61): /note="Nucleotide may be methylated to form 5-methylcytosine"
ccattcttcacctagtcaatggttgttgagttcactcaaagccatcagacatccacagtccgtctggcctggcctttcctgctatgtcatggcacacagagagcccattgtcactgtcacac

SEQ ID NO: 18447 - DNA, 122 bp, Homo sapiens
  misc_feature (61)..(62): /note="This region represents a CpG dinucleotide"
  misc_feature (61)..(61): /note="Nucleotide may be methylated to form 5-methylcytosine"
ccaataaaatgaatcaagagacttaagccagcctctgtccccagactttccttctttgggcgagatagaatctgaaaagttcaatcttgtaagagaaacacagtcagggtttttaagccttt

SEQ ID NO: 18448 - DNA, 122 bp, Homo sapiens
  misc_feature (61)..(62): /note="This region represents a CpG dinucleotide"
  misc_feature (61)..(61): /note="Nucleotide may be methylated to form 5-methylcytosine"
tggggcagatcaccttccttggtggcaatggcaaacttctctgccacaatggctttgagacgttgctcagcttcctgcagcaatttcaggttggcatcaatcatgctccctgctcaacaggg

SEQ ID NO: 18449 - DNA, 122 bp, Homo sapiens
  misc_feature (61)..(62): /note="This region represents a CpG dinucleotide"
  misc_feature (61)..(61): /note="Nucleotide may be methylated to form 5-methylcytosine"
tcagaaaatgattctgcactgggcctcgtgctctctgcctgacctctatctcaggctctgcgtcttgatcaactgtgaatggaaagcaacaggagggacaggattgtgattgtgaggctaat

SEQ ID NO: 18450 - DNA, 122 bp, Homo sapiens
  misc_feature (61)..(62): /note="This region represents a CpG dinucleotide"
  misc_feature (61)..(61): /note="Nucleotide may be methylated to form 5-methylcytosine"
agttgctaaatttgtgttcccattttaaattgaccaattttggggtgtgacacttttgagcggttgaattgggagaatgaagataagtaatttacctgtccaggatcaaaagaagcctagaa

SEQ ID NO: 18451 - DNA, 122 bp, Homo sapiens
  misc_feature (61)..(62): /note="This region represents a CpG dinucleotide"
  misc_feature (61)..(61): /note="Nucleotide may be methylated to form 5-methylcytosine"
ctcctggggatcaaggactcagctggagagcagttcagggagtggtctgccaccagacatcgtcaccggactcgtccggcgagatgcaagcttggctcttgggttagcctgggccaagcgca

SEQ ID NO: 18452 - DNA, 122 bp, Homo sapiens
  misc_feature (61)..(62): /note="This region represents a CpG dinucleotide"
  misc_feature (61)..(61): /note="Nucleotide may be methylated to form 5-methylcytosine"
aagactaaggatacaatgaagtataacaaacagtcctggctctgattggagtctagttggcgaatcaggccaaacacgataaatgacacttgccagcatagagtgatgtgttttaattgctc

SEQ ID NO: 18453 - DNA, 122 bp, Homo sapiens
  misc_feature (61)..(62): /note="This region represents a CpG dinucleotide"
  misc_feature (61)..(61): /note="Nucleotide may be methylated to form 5-methylcytosine"
tgctggagacctttcagaacctggcctcagtaggtaaggatgacatcattccttccttcacgtagttattgagagaacaagtatttcttacacatcagacctgttccaaggcttggaatgtg

SEQ ID NO: 18454 - DNA, 122 bp, Homo sapiens
  misc_feature (61)..(62): /note="This region represents a CpG dinucleotide"
  misc_feature (61)..(61): /note="Nucleotide may be methylated to form 5-methylcytosine"
cctcctttttagctctgtcatttgattacctgagtaaagtgtactgttacctgtttgtctcggaaagagtgagggaatcagcagggagtctgagatgtcatttctgttgtaataaatggagc

SEQ ID NO: 18455 - DNA, 122 bp, Homo sapiens
  misc_feature (61)..(62): /note="This region represents a CpG dinucleotide"
  misc_feature (61)..(61): /note="Nucleotide may be methylated to form 5-methylcytosine"
ccaactttcgtgctccaggtctggccaaatccccgccccaggggtaggagatcctgaatgcgcgcgtactagccattggggcaggggagtcaaccaagttcgtggtgggggtcggggtgggt

SEQ ID NO: 18456 - DNA, 122 bp, Homo sapiens
  misc_feature (61)..(62): /note="This region represents a CpG dinucleotide"
  misc_feature (61)..(61): /note="Nucleotide may be methylated to form 5-methylcytosine"
tggagactatgggaataaactcacacatttatggtcaattgattttttacaagggtgatacgaaaatccaatggcgctaagaaaatccaatggcaaaagaatggtgttttcaacaaatgatg

SEQ ID NO: 18457 - DNA, 122 bp, Homo sapiens
  misc_feature (61)..(62): /note="This region represents a CpG dinucleotide"
  misc_feature (61)..(61): /note="Nucleotide may be methylated to form 5-methylcytosine"
cccaagcttcccctcctgcttcttcacaggaaccacagcagccaagtcctatactatgcccgcccctgctgcagcagcagccatttttggctcagccctgctgcagtcccagatgaaagcca

SEQ ID NO: 18458 - DNA, 122 bp, Homo sapiens
  misc_feature (61)..(62): /note="This region represents a CpG dinucleotide"
  misc_feature (61)..(61): /note="Nucleotide may be methylated to form 5-methylcytosine"
gaacagcagtaagcagcatttgctttactatcactatgtaaatattactcaaggcagacacgggaggcacaccaggacatttcctccttcagggtccactttttgacactgctgtcacctaa

SEQ ID NO: 18459 - DNA, 122 bp, Homo sapiens
  misc_feature (61)..(62): /note="This region represents a CpG dinucleotide"
  misc_feature (61)..(61): /note="Nucleotide may be methylated to form 5-methylcytosine"
cctttttatcagaggatgtgttgaagtgcagccagtatgcaatcacttgactgtccccagcgtcatcaattataaagagcaagggggaagctaggaaatgtgaatctgaggcttggcagcag

SEQ ID NO: 18460 - DNA, 122 bp, Homo sapiens
  misc_feature (61)..(62): /note="This region represents a CpG dinucleotide"
  misc_feature (61)..(61): /note="Nucleotide may be methylated to form 5-methylcytosine"
atgtattgtgtggactgaccagcatctcacatgtaggagctttctgggggctgtggctcccggggtcctgtgggaagaatagtgaggtgcacacaatgcaacgggatccttagggctatttt

SEQ ID NO: 18461 - DNA, 122 bp, Homo sapiens
  misc_feature (61)..(62): /note="This region represents a CpG dinucleotide"
  misc_feature (61)..(61): /note="Nucleotide may be methylated to form 5-methylcytosine"
tgtaatcccagcgcgccaccacgctgggggacggagtaagactcagtctcaaaggcatgacgaaaatagcaaaaatgctttagtgttatacctgttacgaatttaatggaaattacaagtag

SEQ ID NO: 18462 - DNA, 122 bp, Homo sapiens
  misc_feature (61)..(62): /note="This region represents a CpG dinucleotide"
  misc_feature (61)..(61): /note="Nucleotide may be methylated to form 5-methylcytosine"
gtttttgctttccagatgctcgggagccattctgcaggcaagcagacctatttgcagggacgggcaattgttgctgtggtgcaatgaagcaagtggggctgggaaagaatccttaagaagat

SEQ ID NO: 18463 - DNA, 122 bp, Homo sapiens
  misc_feature (61)..(62): /note="This region represents a CpG dinucleotide"
  misc_feature (61)..(61): /note="Nucleotide may be methylated to form 5-methylcytosine"
agcttggtttgggcacaaagccaagtaagcttggacttcccaagctcccgtctgcgcccacgttccagacagagaccacagagaaatggccttgcacatccattcaggagagcggggcccgg

SEQ ID NO: 18464 - DNA, 122 bp, Homo sapiens
  misc_feature (61)..(62): /note="This region represents a CpG dinucleotide"
  misc_feature (61)..(61): /note="Nucleotide may be methylated to form 5-methylcytosine"
cataaaaattgtgtgtcctggaatgtcgtcgtctttcacataaagccaatctcaaatatacgtcttgttttagcaaaatatttttcagcaccaaaaagggatagacctaccaatgctctgtt

SEQ ID NO: 18465 - DNA, 122 bp, Homo sapiens
  misc_feature (61)..(62): /note="This region represents a CpG dinucleotide"
  misc_feature (61)..(61): /note="Nucleotide may be methylated to form 5-methylcytosine"
ctgtttaagtcatttgctgtgagcagagtcacaaggcaacactgggaacaacaggcctaacgcatgtcaactcagtgattttcaaactaatacctaataggagggataggaatcccaacttc

SEQ ID NO: 18466 - DNA, 122 bp, Homo sapiens
  misc_feature (61)..(62): /note="This region represents a CpG dinucleotide"
  misc_feature (61)..(61): /note="Nucleotide may be methylated to form 5-methylcytosine"
caaatgattcatcctgagaaggcagtcaagtcccatttgtttctcaggactcccaaaagacgtccaggcagaagagttctgggacccgagtcagcatcaagtgccttggacatttactgagc

SEQ ID NO: 18467 - DNA, 122 bp, Homo sapiens
  misc_feature (61)..(62): /note="This region represents a CpG dinucleotide"
  misc_feature (61)..(61): /note="Nucleotide may be methylated to form 5-methylcytosine"
gtcaggtggctgccctgttaataaatcaacctctcaacggttagaagttgtagcagttctcgttttagattatctttctacatccggcagaggcttactgtcccccgcagagcacttggtaa

SEQ ID NO: 18468 - DNA, 122 bp, Homo sapiens
  misc_feature (61)..(62): /note="This region represents a CpG dinucleotide"
  misc_feature (61)..(61): /note="Nucleotide may be methylated to form 5-methylcytosine"
tacagtctcttatttcataatttcatcatgagaattccttatctacccagtgacctcagacgcttaggaggaaaagtgtttccaaatgtccagctcttatctgagcatcgtctgaattatgc

SEQ ID NO: 18469 - DNA, 122 bp, Homo sapiens
  misc_feature (61)..(62): /note="This region represents a CpG dinucleotide"
  misc_feature (61)..(61): /note="Nucleotide may be methylated to form 5-methylcytosine"
cgggacccgccgacactggacacttctcctgctcctgctgtggcgggagctgactgcagccggtggaggtgccggggtgggctggggagggctgagggcaggcctttatttccccaagtctc

SEQ ID NO: 18470 - DNA, 122 bp, Homo sapiens
  misc_feature (61)..(62): /note="This region represents a CpG dinucleotide"
  misc_feature (61)..(61): /note="Nucleotide may be methylated to form 5-methylcytosine"
aaatgcaacctggaaaacaggccttcagattcaacagatccaccctgtgcattagggtgtcgcaaacgggatcagttgctgggattaccaggaaatccaatcttctaaatcttcccccctcc

SEQ ID NO: 18471 - DNA, 122 bp, Homo sapiens
  misc_feature (61)..(62): /note="This region represents a CpG dinucleotide"
  misc_feature (61)..(61): /note="Nucleotide may be methylated to form 5-methylcytosine"
atcaaccttagaatcagactgcccatatcttaatttctactttgacacaatccttatggccgttggaaagttattttatcattctgggcctcagtttcctcatctgtaaatgggtgtaataa

SEQ ID NO: 18472 - DNA, 122 bp, Homo sapiens
  misc_feature (61)..(62): /note="This region represents a CpG dinucleotide"
  misc_feature (61)..(61): /note="Nucleotide may be methylated to form 5-methylcytosine"
cattgctctcacatactctccattcatttatttcctttttctttacttagacttacagcacgtgccctagaaagagcgcatgttgaatattcctggagtgtcacaatatgcaatacaataaa

SEQ ID NO: 18473 - DNA, 122 bp, Homo sapiens
  misc_feature (61)..(62): /note="This region represents a CpG dinucleotide"
  misc_feature (61)..(61): /note="Nucleotide may be methylated to form 5-methylcytosine"
cctcaggtaaaaacatgttgaactgcatggtacctgtaatactatgtacactggcagcttcgtttggtagatacctatcatgtaagctactcttttgctcctataaatttagttactatttt

SEQ ID NO: 18474 - DNA, 122 bp, Homo sapiens
  misc_feature (61)..(62): /note="This region represents a CpG dinucleotide"
  misc_feature (61)..(61): /note="Nucleotide may be methylated to form 5-methylcytosine"
gagcaacaggaaatttgcacagtctcaaagaatctccccgcaagtatgtatgaatcatggcggtggctccacaaatctatattcctccctccaggaggcggagcttaactcccctgccctgg

SEQ ID NO: 18475 - DNA, 122 bp, Homo sapiens
  misc_feature (61)..(62): /note="This region represents a CpG dinucleotide"
  misc_feature (61)..(61): /note="Nucleotide may be methylated to form 5-methylcytosine"
atgagccaacacgtcccaccacgtccctccctcaacccatggggattacaattctagatgcgatttgaatggggacacagatccaagccatatcagagtgcattgctctggttcagctgggg

SEQ ID NO: 18476 - DNA, 122 bp, Homo sapiens
  misc_feature (61)..(62): /note="This region represents a CpG dinucleotide"
  misc_feature (61)..(61): /note="Nucleotide may be methylated to form 5-methylcytosine"
ctctgcttgtttttgccaggttgtttccaaacacattaactactattgtgacaataaacacgagtcagagttgaataaaaagaattctttttatcatcatcatcatcatcaatcactgtcat

SEQ ID NO: 18477 - DNA, 122 bp, Homo sapiens
  misc_feature (61)..(62): /note="This region represents a CpG dinucleotide"
  misc_feature (61)..(61): /note="Nucleotide may be methylated to form 5-methylcytosine"
tttaataaagaattaaaacattgcaaagaataaaaacatacatactagaatatcttcctacggtaaattgttactaggcaaagaaactggccatgattaaggcactactgccacctgatggc

SEQ ID NO: 18478 - DNA, 122 bp, Homo sapiens
  misc_feature (61)..(62): /note="This region represents a CpG dinucleotide"
  misc_feature (61)..(61): /note="Nucleotide may be methylated to form 5-methylcytosine"
ttttcaagatttatctcagagcagaactcttttgtcaagcaaacttaacatggaatggaacggaacggaagtatataaaactgataaagctgagctcacttgtcaaagcagggctggggaca

SEQ ID NO: 18479 - DNA, 122 bp, Homo sapiens
  misc_feature (61)..(62): /note="This region represents a CpG dinucleotide"
  misc_feature (61)..(61): /note="Nucleotide may be methylated to form 5-methylcytosine"
ttccaacaggcaaggactaagtaaagcctatttcacactggatgggtgtgcagcacttaacggagatggggatgcaaaatgatatcatctttttgaatagcttataaatgtgtcatgagttt

SEQ ID NO: 18480 - DNA, 122 bp, Homo sapiens
  misc_feature (61)..(62): /note="This region represents a CpG dinucleotide"
  misc_feature (61)..(61): /note="Nucleotide may be methylated to form 5-methylcytosine"
atattgcaaggtgagtccagtctatgcttcttcaaaagcttctaaacacatttgaaaatacgctaaaaaaaaatcattacaaattgcaaataccatatttagcaagggaccttctgaaatct

SEQ ID NO: 18481 - DNA, 122 bp, Homo sapiens
  misc_feature (61)..(62): /note="This region represents a CpG dinucleotide"
  misc_feature (61)..(61): /note="Nucleotide may be methylated to form 5-methylcytosine"
tccaagtcacagcctatgaatagatgctcttcctccctccgaaagagaagccagagtgcccggaacaccacaggggaagcttgaagacttgtacccctttggagtctttttattttaaaaga

SEQ ID NO: 18482 - DNA, 122 bp, Homo sapiens
  misc_feature (61)..(62): /note="This region represents a CpG dinucleotide"
  misc_feature (61)..(61): /note="Nucleotide may be methylated to form 5-methylcytosine"
caccaatttccgttagtcatggcgtgagacctgttcctatgggatgttaattctctgatgcgttgaaaagcctagcaaagacgttccacaggatctggacaccaaagagaatgcctctatga

SEQ ID NO: 18483 - DNA, 122 bp, Homo sapiens
  misc_feature (61)..(62): /note="This region represents a CpG dinucleotide"
  misc_feature (61)..(61): /note="Nucleotide may be methylated to form 5-methylcytosine"
ctgaccaaggggagaggctggaaggcagttttgccagctccaccgcctgtctttatgtgccgattcacgaagctaccttccttcttgcctttgatgtcagaaatccaaaagcgggtgagtaa

SEQ ID NO: 18484 - DNA, 122 bp, Homo sapiens
  misc_feature (61)..(62): /note="This region represents a CpG dinucleotide"
  misc_feature (61)..(61): /note="Nucleotide may be methylated to form 5-methylcytosine"
agtggctttgggggaggcctgggtcaacctgggcatccttgtgttgcagacaggcgagggcgtgaacgatgtgcggaagggagcctgtgccagccacgtcagcaccatggccagcttcctga

SEQ ID NO: 18485 - DNA, 122 bp, Homo sapiens
  misc_feature (61)..(62): /note="This region represents a CpG dinucleotide"
  misc_feature (61)..(61): /note="Nucleotide may be methylated to form 5-methylcytosine"
taaactgcacaaaacaagagtacccacaaagaagaatgaaaatgggcagaaacctacctacgagcaaaagagggagagccgccctgtttattcctacatgagaacatctttcttcctaagtc

SEQ ID NO: 18486 - DNA, 122 bp, Homo sapiens
  misc_feature (61)..(62): /note="This region represents a CpG dinucleotide"
  misc_feature (61)..(61): /note="Nucleotide may be methylated to form 5-methylcytosine"
gtaaaggtgagacatattatcatctactcctagaactccttagctttatggagagctcagcgtttgaattcaagcagagataaatgagtgaggcagagaagaggagagttgaggaagtcagt

SEQ ID NO: 18487 - DNA, 122 bp, Homo sapiens
  misc_feature (61)..(62): /note="This region represents a CpG dinucleotide"
  misc_feature (61)..(61): /note="Nucleotide may be methylated to form 5-methylcytosine"
atcatatagctggaggtggctctaacagttcacctcattggttgactgaaattttagactcgagtaaattatgtttaaaaaaaaaaaccaaaaacaaatttcagctgtggcacatgactggg

SEQ ID NO: 18488 - DNA, 122 bp, Homo sapiens
  misc_feature (61)..(62): /note="This region represents a CpG dinucleotide"
  misc_feature (61)..(61): /note="Nucleotide may be methylated to form 5-methylcytosine"
aaatagcagtcccaccttcttaaaaatgtgcaaacagacatgagagtacattaaagtatacgaatgacagaaagaaagttaagtaacagatgagactgtgagtgcaactaccaatggcccca

SEQ ID NO: 18489 - DNA, 122 bp, Homo sapiens
  misc_feature (61)..(62): /note="This region represents a CpG dinucleotide"
  misc_feature (61)..(61): /note="Nucleotide may be methylated to form 5-methylcytosine"
tcagctggttttgtgacctatggcagcctgatgactccctctgtgtctcagttttctcaccggtaacatgagggggtttgactacatgatctatgaggtccctcccagtgatatgatctgtt

SEQ ID NO: 18490 - DNA, 122 bp, Homo sapiens
  misc_feature (61)..(62): /note="This region represents a CpG dinucleotide"
  misc_feature (61)..(61): /note="Nucleotide may be methylated to form 5-methylcytosine"
accagcaggctcgggctgccacatgctctcagatcccagagtgttgggtttggtgtctagcgcaagagtggcacagggccccagggccctgccctcgacacacagtgctgagtcccatggcc

SEQ ID NO: 18491 - DNA, 122 bp, Homo sapiens
  misc_feature (61)..(62): /note="This region represents a CpG dinucleotide"
  misc_feature (61)..(61): /note="Nucleotide may be methylated to form 5-methylcytosine"
ggcattgactaagtcttcctcagcaagccttacatctgaatctttaagaccagtggctagcgtttgtgactcattaatcagctgacaaatgccaggatttttgatagttctttgagagaata

SEQ ID NO: 18492 - DNA, 122 bp, Homo sapiens
  misc_feature (61)..(62): /note="This region represents a CpG dinucleotide"
  misc_feature (61)..(61): /note="Nucleotide may be methylated to form 5-methylcytosine"
tcccctgctcgtgaaccttatgctccagtctttggaactaattgctactcctagagagcccgtcactcagaattgctgacactgcttactccactggaaatgtccttcccaccttctctatc

SEQ ID NO: 18493 - DNA, 122 bp, Homo sapiens
  misc_feature (61)..(62): /note="This region represents a CpG dinucleotide"
  misc_feature (61)..(61): /note="Nucleotide may be methylated to form 5-methylcytosine"
ttcactgaccaggcctttcctggaggaaacacccagggccgggcggctgctgtttccacacgtggactcggatctgctgtgacaccgtcagcccgacagtctctccatatgcagcctttcct

SEQ ID NO: 18494 - DNA, 122 bp, Homo sapiens
  misc_feature (61)..(62): /note="This region represents a CpG dinucleotide"
  misc_feature (61)..(61): /note="Nucleotide may be methylated to form 5-methylcytosine"
agaacccgaagatcacagtggattattagcatctgcccttttggattgttccctgacatccgcaatgtttgcaaaggcaaaacttctacttgcaggtgaacatgaaactcccactgtttaag

SEQ ID NO: 18495 - DNA, 122 bp, Homo sapiens
  misc_feature (61)..(62): /note="This region represents a CpG dinucleotide"
  misc_feature (61)..(61): /note="Nucleotide may be methylated to form 5-methylcytosine"
caggctcagctcaccaacacctttgaaggtgcaacagcatctcactctgcaggggaagtgcgaaaagtcagatgcagttcacactctcatgccgctagaacccggtagaagttgccagggca

SEQ ID NO: 18496 - DNA, 122 bp, Homo sapiens
  misc_feature (61)..(62): /note="This region represents a CpG dinucleotide"
  misc_feature (61)..(61): /note="Nucleotide may be methylated to form 5-methylcytosine"
gaaggaatagcatgaacatctggggcacttaccacctagactgaaaaattaacacctggtcgtatgtatgtatattacccattgtctactttcttctgtcaaatccgtgactttggaaattt

SEQ ID NO: 18497 - DNA, 122 bp, Homo sapiens
  misc_feature (61)..(62): /note="This region represents a CpG dinucleotide"
  misc_feature (61)..(61): /note="Nucleotide may be methylated to form 5-methylcytosine"
taactgcatatgcctcacattcttgcaaaattataaattgtttagaaaagggattaaaaacgcctgaaacccgcaagagttcaacctctaacctctggggttgttggcaccaggaagctgct

SEQ ID NO: 18498 - DNA, 122 bp, Homo sapiens
  misc_feature (61)..(62): /note="This region represents a CpG dinucleotide"
  misc_feature (61)..(61): /note="Nucleotide may be methylated to form 5-methylcytosine"
aatgcaatttcccccatctagaaatgtaaccctcagccagttgccttgaaagctggttaccgtggagatgattatcagtattatgatgacctatttagaagaatttctgcatcaccagaaaa

SEQ ID NO: 18499 - DNA, 122 bp, Homo sapiens
  misc_feature (61)..(62): /note="This region represents a CpG dinucleotide"
  misc_feature (61)..(61): /note="Nucleotide may be methylated to form 5-methylcytosine"
tcccggtggaaccagaacgtccagctgagctgggaggtgtttgctgtgcctggactgctccggagggtcagagtggattcatcagtttctccctcttctttgggaaaggtcagcaaagaaga

SEQ ID NO: 18500 - DNA, 122 bp, Homo sapiens
  misc_feature (61)..(62): /note="This region represents a CpG dinucleotide"
  misc_feature (61)..(61): /note="Nucleotide may be methylated to form 5-methylcytosine"
cccagcgaagaggcagtcgggctgattttacatgcacctctgcacttagagggatcagggcgttctcgcatgaaatcccatttttcatgaagctcctggatacctcagagataaagttatcc

SEQ ID NO: 18501 - DNA, 122 bp, Homo sapiens
  misc_feature (61)..(62): /note="This region represents a CpG dinucleotide"
  misc_feature (61)..(61): /note="Nucleotide may be methylated to form 5-methylcytosine"
ttccctttgtggcctaggtgcagtggaggcttgcctcttgcatcagctgagacgccgtgccgctggcttcctgcgcagtgacaagatggcagccctgttcaccaaggtggggaagacgtgcc

SEQ ID NO: 18502 - DNA, 122 bp, Homo sapiens
  misc_feature (61)..(62): /note="This region represents a CpG dinucleotide"
  misc_feature (61)..(61): /note="Nucleotide may be methylated to form 5-methylcytosine"
ttactagttcacatagcaaaaaaattctgaggtagggtggtttcaggttggttgattcagcgtctcaataatattatcaaagactcagattctggccaggcacaatggctcatgcctataat

SEQ ID NO: 18503 - DNA, 122 bp, Homo sapiens
  misc_feature (61)..(62): /note="This region represents a CpG dinucleotide"
  misc_feature (61)..(61): /note="Nucleotide may be methylated to form 5-methylcytosine"
aataatctgtggcaggtactgagctaggcttccgggttgtagagctgcctaagtcctggccgctgcccttaggagctcacatcctaagaggggaggatgaagattaatctcctactcactgc

SEQ ID NO: 18504 - DNA, 122 bp, Homo sapiens
  misc_feature (61)..(62): /note="This region represents a CpG dinucleotide"
  misc_feature (61)..(61): /note="Nucleotide may be methylated to form 5-methylcytosine"
gagcaaggggagaagtaaagagattagagagaaggtgtgtcatagcatgcagggccttaacggccattctaaagaaccttactctgagcgaaatgagggaaagagagttttgaacaggagtg

SEQ ID NO: 18505 - DNA, 122 bp, Homo sapiens
  misc_feature (61)..(62): /note="This region represents a CpG dinucleotide"
  misc_feature (61)..(61): /note="Nucleotide may be methylated to form 5-methylcytosine"
ttaaagcctcagctctgctcctaactagtgactacggtcagatgccctcccttccctaagcgccagttttacattgctcatatgtaaaatacaggaatggggaaattggacaaatgatctca

SEQ ID NO: 18506 - DNA, 122 bp, Homo sapiens
  misc_feature (61)..(62): /note="This region represents a CpG dinucleotide"
  misc_feature (61)..(61): /note="Nucleotide may be methylated to form 5-methylcytosine"
gggggaggactgtgggagagagagttgagcatgaaaagcctgaaactcactgtgttcaagcgccacagccatccctggtgtgctaaccacagccctggcctggagccagcccctcaactcac

SEQ ID NO: 18507 - DNA, 122 bp, Homo sapiens
  misc_feature (61)..(62): /note="This region represents a CpG dinucleotide"
  misc_feature (61)..(61): /note="Nucleotide may be methylated to form 5-methylcytosine"
tcctcccaaagctctgcgattacaggcgtgagccaccgtgcctggcttccagcctcttcccgacttagcagctcagcatccctgtcccagaatccggtcctcatcctcagatcccttcactt

SEQ ID NO: 18508 - DNA, 122 bp, Homo sapiens
  misc_feature (61)..(62): /note="This region represents a CpG dinucleotide"
  misc_feature (61)..(61): /note="Nucleotide may be methylated to form 5-methylcytosine"
tcccaagtacctaatttttcagcctcttaaagaactccagtagctcctacctaaatgctacgtgtattctgatcattcaaggatgtgggttttgtcatttgcatatggttttgccctgatct

SEQ ID NO: 18509 - DNA, 122 bp, Homo sapiens
  misc_feature (61)..(62): /note="This region represents a CpG dinucleotide"
  misc_feature (61)..(61): /note="Nucleotide may be methylated to form 5-methylcytosine"
aacaaaagaatgaaaataaaagtaaattacgacagaagaagttctatttagtagtcagtgcggtgcaggtgacattgtgatgtagtcaatatgtgcatgattgttttgttttatttgctagg

SEQ ID NO: 18510 - DNA, 122 bp, Homo sapiens
  misc_feature (61)..(62): /note="This region represents a CpG dinucleotide"
  misc_feature (61)..(61): /note="Nucleotide may be methylated to form 5-methylcytosine"
agaagctcattacccatttgaaagactagggggaccgttaattatggaatccactgctgacgtttaggtaatcagaaaataaaggaatcacgggatcctgtggtgattcacaggaagtgggt

SEQ ID NO: 18511 - DNA, 122 bp, Homo sapiens
  misc_feature (61)..(62): /note="This region represents a CpG dinucleotide"
  misc_feature (61)..(61): /note="Nucleotide may be methylated to form 5-methylcytosine"
cttgggttttacccttcaaaggcggagcgggactgggccggccgcagctctccggctgcccggttcgtccccaggatgtgcagatagaggaggttttgctctgacactctggttctctgccc

SEQ ID NO: 18512 - DNA, 122 bp, Homo sapiens
  misc_feature (61)..(62): /note="This region represents a CpG dinucleotide"
  misc_feature (61)..(61): /note="Nucleotide may be methylated to form 5-methylcytosine"
agctgctttccttgttatcacttatgttccagcagctcgatccatcttcccatgcaggaacgtttctccccaaagtcctgaccctgccgtggagcacctgaggggaggagtcactgggtttc

SEQ ID NO: 18513 - DNA, 122 bp, Homo sapiens
  misc_feature (61)..(62): /note="This region represents a CpG dinucleotide"
  misc_feature (61)..(61): /note="Nucleotide may be methylated to form 5-methylcytosine"
ggggctgagcacacccaatgtgctaaatatttccctgctgcagaatctattttgctgctgcggctgctgcttggcagcaaagagacaggaagctatttagatatattatcttccttttcagg

SEQ ID NO: 18514 - DNA, 122 bp, Homo sapiens
  misc_feature (61)..(62): /note="This region represents a CpG dinucleotide"
  misc_feature (61)..(61): /note="Nucleotide may be methylated to form 5-methylcytosine"
acagaatttgtcattgatatcaatctttattaagtttactgctgagagctcagaaaatggcggttctggagcaaggaacagggtgaaagcaggaagaacatcaggcactaagaaaagctgtg

SEQ ID NO: 18515 - DNA, 122 bp, Homo sapiens
  misc_feature (61)..(62): /note="This region represents a CpG dinucleotide"
  misc_feature (61)..(61): /note="Nucleotide may be methylated to form 5-methylcytosine"
gagatctccaacaactgcctgtccaaggcccagctggctgaggtggtggagtccatgttccgggagtcgggattccaggacaaggaggaactgacatgggaagattttcacttcatgctgcg

SEQ ID NO: 18516 - DNA, 122 bp, Homo sapiens
  misc_feature (61)..(62): /note="This region represents a CpG dinucleotide"
  misc_feature (61)..(61): /note="Nucleotide may be methylated to form 5-methylcytosine"
ggtcaggagcaaagcctgagtcagaatcctggtgtgctggttattatacaactcttggcacggcactaaccttcctgtgcctgtttcttggttaacaaaatgggtatgattcacagtatctt

SEQ ID NO: 18517 - DNA, 122 bp, Homo sapiens
  misc_feature (61)..(62): /note="This region represents a CpG dinucleotide"
  misc_feature (61)..(61): /note="Nucleotide may be methylated to form 5-methylcytosine"
tcccactgggccagcaggaggcccgcggcgcggcagaggcgccgcacgttgcgctccagccgctgcacctgctcccgcaggacgcgctcctgctcccgcaccaggcccagctggcgccgctg

SEQ ID NO: 18518 - DNA, 122 bp, Homo sapiens
  misc_feature (61)..(62): /note="This region represents a CpG dinucleotide"
  misc_feature (61)..(61): /note="Nucleotide may be methylated to form 5-methylcytosine"
tctcatgagccatctggatcttaatggttattttcttataagactgttgagtttacagtacgacagaactgtgtttaccttggaatgagggctgtcctctattaagaagctttcagtacagc

SEQ ID NO: 18519 - DNA, 122 bp, Homo sapiens
  misc_feature (61)..(62): /note="This region represents a CpG dinucleotide"
  misc_feature (61)..(61): /note="Nucleotide may be methylated to form 5-methylcytosine"
aatttgccaagatctgaaattcttcagcagcacctttgcacatgacacatgaactgaacgcgtggagagcagcagtaagcatcacaataacagaatagttttttggtgcatctaatacaaaa

SEQ ID NO: 18520 - DNA, 122 bp, Homo sapiens
  misc_feature (61)..(62): /note="This region represents a CpG dinucleotide"
  misc_feature (61)..(61): /note="Nucleotide may be methylated to form 5-methylcytosine"
catagcaggaaggggaatattttcaatctgtttccttctacatggctgtaagaaacatgacgcccatccatcatgcaaagagagcctgacgaggcagaggaaagatcatggcaggacttctg

SEQ ID NO: 18521 - DNA, 122 bp, Homo sapiens
  misc_feature (61)..(62): /note="This region represents a CpG dinucleotide"
  misc_feature (61)..(61): /note="Nucleotide may be methylated to form 5-methylcytosine"
acaccgacgtaatgaccatagtaagaccccatgtacgtggctaatgaggcagtgacccgacgtggctcggaagccctgctggggagatcccgccccgtcaccccagaggcgctctccgacct

SEQ ID NO: 18522 - DNA, 122 bp, Homo sapiens
  misc_feature (61)..(62): /note="This region represents a CpG dinucleotide"
  misc_feature (61)..(61): /note="Nucleotide may be methylated to form 5-methylcytosine"
ccagttgggactcatgccacgcttaagctgagtaagttaaggactctgcctctggacccccgtcagcacatcctgtgctccagcttcagtgccagccccgggagaagccatggggagccacc

SEQ ID NO: 18523 - DNA, 122 bp, Homo sapiens
  misc_feature (61)..(62): /note="This region represents a CpG dinucleotide"
  misc_feature (61)..(61): /note="Nucleotide may be methylated to form 5-methylcytosine"
gtgttaggtgggggctttgctagggggccgctgccggcgagctgcttggtgagctgtgcccgtgaacccctgcagatacctgaagcggttcaaggtgatgaagcccaaggttctccgcagct

SEQ ID NO: 18524 - DNA, 122 bp, Homo sapiens
  misc_feature (61)..(62): /note="This region represents a CpG dinucleotide"
  misc_feature (61)..(61): /note="Nucleotide may be methylated to form 5-methylcytosine"
tgatggcctcacatggggctcctcacagcacctgggtgcacccactggcagcttcctggacgctcagtcggcgctgcggtgaaggtgacaccgggtgcatgggaccccagggaggtgcccca

SEQ ID NO: 18525 - DNA, 122 bp, Homo sapiens
  misc_feature (61)..(62): /note="This region represents a CpG dinucleotide"
  misc_feature (61)..(61): /note="Nucleotide may be methylated to form 5-methylcytosine"
tgggtcacactttaatgacaacaatatagttattctagatcagagacttggaagggactacggcttgagacatatgagtgtgtctcaaggaactggaccagttttagcataagattttccaa

SEQ ID NO: 18526 - DNA, 122 bp, Homo sapiens
  misc_feature (61)..(62): /note="This region represents a CpG dinucleotide"
  misc_feature (61)..(61): /note="Nucleotide may be methylated to form 5-methylcytosine"
ggattataggcatgagccaccatgcccacccccagtctctttcaatgattaataataatacggttatgaggacaattactgatgtaggtgttgaccattggcattatgctaagcacttcatg

SEQ ID NO: 18527 - DNA, 122 bp, Homo sapiens
  misc_feature (61)..(62): /note="This region represents a CpG dinucleotide"
  misc_feature (61)..(61): /note="Nucleotide may be methylated to form 5-methylcytosine"
tggctctagagtcatgtttactgagtttggacttccatctttaccacttactatgagtcgcgtgatcctgggaacgtattcaacttccttacacttcacttttcacgtctgtaaggtgaaga

SEQ ID NO: 18528 - DNA, 122 bp, Homo sapiens
  misc_feature (61)..(62): /note="This region represents a CpG dinucleotide"
  misc_feature (61)..(61): /note="Nucleotide may be methylated to form 5-methylcytosine"
cagaaggagattaaaaagatgcccctcaagatggctgtgcctgtcagctgcatggagcttcgttcaagtattttctgagcctgatggatttacagtgatcttcagtggtctggggaataacg

SEQ ID NO: 18529 - DNA, 122 bp, Homo sapiens
  misc_feature (61)..(62): /note="This region represents a CpG dinucleotide"
  misc_feature (61)..(61): /note="Nucleotide may be methylated to form 5-methylcytosine"
gcatacaggatggcataaccttgggtagagcagctgttcacagttaaggcaggcccttatcgaggtggcagacggtggccacctgctgaccacactctgcatggctaggcagaatatcctcc

SEQ ID NO: 18530 - DNA, 122 bp, Homo sapiens
  misc_feature (61)..(62): /note="This region represents a CpG dinucleotide"
  misc_feature (61)..(61): /note="Nucleotide may be methylated to form 5-methylcytosine"
caaattaaattatatttttatactacatcctcaaggactcttccctggaaatgaatgtttcgcaaaatgtcgctggcctcaagagcagtttccgtggactacacagttaccataggttgagc

SEQ ID NO: 18531 - DNA, 122 bp, Homo sapiens
  misc_feature (61)..(62): /note="This region represents a CpG dinucleotide"
  misc_feature (61)..(61): /note="Nucleotide may be methylated to form 5-methylcytosine"
aaatgtcgatgtagttgggtctgatgcccagcgactttgcctcgaccacatctgtgacatcgccgtccagcatgcggatgcctgaaagcacagaggaggctcggtgtcggcgcccaggctcc

SEQ ID NO: 18532 - DNA, 122 bp, Homo sapiens
  misc_feature (61)..(62): /note="This region represents a CpG dinucleotide"
  misc_feature (61)..(61): /note="Nucleotide may be methylated to form 5-methylcytosine"
cccctccccctacaaggtgagtctacaggcctgagatctcaccgtcaacacccgtgtccacgggcacaggtactgtttgctgagcacctgacataagttgtatcatttattctttgcaccac

SEQ ID NO: 18533 - DNA, 122 bp, Homo sapiens
  misc_feature (61)..(62): /note="This region represents a CpG dinucleotide"
  misc_feature (61)..(61): /note="Nucleotide may be methylated to form 5-methylcytosine"
tgacacaaccccgccacccagtgacgcaacccccagtgacacaaccctgccacccggtgacgcaacccccagtgacacaacccccagtgacgcaaccccgccacccaatgaagataccacca

SEQ ID NO: 18534 - DNA, 122 bp, Homo sapiens
  misc_feature (61)..(62): /note="This region represents a CpG dinucleotide"
  misc_feature (61)..(61): /note="Nucleotide may be methylated to form 5-methylcytosine"
gaccagcaggttgaagtgtgcggaggagggagggaagagttctgttggggcatgtggagtcgaaggaacctgcaggacatccaaatggagatgtacaggaggcagttagagaaataggtcat

SEQ ID NO: 18535 - DNA, 122 bp, Homo sapiens
  misc_feature (61)..(62): /note="This region represents a CpG dinucleotide"
  misc_feature (61)..(61): /note="Nucleotide may be methylated to form 5-methylcytosine"
cagcacagcacaggacaggacaggacagcataggataggacaggacaggacagcacaggacggcacagcaggctattctggtcaatgttcagtaagcaaggctgaaactaatggttgtaaca

SEQ ID NO: 18536 - DNA, 122 bp, Homo sapiens
  misc_feature (61)..(62): /note="This region represents a CpG dinucleotide"
  misc_feature (61)..(61): /note="Nucleotide may be methylated to form 5-methylcytosine"
tcacgtctacttcactaaatatccaagatcctggatgagtgttttcgccattgtacctaacggagagctgattgacagcacttaaactgaggggaaatgactaatgttttgtctggaaatgt

SEQ ID NO: 18537 - DNA, 122 bp, Homo sapiens
  misc_feature (61)..(62): /note="This region represents a CpG dinucleotide"
  misc_feature (61)..(61): /note="Nucleotide may be methylated to form 5-methylcytosine"
tagaaaaggaaaaataatcacaggtatgctacagagttctgctacaaataacaactacaccgtcataatcaggtaaacaatagtgataatcttactaccaatataaatacattgggtgtgag

SEQ ID NO: 18538 - DNA, 122 bp, Homo sapiens
  misc_feature (61)..(62): /note="This region represents a CpG dinucleotide"
  misc_feature (61)..(61): /note="Nucleotide may be methylated to form 5-methylcytosine"
gcctcggcccctgcttcacccagggtgcctgtgctgagagcatcctgtatgtcaaactcgcggtccctgaatgatgcctctggagccatgactcactcaggctctgcctgatgctctggcat

SEQ ID NO: 18539 - DNA, 122 bp, Homo sapiens
  misc_feature (61)..(62): /note="This region represents a CpG dinucleotide"
  misc_feature (61)..(61): /note="Nucleotide may be methylated to form 5-methylcytosine"
taggaaaaatcagcactgcacatgccaggcagctctggtggctgtgggtgagggtgcagacgcagaagctggttaaaagtctccacgtggagccactgcattacaagtttcaacagaggctg

SEQ ID NO: 18540 - DNA, 122 bp, Homo sapiens
  misc_feature (61)..(62): /note="This region represents a CpG dinucleotide"
  misc_feature (61)..(61): /note="Nucleotide may be methylated to form 5-methylcytosine"
aatcgttgtgagtgctcaatgtaaatgagttgagactgctgtcaaaattccttataaacacgtgtgtttctaagggaaaagtgagagaaaccacatcttgcaactgtctgaatgttctaaaa

SEQ ID NO: 18541 - DNA, 122 bp, Homo sapiens
  misc_feature (61)..(62): /note="This region represents a CpG dinucleotide"
  misc_feature (61)..(61): /note="Nucleotide may be methylated to form 5-methylcytosine"
caaaaacaagttcattatctccggctttgatatttgttcccagtggtggagcctgtgcagcggggtctttgttcacgggctaatgcttctcctaagcacctcgtgtgtgttcttcggcctca

SEQ ID NO: 18542 - DNA, 122 bp, Homo sapiens
  misc_feature (61)..(62): /note="This region represents a CpG dinucleotide"
  misc_feature (61)..(61): /note="Nucleotide may be methylated to form 5-methylcytosine"
tgggatttactttaatacaatttagcatgaaatgatatggcagaagcagttaagatgacacgtgtggaaagatcctgataattggtgaatatgagtaatgggtagaaaggtgaactcactat

SEQ ID NO: 18543 - DNA, 122 bp, Homo sapiens
  misc_feature (61)..(62): /note="This region represents a CpG dinucleotide"
  misc_feature (61)..(61): /note="Nucleotide may be methylated to form 5-methylcytosine"
tctcctggacagacaggccatgctggttggccaacacacgtattttaactatgtggccgacgtgtttgccactcactctgtggttaaaatgtaaacagaaggtcaaaaggtaggatcacagg

SEQ ID NO: 18544 - DNA, 122 bp, Homo sapiens
  misc_feature (61)..(62): /note="This region represents a CpG dinucleotide"
  misc_feature (61)..(61): /note="Nucleotide may be methylated to form 5-methylcytosine"
aaaaaaaaagtctcagtagaacaggtcacttcctgctgtagaggaaaaatttaaaatttacgacttatgttgttttcacatatagggtgttatttttggcttcaatgtctgtgcttattctg

SEQ ID NO: 18545 - DNA, 122 bp, Homo sapiens
  misc_feature (61)..(62): /note="This region represents a CpG dinucleotide"
  misc_feature (61)..(61): /note="Nucleotide may be methylated to form 5-methylcytosine"
tggttctacctgcctttcaagtcgtgcctcagcgaatgcatccccttcccttaggtgggacgcgatttgtgaggtctctgacctcctttccttcccatctcgagcgctttctccactttgca

SEQ ID NO: 18546 - DNA, 122 bp, Homo sapiens
  misc_feature (61)..(62): /note="This region represents a CpG dinucleotide"
  misc_feature (61)..(61): /note="Nucleotide may be methylated to form 5-methylcytosine"
ttggggctcccagtgcacaatagctactgtgttcctgtgttgcctgcatctgtcaggtaccgctttcaatgcaagatgcaatcatggttgcttccctgctgatgggattttggtgttttagc

SEQ ID NO: 18547 - DNA, 122 bp, Homo sapiens
  misc_feature (61)..(62): /note="This region represents a CpG dinucleotide"
  misc_feature (61)..(61): /note="Nucleotide may be methylated to form 5-methylcytosine"
cttgaacagcggaggcccagcctggctcgtccccctcctgccccctggggcgggtgtctgcggcctccaggctactcctggatgattttattagctgtgttgggagcatatggtcctcggac

SEQ ID NO: 18548 - DNA, 122 bp, Homo sapiens
  misc_feature (61)..(62): /note="This region represents a CpG dinucleotide"
  misc_feature (61)..(61): /note="Nucleotide may be methylated to form 5-methylcytosine"
tgggaggaccttcaaggagccaggctccccggcaccagtaggtcttgttcagctgtgaatcggagctaaggtggaatcagattatgacttaatttccctgctaatgcctccctgtctcatag

SEQ ID NO: 18549 - DNA, 122 bp, Homo sapiens
  misc_feature (61)..(62): /note="This region represents a CpG dinucleotide"
  misc_feature (61)..(61): /note="Nucleotide may be methylated to form 5-methylcytosine"
cctgccgcggctgccacttctgggagattcatctctaaggcctcaggggacctgggggatcgggagacaggctgtaccatggcgtctccaccaccacacggtcccctccccgcctgcacccc

SEQ ID NO: 18550 - DNA, 122 bp, Homo sapiens
  misc_feature (61)..(62): /note="This region represents a CpG dinucleotide"
  misc_feature (61)..(61): /note="Nucleotide may be methylated to form 5-methylcytosine"
catctttgttcctgtattttccttcctcttgtggctctcagtggtgtgcaggacatttagcggcattcaatgtttaatcagtttcttaggcctcttcttttgggctagctccagttcactga

SEQ ID NO: 18551 - DNA, 122 bp, Homo sapiens
  misc_feature (61)..(62): /note="This region represents a CpG dinucleotide"
  misc_feature (61)..(61): /note="Nucleotide may be methylated to form 5-methylcytosine"
ggggcagcacccgataaccaaacacggtcatgtttctgctgcaaaacatgtgagtattcacgcccagtggggaaaaacgagggctctaaatagtctcagggcagggcagtttttgctgccaa

SEQ ID NO: 18552 - DNA, 122 bp, Homo sapiens
  misc_feature (61)..(62): /note="This region represents a CpG dinucleotide"
  misc_feature (61)..(61): /note="Nucleotide may be methylated to form 5-methylcytosine"
ctgagctgtttctgtttactcagaggcacttgctaagctgtgccgtaaaggctgatccaccgtgtgctccttaagctcagcagctgtgtgaacatattctttttgtatccatggggcttaaa

SEQ ID NO: 18553 - DNA, 122 bp, Homo sapiens
  misc_feature (61)..(62): /note="This region represents a CpG dinucleotide"
  misc_feature (61)..(61): /note="Nucleotide may be methylated to form 5-methylcytosine"
aatgactttggtttgaagtatagttacctttgtaagctacagcaggtctttggataatgtcgttcattataaagtcagtgagaaaaaaattgattcctggcaggggcaactgtctgtgtgga

SEQ ID NO: 18554 - DNA, 122 bp, Homo sapiens
  misc_feature (61)..(62): /note="This region represents a CpG dinucleotide"
  misc_feature (61)..(61): /note="Nucleotide may be methylated to form 5-methylcytosine"
tcccaagtccacaatgccagccaggtccctatgtcccttgtgttcttgtgtccctattgtcgtttccctctagagaactaaagtacaacctccaggacctcattacctacaattacaacaga

SEQ ID NO: 18555 - DNA, 122 bp, Homo sapiens
  misc_feature (61)..(62): /note="This region represents a CpG dinucleotide"
  misc_feature (61)..(61): /note="Nucleotide may be methylated to form 5-methylcytosine"
ggaaatgactaccctgtggtcgaccacagcctctgatgaccaaaacccactttgtgcaggcggtgctgcgaccaggctcgatctgtcatcgagaacattctgctcccaacctggcacggcat

SEQ ID NO: 18556 - DNA, 122 bp, Homo sapiens
  misc_feature (61)..(62): /note="This region represents a CpG dinucleotide"
  misc_feature (61)..(61): /note="Nucleotide may be methylated to form 5-methylcytosine"
ccgcgcccagcctggaaaactaatcttaaacgtgggcagttggctgggcgcactggctcacgtctgtaaacccagcactttgggaggctgagatgggcagatcacctgaggtcagaagttca

SEQ ID NO: 18557 - DNA, 122 bp, Homo sapiens
  misc_feature (61)..(62): /note="This region represents a CpG dinucleotide"
  misc_feature (61)..(61): /note="Nucleotide may be methylated to form 5-methylcytosine"
ggacagctaaggctgtggctccattctcagctggacttttccttggttggtcttcattcacgttgcctattatgaggatggcttcctcgtgaactccaagcagctccaaacaggaaacctgg

SEQ ID NO: 18558 - DNA, 122 bp, Homo sapiens
  misc_feature (61)..(62): /note="This region represents a CpG dinucleotide"
  misc_feature (61)..(61): /note="Nucleotide may be methylated to form 5-methylcytosine"
atctggggtgaggcccaagaatgtacttatgaagtacttcctccaggagattctgatgcacgtgtgtgtgtgtggactcctgagaaacccctatggtccaagcaccctgctataaggtaaca

SEQ ID NO: 18559 - DNA, 122 bp, Homo sapiens
  misc_feature (61)..(62): /note="This region represents a CpG dinucleotide"
  misc_feature (61)..(61): /note="Nucleotide may be methylated to form 5-methylcytosine"
ctggtatttccagcttcttttctcatccatgacacctagtacaaaagttttcccagattgcgttcacaaaggaggggcatggaggttaagtcttcggagttgaagacacagaagctacccaa

SEQ ID NO: 18560 - DNA, 122 bp, Homo sapiens
  misc_feature (61)..(62): /note="This region represents a CpG dinucleotide"
  misc_feature (61)..(61): /note="Nucleotide may be methylated to form 5-methylcytosine"
tctcttcagctgtgctaaggaggctgcagctctgctcccagctgtgcagaatcttgcaagcgaactaagaagagtctgagaccagcaatatgactccagcaggcatcgctgcagggagatga

SEQ ID NO: 18561 - DNA, 122 bp, Homo sapiens
  misc_feature (61)..(62): /note="This region represents a CpG dinucleotide"
  misc_feature (61)..(61): /note="Nucleotide may be methylated to form 5-methylcytosine"
actgggttttgagaatacacacacacagaatacaagtcctttataagatatatattttcccgcagtctgtggcttatcttttcattcccttaatagtgcagatattcttcattttaatgaag

SEQ ID NO: 18562 - DNA, 122 bp, Homo sapiens
  misc_feature (61)..(62): /note="This region represents a CpG dinucleotide"
  misc_feature (61)..(61): /note="Nucleotide may be methylated to form 5-methylcytosine"
aacttgtccaaaggcacagtcatagaactagggcttacaccagctgtgtctaatagcatgcgtgccccctctgctgtgcttttatttgcttcttggagtgctgtttagagaaattgatggtt

SEQ ID NO: 18563 - DNA, 122 bp, Homo sapiens
  misc_feature (61)..(62): /note="This region represents a CpG dinucleotide"
  misc_feature (61)..(61): /note="Nucleotide may be methylated to form 5-methylcytosine"
tccgtgagatctgatcaccctccatatctgatcgggtttctcattctctgccatcccccacgtgatgtcctcagcaagaatcctgttaggttgggttagccagaatccccctgactgtgaca

SEQ ID NO: 18564 - DNA, 122 bp, Homo sapiens
  misc_feature (61)..(62): /note="This region represents a CpG dinucleotide"
  misc_feature (61)..(61): /note="Nucleotide may be methylated to form 5-methylcytosine"
ccaatcaacatgagtcaccaggggacttgggccctcagtggcttccgtgtggccaggctacgcatgcccagtcagcatttgcccagtcggatttgcacaggcagggccatcacaccccatca

SEQ ID NO: 18565 - DNA, 122 bp, Homo sapiens
  misc_feature (61)..(62): /note="This region represents a CpG dinucleotide"
  misc_feature (61)..(61): /note="Nucleotide may be methylated to form 5-methylcytosine"
ggcttagcttcctgctccctcattggcttgagtgttggtcacagagcggaggattggctgcgttctcactctttccctacacgattcctccccgctggctcctctggctttgggcgaggtca

SEQ ID NO: 18566 - DNA, 122 bp, Homo sapiens
  misc_feature (61)..(62): /note="This region represents a CpG dinucleotide"
  misc_feature (61)..(61): /note="Nucleotide may be methylated to form 5-methylcytosine"
aatttgtcacttcattcttaaccatattatctctgctgcttaagtgagccctggttctgacgacctgaattctactcaaactagttatgcgaccttgaataagtcatctcacctttcgctaa

SEQ ID NO: 18567 - DNA, 122 bp, Homo sapiens
  misc_feature (61)..(62): /note="This region represents a CpG dinucleotide"
  misc_feature (61)..(61): /note="Nucleotide may be methylated to form 5-methylcytosine"
gcttggggagcgtccttggggaccacattcagtagatggaaccacagggccgtaagggtgcgtccatgtgcattgcctggaaggtgaagcttgtagaaagcaaaggtttgtagaaggcgaag

SEQ ID NO: 18568 - DNA, 122 bp, Homo sapiens
  misc_feature (61)..(62): /note="This region represents a CpG dinucleotide"
  misc_feature (61)..(61): /note="Nucleotide may be methylated to form 5-methylcytosine"
gaggagaaacgagaaaggccatagagaaacttagcagggaagggagagcatgatattaaacggcatggggtctaagttttggagtatatattttttgatattacaattaaagtaagattaaa

SEQ ID NO: 18569 - DNA, 122 bp, Homo sapiens
  misc_feature (61)..(62): /note="This region represents a CpG dinucleotide"
  misc_feature (61)..(61): /note="Nucleotide may be methylated to form 5-methylcytosine"
ctcacaatcattagaaggacacgtatgttttaaaaaaattgcagggttttaaagtagcttcgtagaaactaaaagtagaaatataatttattagctggaactgccacatggagatctcctgt

SEQ ID NO: 18570 - DNA, 122 bp, Homo sapiens
  misc_feature (61)..(62): /note="This region represents a CpG dinucleotide"
  misc_feature (61)..(61): /note="Nucleotide may be methylated to form 5-methylcytosine"
tattatcattgaggccatcagagaatgattttttagtatcttgctaccccaagctttctacgtgagttccaatcacaaaatctcaaacctgcacgtggcttttcaaaaatgacatgctacac

SEQ ID NO: 18571 - DNA, 122 bp, Homo sapiens
  misc_feature (61)..(62): /note="This region represents a CpG dinucleotide"
  misc_feature (61)..(61): /note="Nucleotide may be methylated to form 5-methylcytosine"
tcacactcaatgagtcttgacttgtactctctggtttggatctctctagctcttccctcccgccaactaccgcccccagcaaactgctgatccttccctgccatcaatttcccccacttggt

SEQ ID NO: 18572 - DNA, 122 bp, Homo sapiens
  misc_feature (61)..(62): /note="This region represents a CpG dinucleotide"
  misc_feature (61)..(61): /note="Nucleotide may be methylated to form 5-methylcytosine"
aatcctaaactatggacttcaggtgataatgatgggttcatcaattataacatgtgccaccgtggtgcaggatgtcagtagccagggaggttaggtgtgtggggatagggatagacgggaac

SEQ ID NO: 18573 - DNA, 122 bp, Homo sapiens
  misc_feature (61)..(62): /note="This region represents a CpG dinucleotide"
  misc_feature (61)..(61): /note="Nucleotide may be methylated to form 5-methylcytosine"
caggaacaaccacaggtcagcaaggtggctgaatattgagggtcagtcccgctgtggctacgggcagagggcaggctgtgtccatgctcagccctgactctggccctctgggacaccttggt

SEQ ID NO: 18574 - DNA, 122 bp, Homo sapiens
  misc_feature (61)..(62): /note="This region represents a CpG dinucleotide"
  misc_feature (61)..(61): /note="Nucleotide may be methylated to form 5-methylcytosine"
tttccaccaagtgctggagagctggtgaattgctcactcccggctcattcctctaatgaccgaagcgtctcgcagatgcaacctgccgtggaggagcagggagggagtgatttccaggtgtg

SEQ ID NO: 18575 - DNA, 122 bp, Homo sapiens
  misc_feature (61)..(62): /note="This region represents a CpG dinucleotide"
  misc_feature (61)..(61): /note="Nucleotide may be methylated to form 5-methylcytosine"
tcaaagagagggtgaccatctaatttaccttccagactgggaaattctgagagtggaaggcggtgctattaataatttcaccaaggcaacaggcataaaccagtggtatccaggccaaacat

SEQ ID NO: 18576 - DNA, 122 bp, Homo sapiens
  misc_feature (61)..(62): /note="This region represents a CpG dinucleotide"
  misc_feature (61)..(61): /note="Nucleotide may be methylated to form 5-methylcytosine"
ccaattaatatagtgagggaatgaaagtatgtcacaaaaatctttctgaaaatgtttcaacgacataagtacaaacaactctgagaagtacaaacaactacagagaaggcataacaaatatg

SEQ ID NO: 18577 - DNA, 122 bp, Homo sapiens
  misc_feature (61)..(62): /note="This region represents a CpG dinucleotide"
  misc_feature (61)..(61): /note="Nucleotide may be methylated to form 5-methylcytosine"
aggctcagactcagctgagggctgtcagaaagaggggggcagggtggccacggggaccagcgcagcccctactcacgttgatgatcacccgcagtttcctgatgtaggaggcctccgtgtgc

SEQ ID NO: 18578 - DNA, 122 bp, Homo sapiens
  misc_feature (61)..(62): /note="This region represents a CpG dinucleotide"
  misc_feature (61)..(61): /note="Nucleotide may be methylated to form 5-methylcytosine"
caatgttcagaccactgtacacacttccttgtctgcataaacaacacagcaagcatgactcgtactttcactttaactcagaatccaccgtaacaatatgctaggccataactcgattttta

SEQ ID NO: 18579 - DNA, 122 bp, Homo sapiens
  misc_feature (61)..(62): /note="This region represents a CpG dinucleotide"
  misc_feature (61)..(61): /note="Nucleotide may be methylated to form 5-methylcytosine"
atctcactgaggacacatacctgcattcagtcagttcttgtgctatttttatacctgttacggaggctttcctttccacctgtgaaaacagaacctctctgctccaagcttcttcagtcttt

SEQ ID NO: 18580 - DNA, 122 bp, Homo sapiens
  misc_feature (61)..(62): /note="This region represents a CpG dinucleotide"
  misc_feature (61)..(61): /note="Nucleotide may be methylated to form 5-methylcytosine"
tctttcacccatggcctggatgattcatttgaaggaggagcaaactgttaaagtggtttgcgaaagataattgctaagaaggaaagcttcattgcaagcttagcactaatcattttggaaaa

SEQ ID NO: 18581 - DNA, 122 bp, Homo sapiens
  misc_feature (61)..(62): /note="This region represents a CpG dinucleotide"
  misc_feature (61)..(61): /note="Nucleotide may be methylated to form 5-methylcytosine"
actgtgctccttgcagttgtctactggaacatctggagtctactgttcaaagaaagcattcgtgcaggcctgcactaaatcaagcagctgattgacaaccacccctttctccctatttcctt

SEQ ID NO: 18582 - DNA, 122 bp, Homo sapiens
  misc_feature (61)..(62): /note="This region represents a CpG dinucleotide"
  misc_feature (61)..(61): /note="Nucleotide may be methylated to form 5-methylcytosine"
tgaatgcctgcagatgagaaccagccgcggtgcccagaaaggaacagtgtgcgggtgaggcgggctctccactttgctgtatcctccccaggcccccacccccagcacgtgggcagtgaggt

SEQ ID NO: 18583 - DNA, 122 bp, Homo sapiens
  misc_feature (61)..(62): /note="This region represents a CpG dinucleotide"
  misc_feature (61)..(61): /note="Nucleotide may be methylated to form 5-methylcytosine"
agggtctagaggagggtgggaagctagtggggctggccgtgcgggggattcgcaggggcgcggggaggatgctggggatggagatacaggaggcggcgggggaggaaagagggaacgggagg

SEQ ID NO: 18584 - DNA, 122 bp, Homo sapiens
  misc_feature (61)..(62): /note="This region represents a CpG dinucleotide"
  misc_feature (61)..(61): /note="Nucleotide may be methylated to form 5-methylcytosine"
gcccccctgaggccccgccccggccacacccatgcacggaagctcctccctgccgtgccccgaggcagtcgcccaagcttaagcccagaccccagtggtgagaacatcccagctccaccccg

SEQ ID NO: 18585 - DNA, 122 bp, Homo sapiens
  misc_feature (61)..(62): /note="This region represents a CpG dinucleotide"
  misc_feature (61)..(61): /note="Nucleotide may be methylated to form 5-methylcytosine"
ttaattatgaaagttgcactagaacccaggtcgtttgatgtccaattttgtattattccacggcactataaagccttctgatggcttggaagctggctgaccctgagatatttgtccccaca

SEQ ID NO: 18586 - DNA, 122 bp, Homo sapiens
  misc_feature (61)..(62): /note="This region represents a CpG dinucleotide"
  misc_feature (61)..(61): /note="Nucleotide may be methylated to form 5-methylcytosine"
atttcttcaatttgacattcagagcactgggcagaaatcacatcgcgtcaacacccgccgcgggcctttgtggaatggtgctaaaatatttaaacaatggagaaaaaactcttaagtagatt

SEQ ID NO: 18587 - DNA, 122 bp, Homo sapiens
  misc_feature (61)..(62): /note="This region represents a CpG dinucleotide"
  misc_feature (61)..(61): /note="Nucleotide may be methylated to form 5-methylcytosine"
ttctgtagcccaaggaccagcgttctgccaaaaccatattacttgtcaatgaacagcacacgtgaactctgacatttggaaaaagtaatcaagaaaatgaaaatggatcatgggagaggaag

SEQ ID NO: 18588 - DNA, 122 bp, Homo sapiens
  misc_feature (61)..(62): /note="This region represents a CpG dinucleotide"
  misc_feature (61)..(61): /note="Nucleotide may be methylated to form 5-methylcytosine"
acaatttttaattttttttttctccttaaccctagcccaccaagaaaacacattgtggagcgctatacagagttttatcatgtacccactcacagtgatgccagcaagaagagactgattga

SEQ ID NO: 18589 - DNA, 122 bp, Homo sapiens
  misc_feature (61)..(62): /note="This region represents a CpG dinucleotide"
  misc_feature (61)..(61): /note="Nucleotide may be methylated to form 5-methylcytosine"
tgtatatattttatggtgtacaacgtactgtttatacatatatatacatacattgtggagcggctaaataatatatgcattacctcaaatacttattttttgcggtgagaacgctgaaaatc

SEQ ID NO: 18590 - DNA, 122 bp, Homo sapiens
  misc_feature (61)..(62): /note="This region represents a CpG dinucleotide"
  misc_feature (61)..(61): /note="Nucleotide may be methylated to form 5-methylcytosine"
ttttttttttgcaatcagatatgttacatcaccactactgccttagtcagctcaggctaccgtaataaaataccatagactggtggcttaaccaacagaaatttatatatattctcacagct

SEQ ID NO: 18591 - DNA, 122 bp, Homo sapiens
  misc_feature (61)..(62): /note="This region represents a CpG dinucleotide"
  misc_feature (61)..(61): /note="Nucleotide may be methylated to form 5-methylcytosine"
ggagctaaggccactgcatttgatctctctgaatatcctttctacccaccaggctgcaatcggtagcagtcaccattgaacatccttgaagcaattcttccaaaattaccttgcatcaaaga

SEQ ID NO: 18592 - DNA, 122 bp, Homo sapiens
  misc_feature (61)..(62): /note="This region represents a CpG dinucleotide"
  misc_feature (61)..(61): /note="Nucleotide may be methylated to form 5-methylcytosine"
tgtacatcaagggtgtcacctgtctagggtagggtaatatagagtagttgttctcaaatgcgagcattggagtgacctggagggcttgtaaaatacagaaggtcacctacattctcaggatt

SEQ ID NO: 18593 - DNA, 122 bp, Homo sapiens
  misc_feature (61)..(62): /note="This region represents a CpG dinucleotide"
  misc_feature (61)..(61): /note="Nucleotide may be methylated to form 5-methylcytosine"
atgaggatgggcaggtgtcgtgcagcctccacacacccacgtctcaaacacactgttccacgccaggccaccggtcaccgcaccttcccacaccgccaagcacactgacacacggggccgct

SEQ ID NO: 18594 - DNA, 122 bp, Homo sapiens
  misc_feature (61)..(62): /note="This region represents a CpG dinucleotide"
  misc_feature (61)..(61): /note="Nucleotide may be methylated to form 5-methylcytosine"
actgggtatactctgctcctttggggatttgtctggcattttcattatcaaatgcattctcgatagcaaattctcacagtcctttgttttaaaacaacattagagcatttcatatcttggtt

SEQ ID NO: 18595 - DNA, 122 bp, Homo sapiens
  misc_feature (61)..(62): /note="This region represents a CpG dinucleotide"
  misc_feature (61)..(61): /note="Nucleotide may be methylated to form 5-methylcytosine"
ggctggcggcacggagcgcttggctttctgtgggggcgccggcttttccctggggccctgcgcgcccagggccacctcggcgcggcccaggctgcgagtcttgccgcgcacgtcagcggcca

SEQ ID NO: 18596 - DNA, 122 bp, Homo sapiens
  misc_feature (61)..(62): /note="This region represents a CpG dinucleotide"
  misc_feature (61)..(61): /note="Nucleotide may be methylated to form 5-methylcytosine"
atgtcacaggtggcatttaaaacccattccttgctggacctggtagagacgcccccagtccgtcaggtctctcgctgcagttccgcagtttgaccgcaggggacggaatctgcggcggcctg

SEQ ID NO: 18597 - DNA, 122 bp, Homo sapiens
  misc_feature (61)..(62): /note="This region represents a CpG dinucleotide"
  misc_feature (61)..(61): /note="Nucleotide may be methylated to form 5-methylcytosine"
aggtttagtgttatggcccaagatgtcccaccccttccagtaaatggccactggtttgctcgaaggtagttagatcaccatcaagttcctcaggataagaagcactcctacatgacaaacca

SEQ ID NO: 18598 - DNA, 122 bp, Homo sapiens
  misc_feature (61)..(62): /note="This region represents a CpG dinucleotide"
  misc_feature (61)..(61): /note="Nucleotide may be methylated to form 5-methylcytosine"
cgcacacctcgaggccactgtagggttactcactggactaacttggatatttttgtgtctcggaatagggaggctggagcggggagaagagagaggctgggaaaggctggtgggcggaacag

SEQ ID NO: 18599 - DNA, 122 bp, Homo sapiens
  misc_feature (61)..(62): /note="This region represents a CpG dinucleotide"
  misc_feature (61)..(61): /note="Nucleotide may be methylated to form 5-methylcytosine"
tgccaggcaatattctaaatgccagtgatatgctggtgaaccagacaagcttccctgcctcgtggagctgacaggtacagaaatggtgttttagagaggctgattcaccagctgtggtcacc

SEQ ID NO: 18600 - DNA, 122 bp, Homo sapiens
  misc_feature (61)..(62): /note="This region represents a CpG dinucleotide"
  misc_feature (61)..(61): /note="Nucleotide may be methylated to form 5-methylcytosine"
agtaactagaaaacgattcatctgtgtccatttgccagtggttcttcaacttcctttcagcgtctcaatgcatcataagctgttagtcctgacagaggctttagtgattagtccaatccctt

SEQ ID NO: 18601 - DNA, 122 bp, Homo sapiens
  misc_feature (61)..(62): /note="This region represents a CpG dinucleotide"
  misc_feature (61)..(61): /note="Nucleotide may be methylated to form 5-methylcytosine"
tctaacctctgtcatttatgatgtcagcagtggttattcttccttctgttcttacaatttcgttttctttttatggtgctttttttttcttctacttctttcatgaacttgaagatatagtt

SEQ ID NO: 18602 - DNA, 122 bp, Homo sapiens
  misc_feature (61)..(62): /note="This region represents a CpG dinucleotide"
  misc_feature (61)..(61): /note="Nucleotide may be methylated to form 5-methylcytosine"
ggatctgatcaagactctcggactggctgtcacaaaagggacagatttgcatattgagcacgaggaagcaggaagatggactggtccagacacttgtatctggactcctgcagatccaaggt

SEQ ID NO: 18603 - DNA, 122 bp, Homo sapiens
  misc_feature (61)..(62): /note="This region represents a CpG dinucleotide"
  misc_feature (61)..(61): /note="Nucleotide may be methylated to form 5-methylcytosine"
ggaactttgacccacagaaacctggcatttgacttgcttcggtgagtccaacctgtgtcacgagtgcctgtttcaagggtaataaaggacctggctgtttgcttacagcaaatggaggtggt

SEQ ID NO: 18604 - DNA, 122 bp, Homo sapiens
  misc_feature (61)..(62): /note="This region represents a CpG dinucleotide"
  misc_feature (61)..(61): /note="Nucleotide may be methylated to form 5-methylcytosine"
cgtcgtgccgcgcgtgtgcatggaacaccatatagcctcaccattaataggcaagatgagcgagacccattatcagatgagaaaagcacggcacggaatactgtgtccaatgtgctcaccgt

SEQ ID NO: 18605 - DNA, 122 bp, Homo sapiens
  misc_feature (61)..(62): /note="This region represents a CpG dinucleotide"
  misc_feature (61)..(61): /note="Nucleotide may be methylated to form 5-methylcytosine"
gagctggtgactgtggccggctgggagtaggcggcagtgagtttccctgggagggcagcgcgcttggcgcttctcccctccccccgatctgcctccagtctcggacttggttgttgcgcgct

SEQ ID NO: 18606 - DNA, 122 bp, Homo sapiens
  misc_feature (61)..(62): /note="This region represents a CpG dinucleotide"
  misc_feature (61)..(61): /note="Nucleotide may be methylated to form 5-methylcytosine"
atttttttttaatgcaacaaaagagatgattcagaattaatagtgtttttccccagggcacggttttaacacttggattacaggttcatctctccatgccagaagagagcagcagggagcga

SEQ ID NO: 18607 - DNA, 122 bp, Homo sapiens
  misc_feature (61)..(62): /note="This region represents a CpG dinucleotide"
  misc_feature (61)..(61): /note="Nucleotide may be methylated to form 5-methylcytosine"
agctcattatgaaaactgcttagcagactgactgtaaatagacagcattcaggaaagttgcggttattttcatgccatatccaatgtgctagagatgagttctgggtgcttgcataatggtt

SEQ ID NO: 18608 - DNA, 122 bp, Homo sapiens
  misc_feature (61)..(62): /note="This region represents a CpG dinucleotide"
  misc_feature (61)..(61): /note="Nucleotide may be methylated to form 5-methylcytosine"
caggtgaagtcacatgttccatcattgaatctcattactttcctacatcctttgtctaaccggattgtgattcatttgcaattgtcacatctgtgaactatttatttcacttgcaactattt

SEQ ID NO: 18609 - DNA, 122 bp, Homo sapiens
  misc_feature (61)..(62): /note="This region represents a CpG dinucleotide"
  misc_feature (61)..(61): /note="Nucleotide may be methylated to form 5-methylcytosine"
aacagccaaaatatgccacttgaaacatactctgcaatctgtgattgctttgtttctttccgtcttagcatggctacatagagaaatatttatatttaatggtctttttcatgtagaagtag

SEQ ID NO: 18610 - DNA, 122 bp, Homo sapiens
  misc_feature (61)..(62): /note="This region represents a CpG dinucleotide"
  misc_feature (61)..(61): /note="Nucleotide may be methylated to form 5-methylcytosine"
gggaaccgttttcctaacgcagctctgaccgggttctcaaagccaacctgcaaatagtcgcgttcagggacagccagggaccgctgggcttttcacagcctgcctcacctttgaatattgta

SEQ ID NO: 18611 - DNA, 122 bp, Homo sapiens
  misc_feature (61)..(62): /note="This region represents a CpG dinucleotide"
  misc_feature (61)..(61): /note="Nucleotide may be methylated to form 5-methylcytosine"
aagctttctttccaccagggaagactgcaaaggccagagatcattttcacaactaaaggtcgtcatctgggcaaatgaaccactctgacttggagattaggggctcagacagccgtggatga

SEQ ID NO: 18612 - DNA, 122 bp, Homo sapiens
  misc_feature (61)..(62): /note="This region represents a CpG dinucleotide"
  misc_feature (61)..(61): /note="Nucleotide may be methylated to form 5-methylcytosine"
actgcactccagcctgggtgacagagcaagactccgtctcaaaaaaaaaaaaaaaaaagacgtgtaatttttatgagcatgaattgcatggatcaaatgtgttatgagttaaaatgcaatat

SEQ ID NO: 18613 - DNA, 122 bp, Homo sapiens
  misc_feature (61)..(62): /note="This region represents a CpG dinucleotide"
  misc_feature (61)..(61): /note="Nucleotide may be methylated to form 5-methylcytosine"
gtgccccctcacaggcaggctggagacaaggacacactgctaggagcatcagcaacataacgttagaacctacacttgttctattttattaaaaattaatcttctatggtgctttatgacaa

SEQ ID NO: 18614 - DNA, 122 bp, Homo sapiens
  misc_feature (61)..(62): /note="This region represents a CpG dinucleotide"
  misc_feature (61)..(61): /note="Nucleotide may be methylated to form 5-methylcytosine"
tttgagctcctcttgtgtgactgtgtttgtccctcgcctcaccatgtttatcatagagtgcgtatgtttgtttctgtgtaactaactaaataaatcctccagggcaagactgattcatccaa

SEQ ID NO: 18615 - DNA, 122 bp, Homo sapiens
  misc_feature (61)..(62): /note="This region represents a CpG dinucleotide"
  misc_feature (61)..(61): /note="Nucleotide may be methylated to form 5-methylcytosine"
tgctactattctaggcatttccctgaaatgttcaactttccattgaccaagaaagcagctcgcccaagtgtgtgggaagcacttgggtgggacacttttctgccccatttccagaaggatta

SEQ ID NO: 18616 - DNA, 122 bp, Homo sapiens
  misc_feature (61)..(62): /note="This region represents a CpG dinucleotide"
  misc_feature (61)..(61): /note="Nucleotide may be methylated to form 5-methylcytosine"
tatggcctccctttttacatgagcgtccagggagtgaagaggaaaccaaaggactgaaagcgtggacaacagagtagtgacagttccgccaccctttgtcagcaggccacatggctaagtgg

SEQ ID NO: 18617 - DNA, 122 bp, Homo sapiens
  misc_feature (61)..(62): /note="This region represents a CpG dinucleotide"
  misc_feature (61)..(61): /note="Nucleotide may be methylated to form 5-methylcytosine"
tgaaggttaacatttggtgatggtaggaacaactgaaaacaggagtgagtaatgatataacgatttattttgggaaggtagagattgggtaatacaaggcaatataaatgtgaagaaatagc

SEQ ID NO: 18618 - DNA, 122 bp, Homo sapiens
  misc_feature (61)..(62): /note="This region represents a CpG dinucleotide"
  misc_feature (61)..(61): /note="Nucleotide may be methylated to form 5-methylcytosine"
tggcctctcccttctttcatacacaaaaagtagcatactcttgtcaggcgcggtggctcacgcctgggcaacaagagtgaaactctgtctcaggaaaaaaaaaaaaagtagcatactctcta

SEQ ID NO: 18619 - DNA, 122 bp, Homo sapiens
  misc_feature (61)..(62): /note="This region represents a CpG dinucleotide"
  misc_feature (61)..(61): /note="Nucleotide may be methylated to form 5-methylcytosine"
atgtactcaccagctgctgtttcactggccttcacacgaaggctatggtgtggccattcacgaagtgctcttaaaagtggtgccaggagttcccttgaaatggtttttcattctgggcagtg

SEQ ID NO: 18620 - DNA, 122 bp, Homo sapiens
  misc_feature (61)..(62): /note="This region represents a CpG dinucleotide"
  misc_feature (61)..(61): /note="Nucleotide may be methylated to form 5-methylcytosine"
agcttcctggggcctcggaaggattactgggactttctctgcactgccctacgacggcagcggggaaacatggagccaatccactttgtccgttcccaggacaaggtatccagggccaggca

SEQ ID NO: 18621 - DNA, 122 bp, Homo sapiens
  misc_feature (61)..(62): /note="This region represents a CpG dinucleotide"
  misc_feature (61)..(61): /note="Nucleotide may be methylated to form 5-methylcytosine"
agtggcccgtaagtaatataacacaacatccccagagtgggtggctttcctttttcactacgctgcttcttgcactcgcccacggcaccttccacttcccttgtgggcgcatggccgaccat

SEQ ID NO: 18622 - DNA, 122 bp, Homo sapiens
  misc_feature (61)..(62): /note="This region represents a CpG dinucleotide"
  misc_feature (61)..(61): /note="Nucleotide may be methylated to form 5-methylcytosine"
aaaaaatatatatattatcagtgtcaagtattttagtcccacctgtcactaatttaatgacggcattgcctaggaatttcatgagcaacaaaactgttgatttagcctcataattttggaac

SEQ ID NO: 18623 - DNA, 122 bp, Homo sapiens
  misc_feature (61)..(62): /note="This region represents a CpG dinucleotide"
  misc_feature (61)..(61): /note="Nucleotide may be methylated to form 5-methylcytosine"
gtttgttcatggtgattaaaatggctttgaaaagaatgagcaaacattgattcccaccctcggcccttagtaattctgcatactacatatttggagaaagaagaggaatattcaccacacta

SEQ ID NO: 18624 - DNA, 122 bp, Homo sapiens
  misc_feature (61)..(62): /note="This region represents a CpG dinucleotide"
  misc_feature (61)..(61): /note="Nucleotide may be methylated to form 5-methylcytosine"
cctggcttagtgcatctaatgaatgactgaatgaatgcatctttgcctttgccttacccccgggcctgaaacatcgtcttggtccccttctcaataccttggatccttggagatcaaggtcc

SEQ ID NO: 18625 - DNA, 122 bp, Homo sapiens
  misc_feature (61)..(62): /note="This region represents a CpG dinucleotide"
  misc_feature (61)..(61): /note="Nucleotide may be methylated to form 5-methylcytosine"
tgatggacagtacccttagagcctggtggatttgggggagcagtcggcctccgagggcagcgctgcccaataggaatataatgggagccatctgtgtaactttaaactttttaatagctaca

SEQ ID NO: 18626 - DNA, 122 bp, Homo sapiens
  misc_feature (61)..(62): /note="This region represents a CpG dinucleotide"
  misc_feature (61)..(61): /note="Nucleotide may be methylated to form 5-methylcytosine"
cctaactgtaattcctgttttcctttatccacctgattagactttgaagtccttaagacccggaataatgagcctgttattgttatctctgtaacacaggcattacatgcatacttacatag

SEQ ID NO: 18627 - DNA, 122 bp, Homo sapiens
  misc_feature (61)..(62): /note="This region represents a CpG dinucleotide"
  misc_feature (61)..(61): /note="Nucleotide may be methylated to form 5-methylcytosine"
aggtaataccctaaatatgcagccaactaccctatttttgcactgttgaccatataagcacgtttgcatttgcagaaaacagaatgacagcataggaatttgtattgctctataacggtcca

SEQ ID NO: 18628 - DNA, 122 bp, Homo sapiens
  misc_feature (61)..(62): /note="This region represents a CpG dinucleotide"
  misc_feature (61)..(61): /note="Nucleotide may be methylated to form 5-methylcytosine"
gagactgtgatttccagcaatttattcatttcagaaaaatgctgctgctactcagatgcccggagaagttcattagaacaggattttcctgtaatgcctccaggtcaccaggtcactgcagc

SEQ ID NO: 18629 - DNA, 122 bp, Homo sapiens
  misc_feature (61)..(62): /note="This region represents a CpG dinucleotide"
  misc_feature (61)..(61): /note="Nucleotide may be methylated to form 5-methylcytosine"
ggggattgtgtatcacctctgttaaggcagtgggtgtgttcggaatatgtcactttcacccgagtgtcctgactaaggagagaaacagctatgagactcaccgttggaacattcgctcctcc

SEQ ID NO: 18630 - DNA, 122 bp, Homo sapiens
  misc_feature (61)..(62): /note="This region represents a CpG dinucleotide"
  misc_feature (61)..(61): /note="Nucleotide may be methylated to form 5-methylcytosine"
gagcagtgaggatgaccagagatcactttcatcaccatcttggatttggtgtgttttggccggcttgtttagcgcatcctgtttatcagcagggtatttatgacctgtatcttatgatacca

SEQ ID NO: 18631 - DNA, 122 bp, Homo sapiens
  misc_feature (61)..(62): /note="This region represents a CpG dinucleotide"
  misc_feature (61)..(61): /note="Nucleotide may be methylated to form 5-methylcytosine"
tgcccccaccttgggattccctgtgaggcctggctaacctgtgtgctgcccccacagacccgccccggggaggaatccactcagaggcagcgccctgggagccagcatggccacacaggatg

SEQ ID NO: 18632 - DNA, 122 bp, Homo sapiens
  misc_feature (61)..(62): /note="This region represents a CpG dinucleotide"
  misc_feature (61)..(61): /note="Nucleotide may be methylated to form 5-methylcytosine"
atcaggctctccgggaccatggtgggtgaagggtgtgaatctctctgtgccaggcttccacgggcattaaacactggccaaagtgcaggagttccccacctgcatggaaaacattccccacc

SEQ ID NO: 18633 - DNA, 122 bp, Homo sapiens
  misc_feature (61)..(62): /note="This region represents a CpG dinucleotide"
  misc_feature (61)..(61): /note="Nucleotide may be methylated to form 5-methylcytosine"
acgttgagaatgaccactctggatagattcagagggtgaggagcaagtctgtggggcagacggccatgatgctggtgaatcattgcaatatcctggcaagaaataacaaaggcctgaactta

SEQ ID NO: 18634 - DNA, 122 bp, Homo sapiens
  misc_feature (61)..(62): /note="This region represents a CpG dinucleotide"
  misc_feature (61)..(61): /note="Nucleotide may be methylated to form 5-methylcytosine"
ctggggtagaaatagcctgacgttgcttcctggatggacctagaatgttgcacaaggtgacgtcagagtggttgcttagaagagaggtcattggatgcagttttccagctgagtacagtggg

SEQ ID NO: 18635 - DNA, 122 bp, Homo sapiens
  misc_feature (61)..(62): /note="This region represents a CpG dinucleotide"
  misc_feature (61)..(61): /note="Nucleotide may be methylated to form 5-methylcytosine"
ttacattagccagcaaggtcttcggcattactagactaacaggcaggtgactcacttggtcgcccaggctggagtcctgtggtgtgatcttggctcactgcaacctctgcctctcaggttca

SEQ ID NO: 18636 - DNA, 122 bp, Homo sapiens
  misc_feature (61)..(62): /note="This region represents a CpG dinucleotide"
  misc_feature (61)..(61): /note="Nucleotide may be methylated to form 5-methylcytosine"
acacaggctttggcacagagaacaggcacagagacatctgacctccttgttaaacaggtgcgtcaacacaccagtgaaaccaacaaacctcacactcacctcaaatgtcctgtgcagggtgg

SEQ ID NO: 18637 - DNA, 122 bp, Homo sapiens
  misc_feature (61)..(62): /note="This region represents a CpG dinucleotide"
  misc_feature (61)..(61): /note="Nucleotide may be methylated to form 5-methylcytosine"
gtcagttttgtgcattgaggtaccccaatgtcttgagcaattcctggcataaaagaggtacgcaagtatttgttgaatggatgaatgtttgttaaaagaaagatgtaggaggcctagaatct

SEQ ID NO: 18638 - DNA, 122 bp, Homo sapiens
  misc_feature (61)..(62): /note="This region represents a CpG dinucleotide"
  misc_feature (61)..(61): /note="Nucleotide may be methylated to form 5-methylcytosine"
gcttaatgtcattatttaaaaagggggagggaatcacttgacgggtgggcaaggtggggacggggttggatggaatggtcaaaaaaggtctttcagagttcttccaatcctgaactaactca

SEQ ID NO: 18639 - DNA, 122 bp, Homo sapiens
  misc_feature (61)..(62): /note="This region represents a CpG dinucleotide"
  misc_feature (61)..(61): /note="Nucleotide may be methylated to form 5-methylcytosine"
aagggcactggatagatatggtgtctgcactcaggcagcatggggtgcagaatgaacccacgtgttggtcacacacataacttaaccctgcgattcccctgtcaggctggaagacatttctc

SEQ ID NO: 18640 - DNA, 122 bp, Homo sapiens
  misc_feature (61)..(62): /note="This region represents a CpG dinucleotide"
  misc_feature (61)..(61): /note="Nucleotide may be methylated to form 5-methylcytosine"
gcacagttctttccagtcctggcacagaatagagcctgggcttcagtgtggccataagtacggggtttgtgtagggcattggggtttcgccctcatcatctcactcctgcgccactgcctgt

SEQ ID NO: 18641 - DNA, 122 bp, Homo sapiens
  misc_feature (61)..(62): /note="This region represents a CpG dinucleotide"
  misc_feature (61)..(61): /note="Nucleotide may be methylated to form 5-methylcytosine"
gtgacacctcctggcgaaaacaaacttgacctcctgcaggatttcattttgctcactcaccgcaaattactcttgactcttcttgttgcctccaggtgcaattttcttttccttatctggaa

SEQ ID NO: 18642 - DNA, 122 bp, Homo sapiens
  misc_feature (61)..(62): /note="This region represents a CpG dinucleotide"
  misc_feature (61)..(61): /note="Nucleotide may be methylated to form 5-methylcytosine"
tttaattcaattatgaatctcactcaacaagcatcaagcacatcaggcgcctctctacagcgatatccccacaagtttcagagaaatgccagcagggactctgtagttatgattcctatcaa

SEQ ID NO: 18643 - DNA, 122 bp, Homo sapiens
  misc_feature (61)..(62): /note="This region represents a CpG dinucleotide"
  misc_feature (61)..(61): /note="Nucleotide may be methylated to form 5-methylcytosine"
aagtcaaccccaggagagaaacaatacagagctcacccctggctgattgagggccagaagcgccattcttgtaggtgaggaacagagcatgtatacactgtgttgttctgaattggaactga

SEQ ID NO: 18644 - DNA, 122 bp, Homo sapiens
  misc_feature (61)..(62): /note="This region represents a CpG dinucleotide"
  misc_feature (61)..(61): /note="Nucleotide may be methylated to form 5-methylcytosine"
tggtggtaaggacagagcacactcctaactcgtctgtcattatcacgtgggtggctcctacgaatatgaatacaaattatagaactcaggatgaagtgtcagatgcccaagaattagatcat

SEQ ID NO: 18645 - DNA, 122 bp, Homo sapiens
  misc_feature (61)..(62): /note="This region represents a CpG dinucleotide"
  misc_feature (61)..(61): /note="Nucleotide may be methylated to form 5-methylcytosine"
aggaagcgctgggggccctggaggctaggcgcctggctctcagggaaagtgactgcctaacgcaacacaataggcacattacagcccttgccttagagggagattagggtatctgcctagca

SEQ ID NO: 18646 - DNA, 122 bp, Homo sapiens
  misc_feature (61)..(62): /note="This region represents a CpG dinucleotide"
  misc_feature (61)..(61): /note="Nucleotide may be methylated to form 5-methylcytosine"
acagtggaaccagggattagcaccagggatgtctagggcagcggctactacaatgggatccggaggaaatacacatccctctttcagtgaccagcagccaccagcctgaccgtgcagagagc

SEQ ID NO: 18647 - DNA, 122 bp, Homo sapiens
  misc_feature (61)..(62): /note="This region represents a CpG dinucleotide"
  misc_feature (61)..(61): /note="Nucleotide may be methylated to form 5-methylcytosine"
ctttaccatttacatgatttaaggccaaaatctgctctccttcctatgtcataacaaaaccgcgcaagactataacgtaagcctcactacccatatcctagagctttgcagcaaccagcaaa

SEQ ID NO: 18648 - DNA, 122 bp, Homo sapiens
  misc_feature (61)..(62): /note="This region represents a CpG dinucleotide"
  misc_feature (61)..(61): /note="Nucleotide may be methylated to form 5-methylcytosine"
cctggggcaggtaacgcacatttcatgtgtggtatgggaaggagaagttcacaagtgtgtcggctagatttccaccagctcattatttgtttagctcagatattaatagagtttatgtaaca

SEQ ID NO: 18649 - DNA, 122 bp, Homo sapiens
  misc_feature (61)..(62): /note="This region represents a CpG dinucleotide"
  misc_feature (61)..(61): /note="Nucleotide may be methylated to form 5-methylcytosine"
tttatccattcatctgctgatgacatgtgagttgttccattttttagctattacgaataacgctgcaaggacattcctgtatgagtttttgtgtggcaatatgttttcattatacctaagag

SEQ ID NO: 18650 - DNA, 122 bp, Homo sapiens
  misc_feature (61)..(62): /note="This region represents a CpG dinucleotide"
  misc_feature (61)..(61): /note="Nucleotide may be methylated to form 5-methylcytosine"
ggcttccacactacacccagactacaccaggagaaacagaatcatagttcacaacgcaaacgaatgccaggaatggtcagtgagtcaaaggaccagtcaaaaacaatcacacttgtgactag

SEQ ID NO: 18651 - DNA, 122 bp, Homo sapiens
  misc_feature (61)..(62): /note="This region represents a CpG dinucleotide"
  misc_feature (61)..(61): /note="Nucleotide may be methylated to form 5-methylcytosine"
actgacagaagaatcatagcctactcttgggaaggtacctgacaaaaggatgatgcccaacgagcagggcttggattcagagaaatcatgggattttctctctctaaacacatgaatcacaa

SEQ ID NO: 18652 - DNA, 122 bp, Homo sapiens
  misc_feature (61)..(62): /note="This region represents a CpG dinucleotide"
  misc_feature (61)..(61): /note="Nucleotide may be methylated to form 5-methylcytosine"
ataaccctttactcctgcatctctataccaaaataagtctcccttctgcgccactattcccgacgccagtcagccactgccctcttagaggcaaccacgcttctcagtttcctgtgcctcct

SEQ ID NO: 18653 - DNA, 122 bp, Homo sapiens
  misc_feature (61)..(62): /note="This region represents a CpG dinucleotide"
  misc_feature (61)..(61): /note="Nucleotide may be methylated to form 5-methylcytosine"
ggctgaagagtgtgagaagctagacctctgcaggttaccgaagtcaagaacctcattaatcggtaacaagaagtgcagagcgggcttttgagtccatgcctgagtaagaaagtcccaaaaaa

SEQ ID NO: 18654 - DNA, 122 bp, Homo sapiens
  misc_feature (61)..(62): /note="This region represents a CpG dinucleotide"
  misc_feature (61)..(61): /note="Nucleotide may be methylated to form 5-methylcytosine"
attgtcgggagtggcagctgtaacagcatcaactggtcacagccctaaaacacagtgagtcgttgagtctgttgtcatatttcttataaattgtaacaacttttgagacttttgccagagct

SEQ ID NO: 18655 - DNA, 122 bp, Homo sapiens
  misc_feature (61)..(62): /note="This region represents a CpG dinucleotide"
  misc_feature (61)..(61): /note="Nucleotide may be methylated to form 5-methylcytosine"
ccctcttcaacttcgtcagcccaatcctcagtaggtaaagttgtcttcttgtctgatgcacgtgctgcccttgctgcacctctatcacacctgtgccttctctatcatgacacttaatctac

SEQ ID NO: 18656 - DNA, 122 bp, Homo sapiens
  misc_feature (61)..(62): /note="This region represents a CpG dinucleotide"
  misc_feature (61)..(61): /note="Nucleotide may be methylated to form 5-methylcytosine"
ggctgcgcctggtggccgtgcgccctggctggagcggcgcgctgcgcttcggcttcaccgcgcacgatccgtcgctcatgagcgcccaggacatccccaagtacgcctgcccggacctggtc

SEQ ID NO: 18657 - DNA, 122 bp, Homo sapiens
  misc_feature (61)..(62): /note="This region represents a CpG dinucleotide"
  misc_feature (61)..(61): /note="Nucleotide may be methylated to form 5-methylcytosine"
gtttgagaagaatctacaaattcaacaatggaactgattgagcaggttttggtagagccacgcaacagagttttgtgcaaccattcaaaatgatcatatggaagtatatttatttactggag

SEQ ID NO: 18658 - DNA, 122 bp, Homo sapiens
  misc_feature (61)..(62): /note="This region represents a CpG dinucleotide"
  misc_feature (61)..(61): /note="Nucleotide may be methylated to form 5-methylcytosine"
ctttgtatatttgtgcttctccacttctcagaatacttgaaaatagtgacatggttatttcggcatgaaaaactccaaatgtttccccctcgattcataacccaactacttccatttcaggc

SEQ ID NO: 18659 - DNA, 122 bp, Homo sapiens
  misc_feature (61)..(62): /note="This region represents a CpG dinucleotide"
  misc_feature (61)..(61): /note="Nucleotide may be methylated to form 5-methylcytosine"
catggccgtgatggggtctccagcctccttagcagggtgctgagtacatttggcagcatgcgggcgtggaactagtgtccctcacttgcccccatcactcatagggttgggcctgcagccct

SEQ ID NO: 18660 - DNA, 122 bp, Homo sapiens
  misc_feature (61)..(62): /note="This region represents a CpG dinucleotide"
  misc_feature (61)..(61): /note="Nucleotide may be methylated to form 5-methylcytosine"
cacctccgggtattcacacccttatacagtcctctcccacactatactagggttagtctgcgtgacaaatacagtgcagcagaaatgttggtatgtcactcgcaggattagatcataaaggg

SEQ ID NO: 18661 - DNA, 122 bp, Homo sapiens
  misc_feature (61)..(62): /note="This region represents a CpG dinucleotide"
  misc_feature (61)..(61): /note="Nucleotide may be methylated to form 5-methylcytosine"
tcctttgctctaagttgtttttccaggaatggagaaaggttactctgagcagttcatactcgccagttgtctgttagtgaataatagcacacatttgagctacttcagggtctgtgagatga

SEQ ID NO: 18662 - DNA, 122 bp, Homo sapiens
  misc_feature (61)..(62): /note="This region represents a CpG dinucleotide"
  misc_feature (61)..(61): /note="Nucleotide may be methylated to form 5-methylcytosine"
aagaccagagaacaccacctttttgtgattatggggctgtccccaaacctgtcaggaaggcggatgacatggtctgcagctgttcacctcctgtggactgccctgtttcagatctgggttca

SEQ ID NO: 18663 - DNA, 122 bp, Homo sapiens
  misc_feature (61)..(62): /note="This region represents a CpG dinucleotide"
  misc_feature (61)..(61): /note="Nucleotide may be methylated to form 5-methylcytosine"
cagccagagcaccaagagccgctatgtccccaacgggaagctggcgtcctacacggtgcgcgacctgctgccgggacggcggtaccagctctctgtgatagcagtgcagagcacggagctcg

SEQ ID NO: 18664 - DNA, 122 bp, Homo sapiens
  misc_feature (61)..(62): /note="This region represents a CpG dinucleotide"
  misc_feature (61)..(61): /note="Nucleotide may be methylated to form 5-methylcytosine"
ctgaggccatcagccctgatgggtataacttcaaacaaagataattgcgtaaccttggctcgtgtctttttccccactctatggcaatggggcttctgtggcaataattccacctctagaca

SEQ ID NO: 18665 - DNA, 122 bp, Homo sapiens
  misc_feature (61)..(62): /note="This region represents a CpG dinucleotide"
  misc_feature (61)..(61): /note="Nucleotide may be methylated to form 5-methylcytosine"
gaagctctatcatgcatacttcttattcatgcaacacttcaggtaacaagcagcagcaaacgttaattcccagggaatgccagcaggacgattcacgtggaggaaatagtttgtgataaaga

SEQ ID NO: 18666 - DNA, 122 bp, Homo sapiens
  misc_feature (61)..(62): /note="This region represents a CpG dinucleotide"
  misc_feature (61)..(61): /note="Nucleotide may be methylated to form 5-methylcytosine"
atttcatttctcttatgtcgaggtttcttcaagtgccgcctcctctgtccattattttagcgactctggggagctgggtaaaactgacagctttacagttagatgaaccataaaaatttggc

SEQ ID NO: 18667 - DNA, 122 bp, Homo sapiens
  misc_feature (61)..(62): /note="This region represents a CpG dinucleotide"
  misc_feature (61)..(61): /note="Nucleotide may be methylated to form 5-methylcytosine"
agattaagagtgtgaatcatagatcctcccagctatttcagaaaaagccaaaattagagacgggattttccaggaaagatatgtgaggagcctcctgtgtaaatgagtgaatccccatgaca

SEQ ID NO: 18668 - DNA, 122 bp, Homo sapiens
  misc_feature (61)..(62): /note="This region represents a CpG dinucleotide"
  misc_feature (61)..(61): /note="Nucleotide may be methylated to form 5-methylcytosine"
attctctgttttaaactctgatggctaaattaataaataattgcttagtaaattggagtccgacagtatgtgaaccaaagaatgtttaatctcctgggataaaattatttatagggtcataa

SEQ ID NO: 18669 - DNA, 122 bp, Homo sapiens
  misc_feature (61)..(62): /note="This region represents a CpG dinucleotide"
  misc_feature (61)..(61): /note="Nucleotide may be methylated to form 5-methylcytosine"
cagcgagccctgctggcccatgggatcctcatgcttgaatgagtggttggggaactgcgccgcatggtgcgagggcgtgtgaccgtagctgggcgtcccgtcgaaggtgaccgtgctgtaac

SEQ ID NO: 18670 - DNA, 122 bp, Homo sapiens
  misc_feature (61)..(62): /note="This region represents a CpG dinucleotide"
  misc_feature (61)..(61): /note="Nucleotide may be methylated to form 5-methylcytosine"
ttgtcggtcttgaggccagacttgaggccccggctctccctcttggccaccacgtagacgcggcagtacatgaccaggatgatggccagaggcaggtagaaggagcccagcgctgagaagag

SEQ ID NO: 18671 - DNA, 122 bp, Homo sapiens
  misc_feature (61)..(62): /note="This region represents a CpG dinucleotide"
  misc_feature (61)..(61): /note="Nucleotide may be methylated to form 5-methylcytosine"
tagactcgggaaaactaagcttgaggtggtcagaatggttgcaaggccaagggggcccagcggcagggcagagaatgcagcccagaccagagccttcaaaatgccagccccactaaaatcgg

SEQ ID NO: 18672 - DNA, 122 bp, Homo sapiens
  misc_feature (61)..(62): /note="This region represents a CpG dinucleotide"
  misc_feature (61)..(61): /note="Nucleotide may be methylated to form 5-methylcytosine"
tagttaagaatgcccagattatcctctttttgtcggtgtcaagaatttaatcctccctggcgccataccaacctccaccatacctgtttgtttttatgtgaatatgtaaaaattaacacccc

SEQ ID NO: 18673 - DNA, 122 bp, Homo sapiens
  misc_feature (61)..(62): /note="This region represents a CpG dinucleotide"
  misc_feature (61)..(61): /note="Nucleotide may be methylated to form 5-methylcytosine"
aattaattcggtgtctcttttaatcaaactgaaagggaatcgggcagcggcttgcggagccgtgacatcacccccaaaatcggccagagccaatcagcgtcatcactccggggacacgtggg

SEQ ID NO: 18674 - DNA, 122 bp, Homo sapiens
  misc_feature (61)..(62): /note="This region represents a CpG dinucleotide"
  misc_feature (61)..(61): /note="Nucleotide may be methylated to form 5-methylcytosine"
agaatccatcattttaaaatgtcctgtgaatatgtgcatggattcagaaatgagcctgtacgcttggggatccgcctgccctggagcaggatcattctaaaaactgtccttttataactcag

SEQ ID NO: 18675 - DNA, 122 bp, Homo sapiens
  misc_feature (61)..(62): /note="This region represents a CpG dinucleotide"
  misc_feature (61)..(61): /note="Nucleotide may be methylated to form 5-methylcytosine"
ataaatgtaaggtggcttgctgtactgtattttaaacatggaattgatcgctactggagacgtgtagcacctcagtaagttccatcacttcccctattccttgagtataatccttcccaaat

SEQ ID NO: 18676 - DNA, 122 bp, Homo sapiens
  misc_feature (61)..(62): /note="This region represents a CpG dinucleotide"
  misc_feature (61)..(61): /note="Nucleotide may be methylated to form 5-methylcytosine"
tgcaagcctcagatgattgtactggttactgaatgggttgacctctctctagtagatagacgtgcaatggacacatagtaggtgcctgataaatgtttattcttatataatgtgtattaccg

SEQ ID NO: 18677 - DNA, 122 bp, Homo sapiens
  misc_feature (61)..(62): /note="This region represents a CpG dinucleotide"
  misc_feature (61)..(61): /note="Nucleotide may be methylated to form 5-methylcytosine"
tttggtggagaggaagtgaaacaggcgtgtgcgccagaagcccgggcgtcggggtggggccgcgggaggatggtacagggctcctgatcctccccgtctgggcagacgcactcacatcacag

SEQ ID NO: 18678 - DNA, 122 bp, Homo sapiens
  misc_feature (61)..(62): /note="This region represents a CpG dinucleotide"
  misc_feature (61)..(61): /note="Nucleotide may be methylated to form 5-methylcytosine"
cattatagccactaaaagtctgcagaagtgacaatgctcttgcaggtgagggtagtgatgcgaggagtcattttcatgctagttaagaaatatctatcagggctgggcacggtggcttaagc

SEQ ID NO: 18679 - DNA, 122 bp, Homo sapiens
  misc_feature (61)..(62): /note="This region represents a CpG dinucleotide"
  misc_feature (61)..(61): /note="Nucleotide may be methylated to form 5-methylcytosine"
caggtagtgctaaccacacccttcttctgtgacctcaccgtgacaggtacagatggctaccggtgccctggcactgccttgggaatgagtgtgttttaatgtctttgtcttccactgcaaga

SEQ ID NO: 18680 - DNA, 122 bp, Homo sapiens
  misc_feature (61)..(62): /note="This region represents a CpG dinucleotide"
  misc_feature (61)..(61): /note="Nucleotide may be methylated to form 5-methylcytosine"
gcagggccagcccagggcagcgtcacgaataggagcttcccaggccgaatcggagctccccgaaggctccatcctcgtaaatcagcctggcctccgcttctcgctggcacttcccgctccgg

SEQ ID NO: 18681 - DNA, 122 bp, Homo sapiens
  misc_feature (61)..(62): /note="This region represents a CpG dinucleotide"
  misc_feature (61)..(61): /note="Nucleotide may be methylated to form 5-methylcytosine"
gtagatcctagagagaaggtctagtgtggtgattaatggtgactttccagagctcagccacgtgggtttcattctcagtgctgccacctgccagctccaatgtgactatgaacatgtcactt

SEQ ID NO: 18682 - DNA, 122 bp, Homo sapiens
  misc_feature (61)..(62): /note="This region represents a CpG dinucleotide"
  misc_feature (61)..(61): /note="Nucleotide may be methylated to form 5-methylcytosine"
tcaagggcccaggctggccctggcttgaggtctgcacacacaacgggcctctcgaagcagcggacagacacttgttggctgccaacttgggcccagactgtggtcacaaacacacccctctg

SEQ ID NO: 18683 - DNA, 122 bp, Homo sapiens
  misc_feature (61)..(62): /note="This region represents a CpG dinucleotide"
  misc_feature (61)..(61): /note="Nucleotide may be methylated to form 5-methylcytosine"
agcaagtagagtgtacaatggagccaacacctaaagtttgctctcatttgacaatgaacacggtgagagggagccacttactggtaaccatgcagaacatgccttctgcagttcatggagag

SEQ ID NO: 18684 - DNA, 122 bp, Homo sapiens
  misc_feature (61)..(62): /note="This region represents a CpG dinucleotide"
  misc_feature (61)..(61): /note="Nucleotide may be methylated to form 5-methylcytosine"
gaagagttttggtcagcattagtcattgtgaaaccatgggcctcctgccctggtttatctcgacagtcatctccctacagcagaagattgaatcctcatctctccatgagtctgagcatcta

SEQ ID NO: 18685 - DNA, 122 bp, Homo sapiens
  misc_feature (61)..(62): /note="This region represents a CpG dinucleotide"
  misc_feature (61)..(61): /note="Nucleotide may be methylated to form 5-methylcytosine"
tatgagaaatatattcacatgcacgctacttgtgtgatgacaaaattattctctcaaagccgaatacaaattagaaagtcagggcaagggctttattttatatcagatccaataattgtgaa

SEQ ID NO: 18686 - DNA, 122 bp, Homo sapiens
  misc_feature (61)..(62): /note="This region represents a CpG dinucleotide"
  misc_feature (61)..(61): /note="Nucleotide may be methylated to form 5-methylcytosine"
gtcctgggtgatacctggcagctcaagaactgagtggctcaagaaggaaaacccaaaccccggtagaataaggagaaatgaggaatgatgattttggcctgttatttacatgcttagctgtt

SEQ ID NO: 18687 - DNA, 122 bp, Homo sapiens
  misc_feature (61)..(62): /note="This region represents a CpG dinucleotide"
  misc_feature (61)..(61): /note="Nucleotide may be methylated to form 5-methylcytosine"
tccaagtgcagactcattactgatacacaaggaaaaattgtaccacatggggtggaagaacgaagggagaacttgaccaagctcccatctagaaacacacaagataggtgaacaatggccaa

SEQ ID NO: 18688 - DNA, 122 bp, Homo sapiens
  misc_feature (61)..(62): /note="This region represents a CpG dinucleotide"
  misc_feature (61)..(61): /note="Nucleotide may be methylated to form 5-methylcytosine"
tatacaacagagacattttacctgccatgaagagtcattacaggaacttgccttgcaacacgtctagaatagtccttaacacacaataaatgagcactaagtgctactattttccttccact

SEQ ID NO: 18689 - DNA, 122 bp, Homo sapiens
  misc_feature (61)..(62): /note="This region represents a CpG dinucleotide"
  misc_feature (61)..(61): /note="Nucleotide may be methylated to form 5-methylcytosine"
ataaagcaggaaggccgaaggccccgttttcgcccaaaaacaatgctccacgtaaatttgcgggaacaaaagccaccagaaatccagcccgggttttccgcctctctgctctccgcggacca

SEQ ID NO: 18690 - DNA, 122 bp, Homo sapiens
  misc_feature (61)..(62): /note="This region represents a CpG dinucleotide"
  misc_feature (61)..(61): /note="Nucleotide may be methylated to form 5-methylcytosine"
cccctttctctctattgttccgtctcttaccatgtgacacactggctccccttccccttccgccatgattgtaagcttggtctcacaagaagctgagcagatgctggtgccatgcttgtaca

SEQ ID NO: 18691 - DNA, 122 bp, Homo sapiens
  misc_feature (61)..(62): /note="This region represents a CpG dinucleotide"
  misc_feature (61)..(61): /note="Nucleotide may be methylated to form 5-methylcytosine"
gattcagggccagaacaaagggcagccattgacagctgcacattttatgcaaatcttgaacggtttcatccagggaacaaaacccttgtgaaaatggtggaaaagggccctttcccttttag

SEQ ID NO: 18692 - DNA, 122 bp, Homo sapiens
  misc_feature (61)..(62): /note="This region represents a CpG dinucleotide"
  misc_feature (61)..(61): /note="Nucleotide may be methylated to form 5-methylcytosine"
tcatccacctctaattgctgggtggacagcccagcaggtgatgtagcttcactgtttgttcggcagggggactgcagggacccatctctaatatgacccttgagccctgcggcaaggatctg

SEQ ID NO: 18693 - DNA, 122 bp, Homo sapiens
  misc_feature (61)..(62): /note="This region represents a CpG dinucleotide"
  misc_feature (61)..(61): /note="Nucleotide may be methylated to form 5-methylcytosine"
caccttatctatccataggggaaaatcattagaatgactacagattctcttgagaaaccacggagagcaggaggaagtggcacagcatttttcaagtgctgaaagaaaactatcaatctaga

SEQ ID NO: 18694 - DNA, 122 bp, Homo sapiens
  misc_feature (61)..(62): /note="This region represents a CpG dinucleotide"
  misc_feature (61)..(61): /note="Nucleotide may be methylated to form 5-methylcytosine"
ttccctgcaatgctatttgtgtgtgattacaccacactcacaaactgatcaaagcatctccgctccctgcatcctgcttgagttagcagtattcgctctggctgctgactcggcaggctcaa

SEQ ID NO: 18695 - DNA, 122 bp, Homo sapiens
  misc_feature (61)..(62): /note="This region represents a CpG dinucleotide"
  misc_feature (61)..(61): /note="Nucleotide may be methylated to form 5-methylcytosine"
tcccacttgagacctgcctggagtgacagtggaggaatgctcttccccaggctcaccccacggttcacaggaggaaatggccttctgcaccagtgggtgtgcctgcctgagacaccccagac

SEQ ID NO: 18696 - DNA, 122 bp, Homo sapiens
  misc_feature (61)..(62): /note="This region represents a CpG dinucleotide"
  misc_feature (61)..(61): /note="Nucleotide may be methylated to form 5-methylcytosine"
acgccaccacactccagcctgcgcgaccgtgagactccatctcaaaaaaaaagaaacgaacggctggttcctgtttacaccaggcacattcctgtagtgttgctcaaggtcaggagggattt

SEQ ID NO: 18697 - DNA, 122 bp, Homo sapiens
  misc_feature (61)..(62): /note="This region represents a CpG dinucleotide"
  misc_feature (61)..(61): /note="Nucleotide may be methylated to form 5-methylcytosine"
gctgtgagaacgaagtctgaggactgccgtggagaaagcgtggccagagcccagtggagacggaagatgaagacactgctgagaagcaccagccagggcctgctccccaaagcatcggactg

SEQ ID NO: 18698 - DNA, 122 bp, Homo sapiens
  misc_feature (61)..(62): /note="This region represents a CpG dinucleotide"
  misc_feature (61)..(61): /note="Nucleotide may be methylated to form 5-methylcytosine"
aagattggtcacaaaaatatcataaagttagcagctgcaggaagtagttaattgctcccacgtctaagggccagacgctgtggcttatgcctgtaatcccagcactttgggaggctgaggcg

SEQ ID NO: 18699 - DNA, 122 bp, Homo sapiens
  misc_feature (61)..(62): /note="This region represents a CpG dinucleotide"
  misc_feature (61)..(61): /note="Nucleotide may be methylated to form 5-methylcytosine"
tatttgagaaacctacaagtctgtaacagccattatggaagtgcctgcagggtcaggacacgttggcatttaggagtgtcattattcaccatgcacggtgtgcctctatctgctctcctcgg

SEQ ID NO: 18700 - DNA, 122 bp, Homo sapiens
  misc_feature (61)..(62): /note="This region represents a CpG dinucleotide"
  misc_feature (61)..(61): /note="Nucleotide may be methylated to form 5-methylcytosine"
ggcctctgtgtctcacagctccccttcccctggttgttaaggcgaaaaactccctagcaacggggtttcctgaaccttcgggccacccgaatccaccttctcaggtatcagtttccttagga

SEQ ID NO: 18701 - DNA, 122 bp, Homo sapiens
  misc_feature (61)..(62): /note="This region represents a CpG dinucleotide"
  misc_feature (61)..(61): /note="Nucleotide may be methylated to form 5-methylcytosine"
actgaggccctgggggctccaccctctttctgggcttgtcagaggcatttaagaaatacacgttgacttgacatgacccatgtgaaacgggcgtaacgagactccctgcatggctgctggat

SEQ ID NO: 18702 - DNA, 122 bp, Homo sapiens
  misc_feature (61)..(62): /note="This region represents a CpG dinucleotide"
  misc_feature (61)..(61): /note="Nucleotide may be methylated to form 5-methylcytosine"
ttcaaaacatttcttgaacaccttttcagcacagaacctaatctggctcctgcaaacaaacgtgaataagctgaattccggtcatcaaggcggtcacagcttaataggaaagaaggatatgt

SEQ ID NO: 18703 - DNA, 122 bp, Homo sapiens
  misc_feature (61)..(62): /note="This region represents a CpG dinucleotide"
  misc_feature (61)..(61): /note="Nucleotide may be methylated to form 5-methylcytosine"
cattagtaagcttaggatgactgtaaagctggtctaccaattgtgcaagcacttatgggacgtctactgctgataaaaggtcgtatttgtcaaggggaagcaaattactcttggccaattga

SEQ ID NO: 18704 - DNA, 122 bp, Homo sapiens
  misc_feature (61)..(62): /note="This region represents a CpG dinucleotide"
  misc_feature (61)..(61): /note="Nucleotide may be methylated to form 5-methylcytosine"
gctgccagcctgggcagtgggtgagaagccgctctgctgggttacacatggcaggcccagcgccctgcaggctcagggaggagctctgccctgacccagccgaatctcacccatgcaggtgg

SEQ ID NO: 18705 - DNA, 122 bp, Homo sapiens
  misc_feature (61)..(62): /note="This region represents a CpG dinucleotide"
  misc_feature (61)..(61): /note="Nucleotide may be methylated to form 5-methylcytosine"
tatctattgacagctgttaacagcatagttacacttgtgggcctagagcagcactttcaccgtggttctcagcactcttgagagatagcaagagctcagggacctttgccaaagatggctgg

SEQ ID NO: 18706 - DNA, 122 bp, Homo sapiens
  misc_feature (61)..(62): /note="This region represents a CpG dinucleotide"
  misc_feature (61)..(61): /note="Nucleotide may be methylated to form 5-methylcytosine"
aaagcctgcatcgctaagcctaacagtcaacaaaaagaaagcagaatgaagacaagaaagcggtaagaaatgggaagagacatgtagcacagattggcttcaatgtcatcttaaaatcaaga

SEQ ID NO: 18707 - DNA, 122 bp, Homo sapiens
  misc_feature (61)..(62): /note="This region represents a CpG dinucleotide"
  misc_feature (61)..(61): /note="Nucleotide may be methylated to form 5-methylcytosine"
cacgtggcctcccgggttcagacaccctaggctgatgctgtggttccatgtgcctgaacacgagcatccgaactcatttccggcctgcctgtccccccatgcaacggctcctgaaaaagggg

SEQ ID NO: 18708 - DNA, 122 bp, Homo sapiens
  misc_feature (61)..(62): /note="This region represents a CpG dinucleotide"
  misc_feature (61)..(61): /note="Nucleotide may be methylated to form 5-methylcytosine"
atagtaaagattaatgggaatcatggcatttcaacattgttaacccacatatgccttcttcgttacacttccaattaagtgatatttaatttgttcttttatatccccttacaggttttctg

SEQ ID NO: 18709 - DNA, 122 bp, Homo sapiens
  misc_feature (61)..(62): /note="This region represents a CpG dinucleotide"
  misc_feature (61)..(61): /note="Nucleotide may be methylated to form 5-methylcytosine"
aaatatttgttaaaatagtggggataattgcacaacattgtgaatataattgaatgcaatcgatgacatagtattgtacacttagaaatgattaagatgggtggggcatggtggctcatgcc

SEQ ID NO: 18710 - DNA, 122 bp, Homo sapiens
  misc_feature (61)..(62): /note="This region represents a CpG dinucleotide"
  misc_feature (61)..(61): /note="Nucleotide may be methylated to form 5-methylcytosine"
aactcctcctgaagttcagctgcaggtcaacatcttgacgggcattgaggtaaacaccagcgttcattgttttttggctgccatcgtaaaccttagcattaggaaatatattgatttgtatc

SEQ ID NO: 18711 - DNA, 122 bp, Homo sapiens
  misc_feature (61)..(62): /note="This region represents a CpG dinucleotide"
  misc_feature (61)..(61): /note="Nucleotide may be methylated to form 5-methylcytosine"
ggttagtaaaacagtctctgctttccaggaccacactatctagtggtagaaacaaatgcacgtgctgataaccaaagtatgactcagaacaccacaaatatcttactagagataaaatcaag

SEQ ID NO: 18712 - DNA, 122 bp, Homo sapiens
  misc_feature (61)..(62): /note="This region represents a CpG dinucleotide"
  misc_feature (61)..(61): /note="Nucleotide may be methylated to form 5-methylcytosine"
gctgtttctagtttcatttgcaaatgaatggacacagcaggacttcagaagggttcacatcgaatggtcataaatatacgaagaacaaatttagcactctccagagctagtgttaagagcta

SEQ ID NO: 18713 - DNA, 122 bp, Homo sapiens
  misc_feature (61)..(62): /note="This region represents a CpG dinucleotide"
  misc_feature (61)..(61): /note="Nucleotide may be methylated to form 5-methylcytosine"
gaaggtaggaggtaggtgaggccattctgtatttggggacagtgaggtcaccttcccactcgtgtgtgtgggcggccgatgattgatttctgtcatacctgttaccatttggtgcagtatcg

SEQ ID NO: 18714 - DNA, 122 bp, Homo sapiens
  misc_feature (61)..(62): /note="This region represents a CpG dinucleotide"
  misc_feature (61)..(61): /note="Nucleotide may be methylated to form 5-methylcytosine"
gtaggccacacctacttttggaggccattgtttcacaataattggttggttgatttgtcccggctgacctgaatgtctgcctggctttctgtctttagacttctcttatgctcactttcctt

SEQ ID NO: 18715 - DNA, 122 bp, Homo sapiens
  misc_feature (61)..(62): /note="This region represents a CpG dinucleotide"
  misc_feature (61)..(61): /note="Nucleotide may be methylated to form 5-methylcytosine"
aggagtttgggatcccagagaaggaagttcctaccatggaacagagtacaagttacattacgtttaggggtatgtttgttacctgttcaatttgggttcctcatgctaggaggctgttggga

SEQ ID NO: 18716 - DNA, 122 bp, Homo sapiens
  misc_feature (61)..(62): /note="This region represents a CpG dinucleotide"
  misc_feature (61)..(61): /note="Nucleotide may be methylated to form 5-methylcytosine"
gtcaccactttgtttaactacctcagtgggtccctaaactttaataaactctgtaagacccgtatgctctgccccacccatctctctggcctccttttaccagtgaaacccagccccagcag

SEQ ID NO: 18717 - DNA, 122 bp, Homo sapiens
  misc_feature (61)..(62): /note="This region represents a CpG dinucleotide"
  misc_feature (61)..(61): /note="Nucleotide may be methylated to form 5-methylcytosine"
taaggagactttattgaatatgcattgatgactcactaacactgaactcatggccaacagcgctgtaactcatccctgaacgaagcttactgaacacatgtattttctccgcaaggaacgtc

SEQ ID NO: 18718 - DNA, 122 bp, Homo sapiens
  misc_feature (61)..(62): /note="This region represents a CpG dinucleotide"
  misc_feature (61)..(61): /note="Nucleotide may be methylated to form 5-methylcytosine"
taaatacgtttggaaaataaggaatctccatccctcttaacctttgttctcagtgactcacgtaataccagtgtattagtaatgttttaattatccctggaattcaaaattagggaccgtcc

SEQ ID NO: 18719 - DNA, 122 bp, Homo sapiens
  misc_feature (61)..(62): /note="This region represents a CpG dinucleotide"
  misc_feature (61)..(61): /note="Nucleotide may be methylated to form 5-methylcytosine"
ctctccaaaatgggactagggtgaaatttcttcacagtatgaaaataatggcccagggaacgaagcaaatgccaagagctgagccttagggaatgactagtaggcccagattcttggggtga

SEQ ID NO: 18720 - DNA, 122 bp, Homo sapiens
  misc_feature (61)..(62): /note="This region represents a CpG dinucleotide"
  misc_feature (61)..(61): /note="Nucleotide may be methylated to form 5-methylcytosine"
taagacaggccactaaatctagctaagatggctcaacaaaaatgagagttctcaggcctgcgcagaacctgtgaccaagttgctgttagccataaacacctgcattgtgggagctatttgaa

SEQ ID NO: 18721 - DNA, 122 bp, Homo sapiens
  misc_feature (61)..(62): /note="This region represents a CpG dinucleotide"
  misc_feature (61)..(61): /note="Nucleotide may be methylated to form 5-methylcytosine"
cagactatggttgattcagttcgagcctggaaccaagccccatgccttgcatatcagagacggtcaatgacagtcataaccacagtcctttctccttctgtgacttcatctccccatctata

SEQ ID NO: 18722 - DNA, 122 bp, Homo sapiens
  misc_feature (61)..(62): /note="This region represents a CpG dinucleotide"
  misc_feature (61)..(61): /note="Nucleotide may be methylated to form 5-methylcytosine"
aggcgcaatcaccttccgtcatacacttctcagcagcttcccggtgaggctgctggttcacgaggggcgggagctcctagtcctgctccccgacggcatagctgcgaccggcaccacatggg

SEQ ID NO: 18723 - DNA, 122 bp, Homo sapiens
  misc_feature (61)..(62): /note="This region represents a CpG dinucleotide"
  misc_feature (61)..(61): /note="Nucleotide may be methylated to form 5-methylcytosine"
ttggcaatcttcttcagtgttgtggcctcaatatcaagtacaacaatagcataaagtaggcgcttatttgttgaatgggtgagtgacgaatgaatacataaaatctatttccttagctggtg

SEQ ID NO: 18724 - DNA, 122 bp, Homo sapiens
  misc_feature (61)..(62): /note="This region represents a CpG dinucleotide"
  misc_feature (61)..(61): /note="Nucleotide may be methylated to form 5-methylcytosine"
atttcttcagacaactatcaatgtgtgaataatgcatttctcaaaacaaaaagcagataacgtattcacattcagttagtgaagaacaggaaggaccttatcacacagtattttgcagcaag

SEQ ID NO: 18725 - DNA, 122 bp, Homo sapiens
  misc_feature (61)..(62): /note="This region represents a CpG dinucleotide"
  misc_feature (61)..(61): /note="Nucleotide may be methylated to form 5-methylcytosine"
ggactaaatctccttcctcttatcactctaggacaaagacgacaaaaggtatccagatcacgaggtcaagtgattgatttgtgacccatgtgacccatacataaatggcagtgagccatagg

SEQ ID NO: 18726 - DNA, 122 bp, Homo sapiens
  misc_feature (61)..(62): /note="This region represents a CpG dinucleotide"
  misc_feature (61)..(61): /note="Nucleotide may be methylated to form 5-methylcytosine"
aacatccactgcttcctgttccccactgggtgagatgtgcccctccgggactattaaaatcgcaaaccttcttggccaccctgtgcctgggctgaggaggttccaaaggttgcaagaagcca

SEQ ID NO: 18727 - DNA, 122 bp, Homo sapiens
  misc_feature (61)..(62): /note="This region represents a CpG dinucleotide"
  misc_feature (61)..(61): /note="Nucleotide may be methylated to form 5-methylcytosine"
aaagagtgcccctgctgaaactgctgtttatcttgcaagggccctccagggtggagctctcgccctctcctggctcagccttaaacttcactataagtaagcagaatacagcggagacaaga

SEQ ID NO: 18728 - DNA, 122 bp, Homo sapiens
  misc_feature (61)..(62): /note="This region represents a CpG dinucleotide"
  misc_feature (61)..(61): /note="Nucleotide may be methylated to form 5-methylcytosine"
caggcaatcagaagcaaggaaaggaagaaagccaggcaagagggaaggggtgacatcaaacgtgccctctgtatttcgctccagaaaacagctcacaattatgactacctgccttgttttgc

SEQ ID NO: 18729 - DNA, 122 bp, Homo sapiens
  misc_feature (61)..(62): /note="This region represents a CpG dinucleotide"
  misc_feature (61)..(61): /note="Nucleotide may be methylated to form 5-methylcytosine"
ttatttcagacagcaacatggacttcaaagctgctgagtgctaggtagcaagggagggaacgtgtgctgtgatcatccaggaaggaagcagtgggtggtgaatcagaactcagagaaggcag

SEQ ID NO: 18730 - DNA, 122 bp, Homo sapiens
  misc_feature (61)..(62): /note="This region represents a CpG dinucleotide"
  misc_feature (61)..(61): /note="Nucleotide may be methylated to form 5-methylcytosine"
gcccacgagcgtcccagggcaacgggaagacacaaggaccaggaaggaggcaagagaacacggtcaagatgggaaaggtctgcagtagaggtgacacttctgagggtaccgtcaggatgaag

SEQ ID NO: 18731 - DNA, 122 bp, Homo sapiens
  misc_feature (61)..(62): /note="This region represents a CpG dinucleotide"
  misc_feature (61)..(61): /note="Nucleotide may be methylated to form 5-methylcytosine"
ctggggctgactcctggggccaaggtggagacccctggtcttcagggggccctgccaggacgccccgcattcatgttgggcggggcctgccacctgctatcagatctcgggtggggctgcca

SEQ ID NO: 18732 - DNA, 122 bp, Homo sapiens
  misc_feature (61)..(62): /note="This region represents a CpG dinucleotide"
  misc_feature (61)..(61): /note="Nucleotide may be methylated to form 5-methylcytosine"
gaaccgcaagcgcatgacctaccagaagctggcgcgcgccctccgaaactacgccaagaccggcgagatccgcaaggtcaagcgcaagctcacctaccagttcgacagcgcgctgctgcctg

SEQ ID NO: 18733 - DNA, 122 bp, Homo sapiens
  misc_feature (61)..(62): /note="This region represents a CpG dinucleotide"
  misc_feature (61)..(61): /note="Nucleotide may be methylated to form 5-methylcytosine"
acaaaaaggaggaaaaaaaaagatgcagactgacaaatgaattcaaatttctttgatccgcgtcctaactctaaggggacttcagataaatcaatgagtcacagaaggggcaggaagatgta

SEQ ID NO: 18734 - DNA, 122 bp, Homo sapiens
  misc_feature (61)..(62): /note="This region represents a CpG dinucleotide"
  misc_feature (61)..(61): /note="Nucleotide may be methylated to form 5-methylcytosine"
tttcttaggaattcttgcagaatctttccatgtatttataagcactgttcttctcctgcacgcataggattgcagtatatacttcactgtttgtacgtggtgttttcatttataatacagaa

SEQ ID NO: 18735 - DNA, 122 bp, Homo sapiens
  misc_feature (61)..(62): /note="This region represents a CpG dinucleotide"
  misc_feature (61)..(61): /note="Nucleotide may be methylated to form 5-methylcytosine"
ccttcccccgaaagcctcaaagttctgcaaactcacagccaagcaaaacgcagctgcagtcgagccagcctcgaaaggtcttacaactttctgcagtggccagcttgttctctgtttccatg

SEQ ID NO: 18736 - DNA, 122 bp, Homo sapiens
  misc_feature (61)..(62): /note="This region represents a CpG dinucleotide"
  misc_feature (61)..(61): /note="Nucleotide may be methylated to form 5-methylcytosine"
caaacctaatcctctccattacatagctctgcaggctaagttttcaggagacagcacagacggaaaagctccataaagctgttctgatcctcttagcactttgtgcaaggagcacagataag

SEQ ID NO: 18737 - DNA, 122 bp, Homo sapiens
  misc_feature (61)..(62): /note="This region represents a CpG dinucleotide"
  misc_feature (61)..(61): /note="Nucleotide may be methylated to form 5-methylcytosine"
tcaagttatggaggctgcgtagtcaagtcattctttttatgactctgaacctaaaatactcgcctttgaaaagatcacagtgattgattgtgagtagtagacttgtcccatcaagatgaaat

SEQ ID NO: 18738 - DNA, 122 bp, Homo sapiens
  misc_feature (61)..(62): /note="This region represents a CpG dinucleotide"
  misc_feature (61)..(61): /note="Nucleotide may be methylated to form 5-methylcytosine"
cctcaaccccagcttctagagtgttttctgtccccatagtttttcttattcagaacgttacgtatatagaatcgtacactatattgtgtagtgttttgagtccggcttccatttagcgtaga

SEQ ID NO: 18739 - DNA, 122 bp, Homo sapiens
  misc_feature (61)..(62): /note="This region represents a CpG dinucleotide"
  misc_feature (61)..(61): /note="Nucleotide may be methylated to form 5-methylcytosine"
cctccaggcaggccatggccatgtctcaacaatagtttcagaggctctgaatgatgtcagcgtcacttaggagggattataggataagttgtgtccccccaaaagatatgttgaagtcctaa

SEQ ID NO: 18740 - DNA, 122 bp, Homo sapiens
  misc_feature (61)..(62): /note="This region represents a CpG dinucleotide"
  misc_feature (61)..(61): /note="Nucleotide may be methylated to form 5-methylcytosine"
agtactcagtacagtcatgtgctgtacaggtttgtagcccaggatccacaggctataccacgtagcctaggtgtgtaggtgatacctacattgaagacttaaaggattcaggggtgaaagct

SEQ ID NO: 18741 - DNA, 122 bp, Homo sapiens
  misc_feature (61)..(62): /note="This region represents a CpG dinucleotide"
  misc_feature (61)..(61): /note="Nucleotide may be methylated to form 5-methylcytosine"
ttctggaacaggctgtgacccaagtgatccctctcagttgagcctgtccactgggctgtgcgggaccagtgttcaacagtgacaccatgtggcaacaacggaaacaacagctccactgggct

SEQ ID NO: 18742 - DNA, 122 bp, Homo sapiens
  misc_feature (61)..(62): /note="This region represents a CpG dinucleotide"
  misc_feature (61)..(61): /note="Nucleotide may be methylated to form 5-methylcytosine"
attcttcaaatgtgaaacatatcatgtcagcctaggcccctgatcatgactatgtgaatacgttaaaactgccaggcctggcgtggtggcttactctggtaatcccagcactttgggagact

SEQ ID NO: 18743 - DNA, 122 bp, Homo sapiens
  misc_feature (61)..(62): /note="This region represents a CpG dinucleotide"
  misc_feature (61)..(61): /note="Nucleotide may be methylated to form 5-methylcytosine"
tttaaagtgacaggaacgaaatcattctgaagggagcagggcaaggacatatgcatcatgcgctgaacctttgttcctgaagcattactatggattttggagcattaagtaatttaaagcac

SEQ ID NO: 18744 - DNA, 122 bp, Homo sapiens
  misc_feature (61)..(62): /note="This region represents a CpG dinucleotide"
  misc_feature (61)..(61): /note="Nucleotide may be methylated to form 5-methylcytosine"
caaccctgtcctacgcacagcacctactactcatgatacaaatgtggtattaggtcatcacgctttggaagctgtgtcccaccctccacccatcctgtccacagaaaaaaatgtgattataa

SEQ ID NO: 18745 - DNA, 122 bp, Homo sapiens
  misc_feature (61)..(62): /note="This region represents a CpG dinucleotide"
  misc_feature (61)..(61): /note="Nucleotide may be methylated to form 5-methylcytosine"
caagttacggagaggctaatgaaattggagttcaaaaaccctcttttgacagctgcaattcggtaccagctggtggcagtaatctactccagactaaacatcaatgaggatgattcagctct

SEQ ID NO: 18746 - DNA, 122 bp, Homo sapiens
  misc_feature (61)..(62): /note="This region represents a CpG dinucleotide"
  misc_feature (61)..(61): /note="Nucleotide may be methylated to form 5-methylcytosine"
ttaccacttgagtctttcattcatttctctgtattcagtgcctagcatatgccaggctctcgtgtgggcactggataatataaaaatgaaggacttggggaattcacagtttggcagtggag

SEQ ID NO: 18747 - DNA, 122 bp, Homo sapiens
  misc_feature (61)..(62): /note="This region represents a CpG dinucleotide"
  misc_feature (61)..(61): /note="Nucleotide may be methylated to form 5-methylcytosine"
cagccacatttcaagtgctcaattgccacatgtggctggtggctgccatagtgaacaacacggctatagagcttagccacctgacaggaaacataaaggataatgagtaacatgttaaacat

SEQ ID NO: 18748 - DNA, 122 bp, Homo sapiens
  misc_feature (61)..(62): /note="This region represents a CpG dinucleotide"
  misc_feature (61)..(61): /note="Nucleotide may be methylated to form 5-methylcytosine"
ctcccagactcatgtcctgccatacccggtaattagtgacgtttctccaaaggcaagtttcgtaagatggcccttggtccccggcctcccttcctcatggtgatgatgcgttcagagtcagg

SEQ ID NO: 18749 - DNA, 122 bp, Homo sapiens
  misc_feature (61)..(62): /note="This region represents a CpG dinucleotide"
  misc_feature (61)..(61): /note="Nucleotide may be methylated to form 5-methylcytosine"
gaaacaagttgctacctggggtggtttttccaaagcaagacctccaaaggggagagcgcacgtgtaaagaaaaggtgcactttgcatgagggtggggcctttggttaaaagattccagctgg

SEQ ID NO: 18750 - DNA, 122 bp, Homo sapiens
  misc_feature (61)..(62): /note="This region represents a CpG dinucleotide"
  misc_feature (61)..(61): /note="Nucleotide may be methylated to form 5-methylcytosine"
cactaacttgattccaacactgtgacaagtaaatgatttttgccagcacagttggccctccgtatccacaggctctgcatccgtgggttcatccaactggggatagaaaatattctaaaaaa

SEQ ID NO: 18751 - DNA, 122 bp, Homo sapiens
  misc_feature (61)..(62): /note="This region represents a CpG dinucleotide"
  misc_feature (61)..(61): /note="Nucleotide may be methylated to form 5-methylcytosine"
aaaacgcgcacgggcttcggaggtggctatttcatctttgtgtttcttcgcagtggttctcgcctcccagaatccgcagagatctaataaacacataagttaaagagagcctcaggggaacc

SEQ ID NO: 18752 - DNA, 122 bp, Homo sapiens
  misc_feature (61)..(62): /note="This region represents a CpG dinucleotide"
  misc_feature (61)..(61): /note="Nucleotide may be methylated to form 5-methylcytosine"
ggctgcaggtgcaaatagggttgaattcaggatagggccttctctcctgcccagcctgaccgctgagtagcctctggactggaatgaaaggctttccagtaagtgccttgctggactgcagc

SEQ ID NO: 18753 - DNA, 122 bp, Homo sapiens
  misc_feature (61)..(62): /note="This region represents a CpG dinucleotide"
  misc_feature (61)..(61): /note="Nucleotide may be methylated to form 5-methylcytosine"
gtacagctggcttaggctcattgtgatttgaattcacccatggttggggctcttcatttccgctctgaaggcttcctcttcatcacagtgcaagagggcaagcctttgcatagctcctttct

SEQ ID NO: 18754 - DNA, 122 bp, Homo sapiens
  misc_feature (61)..(62): /note="This region represents a CpG dinucleotide"
  misc_feature (61)..(61): /note="Nucleotide may be methylated to form 5-methylcytosine"
gtgttcagagaggaagaaacagttcaatctgattgcagccaaggatgtaaaacagaattacgaaacactggggtctgagaagttgacagcatttgcatatatttcctatttacaaggctact

SEQ ID NO: 18755 - DNA, 122 bp, Homo sapiens
  misc_feature (61)..(62): /note="This region represents a CpG dinucleotide"
  misc_feature (61)..(61): /note="Nucleotide may be methylated to form 5-methylcytosine"
agacttttcccccttctagttggctcacttggacaggacaggatctaaagacagactccacgtgggctcgctcttttgaggcccccttctggcctttgtaaacatttattaaacctttgccc

SEQ ID NO: 18756 - DNA, 122 bp, Homo sapiens
  misc_feature (61)..(62): /note="This region represents a CpG dinucleotide"
  misc_feature (61)..(61): /note="Nucleotide may be methylated to form 5-methylcytosine"
gtgaaagacctgtgtcaaaactgcattacaattaaattctcaaagctcctgttttactttcgcagactatggttctgtgactctgggttgttgcatttaaagttatcctcattctctagcca

SEQ ID NO: 18757 - DNA, 122 bp, Homo sapiens
  misc_feature (61)..(62): /note="This region represents a CpG dinucleotide"
  misc_feature (61)..(61): /note="Nucleotide may be methylated to form 5-methylcytosine"
cttcgttctcatactgctctgagctagagaccttattgcacggcatggtcattgtggactcgcttttcctctccccagctgcactgtgactcatatagtaattgccaggataatctctcgtt

SEQ ID NO: 18758 - DNA, 122 bp, Homo sapiens
  misc_feature (61)..(62): /note="This region represents a CpG dinucleotide"
  misc_feature (61)..(61): /note="Nucleotide may be methylated to form 5-methylcytosine"
ctccttgtccccgtggctcaccaggcaggaagcccgtggcttggctgaggccccaggaagcggagtctgggaggtgaaccgtacctcaggcccagccgtgttcagcttggagtagcttctga

SEQ ID NO: 18759 - DNA, 122 bp, Homo sapiens
  misc_feature (61)..(62): /note="This region represents a CpG dinucleotide"
  misc_feature (61)..(61): /note="Nucleotide may be methylated to form 5-methylcytosine"
gccctgaccctgtcagtactgctaatccttgagtctgtgaccttgtgcatagcacctcatcgcactgggcttctgtttctttatctgtgagatggagcatttggactaaggtctcctccagg

SEQ ID NO: 18760 - DNA, 122 bp, Homo sapiens
  misc_feature (61)..(62): /note="This region represents a CpG dinucleotide"
  misc_feature (61)..(61): /note="Nucleotide may be methylated to form 5-methylcytosine"
caatgactggcatgagattggaaaggcagtgggtcaatgaaagaatgaatgaagaacaaacgaatgaatgatttcaaactgcaaaagtacatatcacacaactctggtgactgtccttccta

SEQ ID NO: 18761 - DNA, 122 bp, Homo sapiens
  misc_feature (61)..(62): /note="This region represents a CpG dinucleotide"
  misc_feature (61)..(61): /note="Nucleotide may be methylated to form 5-methylcytosine"
gacaaaagggaatgaccaattgagacacacaatgacagggtaaatcacacacagggaccacgtgcatgagtccatataagtgacgtcccggggaatggcaaaaccaatccatggggatagag

SEQ ID NO: 18762 - DNA, 122 bp, Homo sapiens
  misc_feature (61)..(62): /note="This region represents a CpG dinucleotide"
  misc_feature (61)..(61): /note="Nucleotide may be methylated to form 5-methylcytosine"
tctaaggtgatcacataaatgagtgcaggattcaaacaatgtttgttgttactgatgttgcgagactggcttcaaggttatttacagaagtggttctaggaagagtcatctttagtcagatg

SEQ ID NO: 18763 - DNA, 122 bp, Homo sapiens
  misc_feature (61)..(62): /note="This region represents a CpG dinucleotide"
  misc_feature (61)..(61): /note="Nucleotide may be methylated to form 5-methylcytosine"
cacatacacacagagacacacagagagatacacatacagatacacatagccatagatacacgcagagacacacacagtgagagaccacatgcagagagaccgcacacacagagagagaccac

SEQ ID NO: 18764 - DNA, 122 bp, Homo sapiens
  misc_feature (61)..(62): /note="This region represents a CpG dinucleotide"
  misc_feature (61)..(61): /note="Nucleotide may be methylated to form 5-methylcytosine"
cgtctcttctacaagaggacagtcagaacaaacacaacacagtctcacatccaggggaaacgtgaatgaaatggcttcagaaagacccagacacccagaagtgccagcaccaggtgacagag

SEQ ID NO: 18765 - DNA, 122 bp, Homo sapiens
  misc_feature (61)..(62): /note="This region represents a CpG dinucleotide"
  misc_feature (61)..(61): /note="Nucleotide may be methylated to form 5-methylcytosine"
tcctgaagttgacctggtgattcatggttctcctcctcaggatgttgagtctatatccatcgttctggacgcacaggtagagctggacagacagggatttgtatatgtttttatcaaccaag

SEQ ID NO: 18766 - DNA, 122 bp, Homo sapiens
  misc_feature (61)..(62): /note="This region represents a CpG dinucleotide"
  misc_feature (61)..(61): /note="Nucleotide may be methylated to form 5-methylcytosine"
ctttccctctctctctctttctctctttctttctaaggaaccttgctctgtcgcccagaccggagtgcagtggcgcgatctcggttcactgcaacctccacctcccgggttaaagcgattct

SEQ ID NO: 18767 - DNA, 122 bp, Homo sapiens
  misc_feature (61)..(62): /note="This region represents a CpG dinucleotide"
  misc_feature (61)..(61): /note="Nucleotide may be methylated to form 5-methylcytosine"
tcagagtgaggaagggacgcattattgtgacccgggccctattgtgcaagtgaaagcagacgtccacagacatgatggtgagaagacagtaatttcccagcagatgagctgacctaggggat

SEQ ID NO: 18768 - DNA, 122 bp, Homo sapiens
  misc_feature (61)..(62): /note="This region represents a CpG dinucleotide"
  misc_feature (61)..(61): /note="Nucleotide may be methylated to form 5-methylcytosine"
aggacagatgaatcagagggttgttcagcaaagggactaatgcacttccccagctgacttcgtcattcctttgtgccttgaatgaaattcctctccagtacatgcctttcagaaaaaaagag

SEQ ID NO: 18769 - DNA, 122 bp, Homo sapiens
  misc_feature (61)..(62): /note="This region represents a CpG dinucleotide"
  misc_feature (61)..(61): /note="Nucleotide may be methylated to form 5-methylcytosine"
aaacactctccttctgcaaactcaaaacggtgcttgtaatcccactctccaggattgttccgggttctgtacccatagccaccaatgagaaccggaatgactggcctttttatgaaattttg

SEQ ID NO: 18770 - DNA, 122 bp, Homo sapiens
  misc_feature (61)..(62): /note="This region represents a CpG dinucleotide"
  misc_feature (61)..(61): /note="Nucleotide may be methylated to form 5-methylcytosine"
ttctctgtaaatactgaaaggtttgttgtaatagtgccagagattgttgattagtaaccacgagaataaacatgttaaaatatttgtgatagtaacctttgtcagaattaaagatcatgcag

SEQ ID NO: 18771 - DNA, 122 bp, Homo sapiens
  misc_feature (61)..(62): /note="This region represents a CpG dinucleotide"
  misc_feature (61)..(61): /note="Nucleotide may be methylated to form 5-methylcytosine"
ttggctggcctacctgctacagaagctgaggctcagctggcctgccaatgggcttgagcccgtggggatctgtgactgtaccatgactcactgaccctgcaaaagccaaactggctccgttg

SEQ ID NO: 18772 - DNA, 122 bp, Homo sapiens
  misc_feature (61)..(62): /note="This region represents a CpG dinucleotide"
  misc_feature (61)..(61): /note="Nucleotide may be methylated to form 5-methylcytosine"
ggatagagagactgagtctgtgtccaagtgctgtattcctggcaccaacttaggagatgccgcataataagtgctcaataaatatttgacaaatgaataagtaaaaatttttgctgtgtact

SEQ ID NO: 18773 - DNA, 122 bp, Homo sapiens
  misc_feature (61)..(62): /note="This region represents a CpG dinucleotide"
  misc_feature (61)..(61): /note="Nucleotide may be methylated to form 5-methylcytosine"
tcccgctgggtgcggaaccgggtgcaagaggccgaagcgctgccccataaagccgatcttcgccggggccccgcccaggccctaacgaatacatcccattggcaggaaccggcagcaggtcc

SEQ ID NO: 18774 - DNA, 122 bp, Homo sapiens
  misc_feature (61)..(62): /note="This region represents a CpG dinucleotide"
  misc_feature (61)..(61): /note="Nucleotide may be methylated to form 5-methylcytosine"
tatttatgttgtgtctcattttctccttctgtaaaacggggcttattatagtgcctgcttcgtagattgttttgaggattaaattaattaattcaggtatttagaataatttgcgtagaggt

SEQ ID NO: 18775 - DNA, 122 bp, Homo sapiens
  misc_feature (61)..(62): /note="This region represents a CpG dinucleotide"
  misc_feature (61)..(61): /note="Nucleotide may be methylated to form 5-methylcytosine"
cgcgtgggaccccagcccccacctgcaggcatgcacgaccacgataagcttgtttctctgcgagctgtgccggatggtcagctggatctgccccagtggagactgtcccagggtcgtcccgc

SEQ ID NO: 18776 - DNA, 122 bp, Homo sapiens
  misc_feature (61)..(62): /note="This region represents a CpG dinucleotide"
  misc_feature (61)..(61): /note="Nucleotide may be methylated to form 5-methylcytosine"
aaggttaggggtgtaggaggcaattatgtctcttctctagcagctgccagagattactgccgtcagagtgattatcaccaaataattgttccctttcttccctgctgacagggcagaatggg

SEQ ID NO: 18777 - DNA, 122 bp, Homo sapiens
  misc_feature (61)..(62): /note="This region represents a CpG dinucleotide"
  misc_feature (61)..(61): /note="Nucleotide may be methylated to form 5-methylcytosine"
ccctactgctggcctaggcctcgggctgtctggcggccgcgactcagcgctgacctcgggcgcaacccagtcaggcttcgtgtccttcaggggttctaggctaacaggcgaaaggaagggcg

SEQ ID NO: 18778 - DNA, 122 bp, Homo sapiens
  misc_feature (61)..(62): /note="This region represents a CpG dinucleotide"
  misc_feature (61)..(61): /note="Nucleotide may be methylated to form 5-methylcytosine"
ttgtccctcctggaagcatcactacactttggtggcagggaagctgagctatgtggggcacgtgtgttcacgcatgttgcctggaagcgttctccagaaaagcattgcctcttctctgacag

SEQ ID NO: 18779 - DNA, 122 bp, Homo sapiens
  misc_feature (61)..(62): /note="This region represents a CpG dinucleotide"
  misc_feature (61)..(61): /note="Nucleotide may be methylated to form 5-methylcytosine"
agacacgactaatgactaaaatactactctgcatagtttgaatagttaacttcttccaggcgtcttctcagttaacttttctcttgtcagggcagtggctcagtcctgtaaacacagccttt

SEQ ID NO: 18780 - DNA, 122 bp, Homo sapiens
  misc_feature (61)..(62): /note="This region represents a CpG dinucleotide"
  misc_feature (61)..(61): /note="Nucleotide may be methylated to form 5-methylcytosine"
ttgaggcccttggcccaacccatgctgtgcttaacaaacataattccatgctaactaaaccggaagttctgaactacagatagggtgtcaaggagattgtgtgtgcgcgtgcattgtgtgtg

SEQ ID NO: 18781 - DNA, 122 bp, Homo sapiens
  misc_feature (61)..(62): /note="This region represents a CpG dinucleotide"
  misc_feature (61)..(61): /note="Nucleotide may be methylated to form 5-methylcytosine"
tgaaaccttggcacttattccttcatgacaaatgaagctctttagcagctacacacaaaccgttaataatgtggaatagaactttttaacactgattaatccataggattccagagtataac

SEQ ID NO: 18782 - DNA, 122 bp, Homo sapiens
  misc_feature (61)..(62): /note="This region represents a CpG dinucleotide"
  misc_feature (61)..(61): /note="Nucleotide may be methylated to form 5-methylcytosine"
ttcatttacaaaaacaggcagctagcccatgggccatagtttgcctacccttgagctagacgctctgcaaatagcaatgactttatttcccacattccattctttacaactctgatttctgt

SEQ ID NO: 18783 - DNA, 122 bp, Homo sapiens
  misc_feature (61)..(62): /note="This region represents a CpG dinucleotide"
  misc_feature (61)..(61): /note="Nucleotide may be methylated to form 5-methylcytosine"
gttacccagtgctcctgtatccttttaatatgcttctgttttgagcacttccttatttcccggcaccataagttcaggcttatcgtgtactttccttgcctcaagtcctggtttgagtcatt

SEQ ID NO: 18784 - DNA, 122 bp, Homo sapiens
  misc_feature (61)..(62): /note="This region represents a CpG dinucleotide"
  misc_feature (61)..(61): /note="Nucleotide may be methylated to form 5-methylcytosine"
agcttgtcatcattgtggtatgtactgccctctttccaccaaattaggtatttgctcctccgtatcatacacccatctctcctgctttctcccccagttcccagtctcctttcagtgcctcc

SEQ ID NO: 18785 - DNA, 122 bp, Homo sapiens
  misc_feature (61)..(62): /note="This region represents a CpG dinucleotide"
  misc_feature (61)..(61): /note="Nucleotide may be methylated to form 5-methylcytosine"
gaggcacggtcgctgccatgaaagcactgaagcttcacctctttgagacgtgttaataaccgcggagtgtggctctactggagatggagctacttgctgttactttgtcggtgatgctccta

SEQ ID NO: 18786 - DNA, 122 bp, Homo sapiens
  misc_feature (61)..(62): /note="This region represents a CpG dinucleotide"
  misc_feature (61)..(61): /note="Nucleotide may be methylated to form 5-methylcytosine"
atgtaaataagattatgccatgcttctgctcagaaacttccaaaggcttgccacctcattcgacataagacaaaaatccttacagtgggcccggcctggtggctcatgcctgtaaatccagc

SEQ ID NO: 18787 - DNA, 122 bp, Homo sapiens
  misc_feature (61)..(62): /note="This region represents a CpG dinucleotide"
  misc_feature (61)..(61): /note="Nucleotide may be methylated to form 5-methylcytosine"
gacggggtttcgccatgttgctcagtctggtcttgaattcctgggcttaagggatttgctcgctttggcctcctgaagtgttaggattacaggcgtgagccaccgtgcctggcctgaaaatc

SEQ ID NO: 18788 - DNA, 122 bp, Homo sapiens
  misc_feature (61)..(62): /note="This region represents a CpG dinucleotide"
  misc_feature (61)..(61): /note="Nucleotide may be methylated to form 5-methylcytosine"
ctggcttccaggttcaacagcagctgtcctttagccctgtcctgtggcaggcttctggttcgttcggcttatccggcctcttggcaattgattctgtgagtttggcaaaaaatggtttgggc

SEQ ID NO: 18789 - DNA, 122 bp, Homo sapiens
  misc_feature (61)..(62): /note="This region represents a CpG dinucleotide"
  misc_feature (61)..(61): /note="Nucleotide may be methylated to form 5-methylcytosine"
cttcaccatccctgcagaatctgaggccagaccagaaggtgaggcccacaggcctgggcacgctgagcctcacccttgcgaatgaaaccagatggagagacccaggccaaggcagagagaag

SEQ ID NO: 18790 - DNA, 122 bp, Homo sapiens
  misc_feature (61)..(62): /note="This region represents a CpG dinucleotide"
  misc_feature (61)..(61): /note="Nucleotide may be methylated to form 5-methylcytosine"
caagggcagctctgcaaggctacagaagagctttgtgggggctctggccagacccaggggcgatggctaaaaccaaagaggaatggatgtactgaattcccatcagagaagtgtggctcccg

SEQ ID NO: 18791 - DNA, 122 bp, Homo sapiens
  misc_feature (61)..(62): /note="This region represents a CpG dinucleotide"
  misc_feature (61)..(61): /note="Nucleotide may be methylated to form 5-methylcytosine"
aaatattaaccataacttgaggataagaatcaccaagcctgagctgggcgctgtggctcacgcctgtaatcccagcactttgggaggccgaggcgggtggattgcctgaagtcaggagttcg

SEQ ID NO: 18792 - DNA, 122 bp, Homo sapiens
  misc_feature (61)..(62): /note="This region represents a CpG dinucleotide"
  misc_feature (61)..(61): /note="Nucleotide may be methylated to form 5-methylcytosine"
aattgcactgattaagagacagctaaaccctcatgtgaccagtcttgcaagtctctgtttcgggaacaaatgattatgctatgcctgtacagtcaagatactggcaccattaaacatgtcac

SEQ ID NO: 18793 - DNA, 122 bp, Homo sapiens
  misc_feature (61)..(62): /note="This region represents a CpG dinucleotide"
  misc_feature (61)..(61): /note="Nucleotide may be methylated to form 5-methylcytosine"
tctctatggtagttgaaattatacctcctggtgtagattttcctgcctttctgcctttcgcgttctgtttccacgactctcaagtttgtcctctagcccttgttttgcatttttaatttctg

SEQ ID NO: 18794 - DNA, 122 bp, Homo sapiens
  misc_feature (61)..(62): /note="This region represents a CpG dinucleotide"
  misc_feature (61)..(61): /note="Nucleotide may be methylated to form 5-methylcytosine"
agagagcaaacccgcactgcttggaggaggaaatcctctaattgcctccacactcctgctcgcttccatctgcttgcatttaaggaaacccaactactgggctcctcgcagctgtagagaaa

SEQ ID NO: 18795 - DNA, 122 bp, Homo sapiens
  misc_feature (61)..(62): /note="This region represents a CpG dinucleotide"
  misc_feature (61)..(61): /note="Nucleotide may be methylated to form 5-methylcytosine"
gagcccgctggagccacctcccctcttgtgtcttcggcagtacatcatctcccaggccgacgggcagagattcaagttcacctccctgtgttccacttagtgattcatcaacccagcatctg

SEQ ID NO: 18796 - DNA, 122 bp, Homo sapiens
  misc_feature (61)..(62): /note="This region represents a CpG dinucleotide"
  misc_feature (61)..(61): /note="Nucleotide may be methylated to form 5-methylcytosine"
attatctctagctatagcataggactctgaggacaggcggtcatagggactcacatctttcgctgcttttgaggatggaggaatgcaggagaaacgcctttcagagaggagccgctctctga

SEQ ID NO: 18797 - DNA, 122 bp, Homo sapiens
  misc_feature (61)..(62): /note="This region represents a CpG dinucleotide"
  misc_feature (61)..(61): /note="Nucleotide may be methylated to form 5-methylcytosine"
acttccccactcataagcggacttggaattttcgccgtaagtcctttgctataagttctacgcacattcaacagggacacctctgtgtagcaagttacctaaatgaatattcaggctgtttt

SEQ ID NO: 18798 - DNA, 122 bp, Homo sapiens
  misc_feature (61)..(62): /note="This region represents a CpG dinucleotide"
  misc_feature (61)..(61): /note="Nucleotide may be methylated to form 5-methylcytosine"
ctggtcctctttctggccaaaccatgtcaatcaacttgccaggagccttgtactccacagcgctgtcatttctctgcaaactccccaggtgagctcatccactcctgccactcccgcaactt

SEQ ID NO: 18799 - DNA, 122 bp, Homo sapiens
  misc_feature (61)..(62): /note="This region represents a CpG dinucleotide"
  misc_feature (61)..(61): /note="Nucleotide may be methylated to form 5-methylcytosine"
cggccctctgacactgaggtcggagttatcatttcaaaaccttgctctgtattaaacagccgtgttgggcagggccagactgctggactgacagtagggggcaggcagccggaccctctgag

SEQ ID NO: 18800 - DNA, 122 bp, Homo sapiens
  misc_feature (61)..(62): /note="This region represents a CpG dinucleotide"
  misc_feature (61)..(61): /note="Nucleotide may be methylated to form 5-methylcytosine"
tgatgaataattatgaaacagttacaatataagagaactccatttttaaagagcagagtccgatgagctacaagtcttctaaaatatgattgtatcttggtagcaaagctaacattagagaa

SEQ ID NO: 18801 - DNA, 122 bp, Homo sapiens
  misc_feature (61)..(62): /note="This region represents a CpG dinucleotide"
  misc_feature (61)..(61): /note="Nucleotide may be methylated to form 5-methylcytosine"
ttccaagcaaatgtagcagaagttgtccccctagttctgctcatgtcctggcaaagagtgcggactgagcctgctgactcatggcactctagttcaggtctcccactagaagacaaagcagg

SEQ ID NO: 18802 - DNA, 122 bp, Homo sapiens
  misc_feature (61)..(62): /note="This region represents a CpG dinucleotide"
  misc_feature (61)..(61): /note="Nucleotide may be methylated to form 5-methylcytosine"
caaacaaaaaatggctttatccctgactttcacaatgccaacacgtgtgagtatgatgatcgtgtgaaaaagttattgtattccaccaagaacgaagtaatataaatttgaccaacttgtaa

SEQ ID NO: 18803 - DNA, 122 bp, Homo sapiens
  misc_feature (61)..(62): /note="This region represents a CpG dinucleotide"
  misc_feature (61)..(61): /note="Nucleotide may be methylated to form 5-methylcytosine"
ataagtgcaaacatgcatacaacctactttatttaaactaaggaaatctttctcacttgtcgataagcccctcactctctccctgttccacacaaacattttatctgtactccaatcaactc

SEQ ID NO: 18804 - DNA, 122 bp, Homo sapiens
  misc_feature (61)..(62): /note="This region represents a CpG dinucleotide"
  misc_feature (61)..(61): /note="Nucleotide may be methylated to form 5-methylcytosine"
attatcagcttaggaagccaaaaacaaaagccactctgttttcagccctgactgactaaccgttttttaaaccagcaaggacacttcctgaactttgccttcccctccctgggcaacaccag

SEQ ID NO: 18805 - DNA, 122 bp, Homo sapiens
  misc_feature (61)..(62): /note="This region represents a CpG dinucleotide"
  misc_feature (61)..(61): /note="Nucleotide may be methylated to form 5-methylcytosine"
tctttgaaaacagggaatggaggagagtcaagcaggaagagtgattgatcctgtcttgagcgtgttctgcacttgggaaggtaagcttgtcatcaacattgtcagtgtgagatttaacagga

SEQ ID NO: 18806 - DNA, 122 bp, Homo sapiens
  misc_feature (61)..(62): /note="This region represents a CpG dinucleotide"
  misc_feature (61)..(61): /note="Nucleotide may be methylated to form 5-methylcytosine"
taaaaaagccatgcattattaacaagacatttggcatcaaagcagaatgatttggaaaaccggaaaatgtccgcagaataagagaaaggggagctaacagcttaaattatttttggtagtgt

SEQ ID NO: 18807 - DNA, 122 bp, Homo sapiens
  misc_feature (61)..(62): /note="This region represents a CpG dinucleotide"
  misc_feature (61)..(61): /note="Nucleotide may be methylated to form 5-methylcytosine"
ggagaagactgtgaacatatatatagtaaatatccattaaatatttgtcaattgagcaatcgttcgttgtttagattgttatctttctaaggaagggacccgtgatatacttttatttattg

SEQ ID NO: 18808 - DNA, 122 bp, Homo sapiens
  misc_feature (61)..(62): /note="This region represents a CpG dinucleotide"
  misc_feature (61)..(61): /note="Nucleotide may be methylated to form 5-methylcytosine"
cagaacatgaaaaactttctctcgaaaatataagtacaacttataacaaagacacaaaaccgcttagtatctactcaagacggtttgggactagtttgctttagactaagttctgatgacat

SEQ ID NO: 18809 - DNA, 122 bp, Homo sapiens
  misc_feature (61)..(62): /note="This region represents a CpG dinucleotide"
  misc_feature (61)..(61): /note="Nucleotide may be methylated to form 5-methylcytosine"
tctagctctcccactgattaattctaactgggccacaccccacctcctcgccagggaatccggatttgacagaagaatatactcaaggggtgacttttcagtgctgtcctttaggtgtggtg

SEQ ID NO: 18810 - DNA, 122 bp, Homo sapiens
  misc_feature (61)..(62): /note="This region represents a CpG dinucleotide"
  misc_feature (61)..(61): /note="Nucleotide may be methylated to form 5-methylcytosine"
ctcaacagaaaaagggctggactatagtaaaaaaaaggaactgcaagttaagtggcccctcggaatgtttgatacgtttttccaaacatgacaagcacaatcagtagtcatcaaacatttct

SEQ ID NO: 18811 - DNA, 122 bp, Homo sapiens
  misc_feature (61)..(62): /note="This region represents a CpG dinucleotide"
  misc_feature (61)..(61): /note="Nucleotide may be methylated to form 5-methylcytosine"
ttactacacattctttattcctttctgtagaactttcacatagccatcctattagattttcgtggtcatccaaagtgcttcaggcaggtattattggcttcattttagagatgaggaaggcg

SEQ ID NO: 18812 - DNA, 122 bp, Homo sapiens
  misc_feature (61)..(62): /note="This region represents a CpG dinucleotide"
  misc_feature (61)..(61): /note="Nucleotide may be methylated to form 5-methylcytosine"
gctgtggggcctcggaaaggggctgggccagcgccggggccaggctcgagaaaggctgcgcgaagtgtgcactgggacgtggagtagaaggcaggcgggagggcgggcagggtgcaaggatg

SEQ ID NO: 18813 - DNA, 122 bp, Homo sapiens
  misc_feature (61)..(62): /note="This region represents a CpG dinucleotide"
  misc_feature (61)..(61): /note="Nucleotide may be methylated to form 5-methylcytosine"
aagtgacttgttcaaggtcacacagcaacttgagacagagccaaaactggaaccagttctcgtacttttcctactatctttcagcctcttctggggtgctcaatcatgatattgcatgaccc

SEQ ID NO: 18814 - DNA, 122 bp, Homo sapiens
  misc_feature (61)..(62): /note="This region represents a CpG dinucleotide"
  misc_feature (61)..(61): /note="Nucleotide may be methylated to form 5-methylcytosine"
tatccacctgagttcagcacatagcacaagatgctccagtgcttgtgaaggaaacccagacggggatcatgcttgcagttttgggctggggctactatgctacccaagatgagggaactgga

SEQ ID NO: 18815 - DNA, 122 bp, Homo sapiens
  misc_feature (61)..(62): /note="This region represents a CpG dinucleotide"
  misc_feature (61)..(61): /note="Nucleotide may be methylated to form 5-methylcytosine"
aagtgcagagatctctatgccactgtgcttacagcgaggcaagattaatcattatctctgcgcattttgttttacttgtctgtgtatatagtgtacataaaggacagacaagtcctgattta

SEQ ID NO: 18816 - DNA, 122 bp, Homo sapiens
  misc_feature (61)..(62): /note="This region represents a CpG dinucleotide"
  misc_feature (61)..(61): /note="Nucleotide may be methylated to form 5-methylcytosine"
aggaccctgggagaaggtgagttatccaaaatgtatgggaagatgacctggatgatacatcgtatcatgtatatattccagaaagagtatgaattgtatatttgtgctttaagaagcagagg

SEQ ID NO: 18817 - DNA, 122 bp, Homo sapiens
  misc_feature (61)..(62): /note="This region represents a CpG dinucleotide"
  misc_feature (61)..(61): /note="Nucleotide may be methylated to form 5-methylcytosine"
tattattatcctcctttcttacagatcaggagacagacacagagaggttaattaactcaccgaaggtcccagagttagaatattgcaaagctggatttgaacccagacagtctagtgcagca

SEQ ID NO: 18818 - DNA, 122 bp, Homo sapiens
  misc_feature (61)..(62): /note="This region represents a CpG dinucleotide"
  misc_feature (61)..(61): /note="Nucleotide may be methylated to form 5-methylcytosine"
agaaactctggagttggggtccagcaatgttaacaagctctaggggatgattctgctctgcgtcaaactttgagaactggagctctaaaactatgaccacaggcaccatgaagaacatgttt

SEQ ID NO: 18819 - DNA, 122 bp, Homo sapiens
  misc_feature (61)..(62): /note="This region represents a CpG dinucleotide"
  misc_feature (61)..(61): /note="Nucleotide may be methylated to form 5-methylcytosine"
tatgggaagtgcagaggaactgacgcttcttccaaattaacagacttgaaaaggcatggacgaaaaagtaataacaagagtagagcaggtgatttgcaggcgcccacagatgagggtgagcc

SEQ ID NO: 18820 - DNA, 122 bp, Homo sapiens
  misc_feature (61)..(62): /note="This region represents a CpG dinucleotide"
  misc_feature (61)..(61): /note="Nucleotide may be methylated to form 5-methylcytosine"
gacaggcagaagtctgagtcagaaattcagctatagaagagcgtgactttcatccctgctcgccctttgaggtatggctggacacagctcagaaaggtcttggatttcaatttgtctaggaa

SEQ ID NO: 18821 - DNA, 122 bp, Homo sapiens
  misc_feature (61)..(62): /note="This region represents a CpG dinucleotide"
  misc_feature (61)..(61): /note="Nucleotide may be methylated to form 5-methylcytosine"
agttggaggcagtcctgtgtgggtctggagcagggctacgcagcgatctccagcatggagcgcactttcctctctcagcttctttctctgggtgtctcaatttttgctttcccacggccatt

SEQ ID NO: 18822 - DNA, 122 bp, Homo sapiens
  misc_feature (61)..(62): /note="This region represents a CpG dinucleotide"
  misc_feature (61)..(61): /note="Nucleotide may be methylated to form 5-methylcytosine"
atgaaaaatgaagagaaacaaaaccactttcacatggcaataattaaatttctgagtttacgtaaagaatcttatgaaacttctcattccaaccttttgtttcctttaagttctttattatc

SEQ ID NO: 18823 - DNA, 122 bp, Homo sapiens
  misc_feature (61)..(62): /note="This region represents a CpG dinucleotide"
  misc_feature (61)..(61): /note="Nucleotide may be methylated to form 5-methylcytosine"
aaagcaagggaattccatggtaatttaacagactggatcttagccttcatttctagagcacgtggctgtcttagtagaaagcatatttcatcacttaagactggaagctactttgcaatgtg

SEQ ID NO: 18824 - DNA, 122 bp, Homo sapiens
  misc_feature (61)..(62): /note="This region represents a CpG dinucleotide"
  misc_feature (61)..(61): /note="Nucleotide may be methylated to form 5-methylcytosine"
ttccaggctcctgaagacgcctgggctgcctgattgacagcccagaagctgaggcctgaacgcatctgccaggtggttattgctctgcttccatggaaacgcacacaggacgggggagctga

SEQ ID NO: 18825 - DNA, 122 bp, Homo sapiens
  misc_feature (61)..(62): /note="This region represents a CpG dinucleotide"
  misc_feature (61)..(61): /note="Nucleotide may be methylated to form 5-methylcytosine"
gaaggccagaggggtggcagagggccgtcctcagacaacattctttccaaaggcagggtgcgtggacagggaagggcttggatgcctgacccagggcaaggctcagtgtacacagttggagc

SEQ ID NO: 18826 - DNA, 122 bp, Homo sapiens
  misc_feature (61)..(62): /note="This region represents a CpG dinucleotide"
  misc_feature (61)..(61): /note="Nucleotide may be methylated to form 5-methylcytosine"
tacaaaaccaatagttatatttaatgaaaatttacgtcaagatatgctttgaattgttaccgattaaccaacagaggctgaaatcagtggcctttaattaataagaaataacaactcagtag

SEQ ID NO: 18827 - DNA, 122 bp, Homo sapiens
  misc_feature (61)..(62): /note="This region represents a CpG dinucleotide"
  misc_feature (61)..(61): /note="Nucleotide may be methylated to form 5-methylcytosine"
cacttacctctacccttttccaggccaggcttcctggaggcccagagggtcacagcacctcgcttttgaccagtgcccagcaatgccacccagtctgacaccctgccttatatgaatccctg

SEQ ID NO: 18828 - DNA, 122 bp, Homo sapiens
  misc_feature (61)..(62): /note="This region represents a CpG dinucleotide"
  misc_feature (61)..(61): /note="Nucleotide may be methylated to form 5-methylcytosine"
caacttttctcaatcttacaaaattgttcttccaaatcatttaggtaatgtacactctcacgagcagcttatgggcagcttaagtaatcccatggagttactgaagtattaccaaggtatct

SEQ ID NO: 18829 - DNA, 122 bp, Homo sapiens
  misc_feature (61)..(62): /note="This region represents a CpG dinucleotide"
  misc_feature (61)..(61): /note="Nucleotide may be methylated to form 5-methylcytosine"
aaaaacaggaatgacttcttcgaattggtgcactagagaaatgttttccagtcgcctaagcgtttaagcatggtaaacagattaccatattagttgcccagaccttgcaaaacttcatagtg

SEQ ID NO: 18830 - DNA, 122 bp, Homo sapiens
  misc_feature (61)..(62): /note="This region represents a CpG dinucleotide"
  misc_feature (61)..(61): /note="Nucleotide may be methylated to form 5-methylcytosine"
gcatcagcagtctcagagtctgtttatatagtatccattcacactagtcaatctaggagtcgagatgaaggatcagaggatggtttcctttccccctctcccccgctacttctttgccctcc

SEQ ID NO: 18831 - DNA, 122 bp, Homo sapiens
  misc_feature (61)..(62): /note="This region represents a CpG dinucleotide"
  misc_feature (61)..(61): /note="Nucleotide may be methylated to form 5-methylcytosine"
ttggctggttatggttccttgcctggtggaaaactcacatctgcattcctgaagagcctacggcattagactatgctgttatttattttattttattattttttttgagacggagtcttcgc

SEQ ID NO: 18832 - DNA, 122 bp, Homo sapiens
  misc_feature (61)..(62): /note="This region represents a CpG dinucleotide"
  misc_feature (61)..(61): /note="Nucleotide may be methylated to form 5-methylcytosine"
atgtgtgtggggtctgcctctgctccagctaacatcccctctccccagggaacttttgggcgtgagccagcagctgtcaagcctgatgatgaccgatacctgcgggctgccatccaggagta

SEQ ID NO: 18833 - DNA, 122 bp, Homo sapiens
  misc_feature (61)..(62): /note="This region represents a CpG dinucleotide"
  misc_feature (61)..(61): /note="Nucleotide may be methylated to form 5-methylcytosine"
aacaagagtcaattctccatatataaatactcggcccctgttttagctgtgtcttaattgcgcaacatctgtttactctgtgttttaacatctgtgtggatagcattgttgttgtaatattt

SEQ ID NO: 18834 - DNA, 122 bp, Homo sapiens
  misc_feature (61)..(62): /note="This region represents a CpG dinucleotide"
  misc_feature (61)..(61): /note="Nucleotide may be methylated to form 5-methylcytosine"
atgatggaatggtgtaaacaatccagaaagagagcaagaacatttgaatacggaagggaacgtgtcagaaggttgatgtttcaggaaggctatgctgggagagtaaccacataatcagaggt

SEQ ID NO: 18835 - DNA, 122 bp, Homo sapiens
  misc_feature (61)..(62): /note="This region represents a CpG dinucleotide"
  misc_feature (61)..(61): /note="Nucleotide may be methylated to form 5-methylcytosine"
aagagcccatgatgagctggatgtttttgttctgttttacaacagcatgcctgacccaggcgaggggccccagctcaggctagtttcccttttctcctctccacactgtttttgctgctgtc

SEQ ID NO: 18836 - DNA, 122 bp, Homo sapiens
  misc_feature (61)..(62): /note="This region represents a CpG dinucleotide"
  misc_feature (61)..(61): /note="Nucleotide may be methylated to form 5-methylcytosine"
gcttgagtttacccacacctgaggatacctgcacctgacctcccttcacctgtgcttacccgcatctgagcttacctgccacagcagtggaatggagagggcacagctcaggctctttcagc

SEQ ID NO: 18837 - DNA, 122 bp, Homo sapiens
  misc_feature (61)..(62): /note="This region represents a CpG dinucleotide"
  misc_feature (61)..(61): /note="Nucleotide may be methylated to form 5-methylcytosine"
ttctcaaaataaactaagtagcctgagtatgaagtcagaccaatagagatcaaagattcacgcatcatcacacaatgggaaatttttagtcatttttctaaccacaaaaataagtctaatgc

SEQ ID NO: 18838 - DNA, 122 bp, Homo sapiens
  misc_feature (61)..(62): /note="This region represents a CpG dinucleotide"
  misc_feature (61)..(61): /note="Nucleotide may be methylated to form 5-methylcytosine"
tactgctgcatgggaccctgcagtgtggttatctccagtttcaagtgcagtgttctaacgcgtctgtttttccttacgtctgccaacactgaatattgtcgtcttttttaatctatctaatt

SEQ ID NO: 18839 - DNA, 122 bp, Homo sapiens
  misc_feature (61)..(62): /note="This region represents a CpG dinucleotide"
  misc_feature (61)..(61): /note="Nucleotide may be methylated to form 5-methylcytosine"
ggaactagcagcagtgacctctgaggagccctgggaacaccctggagctcctgagcaacacgttgcttgtgatcactgacctggatatcatgactgtgtgagcaacaccccccacacctcag

SEQ ID NO: 18840 - DNA, 122 bp, Homo sapiens
  misc_feature (61)..(62): /note="This region represents a CpG dinucleotide"
  misc_feature (61)..(61): /note="Nucleotide may be methylated to form 5-methylcytosine"
ggagttgctgcaatttctgattttccattcaataaaatatacaaatcctaatattttggccggcaaggtgactcacacctgtaatctcagcactttaggaggccgaggtgggcggatcacca

SEQ ID NO: 18841 - DNA, 122 bp, Homo sapiens
  misc_feature (61)..(62): /note="This region represents a CpG dinucleotide"
  misc_feature (61)..(61): /note="Nucleotide may be methylated to form 5-methylcytosine"
aactcctgggcttaagtgattctcccgcctcagcctcctgagtagctggtattatcggtacgtgccaccacacctgacttgaattgttttcaatgactgagaagcttaggttcagaagaagt

SEQ ID NO: 18842 - DNA, 122 bp, Homo sapiens
  misc_feature (61)..(62): /note="This region represents a CpG dinucleotide"
  misc_feature (61)..(61): /note="Nucleotide may be methylated to form 5-methylcytosine"
agttatgctgttagtcataaggttctttgtctctgactcaggaatcttgggtcttccacccgtaatggacaaagttattaacctgtaagcagggtaatcaaatcctgataccaggtaaggta

SEQ ID NO: 18843 - DNA, 122 bp, Homo sapiens
  misc_feature (61)..(62): /note="This region represents a CpG dinucleotide"
  misc_feature (61)..(61): /note="Nucleotide may be methylated to form 5-methylcytosine"
gctccacagataagaatcagaagcacagccatctcaattagaaagcaatttgagttatcacgctaattaaaggggtgtgcaggcacaagacctgactagatctagatccctaacgttaacaa

SEQ ID NO: 18844 - DNA, 122 bp, Homo sapiens
  misc_feature (61)..(62): /note="This region represents a CpG dinucleotide"
  misc_feature (61)..(61): /note="Nucleotide may be methylated to form 5-methylcytosine"
ccagtgtgtcccagaaagagatctggtcatttagtgtttgtctatcccctccctctggcccgtgaattccacatttctgacaatcttaccttcatatcttccattctgaagatgagtgaaaa

SEQ ID NO: 18845 - DNA, 122 bp, Homo sapiens
  misc_feature (61)..(62): /note="This region represents a CpG dinucleotide"
  misc_feature (61)..(61): /note="Nucleotide may be methylated to form 5-methylcytosine"
cttggagggtcagggtgcttctgtcttcagcaaaatcccaggcagggctttgtgtgggctcgggccccatgcccacccctgtcctgctgtctgtggtggaggaatgaggtcctcttgctggc

SEQ ID NO: 18846 - DNA, 122 bp, Homo sapiens
  misc_feature (61)..(62): /note="This region represents a CpG dinucleotide"
  misc_feature (61)..(61): /note="Nucleotide may be methylated to form 5-methylcytosine"
ttcccaaaagatgacagatggattttcacaatttggaaataaaaacatgagtgaagggttcggaaggcaagtctctggtccattacacacttccagaaaaacttagtacccagagactcaca

SEQ ID NO: 18847 - DNA, 122 bp, Homo sapiens
  misc_feature (61)..(62): /note="This region represents a CpG dinucleotide"
  misc_feature (61)..(61): /note="Nucleotide may be methylated to form 5-methylcytosine"
caccatcatcatcatcgtcagtggctgcagcatctttgctaacatttattaagtgcttaccgtctaccaggttctgtagtaattacctgacctgcattattttatttaattctccacagaat

SEQ ID NO: 18848 - DNA, 122 bp, Homo sapiens
  misc_feature (61)..(62): /note="This region represents a CpG dinucleotide"
  misc_feature (61)..(61): /note="Nucleotide may be methylated to form 5-methylcytosine"
tgaaacggaatactgtggccagcaggcagggtgcagtgagctgaaccaagcactagctggcggtccacaagtttgttgccccagggtttccatccacgatgccacaccctgtgactctcaaa

SEQ ID NO: 18849 - DNA, 122 bp, Homo sapiens
  misc_feature (61)..(62): /note="This region represents a CpG dinucleotide"
  misc_feature (61)..(61): /note="Nucleotide may be methylated to form 5-methylcytosine"
tagatttcccatggctagatgccctgggagacaaatgtaggcaaattctgtggatgccaacgcaggtttctgacggctatcaaaagagtaacctggaaccaaggggatacaaattctctcaa

SEQ ID NO: 18850 - DNA, 122 bp, Homo sapiens
  misc_feature (61)..(62): /note="This region represents a CpG dinucleotide"
  misc_feature (61)..(61): /note="Nucleotide may be methylated to form 5-methylcytosine"
tgctcagtgcgatgggaaactcgggctgggtctctgtggccaatgactcctgagcctcgccggcacgttttattcccggctgtccttccagtccggaagcctgaagtggacaccgaggaact

SEQ ID NO: 18851 - DNA, 122 bp, Homo sapiens
  misc_feature (61)..(62): /note="This region represents a CpG dinucleotide"
  misc_feature (61)..(61): /note="Nucleotide may be methylated to form 5-methylcytosine"
gctttgtcacccaggctggggtgagtggcctcattgcagctgactgcagcctcaatttctcgtgcccaagccatccaaagttctttgttctattatgtggacagacacgaagggcatggcat

SEQ ID NO: 18852 - DNA, 122 bp, Homo sapiens
  misc_feature (61)..(62): /note="This region represents a CpG dinucleotide"
  misc_feature (61)..(61): /note="Nucleotide may be methylated to form 5-methylcytosine"
agaaagcaaacagagaagaaacttgtcacatttactttcttcctgatttctttaagtcctcgtcatcatttcaagactaagctttgctatattcactgcattccatttttttttctaacctg

SEQ ID NO: 18853 - DNA, 122 bp, Homo sapiens
  misc_feature (61)..(62): /note="This region represents a CpG dinucleotide"
  misc_feature (61)..(61): /note="Nucleotide may be methylated to form 5-methylcytosine"
caggctcaggttaccctggagatcagggattactaaaaggaatgcaggcacttaaggaaacgtagcaagtgatcactacacaggatgcagcagaaccttcctaagaagctctgccaccatat

SEQ ID NO: 18854 - DNA, 122 bp, Homo sapiens
  misc_feature (61)..(62): /note="This region represents a CpG dinucleotide"
  misc_feature (61)..(61): /note="Nucleotide may be methylated to form 5-methylcytosine"
aaaccacagttaccactacatatctaaaatgtcagtagtcaataataacaacaaaaattacgagacaagtaaagaaaaagaaagtgtgactcatacatggtaggaaaaaaaaaactatcaat

SEQ ID NO: 18855 - DNA, 122 bp, Homo sapiens
  misc_feature (61)..(62): /note="This region represents a CpG dinucleotide"
  misc_feature (61)..(61): /note="Nucleotide may be methylated to form 5-methylcytosine"
agctaacaaacaggtcactgaccttgtcaagtgaccaggtgtccctgatgcattgtcacccgcagttaggaaattctccctctcctgcaacgtcagccctacttctttaatagacagagtag

SEQ ID NO: 18856 - DNA, 122 bp, Homo sapiens
  misc_feature (61)..(62): /note="This region represents a CpG dinucleotide"
  misc_feature (61)..(61): /note="Nucleotide may be methylated to form 5-methylcytosine"
aatgatagcaaggtcacaggtttaaatctctactccatgatcacaggccctctccctggacgggtcctatggctctggtgtcagcccgaccctttggtaaaaaaacagctgaagtggacatc

SEQ ID NO: 18857 - DNA, 122 bp, Homo sapiens
  misc_feature (61)..(62): /note="This region represents a CpG dinucleotide"
  misc_feature (61)..(61): /note="Nucleotide may be methylated to form 5-methylcytosine"
accacggagacgccccaggaggccctgtggtcgagacttttatagtcccgcaatggtagtcgcaggcagcccttttcctgaccaggccgtctctgcctgcaccattgtccttgcttaggcgg

SEQ ID NO: 18858 - DNA, 122 bp, Homo sapiens
  misc_feature (61)..(62): /note="This region represents a CpG dinucleotide"
  misc_feature (61)..(61): /note="Nucleotide may be methylated to form 5-methylcytosine"
tgagaagttatctaagaacacagggcaggagatggtaactcctccacagggcaggagatgcggtgattcaaaggtaatctgataagctgatatttgctttagggttactggatgacaatatg

SEQ ID NO: 18859 - DNA, 122 bp, Homo sapiens
  misc_feature (61)..(62): /note="This region represents a CpG dinucleotide"
  misc_feature (61)..(61): /note="Nucleotide may be methylated to form 5-methylcytosine"
caaatcacatggataggtatgtggcaattatgaaactcagtgctgactaataaagcccagcggcacacagagtaaaggtccaggagcagagactttcccagtagctctcgaaggaagtgttg

SEQ ID NO: 18860 - DNA, 122 bp, Homo sapiens
  misc_feature (61)..(62): /note="This region represents a CpG dinucleotide"
  misc_feature (61)..(61): /note="Nucleotide may be methylated to form 5-methylcytosine"
cagcccggcagtttgtttaaaggtctgggttaccttgggccccaggcgcgtgatatagaacgtcagcaactgctgctgtccaggcgctcctcagccagccttctctcctgacctctcctcag

SEQ ID NO: 18861 - DNA, 122 bp, Homo sapiens
  misc_feature (61)..(62): /note="This region represents a CpG dinucleotide"
  misc_feature (61)..(61): /note="Nucleotide may be methylated to form 5-methylcytosine"
agtgttaatcgcgtggacaccagactgcttgagtgaaatacaggttctaccatttattaacggagtaatgttgggtaagctatttagccagggtccttatctgtaacatggtgataataata

SEQ ID NO: 18862 - DNA, 122 bp, Homo sapiens
  misc_feature (61)..(62): /note="This region represents a CpG dinucleotide"
  misc_feature (61)..(61): /note="Nucleotide may be methylated to form 5-methylcytosine"
gcctcagcaagaaaagagcaggtctgtgagagcatctaaggcaagaagtggccctggcttcgaagtggaatgttaaattaaaccatttgctgactgataacttgggcaggtggcttcatctc

SEQ ID NO: 18863 - DNA, 122 bp, Homo sapiens
  misc_feature (61)..(62): /note="This region represents a CpG dinucleotide"
  misc_feature (61)..(61): /note="Nucleotide may be methylated to form 5-methylcytosine"
cagaaggaggggttgtcaggagttgtcgttcaatgggtatgaagttataattatacaagacgagtaagttccaggggtctgctgtacagtatagcacctatagttaacagtaaggtagagta

SEQ ID NO: 18864 - DNA, 122 bp, Homo sapiens
  misc_feature (61)..(62): /note="This region represents a CpG dinucleotide"
  misc_feature (61)..(61): /note="Nucleotide may be methylated to form 5-methylcytosine"
gatgaggctgtaaaacctagataatcaactcctgcacagagggagtgctttctgggtaatcgccaaacttcacatacatatgatgagtcccagtaaaaagagtgggtcttaatgagcacttt

SEQ ID NO: 18865 - DNA, 122 bp, Homo sapiens
  misc_feature (61)..(62): /note="This region represents a CpG dinucleotide"
  misc_feature (61)..(61): /note="Nucleotide may be methylated to form 5-methylcytosine"
tgtcatatagaattactggtgatgggctggatgcagttttgtatgaactgagaaactaaacgaaagacacaaggtctgagtaaaagaaggaaaaaaataggtattaaaggactaataattgg

SEQ ID NO: 18866 - DNA, 122 bp, Homo sapiens
  misc_feature (61)..(62): /note="This region represents a CpG dinucleotide"
  misc_feature (61)..(61): /note="Nucleotide may be methylated to form 5-methylcytosine"
aactgagtgtggtgtaacgaagttctgtggatgatgttgatgatgacgaatagtggggagcgattttcacagccaggagcttggctctcagcttttgtggcgcctcagactcttccctggga

SEQ ID NO: 18867 - DNA, 122 bp, Homo sapiens
  misc_feature (61)..(62): /note="This region represents a CpG dinucleotide"
  misc_feature (61)..(61): /note="Nucleotide may be methylated to form 5-methylcytosine"
aactttggcctgagctctgcgatggtatctgcaaacctagcattagctttgcagcattttcgtgtgggcaggtggttgcttaatttgcactttaacatgccagcagcagatcctggcacaga

SEQ ID NO: 18868 - DNA, 122 bp, Homo sapiens
  misc_feature (61)..(62): /note="This region represents a CpG dinucleotide"
  misc_feature (61)..(61): /note="Nucleotide may be methylated to form 5-methylcytosine"
agctgagcttgagtcagctattctgttggagaatccctaggttacatcagagaagatagccgtgggctagtcacctctatgagctttgtcatggctataattttcatcaccagtcagtcctt

SEQ ID NO: 18869 - DNA, 122 bp, Homo sapiens
  misc_feature (61)..(62): /note="This region represents a CpG dinucleotide"
  misc_feature (61)..(61): /note="Nucleotide may be methylated to form 5-methylcytosine"
gagatcatatctaaaggaaggcagcagttccaagggaaatggggaaatggctctgggccccggcggatgtcagcaatgggcattgccatccttcccagccagcccacccttggcaagagcag

SEQ ID NO: 18870 - DNA, 122 bp, Homo sapiens
  misc_feature (61)..(62): /note="This region represents a CpG dinucleotide"
  misc_feature (61)..(61): /note="Nucleotide may be methylated to form 5-methylcytosine"
gcaggggtggattgtaacaccctcatccatttccccagtgccagatggaccaggaggtggcgtagggtgggagacaggaaggactcagcatctgggacaagctgggagattaccacagggtg

SEQ ID NO: 18871 - DNA, 122 bp, Homo sapiens
  misc_feature (61)..(62): /note="This region represents a CpG dinucleotide"
  misc_feature (61)..(61): /note="Nucleotide may be methylated to form 5-methylcytosine"
agtccctttctgggccctaggctcttgtcatttgaactatagatgaggcaagagggagaccgttgaggactacactaggtattatgggctaggtctgaaaatgttgcacatcatttctgtcc

SEQ ID NO: 18872 - DNA, 122 bp, Homo sapiens
  misc_feature (61)..(62): /note="This region represents a CpG dinucleotide"
  misc_feature (61)..(61): /note="Nucleotide may be methylated to form 5-methylcytosine"
tccgactgaacgtggcaggcagcaccctgtcgcgctacctgcgggatctgctggtggcggcgaaccctgacctcttgcagcaggccctgccccgcaaggccatcacacatctcaagaagcgc

SEQ ID NO: 18873 - DNA, 122 bp, Homo sapiens
  misc_feature (61)..(62): /note="This region represents a CpG dinucleotide"
  misc_feature (61)..(61): /note="Nucleotide may be methylated to form 5-methylcytosine"
atgggctttaataatatggaaaacatccttttcctgcagagacagattggggactgaaagcgtcagttggctgggtggctcattagctgtctttaatgagtggcaccaccttggaaataacc

SEQ ID NO: 18874 - DNA, 122 bp, Homo sapiens
  misc_feature (61)..(62): /note="This region represents a CpG dinucleotide"
  misc_feature (61)..(61): /note="Nucleotide may be methylated to form 5-methylcytosine"
tgtgcagtctctgactcatcaaggctcccacactgacttccctgagaccctggaagctatcgagctggaccttgacctctcaagccgtggacgccaagtcccagggccaggtttttaaagga

SEQ ID NO: 18875 - DNA, 122 bp, Homo sapiens
  misc_feature (61)..(62): /note="This region represents a CpG dinucleotide"
  misc_feature (61)..(61): /note="Nucleotide may be methylated to form 5-methylcytosine"
tgtcacacaataacgaaccactaacaaatgatccaatttccagttgcagaaaacacatgacgtcatgcacatcatggtgttgaaaatatgggtgcccaatcccttacccacaattctgaaat

SEQ ID NO: 18876 - DNA, 122 bp, Homo sapiens
  misc_feature (61)..(62): /note="This region represents a CpG dinucleotide"
  misc_feature (61)..(61): /note="Nucleotide may be methylated to form 5-methylcytosine"
ggaaggatgcacagcctctcgttccaaagtccacagtctttctagtttctggaaggatcccgagtgactgccttttagtggtagcttctcagactccaccagggactcagccagcacccgcg

SEQ ID NO: 18877 - DNA, 122 bp, Homo sapiens
  misc_feature (61)..(62): /note="This region represents a CpG dinucleotide"
  misc_feature (61)..(61): /note="Nucleotide may be methylated to form 5-methylcytosine"
atccgcccgcctcggcctcccaaagtgctgagattacgggtgtgagccaccgcgcccagccgatcctccagaatgttttgcaacaggttgagaagccctggggtagaagtgaaacaagactc

SEQ ID NO: 18878 - DNA, 122 bp, Homo sapiens
  misc_feature (61)..(62): /note="This region represents a CpG dinucleotide"
  misc_feature (61)..(61): /note="Nucleotide may be methylated to form 5-methylcytosine"
aaactctggtgtctacaggagctcatataacaggctggaggtgactgtagacgagcgccccggctcctggagcggttgggaggcgcctggatggctggcatctgtgcttgccgcggaggcgt

SEQ ID NO: 18879 - DNA, 122 bp, Homo sapiens
  misc_feature (61)..(62): /note="This region represents a CpG dinucleotide"
  misc_feature (61)..(61): /note="Nucleotide may be methylated to form 5-methylcytosine"
acaaaaatcagatatggctctatctcccccactggaccatagaactcctcagattagaaacggcactagggtcacaaattcaaatgctcacagagccaggcagataacataaatgggtgaag

SEQ ID NO: 18880 - DNA, 122 bp, Homo sapiens
  misc_feature (61)..(62): /note="This region represents a CpG dinucleotide"
  misc_feature (61)..(61): /note="Nucleotide may be methylated to form 5-methylcytosine"
ggctttaaaactaattacctaagccacgttcaatctgacaggaggtattattggagctagcgcatcagtcagatcacttaattacttcataaatcctgggtcttagcatagattttaaagca

SEQ ID NO: 18881 - DNA, 122 bp, Homo sapiens
  misc_feature (61)..(62): /note="This region represents a CpG dinucleotide"
  misc_feature (61)..(61): /note="Nucleotide may be methylated to form 5-methylcytosine"
tctttattcagcagtgactttcatttgatgaggtggctctcctctctcacgtcaccctgtcggccaccttgaccaataggtcaagggagacttctgccagctcgcttctgctctgctgatgg

SEQ ID NO: 18882 - DNA, 122 bp, Homo sapiens
  misc_feature (61)..(62): /note="This region represents a CpG dinucleotide"
  misc_feature (61)..(61): /note="Nucleotide may be methylated to form 5-methylcytosine"
aattgaatttttggcatgtgggtgttacgtgcacatgtgtgtttgttttagcagagcccacgctggagcaaatctacaatgattcctttctccatagaaaaaaaaaaaaaaagaatgacagt

SEQ ID NO: 18883 - DNA, 122 bp, Homo sapiens
  misc_feature (61)..(62): /note="This region represents a CpG dinucleotide"
  misc_feature (61)..(61): /note="Nucleotide may be methylated to form 5-methylcytosine"
aagagccgtgttctgggagagaatcgctgggtgccgacgccagttggattcctggaaaggcgtccctaagggaggggtgcaggcagttaccggtcctccctccagtggaactgcccgtgttc

SEQ ID NO: 18884 - DNA, 122 bp, Homo sapiens
  misc_feature (61)..(62): /note="This region represents a CpG dinucleotide"
  misc_feature (61)..(61): /note="Nucleotide may be methylated to form 5-methylcytosine"
aaggatccttgtgttatctctttgtatttctgtggttatatcagttgacatttgctttagcgtattatttgctgttgtttactatatcagaaaagagtctgtagtaataaactttcttttac

SEQ ID NO: 18885 - DNA, 122 bp, Homo sapiens
  misc_feature (61)..(62): /note="This region represents a CpG dinucleotide"
  misc_feature (61)..(61): /note="Nucleotide may be methylated to form 5-methylcytosine"
acagtgtaccactattgaccttcactgggatttgctttcctgggatctggagaagcacagcgtgttcctgtgcatgaacatactgttatctttggcttggtctgaggctgtagaacagtcca

SEQ ID NO: 18886 - DNA, 122 bp, Homo sapiens
  misc_feature (61)..(62): /note="This region represents a CpG dinucleotide"
  misc_feature (61)..(61): /note="Nucleotide may be methylated to form 5-methylcytosine"
tgttgaatggttgagatcttaatttctgttagaacggtctcctgagaatgacctcctacccgttgcctcagtaacctcttacgcatggagagcagagctgcaggaaagcaggacacacgtga

SEQ ID NO: 18887 - DNA, 122 bp, Homo sapiens
  misc_feature (61)..(62): /note="This region represents a CpG dinucleotide"
  misc_feature (61)..(61): /note="Nucleotide may be methylated to form 5-methylcytosine"
gggtgggagattcctgctgttaaaaacaaacaaagggcttagacaccggctagtcggctgcgggaggcagcaagagaaaggccgaggggcctggagtagctcctgaaaaccgccgagggccc

SEQ ID NO: 18888 - DNA, 122 bp, Homo sapiens
  misc_feature (61)..(62): /note="This region represents a CpG dinucleotide"
  misc_feature (61)..(61): /note="Nucleotide may be methylated to form 5-methylcytosine"
ttataatacttataatatatgatgtcttctaccactcagcaattctggcatgaacacatacgtaacaattattgacagtggagggacgggaaaaaaaaaagccactttcctttgctctagtc

SEQ ID NO: 18889 - DNA, 122 bp, Homo sapiens
  misc_feature (61)..(62): /note="This region represents a CpG dinucleotide"
  misc_feature (61)..(61): /note="Nucleotide may be methylated to form 5-methylcytosine"
aggctttgagtcctggagatagatcctgctctgctggttgaggaccttaatcataaggcacggtattaacagcaaggttccaggataactgtctgcagtgtcacagtgtaaaaggagaaatg

SEQ ID NO: 18890 - DNA, 122 bp, Homo sapiens
  misc_feature (61)..(62): /note="This region represents a CpG dinucleotide"
  misc_feature (61)..(61): /note="Nucleotide may be methylated to form 5-methylcytosine"
catcttcgccccgccagctcctcgagatgggatataccagggttgctctccaaccctctccgcaggagggactgatggaaacgcctgggaaagtagcccggtacccacaaaggctgtctaca

SEQ ID NO: 18891 - DNA, 122 bp, Homo sapiens
  misc_feature (61)..(62): /note="This region represents a CpG dinucleotide"
  misc_feature (61)..(61): /note="Nucleotide may be methylated to form 5-methylcytosine"
agtcagcatctacctgtgaagtctttcactttcattaacatacttcacaagctcttcattcgtctagtactgtacatcataaaattaaagacagaactaagaagttctaaagaagtatgttt

SEQ ID NO: 18892 - DNA, 122 bp, Homo sapiens
  misc_feature (61)..(62): /note="This region represents a CpG dinucleotide"
  misc_feature (61)..(61): /note="Nucleotide may be methylated to form 5-methylcytosine"
agactctgttctcttcccataatgtacattatccaaatggtctcttgttgtgggtggattcgggtaaaaattgtcttcaccacgtggggcctcagtttcctcatctgcaaaaaaaaaggagt

SEQ ID NO: 18893 - DNA, 122 bp, Homo sapiens
  misc_feature (61)..(62): /note="This region represents a CpG dinucleotide"
  misc_feature (61)..(61): /note="Nucleotide may be methylated to form 5-methylcytosine"
ggccgtgaactgaatggtggcgctggcctgtgcccagtatatctggtatgaccctggggtcgtgtgggggagccggcatgggcagtggaggtgcttatgggacctgcagtaggacacagtcg

SEQ ID NO: 18894 - DNA, 122 bp, Homo sapiens
  misc_feature (61)..(62): /note="This region represents a CpG dinucleotide"
  misc_feature (61)..(61): /note="Nucleotide may be methylated to form 5-methylcytosine"
taaggcactgtacgtaaagctgtgtgggacacaaggaactatcgaatcttgttgtggcagcggagaatctgaccgtggagcacacatagggtgaagccacagacaccatcaacgcggctgct

SEQ ID NO: 18895 - DNA, 122 bp, Homo sapiens
  misc_feature (61)..(62): /note="This region represents a CpG dinucleotide"
  misc_feature (61)..(61): /note="Nucleotide may be methylated to form 5-methylcytosine"
ctacccagacacgattcagttcggctctatttagaaagatgaattaaaagctagcactgccgtacatccaaccctttggattaggaaaatagtcagagtgcaggtgtggcataatatgcaac

SEQ ID NO: 18896 - DNA, 122 bp, Homo sapiens
  misc_feature (61)..(62): /note="This region represents a CpG dinucleotide"
  misc_feature (61)..(61): /note="Nucleotide may be methylated to form 5-methylcytosine"
tggcacgacaacccagagggaggaagacctttccagtaggttttagaaaacatcgtgaaccggaattcagtggtcacctgaaaggcacatttcacagaccagctagcaaacagactcagcag

SEQ ID NO: 18897 - DNA, 122 bp, Homo sapiens
  misc_feature (61)..(62): /note="This region represents a CpG dinucleotide"
  misc_feature (61)..(61): /note="Nucleotide may be methylated to form 5-methylcytosine"
taagtctgagtcattgctcttagtactgacaactcccactgcagtggatcagagacgaggcggaagcagcctggccagcctctcctgggaaggaaggagcattgccccatctcagattcgga

SEQ ID NO: 18898 - DNA, 122 bp, Homo sapiens
  misc_feature (61)..(62): /note="This region represents a CpG dinucleotide"
  misc_feature (61)..(61): /note="Nucleotide may be methylated to form 5-methylcytosine"
gctgactcttggagttgtaaatcttatcgtccttctgataacacacttgtaataagttagcgtcctattcaaagtgaattgtaaaactgcctcatttaatatggcatctgtgtcattaaaac

SEQ ID NO: 18899 - DNA, 122 bp, Homo sapiens
  misc_feature (61)..(62): /note="This region represents a CpG dinucleotide"
  misc_feature (61)..(61): /note="Nucleotide may be methylated to form 5-methylcytosine"
cagcagggtctaacaagttcacgtgccacctggaggcagtggtagtcatccatgccttctcggtgaggcactgtacgccagagtgactttaaagtatgaggaagccattagcactgctccag

SEQ ID NO: 18900 - DNA, 122 bp, Homo sapiens
  misc_feature (61)..(62): /note="This region represents a CpG dinucleotide"
  misc_feature (61)..(61): /note="Nucleotide may be methylated to form 5-methylcytosine"
aacagttaactaggcactggtgagagattctgtagctgcacaacacaaagctggcgccagcgccaagtgtggcatgccagatgtgtgaatacattctggagcgcagcatcagcagccccggc

SEQ ID NO: 18901 - DNA, 122 bp, Homo sapiens
  misc_feature (61)..(62): /note="This region represents a CpG dinucleotide"
  misc_feature (61)..(61): /note="Nucleotide may be methylated to form 5-methylcytosine"
cggacacccctccccaggggctatattagccgtgtgagtcatggtggaccggctgggaggcggcaggctggcaggcacagtgtagggttacagtccatttatgggcgcagccgaaggcagat

SEQ ID NO: 18902 - DNA, 122 bp, Homo sapiens
  misc_feature (61)..(62): /note="This region represents a CpG dinucleotide"
  misc_feature (61)..(61): /note="Nucleotide may be methylated to form 5-methylcytosine"
gaatgcccatcaatattgagttccactttctcttttagatgggttgcttggaacttaacacgttcataccattatctctaaattaccatttataataaactacattgcagtccactgaggaa

SEQ ID NO: 18903 - DNA, 122 bp, Homo sapiens
  misc_feature (61)..(62): /note="This region represents a CpG dinucleotide"
  misc_feature (61)..(61): /note="Nucleotide may be methylated to form 5-methylcytosine"
cctctgacttctatacccaggcacaggtcagagccatttaagattgagagaggtgaagttcgttctgtttggttctcgaatccactatttagttccaagacaaaatcgcatttctctcaacc

SEQ ID NO: 18904 - DNA, 122 bp, Homo sapiens
  misc_feature (61)..(62): /note="This region represents a CpG dinucleotide"
  misc_feature (61)..(61): /note="Nucleotide may be methylated to form 5-methylcytosine"
atcacttctcattaggccccacctcccaacactgttactttggggattaagtttccaacacgtgcctttgggggaatagattcgaaccatagcacttcctagagtaattaattttaaaagat

SEQ ID NO: 18905 - DNA, 122 bp, Homo sapiens
  misc_feature (61)..(62): /note="This region represents a CpG dinucleotide"
  misc_feature (61)..(61): /note="Nucleotide may be methylated to form 5-methylcytosine"
tgcctttattctctacgagatagaaattttgagagaacaggccacaaacggtattatactcgtggctggagggtaaagcgcaatgcagctaaaatgccagtatatttgtatgagcagaaagt

SEQ ID NO: 18906 - DNA, 122 bp, Homo sapiens
  misc_feature (61)..(62): /note="This region represents a CpG dinucleotide"
  misc_feature (61)..(61): /note="Nucleotide may be methylated to form 5-methylcytosine"
gtctggtccctcaatgctgagtgggatgtgcattgatggagggctttgctgttcctatgtcgtgcttgggacagtcggccacaaagctgggctgacctctcgggccgggccgggcctggcca

SEQ ID NO: 18907 - DNA, 122 bp, Homo sapiens
  misc_feature (61)..(62): /note="This region represents a CpG dinucleotide"
  misc_feature (61)..(61): /note="Nucleotide may be methylated to form 5-methylcytosine"
caaacaaaactgaatgaagttgcttgaaaagaaaattttgcttataggtaagtctctgtacggagagagccaatgcatccagattcaactgctaatcagaaaatctgggttttggcccctgc

SEQ ID NO: 18908 - DNA, 122 bp, Homo sapiens
  misc_feature (61)..(62): /note="This region represents a CpG dinucleotide"
  misc_feature (61)..(61): /note="Nucleotide may be methylated to form 5-methylcytosine"
cccccctctctctctttctctctctctctcttgcttggtttctgtaatgaggaagttctccgcagctcagtttcctttccctcactgagcgcctgaaacaggaagtcagtcagttaagctgg

SEQ ID NO: 18909 - DNA, 122 bp, Homo sapiens
  misc_feature (61)..(62): /note="This region represents a CpG dinucleotide"
  misc_feature (61)..(61): /note="Nucleotide may be methylated to form 5-methylcytosine"
acagttgatagtgtcctgttctcctgttgtgtacactgccgaggtactaagcgttagtgtcgtgttaggacacatattgcttttcatccacagttcctggctcgtaactcccatagcccttg

SEQ ID NO: 18910 - DNA, 122 bp, Homo sapiens
  misc_feature (61)..(62): /note="This region represents a CpG dinucleotide"
  misc_feature (61)..(61): /note="Nucleotide may be methylated to form 5-methylcytosine"
ggcactaacaattgtgtaggtgtggatgaatatggtgtggatgaatatgccagtggtggtcgcctaagtgctccagtgtgaataaacagagtgcctctgagagaatgagtggagtctattag

SEQ ID NO: 18911 - DNA, 122 bp, Homo sapiens
  misc_feature (61)..(62): /note="This region represents a CpG dinucleotide"
  misc_feature (61)..(61): /note="Nucleotide may be methylated to form 5-methylcytosine"
gtcaagagactcaacacctttgcccaagctgcatcgcaatcaaatttaagaatgtcaattcgttatttaaaaatgttaattatacattttaatgtacgctatcaaaatatctcatgtaaccc

SEQ ID NO: 18912 - DNA, 122 bp, Homo sapiens
  misc_feature (61)..(62): /note="This region represents a CpG dinucleotide"
  misc_feature (61)..(61): /note="Nucleotide may be methylated to form 5-methylcytosine"
ggcgactaaaagggccgccagccagggaacaccctggggagcctacggacctctcctctgcggtgtaccttctcagtcacagtcctgacccttctggagggagatgcactgtgtaggcgatt

SEQ ID NO: 18913 - DNA, 122 bp, Homo sapiens
  misc_feature (61)..(62): /note="This region represents a CpG dinucleotide"
  misc_feature (61)..(61): /note="Nucleotide may be methylated to form 5-methylcytosine"
tttcctggagttacagaagaattgaccagtgtgtcagtgtctttcatgtacattaatgggcgatagtattggtagtggttaatataatagcatgggttctggaaccagtctgccaggattta

SEQ ID NO: 18914 - DNA, 122 bp, Homo sapiens
  misc_feature (61)..(62): /note="This region represents a CpG dinucleotide"
  misc_feature (61)..(61): /note="Nucleotide may be methylated to form 5-methylcytosine"
tcttttggggttggagaataaagttctttacctcatcagttagactctatctaaggtacacgagggcttgctagtctcctaagttagtctgctaataaatgttaaccctaataactgaaatt

SEQ ID NO: 18915 - DNA, 122 bp, Homo sapiens
  misc_feature (61)..(62): /note="This region represents a CpG dinucleotide"
  misc_feature (61)..(61): /note="Nucleotide may be methylated to form 5-methylcytosine"
tccagggggcaaaaagcactaacctgtattgttttaatctgctgaaaacaaccaacttctcgagttcccctgctgtcttctagccagtttcctgtaaatgttgcatgtgacattatacttcc

SEQ ID NO: 18916 - DNA, 122 bp, Homo sapiens
  misc_feature (61)..(62): /note="This region represents a CpG dinucleotide"
  misc_feature (61)..(61): /note="Nucleotide may be methylated to form 5-methylcytosine"
tgcctgttgtctcagtgataatgtgcaagcatagagatatattaaaaacctacgtaaatacgtttaaggaaagaaaaagagtaggtcattaaatagtgaaagaacattaattttgaaatgac

SEQ ID NO: 18917 - DNA, 122 bp, Homo sapiens
  misc_feature (61)..(62): /note="This region represents a CpG dinucleotide"
  misc_feature (61)..(61): /note="Nucleotide may be methylated to form 5-methylcytosine"
ttcacagaattcgatagaaccatttgattaaggtgtttagtgtgtgtcttaaacagtgtacgctgcaaagcacgcatacaatggcatgcatcttaaagaaagtacagcacatagaaaggtct

SEQ ID NO: 18918 - DNA, 122 bp, Homo sapiens
  misc_feature (61)..(62): /note="This region represents a CpG dinucleotide"
  misc_feature (61)..(61): /note="Nucleotide may be methylated to form 5-methylcytosine"
tgtctctcctgggcacagtccgtaaggttcagattccagactgtgactttaactggtcaccgtggctctggctggagcaggacatggtgacctggagtctccatccactcctccgatgtgca

SEQ ID NO: 18919 - DNA, 122 bp, Homo sapiens
  misc_feature (61)..(62): /note="This region represents a CpG dinucleotide"
  misc_feature (61)..(61): /note="Nucleotide may be methylated to form 5-methylcytosine"
aacatctcctcgtggagccgggactcagccactggcccatgtttctgcacctggaggaaccggtaacctggctggatggaaagaaggtaattttgatcaggggagacatcttccttctgtac

SEQ ID NO: 18920 - DNA, 122 bp, Homo sapiens
  misc_feature (61)..(62): /note="This region represents a CpG dinucleotide"
  misc_feature (61)..(61): /note="Nucleotide may be methylated to form 5-methylcytosine"
aacccctccctccctccactgtcctacctataaagtggaaaaaaataacagactccctcacggtggctgcatatactgcgtgcacagagctcaactggaactacgttgcccagaatttcctt

SEQ ID NO: 18921 - DNA, 122 bp, Homo sapiens
  misc_feature (61)..(62): /note="This region represents a CpG dinucleotide"
  misc_feature (61)..(61): /note="Nucleotide may be methylated to form 5-methylcytosine"
tctgtggcaccagctaacacggatctgagagaagccctgtcctccactcacctcacccgccgctgccaccatctcctctgtgccaactccttgtggaccgcaagaaagcatgactttgaaaa

SEQ ID NO: 18922 - DNA, 122 bp, Homo sapiens
  misc_feature (61)..(62): /note="This region represents a CpG dinucleotide"
  misc_feature (61)..(61): /note="Nucleotide may be methylated to form 5-methylcytosine"
ggtgaagagtaccacattattaccaatgcccaggacagatgccaagctgggcagtgatggcgtgcagaaaagcctcaggggaaagacacagcagaaggggagagggagcatttctgtctttg

SEQ ID NO: 18923 - DNA, 122 bp, Homo sapiens
  misc_feature (61)..(62): /note="This region represents a CpG dinucleotide"
  misc_feature (61)..(61): /note="Nucleotide may be methylated to form 5-methylcytosine"
ccggcgtccccgcagcggctgcatgtgcagttggagggagcgggtcaaagcctggcaggacgcgctcccaatcccgccattctctgcaccactcgcgataggaccaagaggatcctgcgcag

SEQ ID NO: 18924 - DNA, 122 bp, Homo sapiens
  misc_feature (61)..(62): /note="This region represents a CpG dinucleotide"
  misc_feature (61)..(61): /note="Nucleotide may be methylated to form 5-methylcytosine"
gcggcgcggtaggggaaaggagcccggctccactcacgcgcccgggggcggcactggggccgccgctgcgtctctccggctcaaaaaactgaaaaggggaaaggaaaaaaaaaaaaaaaaga

SEQ ID NO: 18925 - DNA, 122 bp, Homo sapiens
  misc_feature (61)..(62): /note="This region represents a CpG dinucleotide"
  misc_feature (61)..(61): /note="Nucleotide may be methylated to form 5-methylcytosine"
gggacaggacctgggttggggccagcaagggtgacaccccaagtggaaactgagttaccccgtgaagaagacgagttctatttatggtcagaatgccacgctcaagggccagtgaaggcctg

SEQ ID NO: 18926 - DNA, 122 bp, Homo sapiens
  misc_feature (61)..(62): /note="This region represents a CpG dinucleotide"
  misc_feature (61)..(61): /note="Nucleotide may be methylated to form 5-methylcytosine"
tgtgtgtgagtgaatttttcagagctcagctttctagagggtggagcagtgtctgtcacacgggcttctcatagctcaaactgtcatccctgctttagctcatctcttcctaattgttctct

SEQ ID NO: 18927 - DNA, 122 bp, Homo sapiens
  misc_feature (61)..(62): /note="This region represents a CpG dinucleotide"
  misc_feature (61)..(61): /note="Nucleotide may be methylated to form 5-methylcytosine"
caaacccctgacctcaagcgatccgcccgcctcagcctcccaaagtgttgggattacaggcgtgagccactgcacgcccagcctgggtggtggctttttagtaaagacaagatccagggtgt

SEQ ID NO: 18928 - DNA, 122 bp, Homo sapiens
  misc_feature (61)..(62): /note="This region represents a CpG dinucleotide"
  misc_feature (61)..(61): /note="Nucleotide may be methylated to form 5-methylcytosine"
agtcttggtttcagagttcagcaagggatatgcatggtggtggtagcgttgggacagaagcggggcactacttgagagttttgaaatatgtaatttgtcacagcaaggacaagggcaagtga

SEQ ID NO: 18929 - DNA, 122 bp, Homo sapiens
  misc_feature (61)..(62): /note="This region represents a CpG dinucleotide"
  misc_feature (61)..(61): /note="Nucleotide may be methylated to form 5-methylcytosine"
aatggacttggagaggaattctacctgatcttaagccatgacctgcttgtttgtggatagcgagatgcctgtcttcatgctaagctatggaaaatgttgccaggctgtgtgtttgccacgtg

SEQ ID NO: 18930 - DNA, 122 bp, Homo sapiens
  misc_feature (61)..(62): /note="This region represents a CpG dinucleotide"
  misc_feature (61)..(61): /note="Nucleotide may be methylated to form 5-methylcytosine"
ctaatggaaaaagaacacataatcagatcatttcaatgtcctatgataagcagagagctacgcacaaagactgatgtgagcacaaagcatgacctccctcagataccactctggaattacaa

SEQ ID NO: 18931 - DNA, 122 bp, Homo sapiens
  misc_feature (61)..(62): /note="This region represents a CpG dinucleotide"
  misc_feature (61)..(61): /note="Nucleotide may be methylated to form 5-methylcytosine"
gcacctgaaaaggagaagttgctgaacgctaactgaggaggtttcgatgacctcaccaaccgcaggcgggcagcacgcttcacctccccgcccagggcaggagcttcaggcaggggtttctc

SEQ ID NO: 18932 - DNA, 122 bp, Homo sapiens
  misc_feature (61)..(62): /note="This region represents a CpG dinucleotide"
  misc_feature (61)..(61): /note="Nucleotide may be methylated to form 5-methylcytosine"
attgataattgaaggtttcctccgtgaccctgtaacactccaatactgcccataaagaagcgggaagccagttagtgcaagatcttagagctattaatcagatagtccaaactacccaccct

SEQ ID NO: 18933 - DNA, 122 bp, Homo sapiens
  misc_feature (61)..(62): /note="This region represents a CpG dinucleotide"
  misc_feature (61)..(61): /note="Nucleotide may be methylated to form 5-methylcytosine"
ctggttatcttgagttaatgagccaccctgtcgtctggccggaggcaagagactgtaaatcgattgattgttcaacattccttcccaaagtgggacactcggcaaccttggttgtctcctaa

SEQ ID NO: 18934 - DNA, 122 bp, Homo sapiens
  misc_feature (61)..(62): /note="This region represents a CpG dinucleotide"
  misc_feature (61)..(61): /note="Nucleotide may be methylated to form 5-methylcytosine"
ctaaggagctaacatttggcttctgtctgaacttccaggggtcaagggtgagaagactttcgagcagaacattcccagcagcaaaagcaaatacaaaggcccagagatcaaaacaagattag

SEQ ID NO: 18935 - DNA, 122 bp, Homo sapiens
  misc_feature (61)..(62): /note="This region represents a CpG dinucleotide"
  misc_feature (61)..(61): /note="Nucleotide may be methylated to form 5-methylcytosine"
tatctcaccattttctcctatagaccacttcctcttttagttcaggcatatattctctggcggaaactctgaatttccagcatcttctccaaagtaggatagctatttgggaaacagaacaa

SEQ ID NO: 18936 - DNA, 122 bp, Homo sapiens
  misc_feature (61)..(62): /note="This region represents a CpG dinucleotide"
  misc_feature (61)..(61): /note="Nucleotide may be methylated to form 5-methylcytosine"
acagaaggctcacctcttgccttctaggtcacttctcacaatgtcccttcagcacctgaccgtatgcctaccggttattccttggttatattagtaataaaacaaagagtaatattaaaagc

SEQ ID NO: 18937 - DNA, 122 bp, Homo sapiens
  misc_feature (61)..(62): /note="This region represents a CpG dinucleotide"
  misc_feature (61)..(61): /note="Nucleotide may be methylated to form 5-methylcytosine"
ttaatgatataaggttctccctatgagtaacacatgcatgaggttttgttttgagctgaacgtcttttgattggatttttgtttgtttgttttttaatttttgtgggtacatagtaggtgta

SEQ ID NO: 18938 - DNA, 122 bp, Homo sapiens
  misc_feature (61)..(62): /note="This region represents a CpG dinucleotide"
  misc_feature (61)..(61): /note="Nucleotide may be methylated to form 5-methylcytosine"
gagaaattcgatctgaatatctatgaagattcttggctccacagatcagccgggaaccaacgcagaggttacttggctagagtggacgttaccaaatgtacaacgaaggatgacagaaataa

SEQ ID NO: 18939 - DNA, 122 bp, Homo sapiens
  misc_feature (61)..(62): /note="This region represents a CpG dinucleotide"
  misc_feature (61)..(61): /note="Nucleotide may be methylated to form 5-methylcytosine"
actgccctgatctcaaggataggggactcatgacattggtttcagctgtagcgagaaagacggaagtacatacagctttcaggaacagctgacctcgggggaaaccaccttactggtcagta

SEQ ID NO: 18940 - DNA, 122 bp, Homo sapiens
  misc_feature (61)..(62): /note="This region represents a CpG dinucleotide"
  misc_feature (61)..(61): /note="Nucleotide may be methylated to form 5-methylcytosine"
aacggaagggcggtgcgtggagggaactcaaggcctgattggttcctcctaagcaggatgcgatctggttggcagggcaaccggccttcagttagtgccttcagtgggtgctttcagttggt

SEQ ID NO: 18941 - DNA, 122 bp, Homo sapiens
  misc_feature (61)..(62): /note="This region represents a CpG dinucleotide"
  misc_feature (61)..(61): /note="Nucleotide may be methylated to form 5-methylcytosine"
gaggccacaggggtctcctgctgagggtgtgtgtcacacagcccagaggagaggccctcacgagcccggccatctcccatacccatggcctggggccaggctgggccttcctcctcccctgc

SEQ ID NO: 18942 - DNA, 122 bp, Homo sapiens
  misc_feature (61)..(62): /note="This region represents a CpG dinucleotide"
  misc_feature (61)..(61): /note="Nucleotide may be methylated to form 5-methylcytosine"
caaactcctggcctgaagcaatcctcacactttggcttcccaaagtgcggggattacaggcgtgattgtcccaaatgtcagcagtgtgacactgcgttaggctactattgacctcctggcaa

SEQ ID NO: 18943 - DNA, 122 bp, Homo sapiens
  misc_feature (61)..(62): /note="This region represents a CpG dinucleotide"
  misc_feature (61)..(61): /note="Nucleotide may be methylated to form 5-methylcytosine"
catgatccgcctgcctcggcctcccaaagtgttgggattacaggtgtgagccaccgcacccggcctctgagaaatatttagattgtacgcctcaaatgggcagggactgtgtcttacacttt

SEQ ID NO: 18944 - DNA, 122 bp, Homo sapiens
  misc_feature (61)..(62): /note="This region represents a CpG dinucleotide"
  misc_feature (61)..(61): /note="Nucleotide may be methylated to form 5-methylcytosine"
cccacgtcttgcgtcacgtgtcccgcaacgcaggagcgctttctctggccagcggagaagcgaggagaaagactccaaatcagtcagggagaggagtggaaggagccaaaacgtccctgcga

SEQ ID NO: 18945 - DNA, 122 bp, Homo sapiens
  misc_feature (61)..(62): /note="This region represents a CpG dinucleotide"
  misc_feature (61)..(61): /note="Nucleotide may be methylated to form 5-methylcytosine"
atgaataaactaataaatggaggagaggagacaggtctttcttataaaagaatttcaattcgtatatgtagaagaaatagaggatagaaatcatcattgaagtaccacagttattgttgcag

SEQ ID NO: 18946 - DNA, 122 bp, Homo sapiens
  misc_feature (61)..(62): /note="This region represents a CpG dinucleotide"
  misc_feature (61)..(61): /note="Nucleotide may be methylated to form 5-methylcytosine"
actgctactccttgcagcaagagcttcagtgaggatgcagcattttttatgtcctgaggacgtatgtgttgagtaagtgtttgtcaagtgaattcaggtaaagtcaatcttgcttcacctct

SEQ ID NO: 18947 - DNA, 122 bp, Homo sapiens
  misc_feature (61)..(62): /note="This region represents a CpG dinucleotide"
  misc_feature (61)..(61): /note="Nucleotide may be methylated to form 5-methylcytosine"
gttacctgaaggagatgaagaatcttcgcaaactcgttttctccaggtgccatcattacacgtcagataatgaactccaaggacggttagttgccaaattcagctctgtgttcctcaggctg

SEQ ID NO: 18948 - DNA, 122 bp, Homo sapiens
  misc_feature (61)..(62): /note="This region represents a CpG dinucleotide"
  misc_feature (61)..(61): /note="Nucleotide may be methylated to form 5-methylcytosine"
ggggggccattcgattcgcctcagttgctgctgtaataaaagtctactttttgctaaaagcgtcgtgtgttcgcgcctttcccgccagggggagcgggcccggggcggaggcggggcccagg

SEQ ID NO: 18949 - DNA, 122 bp, Homo sapiens
  misc_feature (61)..(62): /note="This region represents a CpG dinucleotide"
  misc_feature (61)..(61): /note="Nucleotide may be methylated to form 5-methylcytosine"
gctcagcaaggggtgctcaggttcaggatgttgtttgttgattcaggctcaaccaggctccgcaagaaaaccttatcaggagattttattttcatgaacaggtgccagtcttcccgccagcc

SEQ ID NO: 18950 - DNA, 122 bp, Homo sapiens
  misc_feature (61)..(62): /note="This region represents a CpG dinucleotide"
  misc_feature (61)..(61): /note="Nucleotide may be methylated to form 5-methylcytosine"
ataacgaccgcatgaagtgttccatcattagcattgatttttaacaccttgggtatgagtcgttgtcgtgtaactgtttaatattagggcataaccaagaccccctcctattatttgctctc

SEQ ID NO: 18951 - DNA, 122 bp, Homo sapiens
  misc_feature (61)..(62): /note="This region represents a CpG dinucleotide"
  misc_feature (61)..(61): /note="Nucleotide may be methylated to form 5-methylcytosine"
ttgtccccatagtgttacccaggtctgtttagagacatgcatgatcagtgtaatgaaatacgtggttttcaaagactgagcactattaaatgtgttggcagaaaggtccattgtgagaggct

SEQ ID NO: 18952 - DNA, 122 bp, Homo sapiens
  misc_feature (61)..(62): /note="This region represents a CpG dinucleotide"
  misc_feature (61)..(61): /note="Nucleotide may be methylated to form 5-methylcytosine"
accattagccaccctttaatgagcgggtgagtgccctttctgcatcagacacagtatttccgtacatcattagtgccaatcctcacaataatcctgtgttcatctccctaatttacaaagag

SEQ ID NO: 18953 - DNA, 122 bp, Homo sapiens
  misc_feature (61)..(62): /note="This region represents a CpG dinucleotide"
  misc_feature (61)..(61): /note="Nucleotide may be methylated to form 5-methylcytosine"
tatgacactctgtcgcaatgctgaactggcagtgagtcacagctcccagtcagccacgcacgagattccatgggtaaataactgatattgtatagtgtattgtgttgcaagatgattttgcc

SEQ ID NO: 18954 - DNA, 122 bp, Homo sapiens
  misc_feature (61)..(62): /note="This region represents a CpG dinucleotide"
  misc_feature (61)..(61): /note="Nucleotide may be methylated to form 5-methylcytosine"
ctgttctttctggcttcccttgccgctaggtgtggccaaatatgactaagtcctcacctccggactggaaacagaagtgatgcaaaccacctctggatctaactcttgcacactctttccat

SEQ ID NO: 18955 - DNA, 122 bp, Homo sapiens
  misc_feature (61)..(62): /note="This region represents a CpG dinucleotide"
  misc_feature (61)..(61): /note="Nucleotide may be methylated to form 5-methylcytosine"
ccttctgtcctccctgtacaatgaaggagactgaccgtaagtggaaccaggaagtgttgacgtggtcattactgcaaggaaggaggaaaaatagcagccaaaaatgccatttacgtgaaact

SEQ ID NO: 18956 - DNA, 122 bp, Homo sapiens
  misc_feature (61)..(62): /note="This region represents a CpG dinucleotide"
  misc_feature (61)..(61): /note="Nucleotide may be methylated to form 5-methylcytosine"
gatttcagggacctgatgagacaatatggtggtgaaaacagactgctggattgcaatgggcggaactgggcttagtctctggataggtgtcagttcatttcacacctgtcattgagggaaaa

SEQ ID NO: 18957 - DNA, 122 bp, Homo sapiens
  misc_feature (61)..(62): /note="This region represents a CpG dinucleotide"
  misc_feature (61)..(61): /note="Nucleotide may be methylated to form 5-methylcytosine"
cattgttatttttagacactgcaaataatttcaatgtgtcttctctctgttaactttgttcgtggtgtctttcactgaacagaaatctttaattatgatgtaataaaagtcatcactagttt

SEQ ID NO: 18958 - DNA, 122 bp, Homo sapiens
  misc_feature (61)..(62): /note="This region represents a CpG dinucleotide"
  misc_feature (61)..(61): /note="Nucleotide may be methylated to form 5-methylcytosine"
tgatcagatatcaccatcttctcattaatgtttgtgattaacattaagaagacatggttacgtgagaagtgatgcaaatgctgtatcttttaaaactttatttgaatcactcatttctggcc

SEQ ID NO: 18959 - DNA, 122 bp, Homo sapiens
  misc_feature (61)..(62): /note="This region represents a CpG dinucleotide"
  misc_feature (61)..(61): /note="Nucleotide may be methylated to form 5-methylcytosine"
agagtaaaggcacatgtaatatgtctgttgctacaggaagttttatgatctgaccatcaccggtggcattttctcttctcatctcttctgtcttgcagctcacaaggtgacaaacttgctga

SEQ ID NO: 18960 - DNA, 122 bp, Homo sapiens
  misc_feature (61)..(62): /note="This region represents a CpG dinucleotide"
  misc_feature (61)..(61): /note="Nucleotide may be methylated to form 5-methylcytosine"
aaaaaaaaagattcacagaggtttttctgtggtgttcacttacagattggatgaaagcctcgtgcagctgacagcttttgttaataactttcctcagtagagaggcagggtcaccagataga

SEQ ID NO: 18961 - DNA, 122 bp, Homo sapiens
  misc_feature (61)..(62): /note="This region represents a CpG dinucleotide"
  misc_feature (61)..(61): /note="Nucleotide may be methylated to form 5-methylcytosine"
aagggggtggagaacatgacgctgggctcctttgacggcggagcccagctatgtggcccacgccctcagccctggagataatttggttcattcacatgttggtgatgacagagatactgcag

SEQ ID NO: 18962 - DNA, 122 bp, Homo sapiens
  misc_feature (61)..(62): /note="This region represents a CpG dinucleotide"
  misc_feature (61)..(61): /note="Nucleotide may be methylated to form 5-methylcytosine"
atctgtgaaatgggatgatgatacaatacatacctgtcaagccaggcttagatgagatcacgtgtgaagggcactccccaggctggcatcacaggcagatttccatcagagtggagtgctgg

SEQ ID NO: 18963 - DNA, 122 bp, Homo sapiens
  misc_feature (61)..(62): /note="This region represents a CpG dinucleotide"
  misc_feature (61)..(61): /note="Nucleotide may be methylated to form 5-methylcytosine"
actacttttgaggtatgatatcttcctccctgagagagtgcaataaattttgggcttcctcgttttatagcttctaatgggcactaagagaacattagttggtttaattaaaatggcacaca

SEQ ID NO: 18964 - DNA, 122 bp, Homo sapiens
  misc_feature (61)..(62): /note="This region represents a CpG dinucleotide"
  misc_feature (61)..(61): /note="Nucleotide may be methylated to form 5-methylcytosine"
gtttgcatttttgaaaagctcagagatctgacagatgtgttccggccgcgatttaacatgcggctccagtgagaaggaagcagatatgacaaatggttcacttatttcagaactaaaacccc

SEQ ID NO: 18965 - DNA, 122 bp, Homo sapiens
  misc_feature (61)..(62): /note="This region represents a CpG dinucleotide"
  misc_feature (61)..(61): /note="Nucleotide may be methylated to form 5-methylcytosine"
aaaatagagctgctctgattgaaattggtggtggtgtggtaaggattagcacccagctcacgtggccacctaaggtgctagagaggccagtctgaaaactcaggaagtgagcgagtaatcag

SEQ ID NO: 18966 - DNA, 122 bp, Homo sapiens
  misc_feature (61)..(62): /note="This region represents a CpG dinucleotide"
  misc_feature (61)..(61): /note="Nucleotide may be methylated to form 5-methylcytosine"
ggtgtgtgtcctatgggtggtgaagccaacaattagtatatcctctgggcattaagcacacgacatgaccacaaagaacttttgtagctctgggctggggagtatagttatggcacctgttg

SEQ ID NO: 18967 - DNA, 122 bp, Homo sapiens
  misc_feature (61)..(62): /note="This region represents a CpG dinucleotide"
  misc_feature (61)..(61): /note="Nucleotide may be methylated to form 5-methylcytosine"
tgattacaggagtctgtctagctcattttctcacctgcttttcagtaggtctaggagcaccgtgttgagtccttaaatattttattgactaagaaaatccaagtgcatttatgaagaataat

SEQ ID NO: 18968 - DNA, 122 bp, Homo sapiens
  misc_feature (61)..(62): /note="This region represents a CpG dinucleotide"
  misc_feature (61)..(61): /note="Nucleotide may be methylated to form 5-methylcytosine"
tttcgtcatgtgccaatcaataaagcaatgccagtaagcccaagttataagcttgcaggacgtgtgataagatttcaggtgtgtgcaggagctaggtaccaaaatgggaaaaaggccactgg

SEQ ID NO: 18969 - DNA, 122 bp, Homo sapiens
  misc_feature (61)..(62): /note="This region represents a CpG dinucleotide"
  misc_feature (61)..(61): /note="Nucleotide may be methylated to form 5-methylcytosine"
aaaagcaaggaccttgttgtgttaccaatgtgtcactgaatcctaattcaatgcttcaagcgtggtaaacgttaatgaatgaataaggtttttgaaaagcaggaacattgtgttgaccttac

SEQ ID NO: 18970 - DNA, 122 bp, Homo sapiens
  misc_feature (61)..(62): /note="This region represents a CpG dinucleotide"
  misc_feature (61)..(61): /note="Nucleotide may be methylated to form 5-methylcytosine"
gttgaggtggccttctggtacagcatgaatcagcaggtttggagcactggtgcacagccccgcatgttatgtaaccatgctacgtgaggcgcattaggtgattacccatgtgagctcgtgct

SEQ ID NO: 18971 - DNA, 122 bp, Homo sapiens
  misc_feature (61)..(62): /note="This region represents a CpG dinucleotide"
  misc_feature (61)..(61): /note="Nucleotide may be methylated to form 5-methylcytosine"
ttgtaagaatttttgaaaagtagagaaatgaattgcatttctcctaaggttaagggcgggcgggtggtagggggaagaagcatacgtaaacacaggcctttaaataaacagcagttataaaa

SEQ ID NO: 18972 - DNA, 122 bp, Homo sapiens
  misc_feature (61)..(62): /note="This region represents a CpG dinucleotide"
  misc_feature (61)..(61): /note="Nucleotide may be methylated to form 5-methylcytosine"
cacagaacccctactctgggcatcctctccccggcctcatcccggttccctctccatctacgccgccagcagcactccagttccacagggtaggagacgagaccgcattcttccttgagatc

SEQ ID NO: 18973 - DNA, 122 bp, Homo sapiens
  misc_feature (61)..(62): /note="This region represents a CpG dinucleotide"
  misc_feature (61)..(61): /note="Nucleotide may be methylated to form 5-methylcytosine"
ccccgtgggtcggtgggaaccagccccttgagcacctgctgtgggcagaccctggaggtgcgagggcacgtgcatcagtcagcctcagatgactttgcccaatcaggacagcacccattcca

SEQ ID NO: 18974 - DNA, 122 bp, Homo sapiens
  misc_feature (61)..(62): /note="This region represents a CpG dinucleotide"
  misc_feature (61)..(61): /note="Nucleotide may be methylated to form 5-methylcytosine"
tgcccttatcagattgaggaagttcacttctattgctgctccactgagttgccctttctgcgtctgttgagataatcatgtggttttcctcccttattctattaatatggtgaattacatca

SEQ ID NO: 18975 - DNA, 122 bp, Homo sapiens
  misc_feature (61)..(62): /note="This region represents a CpG dinucleotide"
  misc_feature (61)..(61): /note="Nucleotide may be methylated to form 5-methylcytosine"
atacttaccacgtgctttatatatattatctcgcttaattcttgcaacaacacttagccacgtgtcatcagctggggggccagaggcagctgccagtgcagtcgagaccccactgatggata

SEQ ID NO: 18976 - DNA, 122 bp, Homo sapiens
  misc_feature (61)..(62): /note="This region represents a CpG dinucleotide"
  misc_feature (61)..(61): /note="Nucleotide may be methylated to form 5-methylcytosine"
acagataaaaaatgttacatttgctttggaaaaggtctggcaatgtctcataaagctaaacgtatacctatcctatgactcagcaattcttctcttacatatttactcaatagaattgaaaa

SEQ ID NO: 18977 - DNA, 122 bp, Homo sapiens
  misc_feature (61)..(62): /note="This region represents a CpG dinucleotide"
  misc_feature (61)..(61): /note="Nucleotide may be methylated to form 5-methylcytosine"
ttacagcatagtctaccatatctgactaatacagagcctaacccagacctaggagttagacgaccaagagtgaaaagaatatcagagaattaaaaatagttcagtgtgactggatcaaagag

SEQ ID NO: 18978 - DNA, 122 bp, Homo sapiens
  misc_feature (61)..(62): /note="This region represents a CpG dinucleotide"
  misc_feature (61)..(61): /note="Nucleotide may be methylated to form 5-methylcytosine"
aagcaaataggaaactcagtttgcatgccctgagtacactccatagtgaatttgcattgacgccaaccagttcatccaggtcaagatgtctgggaggtagagggcttcatacagctggcctg

SEQ ID NO: 18979 - DNA, 122 bp, Homo sapiens
  misc_feature (61)..(62): /note="This region represents a CpG dinucleotide"
  misc_feature (61)..(61): /note="Nucleotide may be methylated to form 5-methylcytosine"
ttgtggctgtcttgatagttccaggagataaggcagaaaacccaaagcatgaacaagagacggttatgttgcaataaggacaggaagtctatctgtccactagcctctgagcctggcatatg

SEQ ID NO: 18980 - DNA, 122 bp, Homo sapiens
  misc_feature (61)..(62): /note="This region represents a CpG dinucleotide"
  misc_feature (61)..(61): /note="Nucleotide may be methylated to form 5-methylcytosine"
attttggtttcattttcacaggctgatttttgcccttgaatgtacgattagttgtatttacgtagactgtgcaccatgtcacttctgccaagatagctgttgaaaattttcatttaaaaata

SEQ ID NO: 18981 - DNA, 122 bp, Homo sapiens
  misc_feature (61)..(62): /note="This region represents a CpG dinucleotide"
  misc_feature (61)..(61): /note="Nucleotide may be methylated to form 5-methylcytosine"
atgtaagaaccgcaagttctgaaaacattggcaatgacgatggaatccactgaatgttcccgtgtccttttctcctcttcggatagtgctggtgctccctcttttccacataggtaagcttg

SEQ ID NO: 18982 - DNA, 122 bp, Homo sapiens
  misc_feature (61)..(62): /note="This region represents a CpG dinucleotide"
  misc_feature (61)..(61): /note="Nucleotide may be methylated to form 5-methylcytosine"
tctgcactcactataggctgggagctacactagggcctggggacatgaagacaggcgacacggtccctgggctcaagatgccagacagatgtgcaaacaagtgaaatctgatgtgatatgtg

SEQ ID NO: 18983 - DNA, 122 bp, Homo sapiens
  misc_feature (61)..(62): /note="This region represents a CpG dinucleotide"
  misc_feature (61)..(61): /note="Nucleotide may be methylated to form 5-methylcytosine"
ctttccagaaacctggctttctgctctcatggccccctgagccggtggggcacattttgacgtcaggcagaccagagggtcagatcccagacccacagctcacttgctgggtgagtatgagc

SEQ ID NO: 18984 - DNA, 122 bp, Homo sapiens
  misc_feature (61)..(62): /note="This region represents a CpG dinucleotide"
  misc_feature (61)..(61): /note="Nucleotide may be methylated to form 5-methylcytosine"
aggcagagggaatggcaggtgggaagcccagaagtgacattgcgagagcacacatgagtgcgtctaactccactgaatgagcttggtatggcaccaccaagcggtagcaaagatggtggtgg

SEQ ID NO: 18985 - DNA, 122 bp, Homo sapiens
  misc_feature (61)..(62): /note="This region represents a CpG dinucleotide"
  misc_feature (61)..(61): /note="Nucleotide may be methylated to form 5-methylcytosine"
aagctgaatttgtcagcagtagagcaacagaagcagagcactaatatgacatcatttaaacgtactgacttagctcagcctgaaccagacaaacaccctggacttttcagttccaaaaaatc

SEQ ID NO: 18986 - DNA, 122 bp, Homo sapiens
  misc_feature (61)..(62): /note="This region represents a CpG dinucleotide"
  misc_feature (61)..(61): /note="Nucleotide may be methylated to form 5-methylcytosine"
aataacacatgactaaatagatgttaaagaagacctcccttggggcaggcattattcccacgtgcatggcaacagagttcgtaacagggcttggtgaacagtataatctcaacacattaact

SEQ ID NO: 18987 - DNA, 122 bp, Homo sapiens
  misc_feature (61)..(62): /note="This region represents a CpG dinucleotide"
  misc_feature (61)..(61): /note="Nucleotide may be methylated to form 5-methylcytosine"
gcgccgtccacctgtcattggatctcaagcacacctgggacactgccacattaataacagcgatgatactgtgtgtgcaggcctggcctaaatcccaggcttgagttaactgacttagcact

SEQ ID NO: 18988 - DNA, 122 bp, Homo sapiens
  misc_feature (61)..(62): /note="This region represents a CpG dinucleotide"
  misc_feature (61)..(61): /note="Nucleotide may be methylated to form 5-methylcytosine"
gctctggacagaagcctgggattagtgagctgtgattacatcactccttttctgctcctccgcctttaagagcaagcttctttatgctatccctggatggttttgttccaacccctatgcta

SEQ ID NO: 18989 - DNA, 122 bp, Homo sapiens
  misc_feature (61)..(62): /note="This region represents a CpG dinucleotide"
  misc_feature (61)..(61): /note="Nucleotide may be methylated to form 5-methylcytosine"
catcccccttgcagcgctgtcacagggaggcttaggcagccacgtggaagccacctaccccgacctttggcagaatttccaaacacaacacagtagctttaagttgattaatttggaactct

SEQ ID NO: 18990 - DNA, 122 bp, Homo sapiens
  misc_feature (61)..(62): /note="This region represents a CpG dinucleotide"
  misc_feature (61)..(61): /note="Nucleotide may be methylated to form 5-methylcytosine"
agtgtgttctgtggctctcttctcttacactaaaaataatgattctcaggtgggttcagtcgtctttaataaaccagacagtcaagaaaagacaccatgccactttggaatctcaaaaacaa

SEQ ID NO: 18991 - DNA, 122 bp, Homo sapiens
  misc_feature (61)..(62): /note="This region represents a CpG dinucleotide"
  misc_feature (61)..(61): /note="Nucleotide may be methylated to form 5-methylcytosine"
gagaccctattatttaaaaaaaaaaaaaatggtctcgagacctgtcaattccccacactacgttgtctggccacctcctgggatgtgatacatgaataaataaatggtgttagccacaaagt

SEQ ID NO: 18992 - DNA, 122 bp, Homo sapiens
  misc_feature (61)..(62): /note="This region represents a CpG dinucleotide"
  misc_feature (61)..(61): /note="Nucleotide may be methylated to form 5-methylcytosine"
cctttgtttgccagggctcctttcttcgtgccctccgggtcttgggagcacagtagttatcgggagcgtcgcctccggcgtgggctctcgggcgcgagtttcggacgaggcctgggcgcggt

SEQ ID NO: 18993 - DNA, 122 bp, Homo sapiens
  misc_feature (61)..(62): /note="This region represents a CpG dinucleotide"
  misc_feature (61)..(61): /note="Nucleotide may be methylated to form 5-methylcytosine"
aaagcaatacttatttttatattgtgtagattcaatcttgtttccttgcctagagtgggccgtgctttggagttcttatgagcatggcattcctgagaacttctctaactgcagcctcgggc

SEQ ID NO: 18994 - DNA, 122 bp, Homo sapiens
  misc_feature (61)..(62): /note="This region represents a CpG dinucleotide"
  misc_feature (61)..(61): /note="Nucleotide may be methylated to form 5-methylcytosine"
ttgccaagcccagagtccaatatgggagacaatgcacaagagcatgaatactgagagacacggtcccttgggggccatgaatggaaaagtctaccaatgaggccatagtcacatctcacttc

SEQ ID NO: 18995 - DNA, 122 bp, Homo sapiens
  misc_feature (61)..(62): /note="This region represents a CpG dinucleotide"
  misc_feature (61)..(61): /note="Nucleotide may be methylated to form 5-methylcytosine"
aaaatcagcctggcgtggtggcagatccctgtaatgccagctacttgggaggctgaggcacgagaatcactccagcctgggcgacagagagagactctgtctcacaaaaataaaagtaaaat

SEQ ID NO: 18996 - DNA, 122 bp, Homo sapiens
  misc_feature (61)..(62): /note="This region represents a CpG dinucleotide"
  misc_feature (61)..(61): /note="Nucleotide may be methylated to form 5-methylcytosine"
taggtatcactgcacttctgaaatatgcagaaaccagatagttgaacaatcctcacacagcgtgggtgagagtacacctggagcacttcctatcctatgcttagaggtcttactttgtaaaa

SEQ ID NO: 18997 - DNA, 122 bp, Homo sapiens
  misc_feature (61)..(62): /note="This region represents a CpG dinucleotide"
  misc_feature (61)..(61): /note="Nucleotide may be methylated to form 5-methylcytosine"
acgtcatagcccatgccttcaggctatttgcattgcatatgggggaatgaaagaagtaaacgtctatgatacagtagaatgtatcacattatgagcacaaggcaggaaataatgataaatga

SEQ ID NO: 18998 - DNA, 122 bp, Homo sapiens
  misc_feature (61)..(62): /note="This region represents a CpG dinucleotide"
  misc_feature (61)..(61): /note="Nucleotide may be methylated to form 5-methylcytosine"
atgggggaggagtcactaataagaatgagtggcagggacagggcggccttgtaacgccctcggtgttggaagggaagaccgtacagcgcgatggggaccagggcggcgggccgcagccaggg

SEQ ID NO: 18999 - DNA, 122 bp, Homo sapiens
  misc_feature (61)..(62): /note="This region represents a CpG dinucleotide"
  misc_feature (61)..(61): /note="Nucleotide may be methylated to form 5-methylcytosine"
tccctgtttgggggagatgtgtggtcctggtgcatacaagcctgcacacatgaccacatgcgcactgcaaacctccgggggatcggcctcctgggggctgagtgcttgcttgggcagctcta

SEQ ID NO: 19000 - DNA, 122 bp, Homo sapiens
  misc_feature (61)..(62): /note="This region represents a CpG dinucleotide"
  misc_feature (61)..(61): /note="Nucleotide may be methylated to form 5-methylcytosine"
ccctctctcccgtcattaatattggtgacggttcagctggcgcggcgcaccctggcgcagcggagggaggcccggccccggcccccggcgcctcccccgctcccgcccaggcctccacgccc

SEQ ID NO: 19001 - DNA, 122 bp, Homo sapiens
  misc_feature (61)..(62): /note="This region represents a CpG dinucleotide"
  misc_feature (61)..(61): /note="Nucleotide may be methylated to form 5-methylcytosine"
tcaagtgtgctggaaagtgcggcattggaaaggctgatgtgataaaggagataacatgggcgaagctcctgacacatgcctgaaacctagtgtgggttcaacaagcatgaattctctctcac

SEQ ID NO: 19002 - DNA, 122 bp, Homo sapiens
  misc_feature (61)..(62): /note="This region represents a CpG dinucleotide"
  misc_feature (61)..(61): /note="Nucleotide may be methylated to form 5-methylcytosine"
accttgctttaggtcctttccaccttttaccaggaccagtttctaatgattctgtttctccgtcttgcctcctatgcacaccaatttattgtccatgctgtagagaaagaaaactttttgaa

SEQ ID NO: 19003 - DNA, 122 bp, Homo sapiens
  misc_feature (61)..(62): /note="This region represents a CpG dinucleotide"
  misc_feature (61)..(61): /note="Nucleotide may be methylated to form 5-methylcytosine"
tgaactcctgacctcaggtggtacgcccgccttggcctcccaaagtgctgggattacaggcgtaagcccccatgcccggctgattatacatactacatagcagacatatctgctcagtttct

SEQ ID NO: 19004 - DNA, 122 bp, Homo sapiens
  misc_feature (61)..(62): /note="This region represents a CpG dinucleotide"
  misc_feature (61)..(61): /note="Nucleotide may be methylated to form 5-methylcytosine"
tctcttagaaataatcacagctaggcctctttataaccggcgagtctttttcctttcacacgccatttgcaggcgcgtggcatggtatttgtaactaattttcagtagcaagtgggtcactg

SEQ ID NO: 19005 - DNA, 122 bp, Homo sapiens
  misc_feature (61)..(62): /note="This region represents a CpG dinucleotide"
  misc_feature (61)..(61): /note="Nucleotide may be methylated to form 5-methylcytosine"
tgcaaagaaagagggtcccgaaacgtgagtactcagcaggtgacagacacttggctaagccgttgctcctggagtcctcaaagcaactgcaaagtattgtccccatttaaaggatgggaaaa

SEQ ID NO: 19006 - DNA, 122 bp, Homo sapiens
  misc_feature (61)..(62): /note="This region represents a CpG dinucleotide"
  misc_feature (61)..(61): /note="Nucleotide may be methylated to form 5-methylcytosine"
gcgactagcccgtcatagcctgcctgtggtctggtggttggccatttgcctctggctcagcgtggcgattgtttcattattttgcattcttttgttgttgttgttttttgttgttttttttt

SEQ ID NO: 19007 - DNA, 122 bp, Homo sapiens
  misc_feature (61)..(62): /note="This region represents a CpG dinucleotide"
  misc_feature (61)..(61): /note="Nucleotide may be methylated to form 5-methylcytosine"
tgcaggtgcagtcagccctagcctttttgggaacagagaatgatgttgaactgaagggggcgctagatttagaaacctgtgagaagcaagatataatgccagaagtggacaagcagtctggt

SEQ ID NO: 19008 - DNA, 122 bp, Homo sapiens
  misc_feature (61)..(62): /note="This region represents a CpG dinucleotide"
  misc_feature (61)..(61): /note="Nucleotide may be methylated to form 5-methylcytosine"
agtggtttgtagttctcctttcacctccctagttagctgtattcataggtattttcttttcgtggcaattgcaaatgatgggagtttattcctgatttggctctctgcttggctgttattag

SEQ ID NO: 19009 - DNA, 122 bp, Homo sapiens
  misc_feature (61)..(62): /note="This region represents a CpG dinucleotide"
  misc_feature (61)..(61): /note="Nucleotide may be methylated to form 5-methylcytosine"
gagtggaggacaggggctgaaggtgagccctgagaaggcctcatggcactgcacacccaccgtccctgccagtgtgcaatcatggcctgcatcctggccccactcccaggccatggggtccc

SEQ ID NO: 19010 - DNA, 122 bp, Homo sapiens
  misc_feature (61)..(62): /note="This region represents a CpG dinucleotide"
  misc_feature (61)..(61): /note="Nucleotide may be methylated to form 5-methylcytosine"
aagaggcatcaggctgctatttttcaaattatgcaggattgatttagtgtagactgccaccgaacattcttcataaacctgctatgttaaaatgtaaattcttaattcaataattttcctcc

SEQ ID NO: 19011 - DNA, 122 bp, Homo sapiens
  misc_feature (61)..(62): /note="This region represents a CpG dinucleotide"
  misc_feature (61)..(61): /note="Nucleotide may be methylated to form 5-methylcytosine"
ctcactctctcatatttcaaaaacgaaacactgtttagttatctcaaatgaaaagtgcctcgaggacaaggaaccaggacttggagttttatcacccacagtgttcaggtagcccagtatcc

SEQ ID NO: 19012 - DNA, 122 bp, Homo sapiens
  misc_feature (61)..(62): /note="This region represents a CpG dinucleotide"
  misc_feature (61)..(61): /note="Nucleotide may be methylated to form 5-methylcytosine"
ttcacctaggacctcattatatactaataaacatactgaatcacacacccaccaataccacgacagttctggggaaatccatatttggtataaaaatgggtgacaccacagttctgagaaat

SEQ ID NO: 19013 - DNA, 122 bp, Homo sapiens
  misc_feature (61)..(62): /note="This region represents a CpG dinucleotide"
  misc_feature (61)..(61): /note="Nucleotide may be methylated to form 5-methylcytosine"
tggctttccatatctctgctctgatttatcaatttttattttacttcctctattccaaaccgtgaggtcatcctcccagctggcctcactcttctccactttggtttcctctgtggttccag

SEQ ID NO: 19014 - DNA, 122 bp, Homo sapiens
  misc_feature (61)..(62): /note="This region represents a CpG dinucleotide"
  misc_feature (61)..(61): /note="Nucleotide may be methylated to form 5-methylcytosine"
gccaacacccttatgacaactccttttccatggcagacacttttagttgtgagcttgtgccgcttgcctagctgcattcaaacagggaggttttaaatatctgaattgttttttctaaacag

SEQ ID NO: 19015 - DNA, 122 bp, Homo sapiens
  misc_feature (61)..(62): /note="This region represents a CpG dinucleotide"
  misc_feature (61)..(61): /note="Nucleotide may be methylated to form 5-methylcytosine"
ccccgggtgccctctcctgcgcctgctcccctgggagagagtgcgctgctgctgactccacggtgtgctgacacacaggaagaaaggcctcaggcagtgcacactgagcccgggactgtttc

SEQ ID NO: 19016 - DNA, 122 bp, Homo sapiens
  misc_feature (61)..(62): /note="This region represents a CpG dinucleotide"
  misc_feature (61)..(61): /note="Nucleotide may be methylated to form 5-methylcytosine"
ggtttcagttcttatgccttcaagtagaactgaacgatgctccccccacccccgcccctccgcccgtgcttggaagggcctggtaaaatcaagagtaaaatgcaatcccaagagatgaacta

SEQ ID NO: 19017 - DNA, 122 bp, Homo sapiens
  misc_feature (61)..(62): /note="This region represents a CpG dinucleotide"
  misc_feature (61)..(61): /note="Nucleotide may be methylated to form 5-methylcytosine"
aaagacaatatttgtacaaaccagcagaaagctgatgtaagaatttacttaacatcagctcgtaaaggccttgtaaaggaagtaaaaacttaaacaaataagtaccaagacaaatatataaa

SEQ ID NO: 19018 - DNA, 122 bp, Homo sapiens
  misc_feature (61)..(62): /note="This region represents a CpG dinucleotide"
  misc_feature (61)..(61): /note="Nucleotide may be methylated to form 5-methylcytosine"
cagaggacaccaagcagcctggtcttggacagggtgttctgcagatggccattacctgagcgtgctggcctatgggctggccctgagcacccacagccacagctcccacacccaaccttaca

SEQ ID NO: 19019 - DNA, 122 bp, Homo sapiens
  misc_feature (61)..(62): /note="This region represents a CpG dinucleotide"
  misc_feature (61)..(61): /note="Nucleotide may be methylated to form 5-methylcytosine"
cctcctagcacctgccatcatattgggtatttgtcttattgtttggcctgattcctcctccgttacttaggcaccaggagagtagagaccttgttggtcttgttcaccatctagaagatact

SEQ ID NO: 19020 - DNA, 122 bp, Homo sapiens
  misc_feature (61)..(62): /note="This region represents a CpG dinucleotide"
  misc_feature (61)..(61): /note="Nucleotide may be methylated to form 5-methylcytosine"
cgcgaggcgcggggcgcgaggccagccctggaacggcggggtgtggggggcgggcagctgcggagcccccagaggaaagcaggggcaggcaggggggtgccgaggtaatgggccgggcctgg

SEQ ID NO: 19021 - DNA, 122 bp, Homo sapiens
  misc_feature (61)..(62): /note="This region represents a CpG dinucleotide"
  misc_feature (61)..(61): /note="Nucleotide may be methylated to form 5-methylcytosine"
agtcaaatctaatttgaaagttgaaggtctaaaacagataaatgcaagagctactgtgatcgaagcagacaaattgaggagagcaaaatcatttaatcaaagaggaagacgtgacccagctc

SEQ ID NO: 19022 - DNA, 122 bp, Homo sapiens
  misc_feature (61)..(62): /note="This region represents a CpG dinucleotide"
  misc_feature (61)..(61): /note="Nucleotide may be methylated to form 5-methylcytosine"
atgttcctctactgcaaggcaatcctgtatgtgtgcatcatttggccctgttcacatcatcgtttgggaaatggagttcagggaagtggctcaaatgttgacactggctactgctactgctg

SEQ ID NO: 19023 - DNA, 122 bp, Homo sapiens
  misc_feature (61)..(62): /note="This region represents a CpG dinucleotide"
  misc_feature (61)..(61): /note="Nucleotide may be methylated to form 5-methylcytosine"
ccccagtgtggcctcctggttccctccccacaggcgcccctctgggggttggagggctgacgcacaccctgcctgagatcccagccgcctggaagctgataaggagccctggcctcattaca

SEQ ID NO: 19024 - DNA, 122 bp, Homo sapiens
  misc_feature (61)..(62): /note="This region represents a CpG dinucleotide"
  misc_feature (61)..(61): /note="Nucleotide may be methylated to form 5-methylcytosine"
ttgttatgcaggactttccattaaaaaaaaaaaaaaaatcgaaatattttaactcaagtacgtttaattcaccacagaggagctaaaagaaaagagagggggttggtaaaatacagtatact

SEQ ID NO: 19025 - DNA, 122 bp, Homo sapiens
  misc_feature (61)..(62): /note="This region represents a CpG dinucleotide"
  misc_feature (61)..(61): /note="Nucleotide may be methylated to form 5-methylcytosine"
aagacaagacggtgtttcatcagccagtgttgcagaactcggcccctctcaggctctgcacgtaccccatcccccgacaaagcctagctctccctctctttctgattcatgggaactaccta

SEQ ID NO: 19026 - DNA, 122 bp, Homo sapiens
  misc_feature (61)..(62): /note="This region represents a CpG dinucleotide"
  misc_feature (61)..(61): /note="Nucleotide may be methylated to form 5-methylcytosine"
cttacagcattgaacaaacttcctcacagtaacctggcaaggagggcagagcctatgttacgatcccatttgagagagcagaggtgaggcccaggacttgagacagatcccttggctggtac

SEQ ID NO: 19027 - DNA, 122 bp, Homo sapiens
  misc_feature (61)..(62): /note="This region represents a CpG dinucleotide"
  misc_feature (61)..(61): /note="Nucleotide may be methylated to form 5-methylcytosine"
gctctcacaaaggggctctcttgctgggctctatttcttaggaattcgtttgagaaacttcgtattcctctgccctggacacttccaattgtggggtgaggggaaagagaaccaagaaaagt

SEQ ID NO: 19028 - DNA, 122 bp, Homo sapiens
  misc_feature (61)..(62): /note="This region represents a CpG dinucleotide"
  misc_feature (61)..(61): /note="Nucleotide may be methylated to form 5-methylcytosine"
catctgccggaaaatcttcatactaaaactacaaatcactggtgatcatgccacggaaggcgccctctatggttgtgcaaggtataacttgcacgatcacacagtgaccctctaggggatat

SEQ ID NO: 19029 - DNA, 122 bp, Homo sapiens
  misc_feature (61)..(62): /note="This region represents a CpG dinucleotide"
  misc_feature (61)..(61): /note="Nucleotide may be methylated to form 5-methylcytosine"
gtgatgtcccctccctccccctttcatgaaattcagatgtcattagagtaggctcctaaccgtccttaccacatcagccctaggatgcctcactgagggcatgcgctcagtcatcaagagca

SEQ ID NO: 19030 - DNA, 122 bp, Homo sapiens
  misc_feature (61)..(62): /note="This region represents a CpG dinucleotide"
  misc_feature (61)..(61): /note="Nucleotide may be methylated to form 5-methylcytosine"
aaaaacttattcagtccagtgactggtgactaagggaacgatggagcacagggaattgggcgggatctagactcctaataatgcctccttagccaatgaaaagcatttcctattgagacccc

SEQ ID NO: 19031 - DNA, 122 bp, Homo sapiens
  misc_feature (61)..(62): /note="This region represents a CpG dinucleotide"
  misc_feature (61)..(61): /note="Nucleotide may be methylated to form 5-methylcytosine"
caacccatgaagaactgaatgaaattccacaagccagccaggcctgctgtcagtgatcagcggccctccattgccactgacctgaccagccagcttccttcagtcaatccaaatgaggccag

SEQ ID NO: 19032 - DNA, 122 bp, Homo sapiens
  misc_feature (61)..(62): /note="This region represents a CpG dinucleotide"
  misc_feature (61)..(61): /note="Nucleotide may be methylated to form 5-methylcytosine"
atccacccaccttggcctccaacagtgctgggattacaggcatgaatgagtcaccacactcggcctcatattgccaactccttaatggtagagaacaaaagtaaatagatttatgaaccatt

SEQ ID NO: 19033 - DNA, 122 bp, Homo sapiens
  misc_feature (61)..(62): /note="This region represents a CpG dinucleotide"
  misc_feature (61)..(61): /note="Nucleotide may be methylated to form 5-methylcytosine"
ctcctggcctcaagtgatccacccacctcagcctcccaaagtacagggattataggcgtgcgccactgtgcccggccgagaacaatttgtcacaagcttacttttctagttttgccaatgca

SEQ ID NO: 19034 - DNA, 122 bp, Homo sapiens
  misc_feature (61)..(62): /note="This region represents a CpG dinucleotide"
  misc_feature (61)..(61): /note="Nucleotide may be methylated to form 5-methylcytosine"
agaactgcagagagacctgttgctcctagctgggctcttaatgccaaacaaaagaagcaacgtgtcagtaattcagttggtggatgccttggagccattcaagatgcattttgctcattagc

SEQ ID NO: 19035 - DNA, 122 bp, Homo sapiens
  misc_feature (61)..(62): /note="This region represents a CpG dinucleotide"
  misc_feature (61)..(61): /note="Nucleotide may be methylated to form 5-methylcytosine"
tgcattctactgaggacagagggagagaaaagaatgggtctgcagtccaagctctgtgcacggatcccaaacactcccatggggactggagttgggagggagaaagaggagaaggggagagt

SEQ ID NO: 19036 - DNA, 122 bp, Homo sapiens
  misc_feature (61)..(62): /note="This region represents a CpG dinucleotide"
  misc_feature (61)..(61): /note="Nucleotide may be methylated to form 5-methylcytosine"
tcttacaaatcacttgtaaatctactaatcttttatcgaatacttctttctcctcttaaacgtcctctgaaatacagaatggttttctgaaaattctattttcaaaacaaatggaaccacaa

SEQ ID NO: 19037 - DNA, 122 bp, Homo sapiens
  misc_feature (61)..(62): /note="This region represents a CpG dinucleotide"
  misc_feature (61)..(61): /note="Nucleotide may be methylated to form 5-methylcytosine"
ctctgtagggcaagccagcaggctggagattcaggtaagagttaatgttgcagtcccaaacgtaaagacttgaaacttgggcagaatgtctatattgccatctggaggcaggattccttctt

SEQ ID NO: 19038 - DNA, 122 bp, Homo sapiens
  misc_feature (61)..(62): /note="This region represents a CpG dinucleotide"
  misc_feature (61)..(61): /note="Nucleotide may be methylated to form 5-methylcytosine"
atggcaaaaagggactctgcagtctcaacttgtgacgaagttaagaagcatgagatggggcgataatcctggatggttcaggcgggaccaatgtcctcactgggctgctaataaaggaaagc

SEQ ID NO: 19039 - DNA, 122 bp, Homo sapiens
  misc_feature (61)..(62): /note="This region represents a CpG dinucleotide"
  misc_feature (61)..(61): /note="Nucleotide may be methylated to form 5-methylcytosine"
cattgctgggaaggagaacatccagggcagtgaggcaggtgctcaggcagagtccagcttcgtggggctgcggtgtggcctggacctggggcatgtcaaaggaaagaccttgtggattgcac

SEQ ID NO: 19040 - DNA, 122 bp, Homo sapiens
  misc_feature (61)..(62): /note="This region represents a CpG dinucleotide"
  misc_feature (61)..(61): /note="Nucleotide may be methylated to form 5-methylcytosine"
gacgaccagaggtcacttttgttgccatcttggtttcagttttggctggcttctttactccgtcctgttttgtcagcgggatctttgtgacctttaccttgtgctgaccttccttgttacgc

SEQ ID NO: 19041 - DNA, 122 bp, Homo sapiens
  misc_feature (61)..(62): /note="This region represents a CpG dinucleotide"
  misc_feature (61)..(61): /note="Nucleotide may be methylated to form 5-methylcytosine"
gtttagatacacaaatacttaccgttgtgttacaactgcctacagtatttggtacagcaacgtgctgccccagtgtgtagtccaggagcaataggctaatgccacatagcctgggggtgtag

SEQ ID NO: 19042 - DNA, 122 bp, Homo sapiens
  misc_feature (61)..(62): /note="This region represents a CpG dinucleotide"
  misc_feature (61)..(61): /note="Nucleotide may be methylated to form 5-methylcytosine"
cactgtagttcctgctacagacaaaactgactctactctaattacctctgagatcaccagcgattgtgatcaagcagagaatatgggcagaccacaactcagcagaaaaacacctaagtttt

SEQ ID NO: 19043 - DNA, 122 bp, Homo sapiens
  misc_feature (61)..(62): /note="This region represents a CpG dinucleotide"
  misc_feature (61)..(61): /note="Nucleotide may be methylated to form 5-methylcytosine"
tacaagctaactatgagtcagaacacagtgatggggagaaatgtgtgtatacgatgctggcgtgtgtactgcttgcttatagaaagaagtgagtgtgtattcactctggctgtgagttctgt

SEQ ID NO: 19044 - DNA, 122 bp, Homo sapiens
  misc_feature (61)..(62): /note="This region represents a CpG dinucleotide"
  misc_feature (61)..(61): /note="Nucleotide may be methylated to form 5-methylcytosine"
tggagactctgggctgcagaatttgcttaataaaagctgcgtctagagataattgagacacgttatatggacttcaataaatttgaaacagcagtcaatatcagaagtaaactggactaaag

SEQ ID NO: 19045 - DNA, 122 bp, Homo sapiens
  misc_feature (61)..(62): /note="This region represents a CpG dinucleotide"
  misc_feature (61)..(61): /note="Nucleotide may be methylated to form 5-methylcytosine"
gcagcagccagcactggggagcagagagctggacctatgttctctggctttctgctttggcgggagaatggggtctaagaataaacaaactaagagagtagagccaaaagggaactttgata

SEQ ID NO: 19046 - DNA, 122 bp, Homo sapiens
  misc_feature (61)..(62): /note="This region represents a CpG dinucleotide"
  misc_feature (61)..(61): /note="Nucleotide may be methylated to form 5-methylcytosine"
ttagggggtgctttgtgccacttcccttggcagggtggggtcccctgggaaaccaacgctcgcctcacagtgagctcagagcgaagtcctggttccaggctgatgctctaggctcaaaataa

SEQ ID NO: 19047 - DNA, 122 bp, Homo sapiens
  misc_feature (61)..(62): /note="This region represents a CpG dinucleotide"
  misc_feature (61)..(61): /note="Nucleotide may be methylated to form 5-methylcytosine"
aataaaggactcctgaattagtctcagagtgtggcattctctctatgacttgctcggttacgacatttggaagccccagagagattcgccaccgggtgaagacctgactcattccgggcttc

SEQ ID NO: 19048 - DNA, 122 bp, Homo sapiens
  misc_feature (61)..(62): /note="This region represents a CpG dinucleotide"
  misc_feature (61)..(61): /note="Nucleotide may be methylated to form 5-methylcytosine"
cagggtgcttccgcagcagaaagcatgcacattgctgtttttagaattccttctggtatacggtctactcagcacctcaggggaaaagcatgtgacactctcagtcatatgagactacagct

SEQ ID NO: 19049 - DNA, 122 bp, Homo sapiens
  misc_feature (61)..(62): /note="This region represents a CpG dinucleotide"
  misc_feature (61)..(61): /note="Nucleotide may be methylated to form 5-methylcytosine"
gtctcagaaagtgcgggtggctgcgtcgaacggtggtggctcagaggaagagattggggccggcagcgacctaggtacctcactctgggtgggacccagaggttgtaacgttgtctatatat

SEQ ID NO: 19050 - DNA, 122 bp, Homo sapiens
  misc_feature (61)..(62): /note="This region represents a CpG dinucleotide"
  misc_feature (61)..(61): /note="Nucleotide may be methylated to form 5-methylcytosine"
tccactgggaggcctggccccagcagcatctggagggccggtggcgcgggaatttgaaaccgttgcgacagacccgttaggcgattcctgtgggggagacgttgtctgctgggagctgggct

SEQ ID NO: 19051 - DNA, 122 bp, Homo sapiens
  misc_feature (61)..(62): /note="This region represents a CpG dinucleotide"
  misc_feature (61)..(61): /note="Nucleotide may be methylated to form 5-methylcytosine"
agatgaaacaaacaaaaaaagacagagacaaaataatgagcaaagcactatacctaaatacgaagaataaatcagaggaatgagaaaaaaatgacttcaaagttttgaagttcaaagttaga

SEQ ID NO: 19052 - DNA, 122 bp, Homo sapiens
  misc_feature (61)..(62): /note="This region represents a CpG dinucleotide"
  misc_feature (61)..(61): /note="Nucleotide may be methylated to form 5-methylcytosine"
aagtgtgtttccaccagcatcaccataaattgaacaatgcactgtgttacgacattatgacgtcgatgtggtttggatttgtgtctccattgttggaggagggggcctggtgggaggtaatc

SEQ ID NO: 19053 - DNA, 122 bp, Homo sapiens
  misc_feature (61)..(62): /note="This region represents a CpG dinucleotide"
  misc_feature (61)..(61): /note="Nucleotide may be methylated to form 5-methylcytosine"
atgaaaatgacagctaaatactaaagtaagccatgccatttcctacttctccattcttggcgcacactgtccactctgtcaggtatgtctcctgagctccaccctccctaccctgtctactt

SEQ ID NO: 19054 - DNA, 122 bp, Homo sapiens
  misc_feature (61)..(62): /note="This region represents a CpG dinucleotide"
  misc_feature (61)..(61): /note="Nucleotide may be methylated to form 5-methylcytosine"
acttgtagaaaagcttctcatttactgaggagtaaggcgtaaaagcgggtcacgggcgaacgcatatgagaaactgggtccatatctgagctctgccatcgtcagtgtgactctaagcaagg

SEQ ID NO: 19055 - DNA, 122 bp, Homo sapiens
  misc_feature (61)..(62): /note="This region represents a CpG dinucleotide"
  misc_feature (61)..(61): /note="Nucleotide may be methylated to form 5-methylcytosine"
tcccacccccaccccttcattcactctagaaatatttattgagtcctcctgtgaatcaggcgcagtttaggcccttgagacacttcagtgaagctacccaaatatgtacacaagccctgcac

SEQ ID NO: 19056 - DNA, 122 bp, Homo sapiens
  misc_feature (61)..(62): /note="This region represents a CpG dinucleotide"
  misc_feature (61)..(61): /note="Nucleotide may be methylated to form 5-methylcytosine"
tgggctattcttatgccttcaggaaacccacctttaccacctggctgttgtgactggcatcgctgaggctgtttctttgtgtataaaatcgaataaggacacatcacgtgctagcaatccac

SEQ ID NO: 19057 - DNA, 122 bp, Homo sapiens
  misc_feature (61)..(62): /note="This region represents a CpG dinucleotide"
  misc_feature (61)..(61): /note="Nucleotide may be methylated to form 5-methylcytosine"
cttaaagaatagtgcttaagtaagctccttagcagagcattcaacttactccagttccaccgtggctctgtggtggaactggctttcagattcgcttttgcagatgccatgttctcaccaga

SEQ ID NO: 19058 - DNA, 122 bp, Homo sapiens
  misc_feature (61)..(62): /note="This region represents a CpG dinucleotide"
  misc_feature (61)..(61): /note="Nucleotide may be methylated to form 5-methylcytosine"
aagaagatagtggttgcttagagcgggaggtggggatgatttgggaaatgactcctgatacgtaaagggtttctttctggcatgatgggaatgttctaaaattagattgtggtgatggttgc

SEQ ID NO: 19059 - DNA, 122 bp, Homo sapiens
  misc_feature (61)..(62): /note="This region represents a CpG dinucleotide"
  misc_feature (61)..(61): /note="Nucleotide may be methylated to form 5-methylcytosine"
gaggaaacaaccaaataaattaactggataaataagtcagtgaatgaaacaaattatgagcgaatagatagacaaagggatggataattgatggatatattacagctagtgaataaaagagt

SEQ ID NO: 19060 - DNA, 122 bp, Homo sapiens
  misc_feature (61)..(62): /note="This region represents a CpG dinucleotide"
  misc_feature (61)..(61): /note="Nucleotide may be methylated to form 5-methylcytosine"
gtttgtgtttaagcattccctcgcaatatttgcaacccaaaccttgtagcatggagtcagcgcctgagaaactgggaaggacatctgacccaaagccaaaccgccagtactagatgtagaaa

SEQ ID NO: 19061 - DNA, 122 bp, Homo sapiens
  misc_feature (61)..(62): /note="This region represents a CpG dinucleotide"
  misc_feature (61)..(61): /note="Nucleotide may be methylated to form 5-methylcytosine"
gggccatgactcaatgcacccaaattctctagattgctatgtctctactcgctaagccttcgggaacaacaagcacagaacttttagggtgctgtctcactgatgtcggcgttagctctggt

SEQ ID NO: 19062 - DNA, 122 bp, Homo sapiens
  misc_feature (61)..(62): /note="This region represents a CpG dinucleotide"
  misc_feature (61)..(61): /note="Nucleotide may be methylated to form 5-methylcytosine"
tgactaagaaaagtaatttttggtcgagccggggggctcctgccttaatcccagcactttcgggggccaaggcgcgcggatcacttgaggtcaggagttggagaccagcccggccaacatga

SEQ ID NO: 19063 - DNA, 122 bp, Homo sapiens
  misc_feature (61)..(62): /note="This region represents a CpG dinucleotide"
  misc_feature (61)..(61): /note="Nucleotide may be methylated to form 5-methylcytosine"
ttgtccctttcttggcaatacttcccctaaatagcattattttgtcatgttagattgactcgtgaaattaaattccttcatttatttccttccattttactgtctgatcatcaaagcaatgt

SEQ ID NO: 19064 - DNA, 122 bp, Homo sapiens
  misc_feature (61)..(62): /note="This region represents a CpG dinucleotide"
  misc_feature (61)..(61): /note="Nucleotide may be methylated to form 5-methylcytosine"
ctaatggctctacataagagagttttatcacttccctggttccaaacgccagaaagaccacgccagctatccagagcagacaccgaatacaggagccatacagcatgcggaagcctccacca

SEQ ID NO: 19065 - DNA, 122 bp, Homo sapiens
  misc_feature (61)..(62): /note="This region represents a CpG dinucleotide"
  misc_feature (61)..(61): /note="Nucleotide may be methylated to form 5-methylcytosine"
tgtgggagaacaaactaactgagctgcctctcacctaggatactcctacagcccaaactacgagttcaagagaattctatcttggaaaggactgagtcttattagactgcttatccctaata

SEQ ID NO: 19066 - DNA, 122 bp, Homo sapiens
  misc_feature (61)..(62): /note="This region represents a CpG dinucleotide"
  misc_feature (61)..(61): /note="Nucleotide may be methylated to form 5-methylcytosine"
cggagaggaagaaagaaagagggagtggtacagagaaggttggggagaagccacagcttgcgagctgggggtataatgaatgatttccaggatctttaggtcctttaaatttgggggtgaga

SEQ ID NO: 19067 - DNA, 122 bp, Homo sapiens
  misc_feature (61)..(62): /note="This region represents a CpG dinucleotide"
  misc_feature (61)..(61): /note="Nucleotide may be methylated to form 5-methylcytosine"
taaataatccatggattaccaacttctcagcaatggtgtaaattcttctgctaaataacccgtgggttaaagaggacatcacattggaaattccagagtacttaaagttaagtgtatcttct

SEQ ID NO: 19068 - DNA, 122 bp, Homo sapiens
  misc_feature (61)..(62): /note="This region represents a CpG dinucleotide"
  misc_feature (61)..(61): /note="Nucleotide may be methylated to form 5-methylcytosine"
aacgggataaagaaacacagaagaccaaataatgaagaaggactagaaaacatttttgtacgtacttcatatgtgaagctactgctctggggggagatccatccagtgaaagcacgggcctg

SEQ ID NO: 19069 - DNA, 122 bp, Homo sapiens
  misc_feature (61)..(62): /note="This region represents a CpG dinucleotide"
  misc_feature (61)..(61): /note="Nucleotide may be methylated to form 5-methylcytosine"
tttgtatgacataaaaatcagaataagaagtacctgacatactttctacatctgtagttgcggaagacattttaataggtaagagcaaaagcacaagcctgcatacttcttttttaaccctg

SEQ ID NO: 19070 - DNA, 122 bp, Homo sapiens
  misc_feature (61)..(62): /note="This region represents a CpG dinucleotide"
  misc_feature (61)..(61): /note="Nucleotide may be methylated to form 5-methylcytosine"
cctgccatgtgccaggcataggctgagcattctacatatatggtctttatgagagccctacgaagcaggtgctattttagtaaccctgtttaacagatgagtaaagaggtttagagagatga

SEQ ID NO: 19071 - DNA, 122 bp, Homo sapiens
  misc_feature (61)..(62): /note="This region represents a CpG dinucleotide"
  misc_feature (61)..(61): /note="Nucleotide may be methylated to form 5-methylcytosine"
atgaccaatcttgattcatctcagaatggacacagagaatccttgcaatccagagttcaccgtcactgcccttactgtgtaagagcacggtctccacagccacatttcctctaggctctgtc

SEQ ID NO: 19072 - DNA, 122 bp, Homo sapiens
  misc_feature (61)..(62): /note="This region represents a CpG dinucleotide"
  misc_feature (61)..(61): /note="Nucleotide may be methylated to form 5-methylcytosine"
ttactgaagctgaaccagcaaagtaccaggatccagcttactggatcgcactgatacatccgtctctattcagataactcacctttcctctgccttcaaaacacagatttgactgccacaag

SEQ ID NO: 19073 - DNA, 122 bp, Homo sapiens
  misc_feature (61)..(62): /note="This region represents a CpG dinucleotide"
  misc_feature (61)..(61): /note="Nucleotide may be methylated to form 5-methylcytosine"
tcaatgttatttctatttacaatgaaagctgctgctgtgctacacttttacacaagagggcgtgattgaaactgatataagacaggctatgctgatagtactactgcattttcatataaact

SEQ ID NO: 19074 - DNA, 122 bp, Homo sapiens
  misc_feature (61)..(62): /note="This region represents a CpG dinucleotide"
  misc_feature (61)..(61): /note="Nucleotide may be methylated to form 5-methylcytosine"
ggcagggttccagacacagtagcctgcctgccccaacagctggggttgaaggtatgagaacgcctaggaacaaggaaaatcctgcacagcagaactggggctggggtcctcagtaaactgct

SEQ ID NO: 19075 - DNA, 122 bp, Homo sapiens
  misc_feature (61)..(62): /note="This region represents a CpG dinucleotide"
  misc_feature (61)..(61): /note="Nucleotide may be methylated to form 5-methylcytosine"
ggcattactctttgacaatatcaacagcagctccaagcaggttgcagagggcagggttagcgggtggacgctgatgtcactttcccacaagctgacaagtctggaacacaccaacacattaa

SEQ ID NO: 19076 - DNA, 122 bp, Homo sapiens
  misc_feature (61)..(62): /note="This region represents a CpG dinucleotide"
  misc_feature (61)..(61): /note="Nucleotide may be methylated to form 5-methylcytosine"
cacactcacccttgcttgctctgcttcaaccacaggggcagacttgcctttctgtgaacacgccaagcatgctgtcactgcaaggattcatatgtcctgtcccctctgctgagatgctcttc

SEQ ID NO: 19077 - DNA, 122 bp, Homo sapiens
  misc_feature (61)..(62): /note="This region represents a CpG dinucleotide"
  misc_feature (61)..(61): /note="Nucleotide may be methylated to form 5-methylcytosine"
atcataccaggtttctggggtggggctatattgggtacctagtgagtcatgttaatgagccgtgtatagccttaaggccatattggtatccaggagcccgatgatgctctatgctatagctt

SEQ ID NO: 19078 - DNA, 122 bp, Homo sapiens
  misc_feature (61)..(62): /note="This region represents a CpG dinucleotide"
  misc_feature (61)..(61): /note="Nucleotide may be methylated to form 5-methylcytosine"
aaaaacaaaatatcacttcctggtattattttccataatcagatttgagatgttagactacgtggcaaaaatgccaggaagtgacatttttgcaggctagcatctcaaatctgattctggaa

SEQ ID NO: 19079 - DNA, 122 bp, Homo sapiens
  misc_feature (61)..(62): /note="This region represents a CpG dinucleotide"
  misc_feature (61)..(61): /note="Nucleotide may be methylated to form 5-methylcytosine"
actgctcccagaatgtcctgtgccttggtctcctcctgagaaagagatggaagagagaagcgcactgcctcaaagggcacactaaaagcgggtggggagccttaggagtagccagcagagtg

SEQ ID NO: 19080 - DNA, 122 bp, Homo sapiens
  misc_feature (61)..(62): /note="This region represents a CpG dinucleotide"
  misc_feature (61)..(61): /note="Nucleotide may be methylated to form 5-methylcytosine"
aacaattcactgggtttgaataattgaaagggagccagtgtgcaggagtgaggtggaaagcggtatgtaaaaaataaagaacagtggtgagggaagcaggggccagatcatgaagaccttgc

SEQ ID NO: 19081 - DNA, 122 bp, Homo sapiens
  misc_feature (61)..(62): /note="This region represents a CpG dinucleotide"
  misc_feature (61)..(61): /note="Nucleotide may be methylated to form 5-methylcytosine"
aaaactagttcaggccttgatgggaagcggaagtcaaacatggcctcacaaacatccgcacggagaccctaagactaatagaggactctgataagaaacatttgcagtgtattcccggcttc

SEQ ID NO: 19082 - DNA, 122 bp, Homo sapiens
  misc_feature (61)..(62): /note="This region represents a CpG dinucleotide"
  misc_feature (61)..(61): /note="Nucleotide may be methylated to form 5-methylcytosine"
gcaaatagggtgtaacaataggagttctggaatgttcctgtgtggggctgacctttgtatcgctgttaatcctctattttcagacacaaaaatgattaagttaaaactggatgaaagtcttt

SEQ ID NO: 19083 - DNA, 122 bp, Homo sapiens
  misc_feature (61)..(62): /note="This region represents a CpG dinucleotide"
  misc_feature (61)..(61): /note="Nucleotide may be methylated to form 5-methylcytosine"
acaagttttcacttttatttacttcatgacagacagtggagacattgcttgataatgatgcggcacagaaagctggtaggttttgagatttagaaaagaaaatttgttagtttttgtgtctc

SEQ ID NO: 19084 - DNA, 122 bp, Homo sapiens
  misc_feature (61)..(62): /note="This region represents a CpG dinucleotide"
  misc_feature (61)..(61): /note="Nucleotide may be methylated to form 5-methylcytosine"
gaccctccagctgtatccacagttcggccaggaacaggctctgccagaggctagggccagcgctacatagtctgtggttaatggaggtgactagggaggggtgagcacaccagctgctctag

SEQ ID NO: 19085 - DNA, 122 bp, Homo sapiens
  misc_feature (61)..(62): /note="This region represents a CpG dinucleotide"
  misc_feature (61)..(61): /note="Nucleotide may be methylated to form 5-methylcytosine"
tctatcgtatgtgtgcaatgaacctgtactttcccatgcttcctactgaaccagctggtgcgagcctggtgcttcgggtgccttaccaggtctggcatcaaccacagcactggcacctcctg

SEQ ID NO: 19086 - DNA, 122 bp, Homo sapiens
  misc_feature (61)..(62): /note="This region represents a CpG dinucleotide"
  misc_feature (61)..(61): /note="Nucleotide may be methylated to form 5-methylcytosine"
gcaaaatcacaccaggttctgctgggcaaatctcccaggtggcgtattgctagaggagagcgccactgcagaggacacactgtcttggccactggctttgcaaaccatagtggaggagggag

SEQ ID NO: 19087 - DNA, 122 bp, Homo sapiens
  misc_feature (61)..(62): /note="This region represents a CpG dinucleotide"
  misc_feature (61)..(61): /note="Nucleotide may be methylated to form 5-methylcytosine"
cccatgacagcccagaatgaaccagcctggctctccctgaattgatttggtaagtccctgcgttaactggctagcttcctgtaggctggcagtgggggcaccagtgtgaggtgaaaggactc

SEQ ID NO: 19088 - DNA, 122 bp, Homo sapiens
  misc_feature (61)..(62): /note="This region represents a CpG dinucleotide"
  misc_feature (61)..(61): /note="Nucleotide may be methylated to form 5-methylcytosine"
cctggggtccccggagatccactgcccactcatttcctgcatgtgccaacttcctctccacggagtccagttacaaggcttctcacccatgacagcagggcagggagtggccagggctgaaa

SEQ ID NO: 19089 - DNA, 122 bp, Homo sapiens
  misc_feature (61)..(62): /note="This region represents a CpG dinucleotide"
  misc_feature (61)..(61): /note="Nucleotide may be methylated to form 5-methylcytosine"
gaaagagaattacctcatgtattcttcatggtacatctgtgagttggctactgttatgtccgtttataaggaggaaaactaacaacctggaggtgcctgggaataatgttactgcctataaa

SEQ ID NO: 19090 - DNA, 122 bp, Homo sapiens
  misc_feature (61)..(62): /note="This region represents a CpG dinucleotide"
  misc_feature (61)..(61): /note="Nucleotide may be methylated to form 5-methylcytosine"
aaaaaccttcagcagaaatagctatatcaaaggaggagatataaaattaatgtaaacaaacgagcgatttgagaaaacagacttaaaagaaatatctacaatgagtcacaagacagtcaaca

SEQ ID NO: 19091 - DNA, 122 bp, Homo sapiens
  misc_feature (61)..(62): /note="This region represents a CpG dinucleotide"
  misc_feature (61)..(61): /note="Nucleotide may be methylated to form 5-methylcytosine"
ctcctagcccacttcaaagcctgctttagggtgctcactgtcacacctcagtgaggttagcgagtcagattaatgccaagacactaatgctattgttcttggcaaatggaacagcactaaaa

SEQ ID NO: 19092 - DNA, 122 bp, Homo sapiens
  misc_feature (61)..(62): /note="This region represents a CpG dinucleotide"
  misc_feature (61)..(61): /note="Nucleotide may be methylated to form 5-methylcytosine"
atataccttgacctgtagggatgtgtccatgagggaatgaatgtcccagtgttgctccagcgatacccctggccacaaagacacgcctgaaattgctgagggcttaaggcactggaaggcct

SEQ ID NO: 19093 - DNA, 122 bp, Homo sapiens
  misc_feature (61)..(62): /note="This region represents a CpG dinucleotide"
  misc_feature (61)..(61): /note="Nucleotide may be methylated to form 5-methylcytosine"
gctcctgcacttttcatttcagtcagctgagcagggtttctacatcctatttgcctccctcggagaagaggaaatttctgcaaattattttctgtttattcttgtggtaaggtaattcactt

SEQ ID NO: 19094 - DNA, 122 bp, Homo sapiens
  misc_feature (61)..(62): /note="This region represents a CpG dinucleotide"
  misc_feature (61)..(61): /note="Nucleotide may be methylated to form 5-methylcytosine"
agacaccctgggaggggcggaagcaggccctaagggactggactccagctccctacagtccggcacctacttccctgtggcctcagagggcagcgagccggccctactgcacagctgggcct

SEQ ID NO: 19095 - DNA, 122 bp, Homo sapiens
  misc_feature (61)..(62): /note="This region represents a CpG dinucleotide"
  misc_feature (61)..(61): /note="Nucleotide may be methylated to form 5-methylcytosine"
ctgactgcagaccttgaagaatgtttaatccaatatattatgatcacattacacacattacgtgaaaatatgacctttatgtagagagaatcatagactattggaagtggaaagaaccttgt

SEQ ID NO: 19096 - DNA, 122 bp, Homo sapiens
  misc_feature (61)..(62): /note="This region represents a CpG dinucleotide"
  misc_feature (61)..(61): /note="Nucleotide may be methylated to form 5-methylcytosine"
acatttgtttacggtcctgctagcattttgtcaacatgcagagtgcatgacacatctttacgacaatgttggaagtgaacatttgaatgagtgtacagttagtggggtttgggtgggtttgt

SEQ ID NO: 19097 - DNA, 122 bp, Homo sapiens
  misc_feature (61)..(62): /note="This region represents a CpG dinucleotide"
  misc_feature (61)..(61): /note="Nucleotide may be methylated to form 5-methylcytosine"
gatctcactccagtgtcccccttggtagaacccaaatggaagccagaggacaaaggagctcgctgatgtagaacatacagattagctactataggggttcccagcccccaggtcacagactg

SEQ ID NO: 19098 - DNA, 122 bp, Homo sapiens
  misc_feature (61)..(62): /note="This region represents a CpG dinucleotide"
  misc_feature (61)..(61): /note="Nucleotide may be methylated to form 5-methylcytosine"
aagtaaaaaattgagttgagtaaattttattctattctttccaggatgttgcaatccctacgcaaccaaggtttcaagttaaagagaatttggctgacccactcacagcaacaaggaaaata

SEQ ID NO: 19099 - DNA, 122 bp, Homo sapiens
  misc_feature (61)..(62): /note="This region represents a CpG dinucleotide"
  misc_feature (61)..(61): /note="Nucleotide may be methylated to form 5-methylcytosine"
ctgggggtctctcatgagggaccttctgaagtattttgctgggtgtctgctagctgggcacggctactgtgtgtctgctgagcttccaccgctgacccacttctatttccttcctcctgaga

SEQ ID NO: 19100 - DNA, 122 bp, Homo sapiens
  misc_feature (61)..(62): /note="This region represents a CpG dinucleotide"
  misc_feature (61)..(61): /note="Nucleotide may be methylated to form 5-methylcytosine"
tgcctggtttgagtattaggttatctttagtgcaggaccatcctggtttggaggtagcatcgtgtggtagtttaagcacagactttgaagtcagactttctagattcgaatcccagttctgc

SEQ ID NO: 19101 - DNA, 122 bp, Homo sapiens
  misc_feature (61)..(62): /note="This region represents a CpG dinucleotide"
  misc_feature (61)..(61): /note="Nucleotide may be methylated to form 5-methylcytosine"
tcgtgctgtcatatgccacctggcgtgtggcactttgttacgacagccacaggtggggggcgaggaccatctgctgaggaagcttcatttataccgggagggatgcgtggaaactgaacagc

SEQ ID NO: 19102 - DNA, 122 bp, Homo sapiens
  misc_feature (61)..(62): /note="This region represents a CpG dinucleotide"
  misc_feature (61)..(61): /note="Nucleotide may be methylated to form 5-methylcytosine"
ccctctagtagtttgcaatttattgtattccttcccaatagttcttgcaaagtacttacccgtgtcctgtatttcacaaatttggtttatgtcacttaattatgttttctttcccacttttc

SEQ ID NO: 19103 - DNA, 122 bp, Homo sapiens
  misc_feature (61)..(62): /note="This region represents a CpG dinucleotide"
  misc_feature (61)..(61): /note="Nucleotide may be methylated to form 5-methylcytosine"
tctggtgatttctggtcttgaaggacttcctgttttaaatgtctgtggggttgtggttcccgagctgctgcactgtctcccataacctttctctctatcctggcctggtctctcttccacac

SEQ ID NO: 19104 - DNA, 122 bp, Homo sapiens
  misc_feature (61)..(62): /note="This region represents a CpG dinucleotide"
  misc_feature (61)..(61): /note="Nucleotide may be methylated to form 5-methylcytosine"
gagacaagctgagaaaacacctttcatactagcctccaacggaaattaaagacgtgtagccgtgtcgccttctggattccataaatccctggctatcgctgtgacttaaaactactacttct

SEQ ID NO: 19105 - DNA, 122 bp, Homo sapiens
  misc_feature (61)..(62): /note="This region represents a CpG dinucleotide"
  misc_feature (61)..(61): /note="Nucleotide may be methylated to form 5-methylcytosine"
catgcctcttccactccactcttctgtgtcaaattgtgacttgacagcctttccttctaccgtttatctgtaggatattgggagtgtgtggcatgcatcctcatcatcaggaaactctaaaa

SEQ ID NO: 19106 - DNA, 122 bp, Homo sapiens
  misc_feature (61)..(62): /note="This region represents a CpG dinucleotide"
  misc_feature (61)..(61): /note="Nucleotide may be methylated to form 5-methylcytosine"
gacctcaggcaaggcgcttaatgttgctgcacctctattggaagaattcagtgaggaatgcgtgatagggccaaggtagagacttaacagatccaagctcagcatcccttcccatatttatt

SEQ ID NO: 19107 - DNA, 122 bp, Homo sapiens
  misc_feature (61)..(62): /note="This region represents a CpG dinucleotide"
  misc_feature (61)..(61): /note="Nucleotide may be methylated to form 5-methylcytosine"
atttttttctcctcctgctgttccgggtctctacagtgtcccctactcctttgttttattcgcacacctgggtagtgcctttccaatcaaaggatagttgggtctgcatttcaggtctgtga

SEQ ID NO: 19108 - DNA, 122 bp, Homo sapiens
  misc_feature (61)..(62): /note="This region represents a CpG dinucleotide"
  misc_feature (61)..(61): /note="Nucleotide may be methylated to form 5-methylcytosine"
ccaggctgctgctgtccactcaggtggtgcggactgggggaggtccttgccaaggccaggcgggtagcacaggaacctgtggctgtggcccgtcataccaagtcttccactatgggcaaaca

SEQ ID NO: 19109 - DNA, 122 bp, Homo sapiens
  misc_feature (61)..(62): /note="This region represents a CpG dinucleotide"
  misc_feature (61)..(61): /note="Nucleotide may be methylated to form 5-methylcytosine"
aacagggccctcgggcctctggtgtcccccatggtgcagggggatgacaaggtgtttcgccgcgcgccctcctggaggaagcgcttccggccgcgggagcaccacggtcgcggcggcatgct

SEQ ID NO: 19110 - DNA, 122 bp, Homo sapiens
  misc_feature (61)..(62): /note="This region represents a CpG dinucleotide"
  misc_feature (61)..(61): /note="Nucleotide may be methylated to form 5-methylcytosine"
aaatgcagctcctgtccatgggtccctgccctgttccttaaccatgagagcagatgcccccgtttccagggaacacataagcaggtgcagttcacaagtgaatcacttgccctgggaaggtg

SEQ ID NO: 19111 - DNA, 122 bp, Homo sapiens
  misc_feature (61)..(62): /note="This region represents a CpG dinucleotide"
  misc_feature (61)..(61): /note="Nucleotide may be methylated to form 5-methylcytosine"
attagataaaagtacgcaaagctttttgggctttgtactgggaagtgctacataagactgcgtggtagtggtttgggcctcattgcttatatctgacatagcttccaggatttatgcctgtc

SEQ ID NO: 19112 - DNA, 122 bp, Homo sapiens
  misc_feature (61)..(62): /note="This region represents a CpG dinucleotide"
  misc_feature (61)..(61): /note="Nucleotide may be methylated to form 5-methylcytosine"
cacagccggggacagtcttgggaggtgactgtggtcaccaccactactgggctgcagcatcgctgaatgcagcccctgccacaactccacaggcattggctgtaatgatgggcgggggtgct

SEQ ID NO: 19113 - DNA, 122 bp, Homo sapiens
  misc_feature (61)..(62): /note="This region represents a CpG dinucleotide"
  misc_feature (61)..(61): /note="Nucleotide may be methylated to form 5-methylcytosine"
tggtagaggcatcagtattgtatccaaggccatgcttatatttattgagatctagtcactcgtggtatattagaattgtggcggcatggttgtcatcttgaataatttcattagggacatct

SEQ ID NO: 19114 - DNA, 122 bp, Homo sapiens
  misc_feature (61)..(62): /note="This region represents a CpG dinucleotide"
  misc_feature (61)..(61): /note="Nucleotide may be methylated to form 5-methylcytosine"
ctggtgtagagcggagcccttggcccagcagagcttgctgtgtggtttcttcagtgctgccgtcgctgtgccgtctatatgtgttgtggtctttaatgtttaataattggcactgtcagaat

SEQ ID NO: 19115 - DNA, 122 bp, Homo sapiens
  misc_feature (61)..(62): /note="This region represents a CpG dinucleotide"
  misc_feature (61)..(61): /note="Nucleotide may be methylated to form 5-methylcytosine"
gctttccaaacatgcaaaagagaagcacgacagcagaggcgctgatgacactggtgtccccgccccgagactctccacccccaagtgctaggacacaggaagacacacacgcacaggaagaa

SEQ ID NO: 19116 - DNA, 122 bp, Homo sapiens
  misc_feature (61)..(62): /note="This region represents a CpG dinucleotide"
  misc_feature (61)..(61): /note="Nucleotide may be methylated to form 5-methylcytosine"
taatgggaaccaataatcatacctcaagtattcccttaatcagggcaataatctcttgtacgttcctggaattctgtattgtttacaatttattctaggacaacataggaaattccaaaagt

SEQ ID NO: 19117 - DNA, 122 bp, Homo sapiens
  misc_feature (61)..(62): /note="This region represents a CpG dinucleotide"
  misc_feature (61)..(61): /note="Nucleotide may be methylated to form 5-methylcytosine"
tggtacctacacccccactttaagccttccctactttcagccttgtgcttggagtggggccggcccacccaggagccatctgagcatgtgacacaagcctggccaatcagcatagtccacct

SEQ ID NO: 19118 - DNA, 122 bp, Homo sapiens
  misc_feature (61)..(62): /note="This region represents a CpG dinucleotide"
  misc_feature (61)..(61): /note="Nucleotide may be methylated to form 5-methylcytosine"
tcaggggagcgccttgtcagcctctaggggctcccgactacagcggaccacgttgagcaacgtcttgttaggtcacagttgtagcctcttgtgttctacgtgcacttcagtattcttcacaa

SEQ ID NO: 19119 - DNA, 122 bp, Homo sapiens
  misc_feature (61)..(62): /note="This region represents a CpG dinucleotide"
  misc_feature (61)..(61): /note="Nucleotide may be methylated to form 5-methylcytosine"
caagaaaataacaattttaattatttgagaatggacaacttcctgtgtctggtatgttaacgagtgaatctatagtgtcagtctggtaggagagtatggtagaatagtcattaatgtctttc

SEQ ID NO: 19120 - DNA, 122 bp, Homo sapiens
  misc_feature (61)..(62): /note="This region represents a CpG dinucleotide"
  misc_feature (61)..(61): /note="Nucleotide may be methylated to form 5-methylcytosine"
acaatgaaggagaaaatgtagcctcgcaacttcattcgtaaataatccagactaaccgcacggagtataatggatcaaagtgagcagaatcgctcactttggatgagatcagccctagaatg

SEQ ID NO: 19121 - DNA, 122 bp, Homo sapiens
  misc_feature (61)..(62): /note="This region represents a CpG dinucleotide"
  misc_feature (61)..(61): /note="Nucleotide may be methylated to form 5-methylcytosine"
acatctggctgaggcccagggaaaagatatccctgctgagggtcacatggggagctgggacgcagaggacccaaagctgccacctcccaggccaggacagtgctcaagaagtcaggttcttg

SEQ ID NO: 19122 - DNA, 122 bp, Homo sapiens
  misc_feature (61)..(62): /note="This region represents a CpG dinucleotide"
  misc_feature (61)..(61): /note="Nucleotide may be methylated to form 5-methylcytosine"
ggcttatagatttttccacagtctagactttgctgattgaatgctcatggtacagctcaacgtcttcttctgccctctgtattttttgcaaccagcagctgaatccagaagcctaatcaggc

SEQ ID NO: 19123 - DNA, 122 bp, Homo sapiens
  misc_feature (61)..(62): /note="This region represents a CpG dinucleotide"
  misc_feature (61)..(61): /note="Nucleotide may be methylated to form 5-methylcytosine"
catgaacagcaggagctccctgaagctttacctgcagtctcagggaaagagggcagaatgcgcagtgactgctaattcacctacatcagcagatatgattgggaagcattaattttcacact

SEQ ID NO: 19124 - DNA, 122 bp, Homo sapiens
  misc_feature (61)..(62): /note="This region represents a CpG dinucleotide"
  misc_feature (61)..(61): /note="Nucleotide may be methylated to form 5-methylcytosine"
gcaggtgctcagcaggtctaggagaaactgagactgactgcctagactaggatcaggacacgtcatgttctggagttgaatcttgcagagtgagtaggagttttccaggaggaagctgtgga

SEQ ID NO: 19125 - DNA, 122 bp, Homo sapiens
  misc_feature (61)..(62): /note="This region represents a CpG dinucleotide"
  misc_feature (61)..(61): /note="Nucleotide may be methylated to form 5-methylcytosine"
gcaggtgcagagggtggggcactgagccacagaagagcattcacgggccttgaaaccccacggaatttgccctgctggatttcagacttgcttgggactggcaacccctttattcctttata

SEQ ID NO: 19126 - DNA, 122 bp, Homo sapiens
  misc_feature (61)..(62): /note="This region represents a CpG dinucleotide"
  misc_feature (61)..(61): /note="Nucleotide may be methylated to form 5-methylcytosine"
ccattattctaggtcctaatctgtttggtggagttgttactccacttctctgaccttgcgcgtagggcctgggcactcctaggaattaggggcagggtggggttagggctgaaacccatttg

SEQ ID NO: 19127 - DNA, 122 bp, Homo sapiens
  misc_feature (61)..(62): /note="This region represents a CpG dinucleotide"
  misc_feature (61)..(61): /note="Nucleotide may be methylated to form 5-methylcytosine"
ttctagattaatcattactcttattactcatattatgcttatggtagccaaaaactggaacgtacccaaatgcccaaccatggtagactggatatatgaattgttgtatgtctgcacaaaag

SEQ ID NO: 19128 - DNA, 122 bp, Homo sapiens
  misc_feature (61)..(62): /note="This region represents a CpG dinucleotide"
  misc_feature (61)..(61): /note="Nucleotide may be methylated to form 5-methylcytosine"
ttgggcctcttcctttttaaaaataacatgtctactattagaaattaatttctggccgggcgcggtggctcatgcctgtaatcccagcgctttgggaggccgaggtgggtggatcacttgag

SEQ ID NO: 19129 - DNA, 122 bp, Homo sapiens
  misc_feature (61)..(62): /note="This region represents a CpG dinucleotide"
  misc_feature (61)..(61): /note="Nucleotide may be methylated to form 5-methylcytosine"
cttctaccaccgtagatccgttttgccttttgtgtctggtttcaatgcatcgtaggtccacgacatccttccacaggtaccggccactcattcctttccttgctgcaggggagaccattgcg

SEQ ID NO: 19130 - DNA, 122 bp, Homo sapiens
  misc_feature (61)..(62): /note="This region represents a CpG dinucleotide"
  misc_feature (61)..(61): /note="Nucleotide may be methylated to form 5-methylcytosine"
cattactgcttgagaactctatgtgcatcaggcaatatgttatttgcttcacgtggttctcgttaaatcttaatagcaattctgtgacattgatgatgttattctcatcttacggaagtgca

SEQ ID NO: 19131 - DNA, 122 bp, Homo sapiens
  misc_feature (61)..(62): /note="This region represents a CpG dinucleotide"
  misc_feature (61)..(61): /note="Nucleotide may be methylated to form 5-methylcytosine"
tcttgccttgtggagtaaagtatttgttcaataaacaaataggaaggccattttctgctgcgatcaaaaactgttttaagcttctttggagaaatatatatcaggctgtggttgaatcttgg

SEQ ID NO: 19132 - DNA, 122 bp, Homo sapiens
  misc_feature (61)..(62): /note="This region represents a CpG dinucleotide"
  misc_feature (61)..(61): /note="Nucleotide may be methylated to form 5-methylcytosine"
gactgttctttctgaactgtccctagtggtgctttgtcatactgctcacctagcagctatcgtactttgttctctgaccagttattcctgtcttttaaaaaggcagtatgtgtaaagcatcg

SEQ ID NO: 19133 - DNA, 122 bp, Homo sapiens
  misc_feature (61)..(62): /note="This region represents a CpG dinucleotide"
  misc_feature (61)..(61): /note="Nucleotide may be methylated to form 5-methylcytosine"
tgctcactccctccatcctgcaggcctgaacgccgtgcaccaccacacggcagcttggcgcgtcccccagcctctgctcagatgcccctcggcaagaccttcctgtggccgagctgtgcaac

SEQ ID NO: 19134 - DNA, 122 bp, Homo sapiens
  misc_feature (61)..(62): /note="This region represents a CpG dinucleotide"
  misc_feature (61)..(61): /note="Nucleotide may be methylated to form 5-methylcytosine"
actcatctacttcctgtctctctaaattgacccactctggacgtttcatctaaagggactcgtacgacgtgtccgtgtttccaggctcagccgcgttgcagcacatatggcctgggttttac

SEQ ID NO: 19135 - DNA, 122 bp, Homo sapiens
  misc_feature (61)..(62): /note="This region represents a CpG dinucleotide"
  misc_feature (61)..(61): /note="Nucleotide may be methylated to form 5-methylcytosine"
tccatgtgccagagatacttcatgctttgaatatatcttcattaatccctcctataacggcggaagtcagttgcatatatgtatgtaggtgtatatgtatgtatacacacagagtaacagga

SEQ ID NO: 19136 - DNA, 122 bp, Homo sapiens
  misc_feature (61)..(62): /note="This region represents a CpG dinucleotide"
  misc_feature (61)..(61): /note="Nucleotide may be methylated to form 5-methylcytosine"
gtaaaaacaaccagaacacatagtaagccctgttggtcccgtgagattgcctgctcttcacgtctcctgtttgtgaaatagcacaggattttaggtgcagggtttttcatatgccgaataaa

SEQ ID NO: 19137 - DNA, 122 bp, Homo sapiens
  misc_feature (61)..(62): /note="This region represents a CpG dinucleotide"
  misc_feature (61)..(61): /note="Nucleotide may be methylated to form 5-methylcytosine"
ccctattgaaatgagggattcaagcagcaatcatcaatagaagccaaaatcctcctttgacgggaactggataatcccaagtgctggactgtcgcccacagattctccgctgctggtcatga

SEQ ID NO: 19138 - DNA, 122 bp, Homo sapiens
  misc_feature (61)..(62): /note="This region represents a CpG dinucleotide"
  misc_feature (61)..(61): /note="Nucleotide may be methylated to form 5-methylcytosine"
gtccagcctttgcctgtcactggaaggccagagagggaaacagattttcatctgaggtcacgcaggaggttctgagcacagctgtctcccgactctcgcaggtgtagcaggccaggcaggtc

SEQ ID NO: 19139 - DNA, 122 bp, Homo sapiens
  misc_feature (61)..(62): /note="This region represents a CpG dinucleotide"
  misc_feature (61)..(61): /note="Nucleotide may be methylated to form 5-methylcytosine"
atattccttacgtctattttcccagggactgactccttttaaataagcatctcaggcgggcgcggtggctcacacctgtaatcccagcactttgcagggcggaggtgggcggatcacctgag

SEQ ID NO: 19140 - DNA, 122 bp, Homo sapiens
  misc_feature (61)..(62): /note="This region represents a CpG dinucleotide"
  misc_feature (61)..(61): /note="Nucleotide may be methylated to form 5-methylcytosine"
agattgtcataatattaaaccattttcattccctcaaagccacatcatttttgttcaaaccggaagaagtgttggccaatgggggcattactcacagaatatttgtcaggccagatgtattg

SEQ ID NO: 19141 - DNA, 122 bp, Homo sapiens
  misc_feature (61)..(62): /note="This region represents a CpG dinucleotide"
  misc_feature (61)..(61): /note="Nucleotide may be methylated to form 5-methylcytosine"
cttaacctatagcctcagccaagcaatatccacttagactcactgctctgaggactgccccgccctgacatcagcttccctatcctttccagaaatatttctttgagacctgctggctacag

SEQ ID NO: 19142 - DNA, 122 bp, Homo sapiens
  misc_feature (61)..(62): /note="This region represents a CpG dinucleotide"
  misc_feature (61)..(61): /note="Nucleotide may be methylated to form 5-methylcytosine"
ccccattgaaacatttaattttgggcaggctccatgttttttccttgtgtagtatcatcccgtgctctgtttttccaacttaaagcctacttacaaacttgtcaagtctcacatctctctgg

SEQ ID NO: 19143 - DNA, 122 bp, Homo sapiens
  misc_feature (61)..(62): /note="This region represents a CpG dinucleotide"
  misc_feature (61)..(61): /note="Nucleotide may be methylated to form 5-methylcytosine"
cagcatcccagcacttgaacttgggaacaggctttccaggagtgcagacagagcccttaccgcattccttctgaacctcatcttgcctctccggggatttgcttctgccatttcgcctgtac

SEQ ID NO: 19144 - DNA, 122 bp, Homo sapiens
  misc_feature (61)..(62): /note="This region represents a CpG dinucleotide"
  misc_feature (61)..(61): /note="Nucleotide may be methylated to form 5-methylcytosine"
acccatatgagctccacatgcatgtggctcccctgccaggaacaggcctccctgtcctcccgtacaacctcactgccgccacttgtcactcagcagatgttgcctgagtccctgccatgtga

SEQ ID NO: 19145 - DNA, 122 bp, Homo sapiens
  misc_feature (61)..(62): /note="This region represents a CpG dinucleotide"
  misc_feature (61)..(61): /note="Nucleotide may be methylated to form 5-methylcytosine"
attccttgtacctgtgcattcccacaaaaatacagacttttatgaatgtcactgagtccccgcctgtgtggaccagccatcaagaggaatgagaactgaagctataaatcagatgacagtgt

SEQ ID NO: 19146 - DNA, 122 bp, Homo sapiens
  misc_feature (61)..(62): /note="This region represents a CpG dinucleotide"
  misc_feature (61)..(61): /note="Nucleotide may be methylated to form 5-methylcytosine"
cctaacatcactctgggtggtgaaagcgcacttttccctaatgtgtgggcggcaagaaggcggacccgctcgaagctccgcccacccacgcgaggccccgcccgcccgctcgaagccccgcc

SEQ ID NO: 19147 - DNA, 122 bp, Homo sapiens
  misc_feature (61)..(62): /note="This region represents a CpG dinucleotide"
  misc_feature (61)..(61): /note="Nucleotide may be methylated to form 5-methylcytosine"
tgttaatatctgttgggataaaggtatttctcactgaggattcaccctcaccaagcttcccggcatgtaaaaaacatcactgtcactgcaggcagatgtaaggaataagaaaacacccacac

SEQ ID NO: 19148 - DNA, 122 bp, Homo sapiens
  misc_feature (61)..(62): /note="This region represents a CpG dinucleotide"
  misc_feature (61)..(61): /note="Nucleotide may be methylated to form 5-methylcytosine"
agtatatctaagagcttccctgagttcagtgggccactctagcaaattaatcatatccaacgagggcgttgtggaaaccccaatctagtcaatcagaagcacagggaaatccacctggagct

SEQ ID NO: 19149 - DNA, 122 bp, Homo sapiens
  misc_feature (61)..(62): /note="This region represents a CpG dinucleotide"
  misc_feature (61)..(61): /note="Nucleotide may be methylated to form 5-methylcytosine"
ttcctgagatttataaaatggttctaacttcttcatgctttgtgttttaacttataaacacgttccaacacagatgcagactttatatgtctccattagcagaaaagactcatgtcccatac

SEQ ID NO: 19150 - DNA, 122 bp, Homo sapiens
  misc_feature (61)..(62): /note="This region represents a CpG dinucleotide"
  misc_feature (61)..(61): /note="Nucleotide may be methylated to form 5-methylcytosine"
gttcaacagcaagcagctcctgccaagtgcttagtggctttctgcttgctggggcagtggcgccagtgctggcccaaggcccggccacctcagcaggacagcatgaggacagtccgggcctg

SEQ ID NO: 19151 - DNA, 122 bp, Homo sapiens
  misc_feature (61)..(62): /note="This region represents a CpG dinucleotide"
  misc_feature (61)..(61): /note="Nucleotide may be methylated to form 5-methylcytosine"
tataagtccaacttcttaatatcaagataaatgaatagttcaccaatttgggaaggagggcgggttgcaatttgagatagtttaaggtttaattattgaaagactgccatcttgtggcacca

SEQ ID NO: 19152 - DNA, 122 bp, Homo sapiens
  misc_feature (61)..(62): /note="This region represents a CpG dinucleotide"
  misc_feature (61)..(61): /note="Nucleotide may be methylated to form 5-methylcytosine"
ctccccaggaatcctgctgcctgctgagaaacatggtcagcaagtcccgtgagtgtcatccgagggctcccccaccctggaggacaggcctcagaagccgtcttcagcaggatcctgggacc

SEQ ID NO: 19153 - DNA, 122 bp, Homo sapiens
  misc_feature (61)..(62): /note="This region represents a CpG dinucleotide"
  misc_feature (61)..(61): /note="Nucleotide may be methylated to form 5-methylcytosine"
cagaagcagaaaggaaaacacagattgtttaagtcactagccctgagtcacacagcaatacgtagtgcaattggaatttggcctgggcagtcattccaggaacttgtgttcataaaccctga

SEQ ID NO: 19154 - DNA, 122 bp, Homo sapiens
  misc_feature (61)..(62): /note="This region represents a CpG dinucleotide"
  misc_feature (61)..(61): /note="Nucleotide may be methylated to form 5-methylcytosine"
cagctatgggatcctgtaagactagtcctgggaactccttaaataatctggcaacactgacgcccatccggatgtgtatcgtgaaattcaggcattaagatagggcacttccccaagcctta

SEQ ID NO: 19155 - DNA, 122 bp, Homo sapiens
  misc_feature (61)..(62): /note="This region represents a CpG dinucleotide"
  misc_feature (61)..(61): /note="Nucleotide may be methylated to form 5-methylcytosine"
ggagtctgtattatcctaaggaaactgtaggaggcagcaaagtcctttttgtagctgggacgcataagaaaattcattagagagtccattgagtggtacttctgagatttcccaatgcagaa

SEQ ID NO: 19156 - DNA, 122 bp, Homo sapiens
  misc_feature (61)..(62): /note="This region represents a CpG dinucleotide"
  misc_feature (61)..(61): /note="Nucleotide may be methylated to form 5-methylcytosine"
gattctttaagggacctggggagtcaaccactgccacaccttgcaaagactggcagtaatcggtaaaaataataactaactcttatacagtggtgtgaagttccacgagacattaatagttt

SEQ ID NO: 19157 - DNA, 122 bp, Homo sapiens
  misc_feature (61)..(62): /note="This region represents a CpG dinucleotide"
  misc_feature (61)..(61): /note="Nucleotide may be methylated to form 5-methylcytosine"
ggctgcctcttctgagccatctctgaccacttgggctggctgtttgtcagcaatgtgagtcgcgggtacaggggacagtcaaacctctggcatctcatggagcccagctgaccctgcacggc

SEQ ID NO: 19158 - DNA, 122 bp, Homo sapiens
  misc_feature (61)..(62): /note="This region represents a CpG dinucleotide"
  misc_feature (61)..(61): /note="Nucleotide may be methylated to form 5-methylcytosine"
acccgaatgagtttggcagcagatctgtcactagtcaggcctccagatggagctgagccacggccgacaccatgatgacagccttgcggcctgcactatgcccaggcccctgactcacaggg

SEQ ID NO: 19159 - DNA, 122 bp, Homo sapiens
  misc_feature (61)..(62): /note="This region represents a CpG dinucleotide"
  misc_feature (61)..(61): /note="Nucleotide may be methylated to form 5-methylcytosine"
gcgtcagggcgccgaggctgaggtagcagccggaagtgcagccgaaggcgcagccggaagcgctgccacagtgccggtcgcacacgtggcactggctgcaacctcctggcaacagctgccag

SEQ ID NO: 19160 - DNA, 122 bp, Homo sapiens
  misc_feature (61)..(62): /note="This region represents a CpG dinucleotide"
  misc_feature (61)..(61): /note="Nucleotide may be methylated to form 5-methylcytosine"
ctcacttgatctccctgcctccgcctcccaaagtgctgggattacaagcatgagcctctgcgcctagcctaagggagactttagatttaagacagaagtatgccaggagagaggaggtagct

SEQ ID NO: 19161 - DNA, 122 bp, Homo sapiens
  misc_feature (61)..(62): /note="This region represents a CpG dinucleotide"
  misc_feature (61)..(61): /note="Nucleotide may be methylated to form 5-methylcytosine"
aataaaatgggaataataggccctgtctcatagacttatattgagcaaggaatgcgtctacgaatgtaagatgcttggtgcagttcatgtaagatcgtagtcaataaatgttatttattatc

SEQ ID NO: 19162 - DNA, 122 bp, Homo sapiens
  misc_feature (61)..(62): /note="This region represents a CpG dinucleotide"
  misc_feature (61)..(61): /note="Nucleotide may be methylated to form 5-methylcytosine"
tttaccgcaaattctttcgtaatcagcaaaaggaagtcattccttttcgcactggaaagacgctccactctctttcactctttggatgcacaacaatggccacacatcgagattgaaatgaa

SEQ ID NO: 19163 - DNA, 122 bp, Homo sapiens
  misc_feature (61)..(62): /note="This region represents a CpG dinucleotide"
  misc_feature (61)..(61): /note="Nucleotide may be methylated to form 5-methylcytosine"
agagagggctctggggccagactgccaggttcagatcctggttttgtcactcatcagttgcgtgacttgggcttgaccttcatgtgccttagttacctcatctgcaaaattggaataataat

SEQ ID NO: 19164 - DNA, 122 bp, Homo sapiens
  misc_feature (61)..(62): /note="This region represents a CpG dinucleotide"
  misc_feature (61)..(61): /note="Nucleotide may be methylated to form 5-methylcytosine"
ataatcatccatcccacaggctgtctgatggcaagaattttaagccccatttaaggtggacgctagaattatttctggatggagcagagtagcacaagctgctgagctgcaaatcaccgtga

SEQ ID NO: 19165 - DNA, 122 bp, Homo sapiens
  misc_feature (61)..(62): /note="This region represents a CpG dinucleotide"
  misc_feature (61)..(61): /note="Nucleotide may be methylated to form 5-methylcytosine"
aaagagagagagagagaattccacagggctctttcctgagtgagggctgtggagaggctgcgaagggccccgtctgcagcctcacagccctggacacaggacctaactgctctctgcctcag

SEQ ID NO: 19166 - DNA, 122 bp, Homo sapiens
  misc_feature (61)..(62): /note="This region represents a CpG dinucleotide"
  misc_feature (61)..(61): /note="Nucleotide may be methylated to form 5-methylcytosine"
ctccagtaaatgagagtcagaatctgaaccttgggctcgtgcttttaggagccacgttctcgtgaccacacagacatcctccccttcttaagaaagcaccagatgtccttggaaatttatgc

SEQ ID NO: 19167 - DNA, 122 bp, Homo sapiens
  misc_feature (61)..(62): /note="This region represents a CpG dinucleotide"
  misc_feature (61)..(61): /note="Nucleotide may be methylated to form 5-methylcytosine"
cctgccctttatcaggcaaaagcagccaaaggcttggcaaagtcaggagagggaaatcagcgtattctgagctagtctccatggtccagaggatgaccatttccttctaataaaaccaatat

SEQ ID NO: 19168 - DNA, 122 bp, Homo sapiens
  misc_feature (61)..(62): /note="This region represents a CpG dinucleotide"
  misc_feature (61)..(61): /note="Nucleotide may be methylated to form 5-methylcytosine"
gccaaacctgcaccagggttagatctcctgactccatcccaagccctttggaggcaccaacgccgccctttaggggatgagtcagcagctgaaattagatctttagctttgtgtgatcaaaa

SEQ ID NO: 19169 - DNA, 122 bp, Homo sapiens
  misc_feature (61)..(62): /note="This region represents a CpG dinucleotide"
  misc_feature (61)..(61): /note="Nucleotide may be methylated to form 5-methylcytosine"
aaaatattttctacatacaataatgtttgatccccataaaatgtgtgagataaagccaaacgtttccttctcagatggagaaactgagacttgatgtcaactgacttagccaactttgccta

SEQ ID NO: 19170 - DNA, 122 bp, Homo sapiens
  misc_feature (61)..(62): /note="This region represents a CpG dinucleotide"
  misc_feature (61)..(61): /note="Nucleotide may be methylated to form 5-methylcytosine"
aattcttacactcctttgcgtctattaaaccaagaggataagcaacctggtaatttagcacggtcatgagcatttatctacacagtgggctccaaatgggtgtctgaaggtgagttgagtgt

SEQ ID NO: 19171 - DNA, 122 bp, Homo sapiens
  misc_feature (61)..(62): /note="This region represents a CpG dinucleotide"
  misc_feature (61)..(61): /note="Nucleotide may be methylated to form 5-methylcytosine"
taacagaagggaacagctgataaaagaagccctcctttgttctacatttcctgcccaggtcgctcaagttctgtttgctttgactgtctctggagtgcttgctgggtgaggtcaaggaaggg

SEQ ID NO: 19172 - DNA, 122 bp, Homo sapiens
  misc_feature (61)..(62): /note="This region represents a CpG dinucleotide"
  misc_feature (61)..(61): /note="Nucleotide may be methylated to form 5-methylcytosine"
ggctggccttgggtgagaggggacacctggatggcaaactgatggaggctggccttgcagcgcccagaggcacccacctgtgggagttcatccgggacatcctcatccacccggagctcaac

SEQ ID NO: 19173 - DNA, 122 bp, Homo sapiens
  misc_feature (61)..(62): /note="This region represents a CpG dinucleotide"
  misc_feature (61)..(61): /note="Nucleotide may be methylated to form 5-methylcytosine"
cgcgtttagtaacaacctttattaatattttacctgcttactagttcatcccctccttaacgtgtatggtgtgtgtgtgtgtgtgtgtgtgtgtgtgtgtgtgtgtgtgtgtgtgtatcact

SEQ ID NO: 19174 - DNA, 122 bp, Homo sapiens
  misc_feature (61)..(62): /note="This region represents a CpG dinucleotide"
  misc_feature (61)..(61): /note="Nucleotide may be methylated to form 5-methylcytosine"
gccaagcaggcaatccttctctgataggatgtttcctaacaaggcttatttctgcttccacgtgatacacattaaaatgtttagttaaatttgaaggcctaaacatcacaggctaggatcag

SEQ ID NO: 19175 - DNA, 122 bp, Homo sapiens
  misc_feature (61)..(62): /note="This region represents a CpG dinucleotide"
  misc_feature (61)..(61): /note="Nucleotide may be methylated to form 5-methylcytosine"
atggaggcgggccggaggccggtggaaccagctcgagctctcgagggccgtttgggggctcgcgccgtacggcttgtgaagtctcgcgcctctccccttagtccgcctctgctgctcaggct

SEQ ID NO: 19176 - DNA, 122 bp, Homo sapiens
  misc_feature (61)..(62): /note="This region represents a CpG dinucleotide"
  misc_feature (61)..(61): /note="Nucleotide may be methylated to form 5-methylcytosine"
ttagcagaacacaattttggactcttacttggtgtgagcaagactacacagagaagttgccgaaaacagctttctgcacagcagggaatgcttgaagacaaaatggggaggaagaagcaaac

SEQ ID NO: 19177 - DNA, 122 bp, Homo sapiens
  misc_feature (61)..(62): /note="This region represents a CpG dinucleotide"
  misc_feature (61)..(61): /note="Nucleotide may be methylated to form 5-methylcytosine"
taattctaattattttcaaaatcaaaagtcatttcagttctaggtcagagctcccaggatcgcctatgaaaagttctgaaggaaaaacctggataacatttctctttccacaagtctcgcaa

SEQ ID NO: 19178 - DNA, 122 bp, Homo sapiens
  misc_feature (61)..(62): /note="This region represents a CpG dinucleotide"
  misc_feature (61)..(61): /note="Nucleotide may be methylated to form 5-methylcytosine"
ccccagccccgccttgttactgcatccgtctgaggtacaaggttagaagccacagacacccgagctgcagcctgacccacacaagctgcgggcgcaatggcgctttgcagacaagacagcct

SEQ ID NO: 19179 - DNA, 122 bp, Homo sapiens
  misc_feature (61)..(62): /note="This region represents a CpG dinucleotide"
  misc_feature (61)..(61): /note="Nucleotide may be methylated to form 5-methylcytosine"
ctcatgtccctcctgctttatcttgagggcccccctttggggaggcaggctcactgctggcgagggcctcttctgtctcttcctccagctgtggcaatggctctgactctttgtggtcctct

SEQ ID NO: 19180 - DNA, 122 bp, Homo sapiens
  misc_feature (61)..(62): /note="This region represents a CpG dinucleotide"
  misc_feature (61)..(61): /note="Nucleotide may be methylated to form 5-methylcytosine"
attccttctgcttaagaaattagcatttcaaaaatatgccactttcccctgaactccaagcgtgtctaataatgcgagaagcagattgtcttccctcgtttccttaatttgtttcatctaaa

SEQ ID NO: 19181 - DNA, 122 bp, Homo sapiens
  misc_feature (61)..(62): /note="This region represents a CpG dinucleotide"
  misc_feature (61)..(61): /note="Nucleotide may be methylated to form 5-methylcytosine"
tcttcaaggggcataggcttgtttcacatgtttttgttaatgaaatggaaaggaggaaagcgatggttctagataaagtaaaaggcctctgtcaagcctcaggttagaggagggaaatacaa

SEQ ID NO: 19182 - DNA, 122 bp, Homo sapiens
  misc_feature (61)..(62): /note="This region represents a CpG dinucleotide"
  misc_feature (61)..(61): /note="Nucleotide may be methylated to form 5-methylcytosine"
ggtcaggtgaacaggaagttaaagactgaaaaggagacacaaaactgccgactttcccgacggcgaattggccctctggaaacagccgaccaatcacaggcagcaggggcgcgccctgcagc

SEQ ID NO: 19183 - DNA, 122 bp, Homo sapiens
  misc_feature (61)..(62): /note="This region represents a CpG dinucleotide"
  misc_feature (61)..(61): /note="Nucleotide may be methylated to form 5-methylcytosine"
ttctcaacgcagacctacattctgagaccacagtgctctacttgctatttcttaaaatgccgtggccaattcctgcctccacatcgttgttgatatataggaagttcaacacctttgtgaca

SEQ ID NO: 19184 - DNA, 122 bp, Homo sapiens
  misc_feature (61)..(62): /note="This region represents a CpG dinucleotide"
  misc_feature (61)..(61): /note="Nucleotide may be methylated to form 5-methylcytosine"
tctggacttacacctcactccgtgactcacctattcataagtgtctcgggaactttcctccgagtgtgtgtggtatagtaacactcaagagaacataattccgagcatgtgtcataaactaa

SEQ ID NO: 19185 - DNA, 122 bp, Homo sapiens
  misc_feature (61)..(62): /note="This region represents a CpG dinucleotide"
  misc_feature (61)..(61): /note="Nucleotide may be methylated to form 5-methylcytosine"
gagcggcccgcaggggcagatgggactcggccactttcggcacgctgggctgaaagtgggcgcgtctgcgactgggagggggtcggagagaagccacaaagcccgggctgcagaggcggttc

SEQ ID NO: 19186 - DNA, 122 bp, Homo sapiens
  misc_feature (61)..(62): /note="This region represents a CpG dinucleotide"
  misc_feature (61)..(61): /note="Nucleotide may be methylated to form 5-methylcytosine"
cattatgaagagaaagactgggtacatgcacccatagtaggtgtcactcttggcataagacgtttaacagaatccctacctgacaacatacattacctatatgtcagctctgtttcaaattc

SEQ ID NO: 19187 - DNA, 122 bp, Homo sapiens
  misc_feature (61)..(62): /note="This region represents a CpG dinucleotide"
  misc_feature (61)..(61): /note="Nucleotide may be methylated to form 5-methylcytosine"
atgcgtaaaaccagatctggtgcataaaaagaagacacgtgtttgtttttaaagcttctacgcctcaagtcatatatgtgaagttgcttgacaaggagcattggctgggcttcccatcttag

SEQ ID NO: 19188 - DNA, 122 bp, Homo sapiens
  misc_feature (61)..(62): /note="This region represents a CpG dinucleotide"
  misc_feature (61)..(61): /note="Nucleotide may be methylated to form 5-methylcytosine"
gtacaccaaaataccataaactggatggcttatcaacaaatttatttctcacagttcttccgactggagtgcccaaaatcagggtgtggtcagatatggtgtctgatgagggcccacttcct

SEQ ID NO: 19189 - DNA, 122 bp, Homo sapiens
  misc_feature (61)..(62): /note="This region represents a CpG dinucleotide"
  misc_feature (61)..(61): /note="Nucleotide may be methylated to form 5-methylcytosine"
taaatctccctcactcatgtcacctcttcaggacatttccttacagacaccttccttgatcgtcacttgggctgtagtgcaaaacagaaggcatgctcaagtgggagtggccaaggagagtt

SEQ ID NO: 19190 - DNA, 122 bp, Homo sapiens
  misc_feature (61)..(62): /note="This region represents a CpG dinucleotide"
  misc_feature (61)..(61): /note="Nucleotide may be methylated to form 5-methylcytosine"
cccgggcctcagccttatgtgttcttgaacagctctgggctctgtcctgtacctcctgggcgcgtggtcaggcctctcgtgacatcagcaggagactcaggtgaagaagcaggcagaacgga

SEQ ID NO: 19191 - DNA, 122 bp, Homo sapiens
  misc_feature (61)..(62): /note="This region represents a CpG dinucleotide"
  misc_feature (61)..(61): /note="Nucleotide may be methylated to form 5-methylcytosine"
gtaggagaatgtggtagcttgagctagagaagttgcctctttccggcagtggtcctcacccggtgagtcacagacactctgtgacactctggtcacaggcagctgcaatacatgaaaggacc

SEQ ID NO: 19192 - DNA, 122 bp, Homo sapiens
  misc_feature (61)..(62): /note="This region represents a CpG dinucleotide"
  misc_feature (61)..(61): /note="Nucleotide may be methylated to form 5-methylcytosine"
catgatctacccgcctcggcctcccaaagtgctgggattacaggcgtgagccaccgcgcccggccaagttattcttttaagtggcagcttaaccctagcacagcagatttattttctgaggt

SEQ ID NO: 19193 - DNA, 122 bp, Homo sapiens
  misc_feature (61)..(62): /note="This region represents a CpG dinucleotide"
  misc_feature (61)..(61): /note="Nucleotide may be methylated to form 5-methylcytosine"
gcactttcctgacatcttggttaggagccaggatgcattcacatgccacagaattctatacgctaataaccagtgctactacaactcagcagaaggtggcttgaaagactggaagtcaactt

SEQ ID NO: 19194 - DNA, 122 bp, Homo sapiens
  misc_feature (61)..(62): /note="This region represents a CpG dinucleotide"
  misc_feature (61)..(61): /note="Nucleotide may be methylated to form 5-methylcytosine"
gccagtgtggctggagttcacgggagctgaagtgggaggcgtatgaaagactcaggtaggcggcaggagccaagtcacattgagccttgtcttgcaggttttatgagaggccatggaatgat

SEQ ID NO: 19195 - DNA, 122 bp, Homo sapiens
  misc_feature (61)..(62): /note="This region represents a CpG dinucleotide"
  misc_feature (61)..(61): /note="Nucleotide may be methylated to form 5-methylcytosine"
catacgtttcaactgccaagcagcagtacatgaagagttcttgtttctgcacttccttaccgatgaaaataataccactaccccacatgacacttactatgtgccaggcatctttctaaaca

SEQ ID NO: 19196 - DNA, 122 bp, Homo sapiens
  misc_feature (61)..(62): /note="This region represents a CpG dinucleotide"
  misc_feature (61)..(61): /note="Nucleotide may be methylated to form 5-methylcytosine"
tattccgagttctaggtcacctcaagccctccccgctgtccctagagctctcccactgttcgttaggaaccaaagcaaaatgtataaggctgctttcctcaccgccaagagactccgcagaa

SEQ ID NO: 19197 - DNA, 122 bp, Homo sapiens
  misc_feature (61)..(62): /note="This region represents a CpG dinucleotide"
  misc_feature (61)..(61): /note="Nucleotide may be methylated to form 5-methylcytosine"
agcttgtgagtatcttggggaagtaccaaatccacagcaccatgagagggaggaggcagccgcagggagttcttggtgggcaaaatatgtctgtcaacctggagccctgcccagaccctgaa

SEQ ID NO: 19198 - DNA, 122 bp, Homo sapiens
  misc_feature (61)..(62): /note="This region represents a CpG dinucleotide"
  misc_feature (61)..(61): /note="Nucleotide may be methylated to form 5-methylcytosine"
gtgagtctctggtattgggttttatctgatgtctgatggcaaggacagtttattcctagacggataggtcccaagttgttaggcaagctcacctttagtaagttgtgaagccttacatccca

SEQ ID NO: 19199 - DNA, 122 bp, Homo sapiens
  misc_feature (61)..(62): /note="This region represents a CpG dinucleotide"
  misc_feature (61)..(61): /note="Nucleotide may be methylated to form 5-methylcytosine"
gaggtttgttgttatttttaactgcatgaagcagtgggtttgtttgtatcttgtcactcacggctgtcagcaaaacttaggtgttgctaaaccagaccacacccatgaattatagtgcctct

SEQ ID NO: 19200 - DNA, 122 bp, Homo sapiens
  misc_feature (61)..(62): /note="This region represents a CpG dinucleotide"
  misc_feature (61)..(61): /note="Nucleotide may be methylated to form 5-methylcytosine"
tgaggaaaagatcatattatagaagaggaaactgacactccaagacgcttgttaacttgccgagaaagtgagtggcaaagtctgagttggaagaagttgggtctgacttcaagttcagtatc

SEQ ID NO: 19201 - DNA, 122 bp, Homo sapiens
  misc_feature (61)..(62): /note="This region represents a CpG dinucleotide"
  misc_feature (61)..(61): /note="Nucleotide may be methylated to form 5-methylcytosine"
ccatctcaagtcctgttccttccctgtggcctcctaggcttcgcctcctgccctccactgcgggagttagaagaaggaaagaaagaataaagattaaagtgtagataaacgaaacagacaat

SEQ ID NO: 19202 - DNA, 122 bp, Homo sapiens
  misc_feature (61)..(62): /note="This region represents a CpG dinucleotide"
  misc_feature (61)..(61): /note="Nucleotide may be methylated to form 5-methylcytosine"
ggtgggggtcgggcccaggggctcacacctctctcagggagctgaagctgaccaggaccacgctgatgatgaagagcagcatccccttccacagtgtgtccaggtagtattcgagcacgaag

SEQ ID NO: 19203 - DNA, 122 bp, Homo sapiens
  misc_feature (61)..(62): /note="This region represents a CpG dinucleotide"
  misc_feature (61)..(61): /note="Nucleotide may be methylated to form 5-methylcytosine"
gtgttgccctggtccagaaggattccttgaacccttgtgcctgcaggacagccaacacaccgctgctccagccctgagtgtaaaacccctcattatggcactagacacatggtacttttcag

SEQ ID NO: 19204 - DNA, 122 bp, Homo sapiens
  misc_feature (61)..(62): /note="This region represents a CpG dinucleotide"
  misc_feature (61)..(61): /note="Nucleotide may be methylated to form 5-methylcytosine"
cagggaacaatgaagaatcggctctgaaggaagctgccaactctgcctgagtcagaggaccggaaatcagtaagcttccccctgaaccgtttgctctgggaacgacctagggattaggaaga

SEQ ID NO: 19205 - DNA, 122 bp, Homo sapiens
  misc_feature (61)..(62): /note="This region represents a CpG dinucleotide"
  misc_feature (61)..(61): /note="Nucleotide may be methylated to form 5-methylcytosine"
ggcctgggagccgggctccccacgtgggagccgggtgggggaggggcgggaggggagaagcgggtcccagcctagggactccgagcatgggctaattggaaggggctgcagctccgggggca

SEQ ID NO: 19206 - DNA, 122 bp, Homo sapiens
  misc_feature (61)..(62): /note="This region represents a CpG dinucleotide"
  misc_feature (61)..(61): /note="Nucleotide may be methylated to form 5-methylcytosine"
tttccattgagatcattcctagttaaaactgtgtcactggaaatacaggatgggaaatgacggagaaaaatgaatgctaaaagcagcaacattggaggagttgtgttgtggaagacatggcc

SEQ ID NO: 19207 - DNA, 122 bp, Homo sapiens
  misc_feature (61)..(62): /note="This region represents a CpG dinucleotide"
  misc_feature (61)..(61): /note="Nucleotide may be methylated to form 5-methylcytosine"
tttctagaatgaaatacacacacacacacacacacacacacacacacacacacacacacacgttttagaagtaaaactggcagaaattacctgaattcaattgttggatctatgtcataata

SEQ ID NO: 19208 - DNA, 122 bp, Homo sapiens
  misc_feature (61)..(62): /note="This region represents a CpG dinucleotide"
  misc_feature (61)..(61): /note="Nucleotide may be methylated to form 5-methylcytosine"
ccaaaccacaagcagtatgagctccacctagaaggtgtgtgggaaagccattttgtaagacgtgtttgcacaagcaagacaaaggaagcatttgattggtcagagtggaaagttccggaggt

SEQ ID NO: 19209 - DNA, 122 bp, Homo sapiens
  misc_feature (61)..(62): /note="This region represents a CpG dinucleotide"
  misc_feature (61)..(61): /note="Nucleotide may be methylated to form 5-methylcytosine"
cagagcgcggctgttcctggcgagtcacgctgactcagcacattgcctctgcctccccgccgcgcccgcactccctggcccgccagccaacagcgccccacgagagccgcagcccccagcct

SEQ ID NO: 19210 - DNA, 122 bp, Homo sapiens
  misc_feature (61)..(62): /note="This region represents a CpG dinucleotide"
  misc_feature (61)..(61): /note="Nucleotide may be methylated to form 5-methylcytosine"
tggggccacatctgatgggtgaggggaagctgaggatcagaaggaggcagccctggttaacggatgtcaccctggggctccacaccgtctcagtctgtggccctgtcactggtccaacaaca

SEQ ID NO: 19211 - DNA, 122 bp, Homo sapiens
  misc_feature (61)..(62): /note="This region represents a CpG dinucleotide"
  misc_feature (61)..(61): /note="Nucleotide may be methylated to form 5-methylcytosine"
cagtggccctggctaggaaccaattttgttttctcaccaaccaaattggcattgataagacgcaggagaatactccttgatcataaggatctcccaggctagcataacaactgaatgagtga

SEQ ID NO: 19212 - DNA, 122 bp, Homo sapiens
  misc_feature (61)..(62): /note="This region represents a CpG dinucleotide"
  misc_feature (61)..(61): /note="Nucleotide may be methylated to form 5-methylcytosine"
tttaccaagatgtattgaataaatgtagggaaatacaatgaaaatgagaaaatgaagaagcgaaaatgattatggagaaaaggttgaaacaacatacatataattggaatccatgaaggcaa

SEQ ID NO: 19213 - DNA, 122 bp, Homo sapiens
  misc_feature (61)..(62): /note="This region represents a CpG dinucleotide"
  misc_feature (61)..(61): /note="Nucleotide may be methylated to form 5-methylcytosine"
ttcctattttgtgattaggatgctccatcagtttctgccaccagcttgctggagacgctgcgtgtccctgactcctctcaaagggtgaaaagctcagtcgcacccgagacctgctcctcagg

SEQ ID NO: 19214 - DNA, 122 bp, Homo sapiens
  misc_feature (61)..(62): /note="This region represents a CpG dinucleotide"
  misc_feature (61)..(61): /note="Nucleotide may be methylated to form 5-methylcytosine"
aatgttactgactgggttttcatactaggatccaaccatcttcccatgacacataggtcccgctggtttttaaaacatgccaaggaagtacacggttgaaaatgctgctgatgtctgcaagt

SEQ ID NO: 19215 - DNA, 122 bp, Homo sapiens
  misc_feature (61)..(62): /note="This region represents a CpG dinucleotide"
  misc_feature (61)..(61): /note="Nucleotide may be methylated to form 5-methylcytosine"
gcatcaacacatgcctcatgggtgaggtgagccagtattcagggttgaacacgtgttcagcgagtcaaactgcacactgagtcagccatgaaacaagcgtctagataggggatgtggtaagg

SEQ ID NO: 19216 - DNA, 122 bp, Homo sapiens
  misc_feature (61)..(62): /note="This region represents a CpG dinucleotide"
  misc_feature (61)..(61): /note="Nucleotide may be methylated to form 5-methylcytosine"
taaactcctgatcttaggtaatctgcccgcctcggcctcccaaagtgctgggattacaggcgttaagccaccacgcctggccggttatataagcttttaactttatgtaaaataacattaat

SEQ ID NO: 19217 - DNA, 122 bp, Homo sapiens
  misc_feature (61)..(62): /note="This region represents a CpG dinucleotide"
  misc_feature (61)..(61): /note="Nucleotide may be methylated to form 5-methylcytosine"
actcaactctgacggcttcaagtacagaaaatgtgattttctgcgttcactcttaatgttcgtggtttcttcagttttcatgtttctgcatgctttttataaactggtaaaaacaaaagagt

SEQ ID NO: 19218 - DNA, 122 bp, Homo sapiens
  misc_feature (61)..(62): /note="This region represents a CpG dinucleotide"
  misc_feature (61)..(61): /note="Nucleotide may be methylated to form 5-methylcytosine"
ccgggctcaagtgatcctctcacctcagcctccccaaaatgctaggattacagaggtgagcgactgtgcctggctgatgccttgctgtataaactgcagcctgctggctctccctctccaac

SEQ ID NO: 19219 - DNA, 122 bp, Homo sapiens
  misc_feature (61)..(62): /note="This region represents a CpG dinucleotide"
  misc_feature (61)..(61): /note="Nucleotide may be methylated to form 5-methylcytosine"
ctggcccctgtcaccaggtggctgcagcctagctatgacacaggcctctcttgcttatatcgataaggatctctggctactgtcccaatggtccagccctcctgggtcgaatgaagggcact

SEQ ID NO: 19220 - DNA, 122 bp, Homo sapiens
  misc_feature (61)..(62): /note="This region represents a CpG dinucleotide"
  misc_feature (61)..(61): /note="Nucleotide may be methylated to form 5-methylcytosine"
taatgaaaccagatgggtaagtcatttcctgagcaacaggtatcaggagaaaagaaagagcgaatcgaggacaagtattttagtggcacatatgctgcgcctcttagtcactctggataatg

SEQ ID NO: 19221 - DNA, 122 bp, Homo sapiens
  misc_feature (61)..(62): /note="This region represents a CpG dinucleotide"
  misc_feature (61)..(61): /note="Nucleotide may be methylated to form 5-methylcytosine"
ctctcgggttgataagggacgcacgcccgaagaactgcctttaaccagcactggggacagcggcacgcaggtggccggggttggcgaacagccactgcagccgcgcctgcggccgggaagcg

SEQ ID NO: 19222 - DNA, 122 bp, Homo sapiens
  misc_feature (61)..(62): /note="This region represents a CpG dinucleotide"
  misc_feature (61)..(61): /note="Nucleotide may be methylated to form 5-methylcytosine"
agtgaatagatattgttctcttaatcttccactctgccactgtgaagcaatcatattggacgggacttgtggtagtcttgacagtggttggtttctcttatgaaatctgatgtctccgaaaa

SEQ ID NO: 19223 - DNA, 122 bp, Homo sapiens
  misc_feature (61)..(62): /note="This region represents a CpG dinucleotide"
  misc_feature (61)..(61): /note="Nucleotide may be methylated to form 5-methylcytosine"
tgccggcttatgctgttggaatcacatcttagtagttacataatgccatcaggaccagtacgagactggtttggtgattgagcccatttcctgggatttgttcctatgtattgcagacagat

SEQ ID NO: 19224 - DNA, 122 bp, Homo sapiens
  misc_feature (61)..(62): /note="This region represents a CpG dinucleotide"
  misc_feature (61)..(61): /note="Nucleotide may be methylated to form 5-methylcytosine"
ttatgactacagttttattacagcaaaagggtgcaaattaaaatcagccaagggaggagacgcatagggcagagtccaggaggggtcaaactctgagactctagtcatctgtccgccttgtg

SEQ ID NO: 19225 - DNA, 122 bp, Homo sapiens
  misc_feature (61)..(62): /note="This region represents a CpG dinucleotide"
  misc_feature (61)..(61): /note="Nucleotide may be methylated to form 5-methylcytosine"
aagagcttggctgggcgtggtggctcacgcctgtaatcccagcattttgggaggccgaggcgggctgatcacgaggtcagatggagaccatcgtggctaacaaggtgaaactccatctctac

SEQ ID NO: 19226 - DNA, 122 bp, Homo sapiens
  misc_feature (61)..(62): /note="This region represents a CpG dinucleotide"
  misc_feature (61)..(61): /note="Nucleotide may be methylated to form 5-methylcytosine"
ttctctgctgtgtgcaatatgaagaaaatccttagagatgacctcacaaatttcctgtttcgtagccagacatctgtaaagatggaaatagtcataaaaagagtggtgttagattaggtcat

SEQ ID NO: 19227 - DNA, 122 bp, Homo sapiens
  misc_feature (61)..(62): /note="This region represents a CpG dinucleotide"
  misc_feature (61)..(61): /note="Nucleotide may be methylated to form 5-methylcytosine"
agtcctgtcataatcttatcacattgtacatacttgaaaaaataattggtaaacattctacgaacattctaacctagagtagcccaaaagtaagtggccactacagtgccctggggctttct

SEQ ID NO: 19228 - DNA, 122 bp, Homo sapiens
  misc_feature (61)..(62): /note="This region represents a CpG dinucleotide"
  misc_feature (61)..(61): /note="Nucleotide may be methylated to form 5-methylcytosine"
ttaattcctgagcacctgagattggccacctcgaggatgaggactggggccagagatgttcggcttggaccacgcccactgctcaaggtcaaggacccagacatcattgctcctgtgaatta

SEQ ID NO: 19229 - DNA, 122 bp, Homo sapiens
  misc_feature (61)..(62): /note="This region represents a CpG dinucleotide"
  misc_feature (61)..(61): /note="Nucleotide may be methylated to form 5-methylcytosine"
gttgggtggggaactgaatgtaccagagacacacacattctcagagtcaggctatgtgtacgtgtctgtgtgttttgttttcttttcttttttaatagagatggggtcttggtatgttgtcc

SEQ ID NO: 19230 - DNA, 122 bp, Homo sapiens
  misc_feature (61)..(62): /note="This region represents a CpG dinucleotide"
  misc_feature (61)..(61): /note="Nucleotide may be methylated to form 5-methylcytosine"
tgtatgttgcctcccactgctcctgggagaagtaagtgccgttcacatgactccactgggcgaggacaattggaagccgtgcctgtctatgcacctttgctggtttgaatctggatcctttc

SEQ ID NO: 19231 - DNA, 122 bp, Homo sapiens
  misc_feature (61)..(62): /note="This region represents a CpG dinucleotide"
  misc_feature (61)..(61): /note="Nucleotide may be methylated to form 5-methylcytosine"
catgcaggaggatgtgcgcagtctataggccaacatggcattttatgtaagtgacttaagcgtcccacggaggagcctggaaccaccctccatggatactgaggaatttataaacgcaaatc

SEQ ID NO: 19232 - DNA, 122 bp, Homo sapiens
  misc_feature (61)..(62): /note="This region represents a CpG dinucleotide"
  misc_feature (61)..(61): /note="Nucleotide may be methylated to form 5-methylcytosine"
taggctgtgtaactgggctcagtagagagttgtctgataagataagtctgtagccagaagcgatgcttgtttataggtgattcagcacagaggcagtttattgggactccaattgacagcat

SEQ ID NO: 19233 - DNA, 122 bp, Homo sapiens
  misc_feature (61)..(62): /note="This region represents a CpG dinucleotide"
  misc_feature (61)..(61): /note="Nucleotide may be methylated to form 5-methylcytosine"
gtaagtaacatgaaatagtattgtatacctataaccatttgagctaaaaccaaaaccagacgttgttgtcattgtatgaggaattcactaatgtatttagcattctcaatatagtaaaatcc

SEQ ID NO: 19234 - DNA, 122 bp, Homo sapiens
  misc_feature (61)..(62): /note="This region represents a CpG dinucleotide"
  misc_feature (61)..(61): /note="Nucleotide may be methylated to form 5-methylcytosine"
acttctccaaactggtaataccgctttccttttggtccttttaggacttcttctactcatcgtcatggagatcgtcaactgtcatggcatggatgggagcgcaatttagcctggaaacggga

SEQ ID NO: 19235 - DNA, 122 bp, Homo sapiens
  misc_feature (61)..(62): /note="This region represents a CpG dinucleotide"
  misc_feature (61)..(61): /note="Nucleotide may be methylated to form 5-methylcytosine"
gacagatctggctggggtggattcgaatgagtaataacagtagcagagacttgtgcttaccgtgtgcctatccctctgctaaggacttcatgcagaaatggaggcagagaggtgaatgaagt

SEQ ID NO: 19236 - DNA, 122 bp, Homo sapiens
  misc_feature (61)..(62): /note="This region represents a CpG dinucleotide"
  misc_feature (61)..(61): /note="Nucleotide may be methylated to form 5-methylcytosine"
cccactaggtcttctagctaatctcataaacttccaaaaactttagcacagccatcaccccgtaaggccctggtttgagatctgtatctgtttggataacactgcccctccatggaatatac

SEQ ID NO: 19237 - DNA, 122 bp, Homo sapiens
  misc_feature (61)..(62): /note="This region represents a CpG dinucleotide"
  misc_feature (61)..(61): /note="Nucleotide may be methylated to form 5-methylcytosine"
aacttgggaaaacctggtctctaccaaaaatacaaacattagccagcatggtggtgtgcacgcttgtaattccagctactcaggagcctgaggcatgagaatcacttgaacctgggagacag

SEQ ID NO: 19238 - DNA, 122 bp, Homo sapiens
  misc_feature (61)..(62): /note="This region represents a CpG dinucleotide"
  misc_feature (61)..(61): /note="Nucleotide may be methylated to form 5-methylcytosine"
agacaggatctcactattgttgccaagtctggtcttgaacggtccttggggtcaagtgatcgtcccatctccacctcccaaagtgctgggattacagaagtgagccaccttgctcagcctgt

SEQ ID NO: 19239 - DNA, 122 bp, Homo sapiens
  misc_feature (61)..(62): /note="This region represents a CpG dinucleotide"
  misc_feature (61)..(61): /note="Nucleotide may be methylated to form 5-methylcytosine"
ttaagaagtccctctctgtcctgggcatcattcactcagggccctgttctggattcccaacgtgagaactgaggtgttaagggctaaaaatgacttatattaaatgagaaatgttttttaat

SEQ ID NO: 19240 - DNA, 122 bp, Homo sapiens
  misc_feature (61)..(62): /note="This region represents a CpG dinucleotide"
  misc_feature (61)..(61): /note="Nucleotide may be methylated to form 5-methylcytosine"
tagcagaggaagagaattgctattttggggcatattttaactccaataggtaggcattatcgtccccatattgcagatgaggaaactgaggatcagagagtttaagtagcttgtctggtgtc

SEQ ID NO: 19241 - DNA, 122 bp, Homo sapiens
  misc_feature (61)..(62): /note="This region represents a CpG dinucleotide"
  misc_feature (61)..(61): /note="Nucleotide may be methylated to form 5-methylcytosine"
cattcagttttgcaagtctaatagtcatcctgaatcatcaccctagagcggcctgtattccgttccaactcgtggcttcagcttaccattcaagatgcaagaaagtaaaatattaatattgg

SEQ ID NO: 19242 - DNA, 122 bp, Homo sapiens
  misc_feature (61)..(62): /note="This region represents a CpG dinucleotide"
  misc_feature (61)..(61): /note="Nucleotide may be methylated to form 5-methylcytosine"
gctgtctttttggacacagttcttccgtagatttaatgaatatgtagatagctataattacgccagctactgaaattcataatgtctatggaggctattccatttcctctaaaatgctgata

SEQ ID NO: 19243 - DNA, 122 bp, Homo sapiens
  misc_feature (61)..(62): /note="This region represents a CpG dinucleotide"
  misc_feature (61)..(61): /note="Nucleotide may be methylated to form 5-methylcytosine"
aggttttgctctgtagtgttacctcacctctgataaatgtttggtttcttcctctggtgtcgcaattcaaagaacaagcaaagactgatgagacagaggagtttcccacttaagaaaagctg

SEQ ID NO: 19244 - DNA, 122 bp, Homo sapiens
  misc_feature (61)..(62): /note="This region represents a CpG dinucleotide"
  misc_feature (61)..(61): /note="Nucleotide may be methylated to form 5-methylcytosine"
caggcgtgagtcaccatacccggccctcgattatcttttaagcaggggatctgacatcaccgggtcagcattcctggttggcaaaaatcaacagagctgtggtagggaccacgagctccaga

SEQ ID NO: 19245 - DNA, 122 bp, Homo sapiens
  misc_feature (61)..(62): /note="This region represents a CpG dinucleotide"
  misc_feature (61)..(61): /note="Nucleotide may be methylated to form 5-methylcytosine"
ccggcagcctggtctgtgccgctcggcggcctttgttccgggctgacagctggggctgctcgcgacctcgcggctccttcgcgcccgcggcctgcgcggggtcccgggtcccgtctctctgc

SEQ ID NO: 19246 - DNA, 122 bp, Homo sapiens
  misc_feature (61)..(62): /note="This region represents a CpG dinucleotide"
  misc_feature (61)..(61): /note="Nucleotide may be methylated to form 5-methylcytosine"
agaagagtgacgatgtggagagggacgggctgcatgtgctccccgcccccgagaggcctgcgtcatgcggtctcgcccgctctgcgccaggcgtcctgctaacgtgtcctggagggactctc

SEQ ID NO: 19247 - DNA, 122 bp, Homo sapiens
  misc_feature (61)..(62): /note="This region represents a CpG dinucleotide"
  misc_feature (61)..(61): /note="Nucleotide may be methylated to form 5-methylcytosine"
tcatccttagtcactggtttgtcagattaaaggagaactcacttatactttatgtaagtgcgtatgtttaagataaaatcaaactgcatggtgttaatgagttggaattaaaatcccttctt

SEQ ID NO: 19248 - DNA, 122 bp, Homo sapiens
  misc_feature (61)..(62): /note="This region represents a CpG dinucleotide"
  misc_feature (61)..(61): /note="Nucleotide may be methylated to form 5-methylcytosine"
gacagatacaagtgtgtgatctccatgagaaataagtgagctacattacttataatgctccgaacatgcgtagttcagttcttgtcacctgttaatactaaacacatagaaaggattttaaa

SEQ ID NO: 19249 - DNA, 122 bp, Homo sapiens
  misc_feature (61)..(62): /note="This region represents a CpG dinucleotide"
  misc_feature (61)..(61): /note="Nucleotide may be methylated to form 5-methylcytosine"
gcagctaccgaagtacacatgtcctgttgtcattcatccacagggcaattacagctgccacgggctagccaaggtgtgcagcgatcactttgactcatagaacctaaagccttagtcaggcg

SEQ ID NO: 19250 - DNA, 122 bp, Homo sapiens
  misc_feature (61)..(62): /note="This region represents a CpG dinucleotide"
  misc_feature (61)..(61): /note="Nucleotide may be methylated to form 5-methylcytosine"
gcacacagttgttttcagagcagcaaggccacttcggcaacacccagagcttagggaggacgtggtcaaccagcctttactggggcctgggagactccccactgacacaaactcccttctgg

SEQ ID NO: 19251 - DNA, 122 bp, Homo sapiens
  misc_feature (61)..(62): /note="This region represents a CpG dinucleotide"
  misc_feature (61)..(61): /note="Nucleotide may be methylated to form 5-methylcytosine"
gttgggattacagatgtgagccaccacacccaggtgacagctaactttagaaggcagtgtcgcaccatttcctgccacacctctgcccatgccgtttcctcagccaggagcaccctttcccc

SEQ ID NO: 19252 - DNA, 122 bp, Homo sapiens
  misc_feature (61)..(62): /note="This region represents a CpG dinucleotide"
  misc_feature (61)..(61): /note="Nucleotide may be methylated to form 5-methylcytosine"
cagctccagcttcagctccagctccaggtcgggctccagctccagccgcagcttaggcagcggaggttctgtgtcccaggtgaggaggccccagaatctgaatgagctgcattcattccctt

SEQ ID NO: 19253 - DNA, 122 bp, Homo sapiens
  misc_feature (61)..(62): /note="This region represents a CpG dinucleotide"
  misc_feature (61)..(61): /note="Nucleotide may be methylated to form 5-methylcytosine"
attgtgagtcaaatatggtcacacccatttatgcattgtttggctacagctgcagattggcgtagttgcgacagaatgtatagcacaaaactgaaaatatttagtatctggccctttataga

SEQ ID NO: 19254 - DNA, 122 bp, Homo sapiens
  misc_feature (61)..(62): /note="This region represents a CpG dinucleotide"
  misc_feature (61)..(61): /note="Nucleotide may be methylated to form 5-methylcytosine"
ccctgtggatcctctggttggaagcatagccactcagtatttgaccaacagagcagaacacgacaggatagccagacagaggaccaagagatacgcaacgtaattcacataatttgtatgca

SEQ ID NO: 19255 - DNA, 122 bp, Homo sapiens
  misc_feature (61)..(62): /note="This region represents a CpG dinucleotide"
  misc_feature (61)..(61): /note="Nucleotide may be methylated to form 5-methylcytosine"
cacaccccctccatctagtagcgtgtgggaagacagggtgctgggctgggactctagggccggctagttggcctctagcctgagctggagtctcactcagcctcatgagtagctgggattac

SEQ ID NO: 19256 - DNA, 122 bp, Homo sapiens
  misc_feature (61)..(62): /note="This region represents a CpG dinucleotide"
  misc_feature (61)..(61): /note="Nucleotide may be methylated to form 5-methylcytosine"
tcacagtaacagcctctgcccagcaatttccttttcagcctgcagggtcctcacgctcaccggtctggtcacagggttcaccctgttttgccagctgccagctcatccagccttcctaagtg

SEQ ID NO: 19257 - DNA, 122 bp, Homo sapiens
  misc_feature (61)..(62): /note="This region represents a CpG dinucleotide"
  misc_feature (61)..(61): /note="Nucleotide may be methylated to form 5-methylcytosine"
acacccacgcttccctgtggactcacctctgcagccacaacaacaccctcctctccttggcgtggaagccagcgctcctggcccactcccagtaggggatgtcctctgagttgtttttcctg

SEQ ID NO: 19258 - DNA, 122 bp, Homo sapiens
  misc_feature (61)..(62): /note="This region represents a CpG dinucleotide"
  misc_feature (61)..(61): /note="Nucleotide may be methylated to form 5-methylcytosine"
gaatggcatggcaagtgcaaaggctctgagatgggaccatgctgtctatgttcaagggaccgcaaggaggccagtaggggaggtgccattgtgagtgatggggagagaagtaggatgggagc

SEQ ID NO: 19259 - DNA, 122 bp, Homo sapiens
  misc_feature (61)..(62): /note="This region represents a CpG dinucleotide"
  misc_feature (61)..(61): /note="Nucleotide may be methylated to form 5-methylcytosine"
cttgtgaagcagtattaacatccattacccctccagcagcaatgccttcctcggccgtggcggtgggttacaagtgaagctgaatcttgaaggtacccaagcctccgcctccgcgcaactcg

SEQ ID NO: 19260 - DNA, 122 bp, Homo sapiens
  misc_feature (61)..(62): /note="This region represents a CpG dinucleotide"
  misc_feature (61)..(61): /note="Nucleotide may be methylated to form 5-methylcytosine"
tctaccagccaccttctacctataggatcaagaccagactccttggcacaatggcctgctcgcaacctgctgctccaggacttccttttgccctttcccactagattccagacacaacagtg

SEQ ID NO: 19261 - DNA, 122 bp, Homo sapiens
  misc_feature (61)..(62): /note="This region represents a CpG dinucleotide"
  misc_feature (61)..(61): /note="Nucleotide may be methylated to form 5-methylcytosine"
ctccagcctgggcaacgagagaggaaaaaaaaaaaagctaaggtcacaatgcattacatacggtaccacagtaatcaggtgtttgccttagcagagcagagatattgatctctcctgttcca

SEQ ID NO: 19262 - DNA, 122 bp, Homo sapiens
  misc_feature (61)..(62): /note="This region represents a CpG dinucleotide"
  misc_feature (61)..(61): /note="Nucleotide may be methylated to form 5-methylcytosine"
gcaagacctccaggggattctcatgcactctcaaatgtgagaatcaccgcagtgaagcaacgccttttacaggggctgagaaaggtgaagtctcaccgcatctggttaccattcctgtgtgc

SEQ ID NO: 19263 - DNA, 122 bp, Homo sapiens
  misc_feature (61)..(62): /note="This region represents a CpG dinucleotide"
  misc_feature (61)..(61): /note="Nucleotide may be methylated to form 5-methylcytosine"
gcctagcacacagtaagatctccaataaacatcatatatctataggtagtttcaaactctcgtactaaaagtaaaaaccaaaacaaaccagactcagagagactgactcattcaagatcaca

SEQ ID NO: 19264 - DNA, 122 bp, Homo sapiens
  misc_feature (61)..(62): /note="This region represents a CpG dinucleotide"
  misc_feature (61)..(61): /note="Nucleotide may be methylated to form 5-methylcytosine"
gtgactatcaagaaagagagcgggaggaataaataggcttctttgtgtgagagagaaccacggacatgaagcaggcctctcaggtatggcaggatgcctgctttatgtccaggttgactttg

SEQ ID NO: 19265 - DNA, 122 bp, Homo sapiens
  misc_feature (61)..(62): /note="This region represents a CpG dinucleotide"
  misc_feature (61)..(61): /note="Nucleotide may be methylated to form 5-methylcytosine"
atatggccttgtgcatagtctactaggggagacagatacataaatatgcaaatgcttaatcgattctccagagcaagggtgagtaaacttcaccctatgggccaaatctagtctgctgtttt

SEQ ID NO: 19266 - DNA, 122 bp, Homo sapiens
  misc_feature (61)..(62): /note="This region represents a CpG dinucleotide"
  misc_feature (61)..(61): /note="Nucleotide may be methylated to form 5-methylcytosine"
gaattatttggtgccattgagttccttattgtttccctctgacctagatttctgggtgtgcgccagtaacacgactgtgattgttgctgctttataacattgtctgtggtcagtccaaacaa

SEQ ID NO: 19267 - DNA, 122 bp, Homo sapiens
  misc_feature (61)..(62): /note="This region represents a CpG dinucleotide"
  misc_feature (61)..(61): /note="Nucleotide may be methylated to form 5-methylcytosine"
acactgtcaaatctctttatttttctttcactcagctgattagttctcaccagacatttacgttggtctgtgcgacctcccctttctgtgctcatcctccaccttagaggtctacaccacat

SEQ ID NO: 19268 - DNA, 122 bp, Homo sapiens
  misc_feature (61)..(62): /note="This region represents a CpG dinucleotide"
  misc_feature (61)..(61): /note="Nucleotide may be methylated to form 5-methylcytosine"
tgtgggagatgttctgccctctccccacgctgaagtgcaggtaaagaactccagcactggcgtggtttggagcagaagctctggaaccagactgcctggttttaaatccccatcctattact

SEQ ID NO: 19269 - DNA, 122 bp, Homo sapiens
  misc_feature (61)..(62): /note="This region represents a CpG dinucleotide"
  misc_feature (61)..(61): /note="Nucleotide may be methylated to form 5-methylcytosine"
tctggtgcacctggctggctctgtgctgtctgggctgagcactgagctaggtttcccatacgtctgctctgtcattcacggctgcattggcagcccagaagccatggatgtggctgcaggag

SEQ ID NO: 19270 - DNA, 122 bp, Homo sapiens
  misc_feature (61)..(62): /note="This region represents a CpG dinucleotide"
  misc_feature (61)..(61): /note="Nucleotide may be methylated to form 5-methylcytosine"
agatgaatagctccttaatggctagagaatgcaaaataacacataagaaaaagaaagcttcgatagtagagtaaaaatttggaagaaagaaacgagaaaatataaacaaacaactatgagtg

SEQ ID NO: 19271 - DNA, 122 bp, Homo sapiens
  misc_feature (61)..(62): /note="This region represents a CpG dinucleotide"
  misc_feature (61)..(61): /note="Nucleotide may be methylated to form 5-methylcytosine"
tacccagtagagagattgtgaaagggaaaataaataaatatgaaagctgtgtttagaggtcgaatctgtttagtggtaaaactttagggtctgttttctccaaagactgaagaatgtggcca

SEQ ID NO: 19272 - DNA, 122 bp, Homo sapiens
  misc_feature (61)..(62): /note="This region represents a CpG dinucleotide"
  misc_feature (61)..(61): /note="Nucleotide may be methylated to form 5-methylcytosine"
acagtaccagctgcctgcagagtagctgtgtgaccacaggtcagtttctcaacatctgtgcgccttagttccttgtttgtcaaacagaaatgaaaataacaccaatttgggggttatttctg

SEQ ID NO: 19273 - DNA, 122 bp, Homo sapiens
  misc_feature (61)..(62): /note="This region represents a CpG dinucleotide"
  misc_feature (61)..(61): /note="Nucleotide may be methylated to form 5-methylcytosine"
ggggtggtttctgtacttaagtcactgcttccaataaatccctagtcaggttaactgtaacgggttaacctgttggaaggaaggaaatggaagaggcaaaggaaaaccctttccttccacgc

SEQ ID NO: 19274 - DNA, 122 bp, Homo sapiens
  misc_feature (61)..(62): /note="This region represents a CpG dinucleotide"
  misc_feature (61)..(61): /note="Nucleotide may be methylated to form 5-methylcytosine"
tagggacgggatggcgtccacacagaagcaatgtgaacaatgccccctggagttgtacaacgtggggccttgttgagcagtactgtttcgcaacacatagtagcaagaatcctctttgtaag

SEQ ID NO: 19275 - DNA, 122 bp, Homo sapiens
  misc_feature (61)..(62): /note="This region represents a CpG dinucleotide"
  misc_feature (61)..(61): /note="Nucleotide may be methylated to form 5-methylcytosine"
cagtggcttcactccaaccttcactcaggcagaaccttttacaaaagtgcagaatcattccgctgggaaaggtgccattcactaatggatgttttcacatcctcttctcctcttagttaaca

SEQ ID NO: 19276 - DNA, 122 bp, Homo sapiens
  misc_feature (61)..(62): /note="This region represents a CpG dinucleotide"
  misc_feature (61)..(61): /note="Nucleotide may be methylated to form 5-methylcytosine"
agacagagcaagatcctgtctcaaaaaaaaaaaaaaaaaaagtataagcgtcgtgctgtacggtgacacatcttgtgagagttggcatcaggactcaagcccaggagacacagttctcttac

SEQ ID NO: 19277 - DNA, 122 bp, Homo sapiens
  misc_feature (61)..(62): /note="This region represents a CpG dinucleotide"
  misc_feature (61)..(61): /note="Nucleotide may be methylated to form 5-methylcytosine"
tacctggacacctgatccataaaaactgtgagaaaaatctgtcttgttttaaggccactacgtttgtggcaatttgcagcaataaataattaagtacaagtacatgtcacccaaggtcaact

SEQ ID NO: 19278 - DNA, 122 bp, Homo sapiens
  misc_feature (61)..(62): /note="This region represents a CpG dinucleotide"
  misc_feature (61)..(61): /note="Nucleotide may be methylated to form 5-methylcytosine"
gcggacattgcttcgtctttatcttcatcgccgggctgtttcttagactagcagccttgacgttgggcttcccgacgatgctatccattacactgtcagcaaagcggggggccgcgcatagg

SEQ ID NO: 19279 - DNA, 122 bp, Homo sapiens
  misc_feature (61)..(62): /note="This region represents a CpG dinucleotide"
  misc_feature (61)..(61): /note="Nucleotide may be methylated to form 5-methylcytosine"
tggagctagtactttgaaaggcgtttatctgtcaagagattaaactgctattttcatctacggaggaaactagaggaagtgtaaaccagtttaagaacagcagaaactagcctacttttttc

SEQ ID NO: 19280 - DNA, 122 bp, Homo sapiens
  misc_feature (61)..(62): /note="This region represents a CpG dinucleotide"
  misc_feature (61)..(61): /note="Nucleotide may be methylated to form 5-methylcytosine"
aggaatttgacaaacccaagcccaacattcttctgacccacatgggattacaaaacaatgcggaaaaactaccagtaaatgcctgcccattatttgggggcattgtgccatccaaataaagt

SEQ ID NO: 19281 - DNA, 122 bp, Homo sapiens
  misc_feature (61)..(62): /note="This region represents a CpG dinucleotide"
  misc_feature (61)..(61): /note="Nucleotide may be methylated to form 5-methylcytosine"
agccaaccggggaggtgcctatgatctttctttccaagtttgagggttcaggtctgtgttcgcctgctggttagaccgatttaagttttagagtcccaggagttctgggcgagctgcagcct

SEQ ID NO: 19282 - DNA, 122 bp, Homo sapiens
  misc_feature (61)..(62): /note="This region represents a CpG dinucleotide"
  misc_feature (61)..(61): /note="Nucleotide may be methylated to form 5-methylcytosine"
caaggtatctgtcacagagtcaccattactcgaccaggcctctgtttcacacagtcgggtcgtttttagtcagtgatccaagggggccgggcggtgaaccaagtctaacggaggcagtcaca

SEQ ID NO: 19283 - DNA, 122 bp, Homo sapiens
  misc_feature (61)..(62): /note="This region represents a CpG dinucleotide"
  misc_feature (61)..(61): /note="Nucleotide may be methylated to form 5-methylcytosine"
atgattactgagttttccttcctgtgattttctctcagtgatttctcctttaaaccacaccgtgacatgaactaatatattgggaatgactcagattttccgtatcccgagaaagtgacaaa

SEQ ID NO: 19284 - DNA, 122 bp, Homo sapiens
  misc_feature (61)..(62): /note="This region represents a CpG dinucleotide"
  misc_feature (61)..(61): /note="Nucleotide may be methylated to form 5-methylcytosine"
cctctcagtataaagaaaacaaagttgcaaccataaataaattaggagcaaggcaaagtgcgtggttaaaatctagattggggctgttgaccaaggtatatcaattttcagattggatggga

SEQ ID NO: 19285 - DNA, 122 bp, Homo sapiens
  misc_feature (61)..(62): /note="This region represents a CpG dinucleotide"
  misc_feature (61)..(61): /note="Nucleotide may be methylated to form 5-methylcytosine"
cttcccagcgcctctgtgtacacacacacacacacacacacacacacacacacacgcacgcgcctgggtaccagccccactgcaaatgccctgctccagcacactggggttcttgggaggaa

SEQ ID NO: 19286 - DNA, 122 bp, Homo sapiens
  misc_feature (61)..(62): /note="This region represents a CpG dinucleotide"
  misc_feature (61)..(61): /note="Nucleotide may be methylated to form 5-methylcytosine"
ggctgaggcctgggccctgggaagtgacagcagccctgtgtagtgttttcaaagatcaggcgtggggacccacaccttggcctccaggcctaaggaggagtgttacgtgcagtagcacccgt

SEQ ID NO: 19287 - DNA, 122 bp, Homo sapiens
  misc_feature (61)..(62): /note="This region represents a CpG dinucleotide"
  misc_feature (61)..(61): /note="Nucleotide may be methylated to form 5-methylcytosine"
ctcactaaaaggtgtttgtaaccccaaagtcaatactcagagcacttttggtcatgcctgcgcatgcgcagagcagcaaaaaagttgcgctggtcaacacacacattcccagctgagctcca

SEQ ID NO: 19288 - DNA, 122 bp, Homo sapiens
  misc_feature (61)..(62): /note="This region represents a CpG dinucleotide"
  misc_feature (61)..(61): /note="Nucleotide may be methylated to form 5-methylcytosine"
catgagtcaccacacccagcctgctcttgctgttaactgtactgcctttctgaggcatcacgtctcacctctggtcaaccagtaaaagcccagggatagaaaatgagtaggacatatttaga

SEQ ID NO: 19289 - DNA, 122 bp, Homo sapiens
  misc_feature (61)..(62): /note="This region represents a CpG dinucleotide"
  misc_feature (61)..(61): /note="Nucleotide may be methylated to form 5-methylcytosine"
tggggtttgggtctgaattttcagcatcctctctgaagaatcacccccacccagtgccggcgtgcgcccagccttcccccagccctttccagggcgctgccccctgcctgccctcactactc

SEQ ID NO: 19290 - DNA, 122 bp, Homo sapiens
  misc_feature (61)..(62): /note="This region represents a CpG dinucleotide"
  misc_feature (61)..(61): /note="Nucleotide may be methylated to form 5-methylcytosine"
acaatgaaatcaggccgggcatgcaggctcttgctgggaacagcacactggggaactgtgcgcctttgaggttttaaccgtccgctggggaaacaagtgagttctttgaaggaaaacatatt

SEQ ID NO: 19291 - DNA, 122 bp, Homo sapiens
  misc_feature (61)..(62): /note="This region represents a CpG dinucleotide"
  misc_feature (61)..(61): /note="Nucleotide may be methylated to form 5-methylcytosine"
gctgtcagcagccagaggtcatgggaagggggcgggagaaagtttatctctcaccttagccgtggtattggctgtgaacacattgaacttcccagccaggcaatgctatgttcatggagtgg

SEQ ID NO: 19292 - DNA, 122 bp, Homo sapiens
  misc_feature (61)..(62): /note="This region represents a CpG dinucleotide"
  misc_feature (61)..(61): /note="Nucleotide may be methylated to form 5-methylcytosine"
tggtggggggatgcaattggggccttcaagactagacaaggtattacagctcttcctgaccgtgtccttgggaagcctttgagacctcttggcagggaaagttcaccagagactattgctta

SEQ ID NO: 19293 - DNA, 122 bp, Homo sapiens
  misc_feature (61)..(62): /note="This region represents a CpG dinucleotide"
  misc_feature (61)..(61): /note="Nucleotide may be methylated to form 5-methylcytosine"
atcttcacaacaacctttaagaaagactctgttaccatcttcaatttacagatgcagaaacgaagcacaaagatgtcatcaaagtgtctgaaggtcacagggccagtaaggccatgggaaat

SEQ ID NO: 19294 - DNA, 122 bp, Homo sapiens
  misc_feature (61)..(62): /note="This region represents a CpG dinucleotide"
  misc_feature (61)..(61): /note="Nucleotide may be methylated to form 5-methylcytosine"
caacagggcacctttatgggatccttcagcctaccttttgtctggcataccaactgtcatcgtggtcaagttttatttctcattcccacctgcacctcacatcctcccaagcttgtccaact

SEQ ID NO: 19295 - DNA, 122 bp, Homo sapiens
  misc_feature (61)..(62): /note="This region represents a CpG dinucleotide"
  misc_feature (61)..(61): /note="Nucleotide may be methylated to form 5-methylcytosine"
acacagggatggtgttaaaagccatgggatgtgctcatatactgagtgtagctgcagaaacggaaccaaaggctgagccctgagatatttcaacattaggagtcaaagtagagaagaatcga

SEQ ID NO: 19296 - DNA, 122 bp, Homo sapiens
  misc_feature (61)..(62): /note="This region represents a CpG dinucleotide"
  misc_feature (61)..(61): /note="Nucleotide may be methylated to form 5-methylcytosine"
ggaacagaagtcagttaccttctgatcaggcccaggcagtggggcccaaggagctctttgcgtgcgaatgctttgctttctcaggctaagtagcaatggagaggaaagccagaatactgtgt

SEQ ID NO: 19297 - DNA, 122 bp, Homo sapiens
  misc_feature (61)..(62): /note="This region represents a CpG dinucleotide"
  misc_feature (61)..(61): /note="Nucleotide may be methylated to form 5-methylcytosine"
cactctgaaacttggaggacagggatcaggcaaagtacctaatgtataaaaggagcttaccgagtctgtattaaaggcctgggtcacaaattctagacagtacatcttagtccagaagtcaa

SEQ ID NO: 19298 - DNA, 122 bp, Homo sapiens
  misc_feature (61)..(62): /note="This region represents a CpG dinucleotide"
  misc_feature (61)..(61): /note="Nucleotide may be methylated to form 5-methylcytosine"
tttgcattctgttaatgttgtactttcacaagtcatttccttcctcattctctaaaacaacgtagatacagcaacctacagatgagcaggacatagacacaatgctcccatatgccactttc

SEQ ID NO: 19299 - DNA, 122 bp, Homo sapiens
  misc_feature (61)..(62): /note="This region represents a CpG dinucleotide"
  misc_feature (61)..(61): /note="Nucleotide may be methylated to form 5-methylcytosine"
taatttaatgaattcgcaattgaggatatgagtcaggaggaattcaggagattggggttacgaaacttctaagagagaattttgttgtccattccaaagctggcattcttcctttgcaagag

SEQ ID NO: 19300 - DNA, 122 bp, Homo sapiens
  misc_feature (61)..(62): /note="This region represents a CpG dinucleotide"
  misc_feature (61)..(61): /note="Nucleotide may be methylated to form 5-methylcytosine"
acaatgggccttaccggttatgctagattaaatagtaataaagacgaaaacaatcgtggccgttcacgtgggcaaggctgtgaatcatggccattcactggggaaggaactcaggtacaggt

SEQ ID NO: 19301 - DNA, 122 bp, Homo sapiens
  misc_feature (61)..(62): /note="This region represents a CpG dinucleotide"
  misc_feature (61)..(61): /note="Nucleotide may be methylated to form 5-methylcytosine"
caaactcctgggctccagtgatcctcctgcctcagcctcccagagtgctggaattatagacgtgaactactacaaaagtttgcatttctgtcaaaacccacataatgctgatgctgctggtc

SEQ ID NO: 19302 - DNA, 122 bp, Homo sapiens
  misc_feature (61)..(62): /note="This region represents a CpG dinucleotide"
  misc_feature (61)..(61): /note="Nucleotide may be methylated to form 5-methylcytosine"
ataaaaggactctattcactaagtagcctgtgtttttaaatccagggctgcaggcagcaacgcaagtcaggctgaacattcagtctccagagacagctgtgtggagcaaatcagagttcatg

SEQ ID NO: 19303 - DNA, 122 bp, Homo sapiens
  misc_feature (61)..(62): /note="This region represents a CpG dinucleotide"
  misc_feature (61)..(61): /note="Nucleotide may be methylated to form 5-methylcytosine"
gattacatgcatgagccactgcatccagcagcaataacaatttctgtcataccatataatcgtatctcctttttgcccattaatttagtaattatctttccttcaattaagctaagtcctta

SEQ ID NO: 19304 - DNA, 122 bp, Homo sapiens
  misc_feature (61)..(62): /note="This region represents a CpG dinucleotide"
  misc_feature (61)..(61): /note="Nucleotide may be methylated to form 5-methylcytosine"
cattgtaaaaaaaaccacaatgataagtgaactaacagagatatgcctagagccttgcaacggcaaaaggacatgaccacacattgcctagagaagtcatagggaacttaactgaggaagta

SEQ ID NO: 19305 - DNA, 122 bp, Homo sapiens
  misc_feature (61)..(62): /note="This region represents a CpG dinucleotide"
  misc_feature (61)..(61): /note="Nucleotide may be methylated to form 5-methylcytosine"
ccatgtccatgttttcacgtgaatgggaaaagagtgggaagagaataagaggtatgctggcgataacaggataggcccaatagagagccctgagatcaggaatctgaacagacttgcagggt

SEQ ID NO: 19306 - DNA, 122 bp, Homo sapiens
  misc_feature (61)..(62): /note="This region represents a CpG dinucleotide"
  misc_feature (61)..(61): /note="Nucleotide may be methylated to form 5-methylcytosine"
ttttgtccatgttcatgtacatcttttacatttttaaattcttgttttagtgggttttggcggggagcaaagaaggatgtttattcagatttatttgtttaactgtaagaggaacttgtttg

SEQ ID NO: 19307 - DNA, 122 bp, Homo sapiens
  misc_feature (61)..(62): /note="This region represents a CpG dinucleotide"
  misc_feature (61)..(61): /note="Nucleotide may be methylated to form 5-methylcytosine"
tctttattaccactgttactacaagtttgctgactttcagccacagtggatggaaaagtacgcctgttgcaacatgacgtgagtcagttgttcataaataatgggattgcaccgtcagctct

SEQ ID NO: 19308 - DNA, 122 bp, Homo sapiens
  misc_feature (61)..(62): /note="This region represents a CpG dinucleotide"
  misc_feature (61)..(61): /note="Nucleotide may be methylated to form 5-methylcytosine"
ttatttacttacaccctgctttattccagaaaagattggaggctgcttttgtgtaacattcggattcactccatgagatattttgatctaaatgatacccacatgagagaagcatggcaaag

SEQ ID NO: 19309 - DNA, 122 bp, Homo sapiens
  misc_feature (61)..(62): /note="This region represents a CpG dinucleotide"
  misc_feature (61)..(61): /note="Nucleotide may be methylated to form 5-methylcytosine"
cacccttccctccttatcagaaattgctgtcttgcctatgagtcacatgtcaggatatagcgaccttgctgcacaggacaataaaggacacccacaaggtcagcaaaaggcctactatgtgc

SEQ ID NO: 19310 - DNA, 122 bp, Homo sapiens
  misc_feature (61)..(62): /note="This region represents a CpG dinucleotide"
  misc_feature (61)..(61): /note="Nucleotide may be methylated to form 5-methylcytosine"
tagatgaccacgttttcactgttgaaagcaccaagcccaaataacacctcctggtaatcacgtcaggaaatgcaaatgcatgccatgtgaaaggaatggtcacatttcacttttttatataa

SEQ ID NO: 19311 - DNA, 122 bp, Homo sapiens
  misc_feature (61)..(62): /note="This region represents a CpG dinucleotide"
  misc_feature (61)..(61): /note="Nucleotide may be methylated to form 5-methylcytosine"
gtggagattcttagatgcttctaggtactatctgatgcttctagagtattatctgcctctcggttttggtggcctaatttggggtcctgcggccctactttgatgtcttggggtaaaacctg

SEQ ID NO: 19312 - DNA, 122 bp, Homo sapiens
  misc_feature (61)..(62): /note="This region represents a CpG dinucleotide"
  misc_feature (61)..(61): /note="Nucleotide may be methylated to form 5-methylcytosine"
gttatagactttatcttcccaaaacattcaaatcacatattagccaaatcacttagataccgtcctaagtgctggaactctttaagtcttgttagcagaaaaggctaaagtttaggtaaata

SEQ ID NO: 19313 - DNA, 122 bp, Homo sapiens
  misc_feature (61)..(62): /note="This region represents a CpG dinucleotide"
  misc_feature (61)..(61): /note="Nucleotide may be methylated to form 5-methylcytosine"
ccccgcgatatggggagtaatatcaccgccctctcccccctcagatattagcaaccacatcgcagaggggtgaacactttctgagaactggggagtaatatcacccccctctccctccctgg

SEQ ID NO: 19314 - DNA, 122 bp, Homo sapiens
  misc_feature (61)..(62): /note="This region represents a CpG dinucleotide"
  misc_feature (61)..(61): /note="Nucleotide may be methylated to form 5-methylcytosine"
aagaacagtcatgaaattccccaatgatgcgatgatcaaaagtccttcaattgactgttacgtttcctatgtacttccaaactgtttgtattacctgttctaacctctcccctatcttcacc

SEQ ID NO: 19315 - DNA, 122 bp, Homo sapiens
  misc_feature (61)..(62): /note="This region represents a CpG dinucleotide"
  misc_feature (61)..(61): /note="Nucleotide may be methylated to form 5-methylcytosine"
ctgggagaggctctagagcatggaggctttttcactgaaatctgtttgctcttctcagagcgtagcccaaggcgtgcaaatgtaaacacctgtaatgtaatgagaagtgagttggagatgag

SEQ ID NO: 19316 - DNA, 122 bp, Homo sapiens
  misc_feature (61)..(62): /note="This region represents a CpG dinucleotide"
  misc_feature (61)..(61): /note="Nucleotide may be methylated to form 5-methylcytosine"
ggtgaagaaatagggaaaactgctgccttccggaatagctttggattaaattagagatctcgtgatgacgcgttgttttctgccatttatcccaaactttttcagatctagaattcgagagt

SEQ ID NO: 19317 - DNA, 122 bp, Homo sapiens
  misc_feature (61)..(62): /note="This region represents a CpG dinucleotide"
  misc_feature (61)..(61): /note="Nucleotide may be methylated to form 5-methylcytosine"
aagccctccccaggccagtgatgagcccaaaagctcctctggaaaacgttgatctttgcacggcgcccatgcaggcttccaggccaccagggcatgggcaggactcagcccgccatgggcgc

SEQ ID NO: 19318 - DNA, 122 bp, Homo sapiens
  misc_feature (61)..(62): /note="This region represents a CpG dinucleotide"
  misc_feature (61)..(61): /note="Nucleotide may be methylated to form 5-methylcytosine"
ttccttgctaccactcagagcggcagtgacacagttcccttatctcagaaggccagaagacggctgtcaaaggtcacagggaaatcaaaggcggggtacagggccagagggaggaggaaaca

SEQ ID NO: 19319 - DNA, 122 bp, Homo sapiens
  misc_feature (61)..(62): /note="This region represents a CpG dinucleotide"
  misc_feature (61)..(61): /note="Nucleotide may be methylated to form 5-methylcytosine"
aaaatcaaaacagcacagtagaagggccccgggatgcggctgggcttacgcacctggtcgcgcagctctccctgaggtggtttgctcggctcctccagccggggctccctgcgtgagcatga

SEQ ID NO: 19320 - DNA, 122 bp, Homo sapiens
  misc_feature (61)..(62): /note="This region represents a CpG dinucleotide"
  misc_feature (61)..(61): /note="Nucleotide may be methylated to form 5-methylcytosine"
ggtggcctccgggcagaagcgggagatgggtgcctcgctctacgtcggctgggccgcctccggcctgctgctccttggcggggggctgctttgctgcaactgtccaccccgcacagacaagc

SEQ ID NO: 19321 - DNA, 122 bp, Homo sapiens
  misc_feature (61)..(62): /note="This region represents a CpG dinucleotide"
  misc_feature (61)..(61): /note="Nucleotide may be methylated to form 5-methylcytosine"
ttgtgctgagaaacgaaacattgcctaaccccagggagaaaccacaaaaagacaaaaacacgcaatgtcgctgcagctgggcctgagggctcaacccagatcctgctgtctgcaaggcgggt

SEQ ID NO: 19322 - DNA, 122 bp, Homo sapiens
  misc_feature (61)..(62): /note="This region represents a CpG dinucleotide"
  misc_feature (61)..(61): /note="Nucleotide may be methylated to form 5-methylcytosine"
cctgatccccagagcattcactgcaagaactgtttgcatattcagttattgtttctgctgcgtcagtcatctgttgaagttcactctaatgtggccctgatcaattctgccagctgtgctta

SEQ ID NO: 19323 - DNA, 122 bp, Homo sapiens
  misc_feature (61)..(62): /note="This region represents a CpG dinucleotide"
  misc_feature (61)..(61): /note="Nucleotide may be methylated to form 5-methylcytosine"
taccctgccccgcatccacagatatcttcccttccttgatcgccagtacctggcactgaccgtgctttgaattcaaacaccctgggaggcatagtccctgtgatttaaactaacattgaaga

SEQ ID NO: 19324 - DNA, 122 bp, Homo sapiens
  misc_feature (61)..(62): /note="This region represents a CpG dinucleotide"
  misc_feature (61)..(61): /note="Nucleotide may be methylated to form 5-methylcytosine"
aagctcatattaatgtttacttcttccacattcttcctgttcccttactcctctctgcttcgtttctccttcctttgtttttctctcactgtagagcctgattgtaatgattgtttgtaagt

SEQ ID NO: 19325 - DNA, 122 bp, Homo sapiens
  misc_feature (61)..(62): /note="This region represents a CpG dinucleotide"
  misc_feature (61)..(61): /note="Nucleotide may be methylated to form 5-methylcytosine"
cttcaactatttattaccaaaggatcacaggtcaccaagcatgaggaagtactgtctatacgttttaagtaagagtccaggtaacacttattgttgttgctgcttcagagaattctccttgg

SEQ ID NO: 19326 - DNA, 122 bp, Homo sapiens
  misc_feature (61)..(62): /note="This region represents a CpG dinucleotide"
  misc_feature (61)..(61): /note="Nucleotide may be methylated to form 5-methylcytosine"
agccacctatacccagccaacaaagaattttttttcatataaatttagtgtagcttagagcgtacaatgtttataacgtctacagtagtgtatagccatgtcttaggccttcacattcactc

SEQ ID NO: 19327 - DNA, 122 bp, Homo sapiens
  misc_feature (61)..(62): /note="This region represents a CpG dinucleotide"
  misc_feature (61)..(61): /note="Nucleotide may be methylated to form 5-methylcytosine"
atttatgtactgtaaaagatatgacataagagaagtattttgagatatgaagaagagcaacgtagtagggtatatcatttcttagctacatcatatgggcagtatacttgaatgaatatttc

SEQ ID NO: 19328 - DNA, 122 bp, Homo sapiens
  misc_feature (61)..(62): /note="This region represents a CpG dinucleotide"
  misc_feature (61)..(61): /note="Nucleotide may be methylated to form 5-methylcytosine"
gtctaaaaacacagaaggaaaacctagaaataaactatacattaaatggaatgaactcatcgtcttggaagattttggaaatattccattaagagaatatttcatgatccattcacagagaa

SEQ ID NO: 19329 - DNA, 122 bp, Homo sapiens
  misc_feature (61)..(62): /note="This region represents a CpG dinucleotide"
  misc_feature (61)..(61): /note="Nucleotide may be methylated to form 5-methylcytosine"
tcttgaccatcactgtctatgctgttgtttgttttggcacaactggctttatttcaagctcgttctgtctagtttataatctctatcaacatatcagttatctgcattgccctacttactcc

SEQ ID NO: 19330 - DNA, 122 bp, Homo sapiens
  misc_feature (61)..(62): /note="This region represents a CpG dinucleotide"
  misc_feature (61)..(61): /note="Nucleotide may be methylated to form 5-methylcytosine"
cagttgggatttttctatcagagaagttaaaatacgatgttgcattcacttttatgtgtgcgtattaatgcagtgaatacaaccaggacaggctccttcatcgcatgtctccatctagaatt

SEQ ID NO: 19331 - DNA, 122 bp, Homo sapiens
  misc_feature (61)..(62): /note="This region represents a CpG dinucleotide"
  misc_feature (61)..(61): /note="Nucleotide may be methylated to form 5-methylcytosine"
agccgggagctatttaacgaggtttagggtaggctcctaggtcactgcgcaggactgctccgttacaggtgggcaggggaggcggctgcgttacaggtgggcaggggaggcggctgcgttac

SEQ ID NO: 19332 - DNA, 122 bp, Homo sapiens
  misc_feature (61)..(62): /note="This region represents a CpG dinucleotide"
  misc_feature (61)..(61): /note="Nucleotide may be methylated to form 5-methylcytosine"
aattagctctcacacttgattgccatcattaaaacgagttgttcgggtgctgctcaaagccgattcttactagttattaacttgaaatctctttccattgaaatgtaaaaaaaaaaaaaaaa

SEQ ID NO: 19333 - DNA, 122 bp, Homo sapiens
  misc_feature (61)..(62): /note="This region represents a CpG dinucleotide"
  misc_feature (61)..(61): /note="Nucleotide may be methylated to form 5-methylcytosine"
gccaggtcagggatgaatgacaaggtggcccagaagaccagtcctggcagccacagtggccgtgccgaagcctggtctgtgcagggactgtggtcttcatgggttgctcaggcaactcaagt

SEQ ID NO: 19334 - DNA, 122 bp, Homo sapiens
  misc_feature (61)..(62): /note="This region represents a CpG dinucleotide"
  misc_feature (61)..(61): /note="Nucleotide may be methylated to form 5-methylcytosine"
gtgtgtaagagaagatgtgtgtgttctacatccatcacctcccagagttgcgtgaacaggcgtgagttaagggcatgtactttaacgtggttgataattttaatcacatcctgcaaaacgtt

SEQ ID NO: 19335 - DNA, 122 bp, Homo sapiens
  misc_feature (61)..(62): /note="This region represents a CpG dinucleotide"
  misc_feature (61)..(61): /note="Nucleotide may be methylated to form 5-methylcytosine"
tctaggagtctcaacctgagcattagcctggcctccgcttccactgagcaggctgcccttcggcaggtgacggctgcactgggactccatttcctgctgcataaaacgagtagattaaacta

SEQ ID NO: 19336 - DNA, 122 bp, Homo sapiens
  misc_feature (61)..(62): /note="This region represents a CpG dinucleotide"
  misc_feature (61)..(61): /note="Nucleotide may be methylated to form 5-methylcytosine"
gccagcctcaacctctcaaagtactggaattacaagtgtgagccactgagcccagccaagcggatggatttcaagggttttcatatatatgcttataatcatatttaaatgtattgatgggg

SEQ ID NO: 19337 - DNA, 122 bp, Homo sapiens
  misc_feature (61)..(62): /note="This region represents a CpG dinucleotide"
  misc_feature (61)..(61): /note="Nucleotide may be methylated to form 5-methylcytosine"
gtacttctcattccatgtcactgtcattcactgccctctcattctctccctctctgcacgcgcagaaccacagagcacagactcgagcaagctaaatcgctatttgcagagcctgtggctgt

SEQ ID NO: 19338 - DNA, 122 bp, Homo sapiens
  misc_feature (61)..(62): /note="This region represents a CpG dinucleotide"
  misc_feature (61)..(61): /note="Nucleotide may be methylated to form 5-methylcytosine"
ggccaagtcaggattctaacccagcttggtctcgcatagctccaattctacactgccttacgtgtattgaatatatgaaatgaagctagtgtgattgaagaaatgaattttaaatctcattt

SEQ ID NO: 19339 - DNA, 122 bp, Homo sapiens
  misc_feature (61)..(62): /note="This region represents a CpG dinucleotide"
  misc_feature (61)..(61): /note="Nucleotide may be methylated to form 5-methylcytosine"
aagcccttagaaaccaagaacaagttctcccaggtgaagctgttggcaggagctgtgaagcgtaagagctcagagagtgacaacagtgtgaaaagactgaaaccggaccctgagccagatga

SEQ ID NO: 19340 - DNA, 122 bp, Homo sapiens
  misc_feature (61)..(62): /note="This region represents a CpG dinucleotide"
  misc_feature (61)..(61): /note="Nucleotide may be methylated to form 5-methylcytosine"
tccagtgtttcatcacatctactttacattagaaaggctgcttacaaattgtctgccagccgtgaagtccaagacttatgcaatgatgccccattgtccagcaagttccccatgctcactgc

SEQ ID NO: 19341 - DNA, 122 bp, Homo sapiens
  misc_feature (61)..(62): /note="This region represents a CpG dinucleotide"
  misc_feature (61)..(61): /note="Nucleotide may be methylated to form 5-methylcytosine"
ggaacactgaagggcctagagagtcctccaactgcagaattcattcttgaatcactgaatcgcaaactagcaaggtgtttgattttgaacccttgattttctaagagattatacagatatgc

SEQ ID NO: 19342 - DNA, 122 bp, Homo sapiens
  misc_feature (61)..(62): /note="This region represents a CpG dinucleotide"
  misc_feature (61)..(61): /note="Nucleotide may be methylated to form 5-methylcytosine"
gccgtagtacactccttgggtaacccttaggtaacccatgctcttactttaagtgcacaacgtcagaataggtttgccatgtgcaccattaagctctgagaatcttatctgctatttcaaat

SEQ ID NO: 19343 - DNA, 122 bp, Homo sapiens
  misc_feature (61)..(62): /note="This region represents a CpG dinucleotide"
  misc_feature (61)..(61): /note="Nucleotide may be methylated to form 5-methylcytosine"
catgtcaggaggcaaaggggaagcaagatgccttcctcacaaggcggccggaagaagtgccgagaaaggggaaagagcctcttacataaccatcagctgtggtgagaattcactcactatca

SEQ ID NO: 19344 - DNA, 122 bp, Homo sapiens
  misc_feature (61)..(62): /note="This region represents a CpG dinucleotide"
  misc_feature (61)..(61): /note="Nucleotide may be methylated to form 5-methylcytosine"
ggacatgtcttgttaacagtgtcctctgtactttagtctgaacctgtactcagtgaaggtcggttatatgaactcgtggtagaatgcctggaagctcaccaccagcacttccttgtgtctga

SEQ ID NO: 19345 - DNA, 122 bp, Homo sapiens
  misc_feature (61)..(62): /note="This region represents a CpG dinucleotide"
  misc_feature (61)..(61): /note="Nucleotide may be methylated to form 5-methylcytosine"
tgcttcctcagagatatttattcttaacttgtttagtctgccagtaaatgaccaccaaatcgtcagttttgtttttattacagtctttgctggtttgcttatttgtgcatcactttatttaa

SEQ ID NO: 19346 - DNA, 122 bp, Homo sapiens
  misc_feature (61)..(62): /note="This region represents a CpG dinucleotide"
  misc_feature (61)..(61): /note="Nucleotide may be methylated to form 5-methylcytosine"
ggcagctgtggtgattggcggggagacctacggcgtgagcctggagtccctgcagctggccgagagcactggtggcaagaggctgctgatccccgttgtgcctggtgtggacagcctcaact

SEQ ID NO: 19347 - DNA, 122 bp, Homo sapiens
  misc_feature (61)..(62): /note="This region represents a CpG dinucleotide"
  misc_feature (61)..(61): /note="Nucleotide may be methylated to form 5-methylcytosine"
ttagacatgagcatgtcaagcatacaactattattcttgaaacgggagagttccctgaaccgctctcaggacttgtgacaggagtgtggctcatttactcagccactgtgcactcaaatccc

SEQ ID NO: 19348 - DNA, 122 bp, Homo sapiens
  misc_feature (61)..(62): /note="This region represents a CpG dinucleotide"
  misc_feature (61)..(61): /note="Nucleotide may be methylated to form 5-methylcytosine"
tccttccttatggtaacaatgacttcctgatccacctttgtctatgaagcttggctgccacgcatgagtctcactttgatggacagttattgacaggtcttcttctgagaattactgttctg

SEQ ID NO: 19349 - DNA, 122 bp, Homo sapiens
  misc_feature (61)..(62): /note="This region represents a CpG dinucleotide"
  misc_feature (61)..(61): /note="Nucleotide may be methylated to form 5-methylcytosine"
acatatatctctaggacacagacacacacagacagacatacacacacacacacacacacacgcacgcacaagggggaaatcatcagaaaattaaaagcggttaccactttggatgattttta

SEQ ID NO: 19350 - DNA, 122 bp, Homo sapiens
  misc_feature (61)..(62): /note="This region represents a CpG dinucleotide"
  misc_feature (61)..(61): /note="Nucleotide may be methylated to form 5-methylcytosine"
ttttaggttattttcttggaaggttgggaaaagatgtttgttttaacaggtcatgtactacgttgttgttttcatttctgttataagtaaaactaaaagcacagaatggtgggaaaggggct

SEQ ID NO: 19351 - DNA, 122 bp, Homo sapiens
  misc_feature (61)..(62): /note="This region represents a CpG dinucleotide"
  misc_feature (61)..(61): /note="Nucleotide may be methylated to form 5-methylcytosine"
ttaagagctgtaacactcactgcgaaggtctgcaccttcactcttgagccagcaagaccacgaacccaccaggagaaaactccgaacacaactgaacatcagaaggaacaaactccagacgc

SEQ ID NO: 19352 - DNA, 122 bp, Homo sapiens
  misc_feature (61)..(62): /note="This region represents a CpG dinucleotide"
  misc_feature (61)..(61): /note="Nucleotide may be methylated to form 5-methylcytosine"
gctgagactcctagcctgtagtcccgttttagcaggatgcatcacggggattaggactctcgctagggagtttggtcatgcagtaggagagtggaagggtgggatgagaacacaggcccctt

SEQ ID NO: 19353 - DNA, 122 bp, Homo sapiens
  misc_feature (61)..(62): /note="This region represents a CpG dinucleotide"
  misc_feature (61)..(61): /note="Nucleotide may be methylated to form 5-methylcytosine"
ggccttttcgaagagtttagctacgcaaccgttttccattaatgttaccatcttgtgactcgggtgacctgtgcgacttgggtcgtgaattctcaggtcggccttcccaatgcttgagaagg

SEQ ID NO: 19354 - DNA, 122 bp, Homo sapiens
  misc_feature (61)..(62): /note="This region represents a CpG dinucleotide"
  misc_feature (61)..(61): /note="Nucleotide may be methylated to form 5-methylcytosine"
aagccagggggattgagcaacatctcaaaggcaaatcaccgaggaaagcaatcgacctaccgatccgctcaggaaaagtcactgcaaggagactgtaattggcagtgggggataccaggaaa

SEQ ID NO: 19355 - DNA, 122 bp, Homo sapiens
  misc_feature (61)..(62): /note="This region represents a CpG dinucleotide"
  misc_feature (61)..(61): /note="Nucleotide may be methylated to form 5-methylcytosine"
gcattaaagaatgacaagggggtagcgggcagggagcactggtcccctgggcctggcctccgcagaggtcgcagaagacctccctgaagagggtgcctgaggaccagggtggctgacgaggg

SEQ ID NO: 19356 - DNA, 122 bp, Homo sapiens
  misc_feature (61)..(62): /note="This region represents a CpG dinucleotide"
  misc_feature (61)..(61): /note="Nucleotide may be methylated to form 5-methylcytosine"
ctgcattgtagaatttctcgccctgcaggttatggaagtggatccttcccaggtgatgtgcgagggaagacacatttactatccttgatggggctgattcctttagtttctctagcagcaga

SEQ ID NO: 19357 - DNA, 122 bp, Homo sapiens
  misc_feature (61)..(62): /note="This region represents a CpG dinucleotide"
  misc_feature (61)..(61): /note="Nucleotide may be methylated to form 5-methylcytosine"
catgccataaacactattccacattttgtttatttcagtttacaaaacatcctgcaatctcgttgttttctgttgtgtagatgtttatttaaccaatgccctaatggtgaacacttcctggt

SEQ ID NO: 19358 - DNA, 122 bp, Homo sapiens
  misc_feature (61)..(62): /note="This region represents a CpG dinucleotide"
  misc_feature (61)..(61): /note="Nucleotide may be methylated to form 5-methylcytosine"
cggcccgccggcccgcagggaccgcgccctggaacgctcccgagccgcgccacgcgggagcggccccagcgcccctggccctgccctccgagaaagcccggccgaggctgccccgaggccca

SEQ ID NO: 19359 - DNA, 122 bp, Homo sapiens
  misc_feature (61)..(62): /note="This region represents a CpG dinucleotide"
  misc_feature (61)..(61): /note="Nucleotide may be methylated to form 5-methylcytosine"
tcttctcccctctcacgtcacaagaaaaaccagtcaagaggtcggagagtgtgttataaccgtcctgctgaaaattaagatgtagcaatcacagtttggaggaatccacagcgacagaggag

SEQ ID NO: 19360 - DNA, 122 bp, Homo sapiens
  misc_feature (61)..(62): /note="This region represents a CpG dinucleotide"
  misc_feature (61)..(61): /note="Nucleotide may be methylated to form 5-methylcytosine"
cctgctcctccccaccactgtttccttgactggaaagtgggtgtgatggagaacatgacacgctctcagctctcggagtctagcttctctttgctgtgtccaaagtgagggcttactataga

SEQ ID NO: 19361 - DNA, 122 bp, Homo sapiens
  misc_feature (61)..(62): /note="This region represents a CpG dinucleotide"
  misc_feature (61)..(61): /note="Nucleotide may be methylated to form 5-methylcytosine"
aaggagattaccctcaatcatatgggtgggccttttccaatcaggtgaaggccttaacagcgaagactgaggcttatcaaagaaggaggaattctgcctcaagacttgcaacatcagctctt

SEQ ID NO: 19362 - DNA, 122 bp, Homo sapiens
  misc_feature (61)..(62): /note="This region represents a CpG dinucleotide"
  misc_feature (61)..(61): /note="Nucleotide may be methylated to form 5-methylcytosine"
gatgtgctttggtaagaaatggctgagtatgagagtgtaaacggggaaaaaaagctgtaacgctaaaggccataatgagacttcaatgagcttcagctggtgcccggatcagtgaggacaac

SEQ ID NO: 19363 - DNA, 122 bp, Homo sapiens
  misc_feature (61)..(62): /note="This region represents a CpG dinucleotide"
  misc_feature (61)..(61): /note="Nucleotide may be methylated to form 5-methylcytosine"
ctcaataattctaaagtaatttttcaaggtcagacttggctatagctcagtgtgtcactgcgttgtaaagattgatgcttctgtttccttgaaattatcctggttatctttagtaatttttt

SEQ ID NO: 19364 - DNA, 122 bp, Homo sapiens
  misc_feature (61)..(62): /note="This region represents a CpG dinucleotide"
  misc_feature (61)..(61): /note="Nucleotide may be methylated to form 5-methylcytosine"
gcggacacaggcacattcaagcttgaggcagagtggagcacaggaaagaacatatgggtgcgttcatcccagccttgtggattcctaatgccagctttgtcactcagtagtatgtgacttta

SEQ ID NO: 19365 - DNA, 122 bp, Homo sapiens
  misc_feature (61)..(62): /note="This region represents a CpG dinucleotide"
  misc_feature (61)..(61): /note="Nucleotide may be methylated to form 5-methylcytosine"
tcacgtgccgccttccaggccacagtgaagacttttcatgttattctaggtgtgatggggcgccttggagtgtttcaacccggagagtgacatgatctgatttatgtttataaagtgcctgg

SEQ ID NO: 19366 - DNA, 122 bp, Homo sapiens
  misc_feature (61)..(62): /note="This region represents a CpG dinucleotide"
  misc_feature (61)..(61): /note="Nucleotide may be methylated to form 5-methylcytosine"
cttggctaactagtgctagcagcctagtttgggacctatctcagctttcaacatgctttccgtactaagcttaatcatttctagcttttttgtttttttttatttgtttgtttattttttga

SEQ ID NO: 19367 - DNA, 122 bp, Homo sapiens
  misc_feature (61)..(62): /note="This region represents a CpG dinucleotide"
  misc_feature (61)..(61): /note="Nucleotide may be methylated to form 5-methylcytosine"
cccggtgaaaaacatgaaatgtgactatccggaaatggagtgtgatcacaggggcacgtacggctgagtcatccaaaacgctgactgtcgtgtagggctccgtggttttggtggttttctta

SEQ ID NO: 19368 - DNA, 122 bp, Homo sapiens
  misc_feature (61)..(62): /note="This region represents a CpG dinucleotide"
  misc_feature (61)..(61): /note="Nucleotide may be methylated to form 5-methylcytosine"
ctccaccccagtgggtcagctggaaatgggctcaaaacttaatcacacaattacctcagccgtggcttccctgcagcctctgaggaggcagagttttttctcctttgctggtaggtttctgc

SEQ ID NO: 19369 - DNA, 122 bp, Homo sapiens
  misc_feature (61)..(62): /note="This region represents a CpG dinucleotide"
  misc_feature (61)..(61): /note="Nucleotide may be methylated to form 5-methylcytosine"
ctagatcatcctttgggcaagaaccagttttgaagtgcttaaagaagataactccagtttcgcttcagtcatcaatcatgtgtgattctgtgtaggcaaaagacaatctcaatattcatttg

SEQ ID NO: 19370 - DNA, 122 bp, Homo sapiens
  misc_feature (61)..(62): /note="This region represents a CpG dinucleotide"
  misc_feature (61)..(61): /note="Nucleotide may be methylated to form 5-methylcytosine"
tcagtactgggacctgaccttgcttcttctaatgtttgcctactgtgttcatgcagatttcgttaggttaaatgttcaacctacttattaagttgggtccagtgtgatctcttcctaggaaa

SEQ ID NO: 19371 - DNA, 122 bp, Homo sapiens
  misc_feature (61)..(62): /note="This region represents a CpG dinucleotide"
  misc_feature (61)..(61): /note="Nucleotide may be methylated to form 5-methylcytosine"
gatcctgtttggtccccaggtcctgcagcatcagcactaatgggactttgatctggagtgcgtgtcttcaccctctttgctgtttttattgacactgtgcagtaagagcagtgcaatttcct

SEQ ID NO: 19372 - DNA, 122 bp, Homo sapiens
  misc_feature (61)..(62): /note="This region represents a CpG dinucleotide"
  misc_feature (61)..(61): /note="Nucleotide may be methylated to form 5-methylcytosine"
aaccacatatcacttcaaaatctaaggaatttgcagtttctttgtggatataagaaggtacggacatgccaagctgtgccgcaaagtgtttaaatggcacaggcccagcatctaggacaaag

SEQ ID NO: 19373 - DNA, 122 bp, Homo sapiens
  misc_feature (61)..(62): /note="This region represents a CpG dinucleotide"
  misc_feature (61)..(61): /note="Nucleotide may be methylated to form 5-methylcytosine"
gcatattctggtctcctgcagtggttagttctacttctttgtagcatttgaaccctgacacgttttctcttgatttctaggacataattttctcttttcagtctctctctttatggttgtat

SEQ ID NO: 19374 - DNA, 122 bp, Homo sapiens
  misc_feature (61)..(62): /note="This region represents a CpG dinucleotide"
  misc_feature (61)..(61): /note="Nucleotide may be methylated to form 5-methylcytosine"
atgtccttattagtgtgcaagcacttccttcatttctggcattacacagtatttcagactcgtcttgactcgtcttggtttgttgttgttgttttcatttttgttttgcccccaaccctgta

SEQ ID NO: 19375 - DNA, 122 bp, Homo sapiens
  misc_feature (61)..(62): /note="This region represents a CpG dinucleotide"
  misc_feature (61)..(61): /note="Nucleotide may be methylated to form 5-methylcytosine"
ttgtttcctgacttgccctgatgtaggccaccctgaaaatcaggaactccaacttctacacggtggcagtgaccagcctgtccagccagattcagtacatgaacacagtggtcagtacatat

SEQ ID NO: 19376 - DNA, 122 bp, Homo sapiens
  misc_feature (61)..(62): /note="This region represents a CpG dinucleotide"
  misc_feature (61)..(61): /note="Nucleotide may be methylated to form 5-methylcytosine"
ataaattacttactgaaatagagcttgtgacagattcccagttggtctctgaagctgctgcgggttggaaatcttcctggaaggcaaagaaacatctgtgagtcagtcaaacctctgttcaa

SEQ ID NO: 19377 - DNA, 122 bp, Homo sapiens
  misc_feature (61)..(62): /note="This region represents a CpG dinucleotide"
  misc_feature (61)..(61): /note="Nucleotide may be methylated to form 5-methylcytosine"
gcctttttctgagcagttggcacagatcttaccacttctgaaggtagtctctgacacagacgtcttttctctgtggttttcattgtcagtgttcacccgaagcttgaatcttctggtgggtt

SEQ ID NO: 19378 - DNA, 122 bp, Homo sapiens
  misc_feature (61)..(62): /note="This region represents a CpG dinucleotide"
  misc_feature (61)..(61): /note="Nucleotide may be methylated to form 5-methylcytosine"
aactccaaactttttagtgtggtgttcaagtaacttcaactgctctatctttctaccctccgctccccctgcatttccaatagcagaaatcctaaacagtgttcgacacgttgaatccagtg

SEQ ID NO: 19379 - DNA, 122 bp, Homo sapiens
  misc_feature (61)..(62): /note="This region represents a CpG dinucleotide"
  misc_feature (61)..(61): /note="Nucleotide may be methylated to form 5-methylcytosine"
ctttattgggacaactggcagaactagaattcagtcagagggttgatggtaataacataccgatgttaatttcctgagtctgatggctgtgccggagaatgtcgttgttcataggaaatacc

SEQ ID NO: 19380 - DNA, 122 bp, Homo sapiens
  misc_feature (61)..(62): /note="This region represents a CpG dinucleotide"
  misc_feature (61)..(61): /note="Nucleotide may be methylated to form 5-methylcytosine"
tacctctcgaggggttgtgaggattaaatgaaatgatattatatgagatatgacttagtacggtgagtaatctcttctaatgtattggttacataaatccagatttctatggatcagatgtt

SEQ ID NO: 19381 - DNA, 122 bp, Homo sapiens
  misc_feature (61)..(62): /note="This region represents a CpG dinucleotide"
  misc_feature (61)..(61): /note="Nucleotide may be methylated to form 5-methylcytosine"
ggactccctttcttctctgtccttgacacaccacaaagctgtgatgcttttgtttgcaggcgctgcagctgccaaggctccaatctgagttctatgctcctgtctctcttccaccttgagca

SEQ ID NO: 19382 - DNA, 122 bp, Homo sapiens
  misc_feature (61)..(62): /note="This region represents a CpG dinucleotide"
  misc_feature (61)..(61): /note="Nucleotide may be methylated to form 5-methylcytosine"
aatctggaagtatgaaaatatgattacaagttccattcattatttgtgttctgtggttttcgtattgttcttgaaatttacttcctgcctgcctgaagttttgtattatgaatttagtgtca

SEQ ID NO: 19383 - DNA, 122 bp, Homo sapiens
  misc_feature (61)..(62): /note="This region represents a CpG dinucleotide"
  misc_feature (61)..(61): /note="Nucleotide may be methylated to form 5-methylcytosine"
ataacactggccaggcatcacgaggaagctatgagcactcggttgatgtctgcagtcacacggaggcctcagttactaaagaaagaggagtgttactgagatcagttacttcacacccattt

SEQ ID NO: 19384 - DNA, 122 bp, Homo sapiens
  misc_feature (61)..(62): /note="This region represents a CpG dinucleotide"
  misc_feature (61)..(61): /note="Nucleotide may be methylated to form 5-methylcytosine"
taacaacatgggtttcatcacagtggggtcccccttgttctctctgggtgtgcagatggtcgtgtcctttgatgatgatgctgggaaatggggaagggctttccaggggagaacataaaagt

SEQ ID NO: 19385 - DNA, 122 bp, Homo sapiens
  misc_feature (61)..(62): /note="This region represents a CpG dinucleotide"
  misc_feature (61)..(61): /note="Nucleotide may be methylated to form 5-methylcytosine"
gaacatccttttaagttaaaaatggaaaaaccaaggccattttgggacaactgtttttaacgttaatgcatcacaatacaggaaaatactggaggtgagcaggttatttgcctgagtcattt

SEQ ID NO: 19386 - DNA, 122 bp, Homo sapiens
  misc_feature (61)..(62): /note="This region represents a CpG dinucleotide"
  misc_feature (61)..(61): /note="Nucleotide may be methylated to form 5-methylcytosine"
taatacaaataagaagtatatcctgttgtatttcctttctgttacagtagcactgtgtcacggagtgttgggtgcagatcaaatgagatgctgaatgtgtaagcacttagtaggttgcatgc

SEQ ID NO: 19387 - DNA, 122 bp, Homo sapiens
  misc_feature (61)..(62): /note="This region represents a CpG dinucleotide"
  misc_feature (61)..(61): /note="Nucleotide may be methylated to form 5-methylcytosine"
ggtccccaagacttggggctcctctgctctcttgtgagtgttggagtctgaggcggggcccgtggacaaggcagtttctgcgtctcttggccacagctgcttggggaagtgttttcattgca

SEQ ID NO: 19388 - DNA, 122 bp, Homo sapiens
  misc_feature (61)..(62): /note="This region represents a CpG dinucleotide"
  misc_feature (61)..(61): /note="Nucleotide may be methylated to form 5-methylcytosine"
ccactgctatattgggagttacgtcatactctaccccctggatatttggatcaatatcaccgggtgggtgtacacctactgcaatattgaaagtaataccatgctgtctccctccctggaca

SEQ ID NO: 19389 - DNA, 122 bp, Homo sapiens
  misc_feature (61)..(62): /note="This region represents a CpG dinucleotide"
  misc_feature (61)..(61): /note="Nucleotide may be methylated to form 5-methylcytosine"
accactgatgaatcagtgccactcacatcctgggtaattctagggacactagttggacaacgctgacatctgaagaggtggcagggcggaacatggatccctttaaggctactttattgtcg

SEQ ID NO: 19390 - DNA, 122 bp, Homo sapiens
  misc_feature (61)..(62): /note="This region represents a CpG dinucleotide"
  misc_feature (61)..(61): /note="Nucleotide may be methylated to form 5-methylcytosine"
gctacagaactcccgcagcgctgcaaatcatatgccaatcctgcatatgaggtacaagaacggcattgggtcagcattttctgagtgtgtttgtaacctgctgtttggtgtatggttacaca

SEQ ID NO: 19391 - DNA, 122 bp, Homo sapiens
  misc_feature (61)..(62): /note="This region represents a CpG dinucleotide"
  misc_feature (61)..(61): /note="Nucleotide may be methylated to form 5-methylcytosine"
atttttactaatttgcttgctgtctctggtatgtgatacaattcttcctctggtgacaaccgtaaatcttcagtaaagttcttaaggtcagaggatgcttaggttaagtaaaatttccatag

SEQ ID NO: 19392 - DNA, 122 bp, Homo sapiens
  misc_feature (61)..(62): /note="This region represents a CpG dinucleotide"
  misc_feature (61)..(61): /note="Nucleotide may be methylated to form 5-methylcytosine"
tgtgtattaagtcttgtttcctatctcctttcattttttccttctcttttaaagtcagttcgtcttaagtagtttctttgttaggtaaatttaataataataaaaatctgacgtgttcagga

SEQ ID NO: 19393 - DNA, 122 bp, Homo sapiens
  misc_feature (61)..(62): /note="This region represents a CpG dinucleotide"
  misc_feature (61)..(61): /note="Nucleotide may be methylated to form 5-methylcytosine"
cagctaggtatctgatttcatatgcctgtttgctcgttttgcaagacaacatctgcctatcgtcatactgtttctgtgatctgagaatgaatgggctctcctggcacattagaggaatagca

SEQ ID NO: 19394 - DNA, 122 bp, Homo sapiens
  misc_feature (61)..(62): /note="This region represents a CpG dinucleotide"
  misc_feature (61)..(61): /note="Nucleotide may be methylated to form 5-methylcytosine"
ccctgcctcggaccgcagggtgctgacctgccttccccaggtgccagtttctcatcagggcgtggtgcccgcccttatcccctgcatgtgacagtggaggcccagtccccaagtgtgggtgc

SEQ ID NO: 19395 - DNA, 122 bp, Homo sapiens
  misc_feature (61)..(62): /note="This region represents a CpG dinucleotide"
  misc_feature (61)..(61): /note="Nucleotide may be methylated to form 5-methylcytosine"
ggatggaccatgatcctaagatgagttttaattttgtgtttacagtcatctcttgtacaacgtggagaagaaaagatatacttactactttgcttcaggtacacataagaaaacctcttttt

SEQ ID NO: 19396 - DNA, 122 bp, Homo sapiens
  misc_feature (61)..(62): /note="This region represents a CpG dinucleotide"
  misc_feature (61)..(61): /note="Nucleotide may be methylated to form 5-methylcytosine"
ttgtgtgtgcacgtgtgtgtggctggtctgcagtcatactctgccttaggctgacagcttcggaggtgcaaatgtgtgtttccctcattctactttggcatccatcatgaagcccgcctttc

SEQ ID NO: 19397 - DNA, 122 bp, Homo sapiens
  misc_feature (61)..(62): /note="This region represents a CpG dinucleotide"
  misc_feature (61)..(61): /note="Nucleotide may be methylated to form 5-methylcytosine"
ggaatactatattagcgactcataaagagcatctccagttttgttcttttgcttctctgacgatagttttggtaggttagacctcaggaagaactaaagtagatactgcttttttctttgct

SEQ ID NO: 19398 - DNA, 122 bp, Homo sapiens
  misc_feature (61)..(62): /note="This region represents a CpG dinucleotide"
  misc_feature (61)..(61): /note="Nucleotide may be methylated to form 5-methylcytosine"
tgaaggtcatttgaagctgataacagatgactcagcacaacacgaagaggcccaggcttgcgaatgaatgagtaagtgaacctgaatccctgaacacttgaggtagccacattttcacacag

SEQ ID NO: 19399 - DNA, 122 bp, Homo sapiens
  misc_feature (61)..(62): /note="This region represents a CpG dinucleotide"
  misc_feature (61)..(61): /note="Nucleotide may be methylated to form 5-methylcytosine"
ggctgtcttgtgcattgtaggacattaagcagtttccttgacctctacacatgagatgaccgtatcacttcccttctcagttgtgtcaactaacagtatctcctggggagcaaaattacctt

SEQ ID NO: 19400 - DNA, 122 bp, Homo sapiens
  misc_feature (61)..(62): /note="This region represents a CpG dinucleotide"
  misc_feature (61)..(61): /note="Nucleotide may be methylated to form 5-methylcytosine"
aacctgaagtaagctaagttaaacaatcagttttcttcttccactgttctgtttccttgtcgccaacttacaaacatcactgttctgccactgcccagagggagctctcattctattttgta

SEQ ID NO: 19401 - DNA, 122 bp, Homo sapiens
  misc_feature (61)..(62): /note="This region represents a CpG dinucleotide"
  misc_feature (61)..(61): /note="Nucleotide may be methylated to form 5-methylcytosine"
gtctcagcctctcagcctggactggacaactgggcttcgggaattcatttaaattctacccgctacacgccttccctggattcagggcggcgtccagtgcattcatcacgcgtgtgctgccg

SEQ ID NO: 19402 - DNA, 122 bp, Homo sapiens
  misc_feature (61)..(62): /note="This region represents a CpG dinucleotide"
  misc_feature (61)..(61): /note="Nucleotide may be methylated to form 5-methylcytosine"
aaaatatccctagctgggcccagcctgaaggaaatgtttaaataccaatatctctttggccgtcttagaggcctcccaagaacaaaaataaaggaaactaagggcatgttttattgactatt

SEQ ID NO: 19403 - DNA, 122 bp, Homo sapiens
  misc_feature (61)..(62): /note="This region represents a CpG dinucleotide"
  misc_feature (61)..(61): /note="Nucleotide may be methylated to form 5-methylcytosine"
gaagtaaaatggcctgctcatacattactaacaagaatataggccaggcacggtcgctcacgcctgtaatcccagtactttgggaggccgaggcgggtggatcatctgaggtcaggagtttg

SEQ ID NO: 19404 - DNA, 122 bp, Homo sapiens
  misc_feature (61)..(62): /note="This region represents a CpG dinucleotide"
  misc_feature (61)..(61): /note="Nucleotide may be methylated to form 5-methylcytosine"
ccactcctgtccagaacagtgaggacctgttccatccatcagaaaggcctccgcagaagccgcgagccgtgccttcgcgtgtgcacacctgagagctcacgcgtgtctgtgggtactcaggg

SEQ ID NO: 19405 - DNA, 122 bp, Homo sapiens
  misc_feature (61)..(62): /note="This region represents a CpG dinucleotide"
  misc_feature (61)..(61): /note="Nucleotide may be methylated to form 5-methylcytosine"
aggggaagaaagttgaaatactaaaagtgggaggagagagggagagtgtgggagcaaggccgggacccaccccaaaagagattggaatacatgtgcagctttagttcatggcctgccaaata

SEQ ID NO: 19406 - DNA, 122 bp, Homo sapiens
  misc_feature (61)..(62): /note="This region represents a CpG dinucleotide"
  misc_feature (61)..(61): /note="Nucleotide may be methylated to form 5-methylcytosine"
tggcttgaccccagtgacaggattggtggctggtccatcaggaatgcctggctcctgctgcgttttggagctggtgctgccggcccgtttgcctaggcacactcacagggcacctcccagtt

SEQ ID NO: 19407 - DNA, 122 bp, Homo sapiens
  misc_feature (61)..(62): /note="This region represents a CpG dinucleotide"
  misc_feature (61)..(61): /note="Nucleotide may be methylated to form 5-methylcytosine"
tcttgcagaggaggaaactgaagctctgagaagttgagtaactcgcccaagatctcacagcggaaagtggtagagctgcaacttacacttcggtttgttgactccaaagcctgtgcttttca

SEQ ID NO: 19408 - DNA, 122 bp, Homo sapiens
  misc_feature (61)..(62): /note="This region represents a CpG dinucleotide"
  misc_feature (61)..(61): /note="Nucleotide may be methylated to form 5-methylcytosine"
tcattgtggttttactataaaatattataaagcaaaagaaacaccaactacctacctaagcgatgaaatccaaaggtgaatcttttggttggtgattttgatgatagccacaaagcaagcag

SEQ ID NO: 19409 - DNA, 122 bp, Homo sapiens
  misc_feature (61)..(62): /note="This region represents a CpG dinucleotide"
  misc_feature (61)..(61): /note="Nucleotide may be methylated to form 5-methylcytosine"
atagtacttgcctcacacagttgcttcaaggattagcaaaaaagataggcaacacccctgcgtggtactgctaccaccctgcaacacccgcccagtcatcagagagaattgggtggagcacc

SEQ ID NO: 19410 - DNA, 122 bp, Homo sapiens
  misc_feature (61)..(62): /note="This region represents a CpG dinucleotide"
  misc_feature (61)..(61): /note="Nucleotide may be methylated to form 5-methylcytosine"
gaatttcaccccctaaactctcttaggcataaaagcacagggaggaagcacatcttcctccgttatatgtcatcaaggctgaaggttgacagacagtagggtggaggagtgaatgccacatg

SEQ ID NO: 19411 - DNA, 122 bp, Homo sapiens
  misc_feature (61)..(62): /note="This region represents a CpG dinucleotide"
  misc_feature (61)..(61): /note="Nucleotide may be methylated to form 5-methylcytosine"
ttatgctgtaagacccaaagtctgctgagggctgcccctgccaggtaacttccggagacccggagttacttggagacagacccggccctttgcacattccaagtgaaggacgtctcgcgcat

SEQ ID NO: 19412 - DNA, 122 bp, Homo sapiens
  misc_feature (61)..(62): /note="This region represents a CpG dinucleotide"
  misc_feature (61)..(61): /note="Nucleotide may be methylated to form 5-methylcytosine"
tgattaattttgtgtaaatgattagccacctcagctgactcagagccacaggaagctctacggctgtgctgtccagtgtgatagccattcaccacatgtggctatgtaaatttaaatacaaa

SEQ ID NO: 19413 - DNA, 122 bp, Homo sapiens
  misc_feature (61)..(62): /note="This region represents a CpG dinucleotide"
  misc_feature (61)..(61): /note="Nucleotide may be methylated to form 5-methylcytosine"
tcctcagcatcaaaagctgtggcactacagctttttctctggattgcagcttgatatccccgagtgtgtttgacactatataagtgtatacacagcatggtgtcacatggttcttagagtca

SEQ ID NO: 19414 - DNA, 122 bp, Homo sapiens
  misc_feature (61)..(62): /note="This region represents a CpG dinucleotide"
  misc_feature (61)..(61): /note="Nucleotide may be methylated to form 5-methylcytosine"
ttagaaaaaaatgttacgtgcatcaaccgaagtaaatattcttgaatgttccctggtaaacgttgatgaatgcagtgatttaggagtggttagaacaggaagaaggccatttctatgtctag

SEQ ID NO: 19415 - DNA, 122 bp, Homo sapiens
  misc_feature (61)..(62): /note="This region represents a CpG dinucleotide"
  misc_feature (61)..(61): /note="Nucleotide may be methylated to form 5-methylcytosine"
tgatctggaaaactgcctgtcctctgtgaaaattaccagcttcaggggctatgacttctacggtcttaaggtatctttcaaactgttaactatggggtttgactttttcttttcgttttttg

SEQ ID NO: 19416 - DNA, 122 bp, Homo sapiens
  misc_feature (61)..(62): /note="This region represents a CpG dinucleotide"
  misc_feature (61)..(61): /note="Nucleotide may be methylated to form 5-methylcytosine"
ccagtttacatgagaccctaacagaccacagagctgtcattcaattcattggtcaaaggacggattattgactaattagtgctggcacactggaaggaaacaaaattgccctcccccacccc

SEQ ID NO: 19417 - DNA, 122 bp, Homo sapiens
  misc_feature (61)..(62): /note="This region represents a CpG dinucleotide"
  misc_feature (61)..(61): /note="Nucleotide may be methylated to form 5-methylcytosine"
tcttctgcatttatattgatttgttcctctgtatagttcagaggaactaaggacaggtgacggggctgaacagaaaccaaacacaaatatgttagtgatgggggaatatttacaataataca

SEQ ID NO: 19418 - DNA, 122 bp, Homo sapiens
  misc_feature (61)..(62): /note="This region represents a CpG dinucleotide"
  misc_feature (61)..(61): /note="Nucleotide may be methylated to form 5-methylcytosine"
aacttcgaaatgtacagatttctcttcaatattcaaaaacaggaactcaaagatctcttccgtgactttgacattacaggtgacaatgtaagtacagatccaaaatgtggcatgtgtgtggc

SEQ ID NO: 19419 - DNA, 122 bp, Homo sapiens
  misc_feature (61)..(62): /note="This region represents a CpG dinucleotide"
  misc_feature (61)..(61): /note="Nucleotide may be methylated to form 5-methylcytosine"
ttttttctgattatcttcaagtctccatggacagtgtcactgcaggtctattcatgctttcgttcctcctttacctgccttcatctgctttctctgggcattggtacccatacccaggtgtg

SEQ ID NO: 19420 - DNA, 122 bp, Homo sapiens
  misc_feature (61)..(62): /note="This region represents a CpG dinucleotide"
  misc_feature (61)..(61): /note="Nucleotide may be methylated to form 5-methylcytosine"
acagttgtgagccaccacacctggcttgaatgtagattttaataattgaatttattctgccgtgttgatagaataactgaatatcagtaaattgtgtaacagtggtggatactgttgcataa

SEQ ID NO: 19421 - DNA, 122 bp, Homo sapiens
  misc_feature (61)..(62): /note="This region represents a CpG dinucleotide"
  misc_feature (61)..(61): /note="Nucleotide may be methylated to form 5-methylcytosine"
agacttctggggctttatgtggcctctccctccccaggtctgaggagagcctctgggtgtcgacctggcttcctggtgagtgcccagccacccagccctggcttgtaggagggggactcttg

SEQ ID NO: 19422 - DNA, 122 bp, Homo sapiens
  misc_feature (61)..(62): /note="This region represents a CpG dinucleotide"
  misc_feature (61)..(61): /note="Nucleotide may be methylated to form 5-methylcytosine"
tagggttgggggatggaagagagaaagagctgtggatgggggaatgaggcttggtggggacgagggctcaagaagagctggttggccaggcatgatgactcacacctgtaatcccagcactt

SEQ ID NO: 19423 - DNA, 122 bp, Homo sapiens
  misc_feature (61)..(62): /note="This region represents a CpG dinucleotide"
  misc_feature (61)..(61): /note="Nucleotide may be methylated to form 5-methylcytosine"
aatttcctaatactctgggggtgtctcttctcctcctcctcttggggtccccctattttgcgaggcagaggctccctcaagcctgtggtgctcaagtaccttcaaccctagagaggggaaag

SEQ ID NO: 19424 - DNA, 122 bp, Homo sapiens
  misc_feature (61)..(62): /note="This region represents a CpG dinucleotide"
  misc_feature (61)..(61): /note="Nucleotide may be methylated to form 5-methylcytosine"
tctcttgtcagtggtaatcaattcttagtgttcattggacatgtattctacagctaaattcgtttctcttccttcgaagagaaataaaggttttgtaaatatcataacatcttccatgttta

SEQ ID NO: 19425 - DNA, 122 bp, Homo sapiens
  misc_feature (61)..(62): /note="This region represents a CpG dinucleotide"
  misc_feature (61)..(61): /note="Nucleotide may be methylated to form 5-methylcytosine"
tcacacaccagcctagccccagaggacagggtcttgagcctgtctctgaagcactgctcccgtctccatcctgactcatcctgagacacagttactgaatgtttactgtgggccaggctctc

SEQ ID NO: 19426 - DNA, 122 bp, Homo sapiens
  misc_feature (61)..(62): /note="This region represents a CpG dinucleotide"
  misc_feature (61)..(61): /note="Nucleotide may be methylated to form 5-methylcytosine"
aaaatccagactgcatttaatgtcagaggaaatgagtgctttatttgattaaaatactgacgtgcaattttgcccactataagtcaagaagctggtctggaatatttcacaagactccagat

SEQ ID NO: 19427 - DNA, 122 bp, Homo sapiens
  misc_feature (61)..(62): /note="This region represents a CpG dinucleotide"
  misc_feature (61)..(61): /note="Nucleotide may be methylated to form 5-methylcytosine"
ttctaacaagctcccaggtgagcctgctgcttttgttctgtggatagagagtccgggtgacgggtaaaggagaaataactggggctgctgattcacatcacaaacagctgcgggtgatggag

SEQ ID NO: 19428 - DNA, 122 bp, Homo sapiens
  misc_feature (61)..(62): /note="This region represents a CpG dinucleotide"
  misc_feature (61)..(61): /note="Nucleotide may be methylated to form 5-methylcytosine"
cttggagtgtgggaaggcagggcgggctacagggataggcagtcactactcccagcacttcgctatacaaagccaaaaaaaaaaaagattcttattttcacctacctcattttttagacgga

SEQ ID NO: 19429 - DNA, 122 bp, Homo sapiens
  misc_feature (61)..(62): /note="This region represents a CpG dinucleotide"
  misc_feature (61)..(61): /note="Nucleotide may be methylated to form 5-methylcytosine"
gtggaggaataagacgcccttgtgataagcccggctcataaggataaggatactaagaagcgccgtattttatggggcatttcctacgtgctacgctctattctaagcattgggtgtggagg

SEQ ID NO: 19430 - DNA, 122 bp, Homo sapiens
  misc_feature (61)..(62): /note="This region represents a CpG dinucleotide"
  misc_feature (61)..(61): /note="Nucleotide may be methylated to form 5-methylcytosine"
tatctggccatcagagtcttactaattttctttgttgatttgtaaaagttccttttaaagcgttccttgtatagaaaagatatttgactggttttaaaacacatttttgttttcttttgact

SEQ ID NO: 19431 - DNA, 122 bp, Homo sapiens
  misc_feature (61)..(62): /note="This region represents a CpG dinucleotide"
  misc_feature (61)..(61): /note="Nucleotide may be methylated to form 5-methylcytosine"
cagacaccacatctatcttgattacatttgtgccatcagtgtctgcagcaggtcttcaaacgtctttgctgaagaaataagtgaagaaataaatggatagacattttgcaagaaggcaggac

SEQ ID NO: 19432 - DNA, 122 bp, Homo sapiens
  misc_feature (61)..(62): /note="This region represents a CpG dinucleotide"
  misc_feature (61)..(61): /note="Nucleotide may be methylated to form 5-methylcytosine"
ctcctgtgtttgtggtgacccttggtattaacaaacctattgtgctaccagatacgtgaacgtctaccacatacaattatgtacagtacatgacacttgatgataataaatgactatgttat

SEQ ID NO: 19433 - DNA, 122 bp, Homo sapiens
  misc_feature (61)..(62): /note="This region represents a CpG dinucleotide"
  misc_feature (61)..(61): /note="Nucleotide may be methylated to form 5-methylcytosine"
tattaagagacagtcactgattgagttgaaaaaaacagaatatgttatttaccctagcaccgtagaaccactgacagctgagagaaaggtctttttctgttacaatatgttgatctcacaga

SEQ ID NO: 19434 - DNA, 122 bp, Homo sapiens
  misc_feature (61)..(62): /note="This region represents a CpG dinucleotide"
  misc_feature (61)..(61): /note="Nucleotide may be methylated to form 5-methylcytosine"
gtggtcagaaatgggacaaaattggcagtaagggtgccagaggccaggacacaggtgcaccgctgagacacacacacgtcctaaaatctgcatatgtctgagtcacatctaactctacagac

SEQ ID NO: 19435 - DNA, 122 bp, Homo sapiens
  misc_feature (61)..(62): /note="This region represents a CpG dinucleotide"
  misc_feature (61)..(61): /note="Nucleotide may be methylated to form 5-methylcytosine"
gctgcttccccaggcggcccccagaactcccaccgcggtggttgtaaagaaactgtgaaccggagcgctcaggcaccagacacagccacctgagacaacggcagtggcagggaagccgtttc

SEQ ID NO: 19436 - DNA, 122 bp, Homo sapiens
  misc_feature (61)..(62): /note="This region represents a CpG dinucleotide"
  misc_feature (61)..(61): /note="Nucleotide may be methylated to form 5-methylcytosine"
ctgaatcatagaacctcggggtgggaacagactaacccctctccaactccagcacagatgcgggaaggtggtgcaacttctgcccaatagcacagacagcaagcttctgagtcaggatggga

SEQ ID NO: 19437 - DNA, 122 bp, Homo sapiens
  misc_feature (61)..(62): /note="This region represents a CpG dinucleotide"
  misc_feature (61)..(61): /note="Nucleotide may be methylated to form 5-methylcytosine"
tcctcacaacaacctaatggggtaggcgctactattatccctaaggctgagatgaggaaacggaggcatagtagggtgaggtaacttccccaaggtcacaaagctggtaggcaaaagagcca

SEQ ID NO: 19438 - DNA, 122 bp, Homo sapiens
  misc_feature (61)..(62): /note="This region represents a CpG dinucleotide"
  misc_feature (61)..(61): /note="Nucleotide may be methylated to form 5-methylcytosine"
gatcactacatttaaagcagtccaatagtggaacaggctgcctcacaaatagtgagctctcgtttcctctacacagattctactatgggccaggatctcagccaagcagtggagccagaggc

SEQ ID NO: 19439 - DNA, 122 bp, Homo sapiens
  misc_feature (61)..(62): /note="This region represents a CpG dinucleotide"
  misc_feature (61)..(61): /note="Nucleotide may be methylated to form 5-methylcytosine"
gagatcatcacactttagcttggttgccttactctctaaagactcattctactacatcagcgcatatacactcttatgtacgagtgttatgcaaaactaaacaaaataccaagtgtcacttc

SEQ ID NO: 19440 - DNA, 122 bp, Homo sapiens
  misc_feature (61)..(62): /note="This region represents a CpG dinucleotide"
  misc_feature (61)..(61): /note="Nucleotide may be methylated to form 5-methylcytosine"
tagagaagacttaaaagtaagcatgaatagataattaatttgatcaattgtctaatatgtcgtactctagattctaagttgccacatactcaaaaaagggaaagattatccagggcctgatt

SEQ ID NO: 19441 - DNA, 122 bp, Homo sapiens
  misc_feature (61)..(62): /note="This region represents a CpG dinucleotide"
  misc_feature (61)..(61): /note="Nucleotide may be methylated to form 5-methylcytosine"
gtcttctaacaacttgcctgctgaactcctactcctcctttcagggctcagcttaagcatcgcctgtggccagggctcagggcctgccctgcacctttcatatcgcctctctgggagtggct

SEQ ID NO: 19442 - DNA, 122 bp, Homo sapiens
  misc_feature (61)..(62): /note="This region represents a CpG dinucleotide"
  misc_feature (61)..(61): /note="Nucleotide may be methylated to form 5-methylcytosine"
gctggcaaaatggtttgctggcacttgaggacataagacaatacgatttcaggccgggcgcggtggctcacgcctataatcccagcactttgagaggctgaggcgggcagatcacaaggttg

SEQ ID NO: 19443 - DNA, 122 bp, Homo sapiens
  misc_feature (61)..(62): /note="This region represents a CpG dinucleotide"
  misc_feature (61)..(61): /note="Nucleotide may be methylated to form 5-methylcytosine"
ttagaaggcaagagcagcagggtcaggaggaagagcaggggtgtggcgcctcgttccttccgccaggagctcatggggcttcgttggacccaatcccgttgcctttgttgacgtagaatggc

SEQ ID NO: 19444 - DNA, 122 bp, Homo sapiens
  misc_feature (61)..(62): /note="This region represents a CpG dinucleotide"
  misc_feature (61)..(61): /note="Nucleotide may be methylated to form 5-methylcytosine"
atgttaattaactggaccttaacctctttttacctctgttctagtgttttgttcccacaacgttggaaaaggaaaacttttaagaactatttctgacagtggtgatgaaaagtattttcaat

SEQ ID NO: 19445 - DNA, 122 bp, Homo sapiens
  misc_feature (61)..(62): /note="This region represents a CpG dinucleotide"
  misc_feature (61)..(61): /note="Nucleotide may be methylated to form 5-methylcytosine"
gagtttgtatttcattcattcccatggcaaatatttaccaagcaactgctaagtgccagacgtgtataatacaatacactagaaaaactagtccatgtgatgatgtaaaaatcaatcaactt

SEQ ID NO: 19446 - DNA, 122 bp, Homo sapiens
  misc_feature (61)..(62): /note="This region represents a CpG dinucleotide"
  misc_feature (61)..(61): /note="Nucleotide may be methylated to form 5-methylcytosine"
ccacttcctctaaaacatcttcaacatctacagctacaatatagccacagatgacaataacgtcccacttcatggaccaggaaaatgctaaatcactaagaaagttttatgtagtgaaactc

SEQ ID NO: 19447 - DNA, 122 bp, Homo sapiens
  misc_feature (61)..(62): /note="This region represents a CpG dinucleotide"
  misc_feature (61)..(61): /note="Nucleotide may be methylated to form 5-methylcytosine"
catatctcccactttgccctccctaatcccaccacacccagctcttaggatcagaaagtacgttgaagttccagggccactctcctgaataaaaagtgtggcttctgtttccggcagataag

SEQ ID NO: 19448 - DNA, 122 bp, Homo sapiens
  misc_feature (61)..(62): /note="This region represents a CpG dinucleotide"
  misc_feature (61)..(61): /note="Nucleotide may be methylated to form 5-methylcytosine"
aactgtgttctttcctttgagctaagtccttacacaacacctctatgaaaatatatatcacgctgatttgtaatgtgtgtttagctgtcagtcttcttcagcaacttccttcaaaactgagg

SEQ ID NO: 19449 - DNA, 122 bp, Homo sapiens
  misc_feature (61)..(62): /note="This region represents a CpG dinucleotide"
  misc_feature (61)..(61): /note="Nucleotide may be methylated to form 5-methylcytosine"
gtttttgtaaattaaactcttcattgcaattcccctgtcttgataaatctgctctgtctgcgtatcaggcaaggagaagccattgggtggttacacaagtacttatccactttatgtttcta

SEQ ID NO: 19450 - DNA, 122 bp, Homo sapiens
  misc_feature (61)..(62): /note="This region represents a CpG dinucleotide"
  misc_feature (61)..(61): /note="Nucleotide may be methylated to form 5-methylcytosine"
gaatctgttgaaagagatgcgccctgaaaaaggaggataaaaccaagaaagaagacgacacgggatccaggaaataagagatttagcacagaaagaaaaagtaaaataaccctgtcgatcgt

SEQ ID NO: 19451 - DNA, 122 bp, Homo sapiens
  misc_feature (61)..(62): /note="This region represents a CpG dinucleotide"
  misc_feature (61)..(61): /note="Nucleotide may be methylated to form 5-methylcytosine"
gggcagactctgccccagagtctgcctgagttcagtgcttcagcctgccacactgagctgcgatgcatggggtgacaaacatcaattagtttaaatgttttctgaattattgcccactttaa

SEQ ID NO: 19452 - DNA, 122 bp, Homo sapiens
  misc_feature (61)..(62): /note="This region represents a CpG dinucleotide"
  misc_feature (61)..(61): /note="Nucleotide may be methylated to form 5-methylcytosine"
cccagtggccttttggcaatgtctgaagatatgtttgatgggcacaacttggggaggtggcgtactattgtctcgtagtggcttgcaggggtactgctaaacatcaacacacaggacagctc

SEQ ID NO: 19453 - DNA, 122 bp, Homo sapiens
  misc_feature (61)..(62): /note="This region represents a CpG dinucleotide"
  misc_feature (61)..(61): /note="Nucleotide may be methylated to form 5-methylcytosine"
atttctgtcttgctcacagtatagaagctgttgaccgctccttgcttggctgtcacaatacgatgatcaaatggggccggaggagccgggatgtcaactagaaggtgagagaaacagaaggg

SEQ ID NO: 19454 - DNA, 122 bp, Homo sapiens
  misc_feature (61)..(62): /note="This region represents a CpG dinucleotide"
  misc_feature (61)..(61): /note="Nucleotide may be methylated to form 5-methylcytosine"
agcattttacactttttatcttgattaaagtttataaaagccctgataatccctcttttacgtatatcatagcagaggctcagagagattaagtgactcatttagagcagattacctttaaa

SEQ ID NO: 19455 - DNA, 122 bp, Homo sapiens
  misc_feature (61)..(62): /note="This region represents a CpG dinucleotide"
  misc_feature (61)..(61): /note="Nucleotide may be methylated to form 5-methylcytosine"
caacaacaggaagtacaggtgcagtgtggggacctgggccaggcaggcactccgcaaaggcgagttccagagcccacaggtgcccgagctgcccttgcagtggctggttccacagtcacctt

SEQ ID NO: 19456 - DNA, 122 bp, Homo sapiens
  misc_feature (61)..(62): /note="This region represents a CpG dinucleotide"
  misc_feature (61)..(61): /note="Nucleotide may be methylated to form 5-methylcytosine"
taaatcacataactgtgatttaatgttatgtgttggtatagagctactctagcttgcaaacgtgagggaagctgtgaagaatagtaaatataatttcttcttgctaaacatcacaaggcttc

SEQ ID NO: 19457 - DNA, 122 bp, Homo sapiens
  misc_feature (61)..(62): /note="This region represents a CpG dinucleotide"
  misc_feature (61)..(61): /note="Nucleotide may be methylated to form 5-methylcytosine"
agctttaagtcaaagaaagatgacctggacttaaagtgccttatggtatggttggaagcacggccccagattctctttgtgtaagtgtctgtttattaattcattcaatgtgcaaatatttg

SEQ ID NO: 19458 - DNA, 122 bp, Homo sapiens
  misc_feature (61)..(62): /note="This region represents a CpG dinucleotide"
  misc_feature (61)..(61): /note="Nucleotide may be methylated to form 5-methylcytosine"
agttttctgtgtttagatctgatggcatctgcatgacttctgtgtttatttttctcattacgacttcagagttagcaagacgatggcctctttatcttttctcactgccatattttccaggc

SEQ ID NO: 19459 - DNA, 122 bp, Homo sapiens
  misc_feature (61)..(62): /note="This region represents a CpG dinucleotide"
  misc_feature (61)..(61): /note="Nucleotide may be methylated to form 5-methylcytosine"
accatggtagaagtaatgctttcaaccagcttctcaggttgctctcgggcatctgaagggcgcaataactctgtcatgttaatcagctcttgctgaaaagcaaaccagctgagctgaaagga

SEQ ID NO: 19460 - DNA, 122 bp, Homo sapiens
  misc_feature (61)..(62): /note="This region represents a CpG dinucleotide"
  misc_feature (61)..(61): /note="Nucleotide may be methylated to form 5-methylcytosine"
agacatcctctctccaggacaatggtggagattccctgtgaatctagccctcttggtctccgtttccttttgttgcatgccaacatacccctgcttgataaaccctctttcttttgtggtaa

SEQ ID NO: 19461 - DNA, 122 bp, Homo sapiens
  misc_feature (61)..(62): /note="This region represents a CpG dinucleotide"
  misc_feature (61)..(61): /note="Nucleotide may be methylated to form 5-methylcytosine"
aattatactgcatagcaaactagcccaaaagtcagtggcttacaataataggcattcacgcgtcttgctcatgagtcacagtctacttagttttaggtttcagggtggctttatttctgctc

SEQ ID NO: 19462 - DNA, 122 bp, Homo sapiens
  misc_feature (61)..(62): /note="This region represents a CpG dinucleotide"
  misc_feature (61)..(61): /note="Nucleotide may be methylated to form 5-methylcytosine"
gcacccactccgcctgtgctggggacagcagaaggggccctccaagccagactcggctctcgtgaacccttcacgactggggcctccccgctaaaacagcctcattcccacttaacagcttt

SEQ ID NO: 19463 - DNA, 122 bp, Homo sapiens
  misc_feature (61)..(62): /note="This region represents a CpG dinucleotide"
  misc_feature (61)..(61): /note="Nucleotide may be methylated to form 5-methylcytosine"
ccagccgacatttgtggccgagctgggccaggagggactcgggtccacaaacctagaagacgactgcagggaggcccagtcacgctaccgccgcttcggcagcggagcctagcctgcccccc

SEQ ID NO: 19464 - DNA, 122 bp, Homo sapiens
  misc_feature (61)..(62): /note="This region represents a CpG dinucleotide"
  misc_feature (61)..(61): /note="Nucleotide may be methylated to form 5-methylcytosine"
cttttttaaagaaaaaaaacctccctcaccacatgtcaaactctaggaaagcaagtaattcgaagagttccaccatatacgaaatgatgtacaagagcacggaaataaagaggccagtgtct

SEQ ID NO: 19465 - DNA, 122 bp, Homo sapiens
  misc_feature (61)..(62): /note="This region represents a CpG dinucleotide"
  misc_feature (61)..(61): /note="Nucleotide may be methylated to form 5-methylcytosine"
ttactgagatcagatctcactatactgcccatgctgaagtgcagtggctattcacaggtacgatcatgggccagtgtcatgatcaagtgcagccttgaactcctgggctcaagtgatcttcc

SEQ ID NO: 19466 - DNA, 122 bp, Homo sapiens
  misc_feature (61)..(62): /note="This region represents a CpG dinucleotide"
  misc_feature (61)..(61): /note="Nucleotide may be methylated to form 5-methylcytosine"
ttaaatttaaaagactcttcaataacacataaaacattataataaagtcttactaaatttcggttcatcaatgtctattgttaaatattgagctatttcaattgtgattataaagctatttt

SEQ ID NO: 19467 - DNA, 122 bp, Homo sapiens
  misc_feature (61)..(62): /note="This region represents a CpG dinucleotide"
  misc_feature (61)..(61): /note="Nucleotide may be methylated to form 5-methylcytosine"
gaaaccacgctgcccgggtggaggagcgccagagggaagcaggccccatgtcctccctcccgcaggaagtgcaccaggcccgtcctttccacccaggctgtacaaaagggaggaggagcact

SEQ ID NO: 19468 - DNA, 122 bp, Homo sapiens
  misc_feature (61)..(62): /note="This region represents a CpG dinucleotide"
  misc_feature (61)..(61): /note="Nucleotide may be methylated to form 5-methylcytosine"
tttgtcagctgtttgtctgcacaagataatgaggttacactaggatgtaaatcagttttacgctcactgcttacttaaatggacagttttaagtttcagttttaagctcactgcttagttaa

SEQ ID NO: 19469 - DNA, 122 bp, Homo sapiens
  misc_feature (61)..(62): /note="This region represents a CpG dinucleotide"
  misc_feature (61)..(61): /note="Nucleotide may be methylated to form 5-methylcytosine"
ctttttcagctatgggtcaggttattctaagcttttatatactcatgccaaaggtgtaggcgctgggcttatgttcagctatttcagatcatctggacttgaatttagagaatgtctttgct

SEQ ID NO: 19470 - DNA, 122 bp, Homo sapiens
  misc_feature (61)..(62): /note="This region represents a CpG dinucleotide"
  misc_feature (61)..(61): /note="Nucleotide may be methylated to form 5-methylcytosine"
actcctactttcacacccaaatgttgcatttcccaagagcgccctggcccaccacgcccccgtcctatgcctataaaaacccccagaccctagcgggcagagacacacgcagctggacgtgg

SEQ ID NO: 19471 - DNA, 122 bp, Homo sapiens
  misc_feature (61)..(62): /note="This region represents a CpG dinucleotide"
  misc_feature (61)..(61): /note="Nucleotide may be methylated to form 5-methylcytosine"
agatggttcttctgctgatcctaactggacacactcatgcatctgtagtcaactgctggtcgctatgctgctctgcttctggggttgactggtggtgggtggggtgccagggatgactgggt

SEQ ID NO: 19472 - DNA, 122 bp, Homo sapiens
  misc_feature (61)..(62): /note="This region represents a CpG dinucleotide"
  misc_feature (61)..(61): /note="Nucleotide may be methylated to form 5-methylcytosine"
caaattctctaatgaacttcaagtgtttctagagtaaaatatactcttccattccagaaccgttagtacaactcttaattcaaccagaaaatggaaggcttacacatattcctttgaccaac

SEQ ID NO: 19473 - DNA, 122 bp, Homo sapiens
  misc_feature (61)..(62): /note="This region represents a CpG dinucleotide"
  misc_feature (61)..(61): /note="Nucleotide may be methylated to form 5-methylcytosine"
gcgcccggcctcaaattttgtgattattcatttaaattttgtaatcaaacattagggtgacgtgttggagctgatcccatactgtaggttcaggaaatacagtcattgcagacatcatcatt

SEQ ID NO: 19474 - DNA, 122 bp, Homo sapiens
  misc_feature (61)..(62): /note="This region represents a CpG dinucleotide"
  misc_feature (61)..(61): /note="Nucleotide may be methylated to form 5-methylcytosine"
cgtcccaactccgccggtatacgagtcgctgtgttatataatgcagacagtttaataaaacgaagctcctgttattttgattctgggaatctgcagtggcccttgagataaacactaatgcc

SEQ ID NO: 19475 - DNA, 122 bp, Homo sapiens
  misc_feature (61)..(62): /note="This region represents a CpG dinucleotide"
  misc_feature (61)..(61): /note="Nucleotide may be methylated to form 5-methylcytosine"
ctggagaagctacctggagaacctggagaacctgttccagtgcctgggccaggtgctgcccgagtcttgcctcctggtgtggaacacggccatgcctgtgggcgaggaagtcaccgggggtt

SEQ ID NO: 19476 - DNA, 122 bp, Homo sapiens
  misc_feature (61)..(62): /note="This region represents a CpG dinucleotide"
  misc_feature (61)..(61): /note="Nucleotide may be methylated to form 5-methylcytosine"
gaggtgttgatagattcttcacttgtcatctttaattcattgctgagaaaactttagttgcgctaggccagattatccccaaaggcgtttggacagtgtcacattagaatttagggctattt

SEQ ID NO: 19477 - DNA, 122 bp, Homo sapiens
  misc_feature (61)..(62): /note="This region represents a CpG dinucleotide"
  misc_feature (61)..(61): /note="Nucleotide may be methylated to form 5-methylcytosine"
cttagtggacctttgccccaagattttctctcagcttttcctaggtaagacagcatcacccgggcgcgatggctcatgcctgtaatcccagaactttgggaggccaaggcaggcggattgcc

SEQ ID NO: 19478 - DNA, 122 bp, Homo sapiens
  misc_feature (61)..(62): /note="This region represents a CpG dinucleotide"
  misc_feature (61)..(61): /note="Nucleotide may be methylated to form 5-methylcytosine"
agcaggcagacagcgagggattatcactccagttcagtcttgctccttatctcccatgtgcggaaaataggtcttgcttcagactaaagctggtagttgttttgggttgaaaatgttcatat

SEQ ID NO: 19479 - DNA, 122 bp, Homo sapiens
  misc_feature (61)..(62): /note="This region represents a CpG dinucleotide"
  misc_feature (61)..(61): /note="Nucleotide may be methylated to form 5-methylcytosine"
gtgggcggcagcgcagcgggccgtggggagtggccgtggcaggtgagcctgtggctgcggcgccgggaacaccgttgcggggccgtgctggtggcagagaggtggctgctgtcggcggcgca

SEQ ID NO: 19480 - DNA, 122 bp, Homo sapiens
  misc_feature (61)..(62): /note="This region represents a CpG dinucleotide"
  misc_feature (61)..(61): /note="Nucleotide may be methylated to form 5-methylcytosine"
aatgtcaggcctgcttgccttacacagagcaccccgacacaccccatcccagccacttcacgctgccaaaaagctccagtgatgatcaggatgaatattgataaatgattttccatacttca

SEQ ID NO: 19481 - DNA, 122 bp, Homo sapiens
  misc_feature (61)..(62): /note="This region represents a CpG dinucleotide"
  misc_feature (61)..(61): /note="Nucleotide may be methylated to form 5-methylcytosine"
tgtttgctaaaccctcaatcctgcttttcagtcttggcaagattccccagcatctccagtcgtagttcctaactttgcctaactattaacactctccaatttgatttcactattactgatct

SEQ ID NO: 19482 - DNA, 122 bp, Homo sapiens
  misc_feature (61)..(62): /note="This region represents a CpG dinucleotide"
  misc_feature (61)..(61): /note="Nucleotide may be methylated to form 5-methylcytosine"
ttgtcctttcttcctccctgtgggctgtgaatccaactcgtcctgggagcagggcgctctcgccttctgttcctctccgagctcagtgcacagaagcattctgcttacccagctgggactgc

SEQ ID NO: 19483 - DNA, 122 bp, Homo sapiens
  misc_feature (61)..(62): /note="This region represents a CpG dinucleotide"
  misc_feature (61)..(61): /note="Nucleotide may be methylated to form 5-methylcytosine"
gcatgtgctccggattaatgctgcctgagttctaatcctcgctctgccacttagtagtcacgttaccataggcaagtcatttaagccacttagtcactcgaagcctcatttttcccatctgc

SEQ ID NO: 19484 - DNA, 122 bp, Homo sapiens
  misc_feature (61)..(62): /note="This region represents a CpG dinucleotide"
  misc_feature (61)..(61): /note="Nucleotide may be methylated to form 5-methylcytosine"
ctcttcacaacctatgaggttcagatcatccaattgctggtttgcagaggcagagatgcacgaggtcacagagataacaggagttgtatttcctcgtgcaagatcccacatctttctataaa

SEQ ID NO: 19485 - DNA, 122 bp, Homo sapiens
  misc_feature (61)..(62): /note="This region represents a CpG dinucleotide"
  misc_feature (61)..(61): /note="Nucleotide may be methylated to form 5-methylcytosine"
gcccagcctctaggactaaattcttggccattgtgctacactacttggcactcacggacacgttcttaagcttgttctccatggccccaactagtccagtgggttcagtagatgagggtgca

SEQ ID NO: 19486 - DNA, 122 bp, Homo sapiens
  misc_feature (61)..(62): /note="This region represents a CpG dinucleotide"
  misc_feature (61)..(61): /note="Nucleotide may be methylated to form 5-methylcytosine"
tttaccagctgcccttcagggctgaccttggagctgaagcacctgacagctgtgaaccaacgtcagcagttgtggaaacaagataccgcagtttctttacccctaccccaacagctcatgca

SEQ ID NO: 19487 - DNA, 122 bp, Homo sapiens
  misc_feature (61)..(62): /note="This region represents a CpG dinucleotide"
  misc_feature (61)..(61): /note="Nucleotide may be methylated to form 5-methylcytosine"
atttcttggtaaatggctgcaagaggtgccaactcagcatgccttctgttcaaggaccttcggttttcctcattcacagggatatgctgcagacattgctcaagtgtttggtactccttact

SEQ ID NO: 19488 - DNA, 122 bp, Homo sapiens
  misc_feature (61)..(62): /note="This region represents a CpG dinucleotide"
  misc_feature (61)..(61): /note="Nucleotide may be methylated to form 5-methylcytosine"
aataacaggtgagacaacagaggtaagtaactataggatttattgctcatgctgaattgacgagtgtcagtaggagaagcaattagtcagcagttgcagatactctctagagcagtgcttct

SEQ ID NO: 19489 - DNA, 122 bp, Homo sapiens
  misc_feature (61)..(62): /note="This region represents a CpG dinucleotide"
  misc_feature (61)..(61): /note="Nucleotide may be methylated to form 5-methylcytosine"
gccctggagatacagtagtgaatgcaacagacaaaagccaaacaaaaaatctctgtctttcgtgagcttagtttatttcagttcactctaagtacaactctcctagatgactaaggtacttt

SEQ ID NO: 19490 - DNA, 122 bp, Homo sapiens
  misc_feature (61)..(62): /note="This region represents a CpG dinucleotide"
  misc_feature (61)..(61): /note="Nucleotide may be methylated to form 5-methylcytosine"
taggcagctaagaatgagaaaagtgtcctaaatagaaattgcagcaattcagtatttcctcgctgagtaggtagatgactcaatacacttggtaaaacattaaaattgctctattaagactg

SEQ ID NO: 19491 - DNA, 122 bp, Homo sapiens
  misc_feature (61)..(62): /note="This region represents a CpG dinucleotide"
  misc_feature (61)..(61): /note="Nucleotide may be methylated to form 5-methylcytosine"
tgaggaaggccatgctgggcctgatgacaacgaagaggtcatgcgagcactgctcattcacgagaaaaagacttcctctgccatggctggttcagtgggggcagctgctccagtgaccgctg

SEQ ID NO: 19492 - DNA, 122 bp, Homo sapiens
  misc_feature (61)..(62): /note="This region represents a CpG dinucleotide"
  misc_feature (61)..(61): /note="Nucleotide may be methylated to form 5-methylcytosine"
tttatctctcacatctctgttgactgggctcagctcactcaggatgtcttgcagttggaacggctagggctgaaatcatctgaaggttctactgagctggacatccaaggtcaccatcactc

SEQ ID NO: 19493 - DNA, 122 bp, Homo sapiens
  misc_feature (61)..(62): /note="This region represents a CpG dinucleotide"
  misc_feature (61)..(61): /note="Nucleotide may be methylated to form 5-methylcytosine"
ggacatggcacagggaggactctgtccctgccttcacgaaggggaattccaaacgagtcacgaagtccttctgactagggaccaaggcactagcctgtgtcagagataacatggccctgtgg

SEQ ID NO: 19494 - DNA, 122 bp, Homo sapiens
  misc_feature (61)..(62): /note="This region represents a CpG dinucleotide"
  misc_feature (61)..(61): /note="Nucleotide may be methylated to form 5-methylcytosine"
ctcaggtgatccacccacctgggcttcccaaagtgctgggattacaggtgtgagtcaccgcgccgggcctggagacctattctagacaacacctggcaaaactgcagagactgtcacaatgc

SEQ ID NO: 19495 - DNA, 122 bp, Homo sapiens
  misc_feature (61)..(62): /note="This region represents a CpG dinucleotide"
  misc_feature (61)..(61): /note="Nucleotide may be methylated to form 5-methylcytosine"
ggagtgaaacagtgagagatcctgtttgtagttctgtgcagacaaacccagaaaccagaacgcagacacaccaggacgcaacaggaaaccacaaaggcctgagatctttcaatgtaaatagg

SEQ ID NO: 19496 - DNA, 122 bp, Homo sapiens
  misc_feature (61)..(62): /note="This region represents a CpG dinucleotide"
  misc_feature (61)..(61): /note="Nucleotide may be methylated to form 5-methylcytosine"
atgatggtgatgaaagtggctggtgactgttctcagtctcatcgccataatggaaccctacgttgtgttcctccacactggtgtgagggacactactaagtgcggcagagtttgcactcagg

SEQ ID NO: 19497 - DNA, 122 bp, Homo sapiens
  misc_feature (61)..(62): /note="This region represents a CpG dinucleotide"
  misc_feature (61)..(61): /note="Nucleotide may be methylated to form 5-methylcytosine"
atctgtaactccaccattattgataccttctattctcttgcaaatctagtgagtaaagttcgtgagcttttctccttttttgaggcttaacgtgcttttgaaatgacatgacaaatttaaaa

SEQ ID NO: 19498 - DNA, 122 bp, Homo sapiens
  misc_feature (61)..(62): /note="This region represents a CpG dinucleotide"
  misc_feature (61)..(61): /note="Nucleotide may be methylated to form 5-methylcytosine"
ttagctttagttgagcctcatgggctggctttgtgtcaagtaaaagctctactacaatgccgtccagtaaattggttttgtctgtgcagcaggcaggacaaacccttccgacgattataagg

SEQ ID NO: 19499 - DNA, 122 bp, Homo sapiens
  misc_feature (61)..(62): /note="This region represents a CpG dinucleotide"
  misc_feature (61)..(61): /note="Nucleotide may be methylated to form 5-methylcytosine"
ccttccaccaggaaaaggaagaaagggaagggaaaggactgtacttcataaaatgccaaacgtgagagtgtgtgatgaaatatccatctgcactgtggaagcatgacattttgatgcattaa

SEQ ID NO: 19500 - DNA, 122 bp, Homo sapiens
  misc_feature (61)..(62): /note="This region represents a CpG dinucleotide"
  misc_feature (61)..(61): /note="Nucleotide may be methylated to form 5-methylcytosine"
tgttttctctttacttgaggccaacacataacaatgaaagcactgggctactggtgctttcggattgtgaaagtcaggtggagcctgtttgcactctgagtgcactcattcaagaggtcagt

SEQ ID NO: 19501 - DNA, 122 bp, Homo sapiens
  misc_feature (61)..(62): /note="This region represents a CpG dinucleotide"
  misc_feature (61)..(61): /note="Nucleotide may be methylated to form 5-methylcytosine"
atctggtcggaagcaaggaggtccgaggtcactgtcccttgaaggctgcagcggaggaaacggagaggctgggctggccctaccctacgtagcctaatcaaagcaagaatctgcaggattta

SEQ ID NO: 19502 - DNA, 122 bp, Homo sapiens
  misc_feature (61)..(62): /note="This region represents a CpG dinucleotide"
  misc_feature (61)..(61): /note="Nucleotide may be methylated to form 5-methylcytosine"
agaaaaattgtcatttaaagttgtcaccttggggacaagcttttattctaatgatgctgacgttattccagatatttctagaacatttttagaattgccttaggagtttgaatcataacatt

SEQ ID NO: 19503 - DNA, 122 bp, Homo sapiens
  misc_feature (61)..(62): /note="This region represents a CpG dinucleotide"
  misc_feature (61)..(61): /note="Nucleotide may be methylated to form 5-methylcytosine"
aataaaggactgacaggttagacatgctctcatatatttattttatgcattatttcacaacgttgaatcctgaagtcaatgtgtaaggcacagagaacatgacaatactgagcacctctaat

SEQ ID NO: 19504 - DNA, 122 bp, Homo sapiens
  misc_feature (61)..(62): /note="This region represents a CpG dinucleotide"
  misc_feature (61)..(61): /note="Nucleotide may be methylated to form 5-methylcytosine"
tccagggcccactctggcagggagagtggcttacccgcttaacctggcatgccgaggtctcggctgtgcccctgaatcattgctgagtgcgtcaaggactccagtccccaaccctctgcagg

SEQ ID NO: 19505 - DNA, 122 bp, Homo sapiens
  misc_feature (61)..(62): /note="This region represents a CpG dinucleotide"
  misc_feature (61)..(61): /note="Nucleotide may be methylated to form 5-methylcytosine"
cagtgaatggaatgttcagtcaatgttgggcactgctgcacagagcaatgacatcactaccgtcatcatcatcatcatgatctctgaagcattcttaaatgccgaaagatgtactcacaaaa

SEQ ID NO: 19506 - DNA, 122 bp, Homo sapiens
  misc_feature (61)..(62): /note="This region represents a CpG dinucleotide"
  misc_feature (61)..(61): /note="Nucleotide may be methylated to form 5-methylcytosine"
caactactatccataccacttcccttattctcacctcacactaaagctggtccaaggcagcgtaaggtctatggtattaacactagaaacagtaaaaggaaaaagaaaggggagttaaaatg

SEQ ID NO: 19507 - DNA, 122 bp, Homo sapiens
  misc_feature (61)..(62): /note="This region represents a CpG dinucleotide"
  misc_feature (61)..(61): /note="Nucleotide may be methylated to form 5-methylcytosine"
actggttttcctcagatagtcagccttgtctacacttccacaaatttacccacttgaatacgctgtagtatatttcaggaaactcacaatgtttctgcagaaaggactgtttacatggaggt

SEQ ID NO: 19508 - DNA, 122 bp, Homo sapiens
  misc_feature (61)..(62): /note="This region represents a CpG dinucleotide"
  misc_feature (61)..(61): /note="Nucleotide may be methylated to form 5-methylcytosine"
tgatcctcaccagaacccagtgagggtaatattataattcttattttacaattgaggaaacgaagactgagaaagtgaaagactggctcaagactggtctcacagctagaaactaggtggaa

SEQ ID NO: 19509 - DNA, 122 bp, Homo sapiens
  misc_feature (61)..(62): /note="This region represents a CpG dinucleotide"
  misc_feature (61)..(61): /note="Nucleotide may be methylated to form 5-methylcytosine"
ccttggcttatgagtcagctgaaagcgacatcatgaagaggcttccaaggaacccaaagacggataatctggtgaaccaccgtctcattggcatggcctatggacagattggtgcgcccaga

SEQ ID NO: 19510 - DNA, 122 bp, Homo sapiens
  misc_feature (61)..(62): /note="This region represents a CpG dinucleotide"
  misc_feature (61)..(61): /note="Nucleotide may be methylated to form 5-methylcytosine"
gaagtgccttcccagccactgaaccaggcagcagctgtttctccccacaacctcctgctgcggggtcatcctcagtctgaatatctggcgtgcttggtcacacttcgcctccttgtttacat

SEQ ID NO: 19511 - DNA, 122 bp, Homo sapiens
  misc_feature (61)..(62): /note="This region represents a CpG dinucleotide"
  misc_feature (61)..(61): /note="Nucleotide may be methylated to form 5-methylcytosine"
gcaaatatctactcagggacttagggcagcacaagggcactgaagataaaataggattagcgaagagcatgagatctggcagagagggacaggacagggaaagtgtcctccacctgcttttc

SEQ ID NO: 19512 - DNA, 122 bp, Homo sapiens
  misc_feature (61)..(62): /note="This region represents a CpG dinucleotide"
  misc_feature (61)..(61): /note="Nucleotide may be methylated to form 5-methylcytosine"
agaaaaaactctcatatagtgttaaatttgttaaaaacagataacctttatagatccttacgtaggatgtgtctatcagaaagatttagaatacttaatgctgtgctgtacttcctttttct

SEQ ID NO: 19513 - DNA, 122 bp, Homo sapiens
  misc_feature (61)..(62): /note="This region represents a CpG dinucleotide"
  misc_feature (61)..(61): /note="Nucleotide may be methylated to form 5-methylcytosine"
tgctttgatttggccttggtgaccaggacaacacactctgagggtgccacagtcaatattcgcttcactgagcttcttatcaggctccaacctatggggagcaaagggcagagcttggcaag

SEQ ID NO: 19514 - DNA, 122 bp, Homo sapiens
  misc_feature (61)..(62): /note="This region represents a CpG dinucleotide"
  misc_feature (61)..(61): /note="Nucleotide may be methylated to form 5-methylcytosine"
aaaatataatttttaaggaaaacaagttgtttgtttgtttaagatcttaacatccaacaccgggtactacgctagattttgagaatactaaaatgaaaaagactgcacgactgtggaaccac

SEQ ID NO: 19515 - DNA, 122 bp, Homo sapiens
  misc_feature (61)..(62): /note="This region represents a CpG dinucleotide"
  misc_feature (61)..(61): /note="Nucleotide may be methylated to form 5-methylcytosine"
tgaagagctaattcttccctctaataataatactctttgaccatttactatatgtcaaaccgtattttaaggactttaaaggtattaattcgtttaatcttcacagcaatcctgtgagtagg

SEQ ID NO: 19516 - DNA, 122 bp, Homo sapiens
  misc_feature (61)..(62): /note="This region represents a CpG dinucleotide"
  misc_feature (61)..(61): /note="Nucleotide may be methylated to form 5-methylcytosine"
taaatgagtggcttctctcagtcaaagtggtaccagctggcccctggctgcagctcaccacggccaactgtgtgacatagtaacagttaacctccactgactggtcaccgtgctccaggcac

SEQ ID NO: 19517 - DNA, 122 bp, Homo sapiens
  misc_feature (61)..(62): /note="This region represents a CpG dinucleotide"
  misc_feature (61)..(61): /note="Nucleotide may be methylated to form 5-methylcytosine"
tggctgtctctctttctctgggcaccagtgcctgcacaagagccatgttgagccaggctgcgccccaagagcgcctgtacaacggtagcagggcaattataccttttacagacaacagtggc

SEQ ID NO: 19518 - DNA, 122 bp, Homo sapiens
  misc_feature (61)..(62): /note="This region represents a CpG dinucleotide"
  misc_feature (61)..(61): /note="Nucleotide may be methylated to form 5-methylcytosine"
tttctgcctcccaactttgttctaataaagcatgacaggaacgttgccaattggcaacggcgtccaggaaatgtagcatgcaggctttaagtgccagtatcagagtctagaatggtggtggc

SEQ ID NO: 19519 - DNA, 122 bp, Homo sapiens
  misc_feature (61)..(62): /note="This region represents a CpG dinucleotide"
  misc_feature (61)..(61): /note="Nucleotide may be methylated to form 5-methylcytosine"
attaaaacttaaccaaactattcacttttacaagatacacgttagattcaagaacaataacgtgatcttttttgcctttcaggattaaagaatcgggttagtcagtcttggtggtgcatgcc

SEQ ID NO: 19520 - DNA, 122 bp, Homo sapiens
  misc_feature (61)..(62): /note="This region represents a CpG dinucleotide"
  misc_feature (61)..(61): /note="Nucleotide may be methylated to form 5-methylcytosine"
gtgttcgcgctcttgagcgtgcgctctgcggggcgcgggctggtggcgggcgggggtcgccggctccagctcaggttcccgcgccaggaccgcgtccagaaccttgtctccggaagcgggca

SEQ ID NO: 19521 - DNA, 122 bp, Homo sapiens
  misc_feature (61)..(62): /note="This region represents a CpG dinucleotide"
  misc_feature (61)..(61): /note="Nucleotide may be methylated to form 5-methylcytosine"
tgtgtcaccatgtgcctggctttttctcagccacatgcatttgaggtctgcctgggttgtcgtgtgactcgagagtccattcctctttgtcgctgagaatatttcgttgtgtggatctacca

SEQ ID NO: 19522 - DNA, 122 bp, Homo sapiens
  misc_feature (61)..(62): /note="This region represents a CpG dinucleotide"
  misc_feature (61)..(61): /note="Nucleotide may be methylated to form 5-methylcytosine"
tagtcttggctctacccctgattcactgtgacaccctgaggttttctgtaacattctttacgacatgagaggggtgaagtatcccattccaatactttaagtggtataactgaaatgtgttt

SEQ ID NO: 19523 - DNA, 122 bp, Homo sapiens
  misc_feature (61)..(62): /note="This region represents a CpG dinucleotide"
  misc_feature (61)..(61): /note="Nucleotide may be methylated to form 5-methylcytosine"
gcggtcttgacagcatagatgtttgcctcctcttggaactttccgatgtttttcttatagcgaatcctcttgttgccaaaccagttggagacctgtggggcagaaaggagggtcaggtagaa

SEQ ID NO: 19524 - DNA, 122 bp, Homo sapiens
  misc_feature (61)..(62): /note="This region represents a CpG dinucleotide"
  misc_feature (61)..(61): /note="Nucleotide may be methylated to form 5-methylcytosine"
ggatgtggccggtcttggtgccggtggctggcggtgctcaggaagcagtacctgttctcacgcttgctgggtgaaactggagcctgctgttccagtgggagggatttaagtgtaggagttga

SEQ ID NO: 19525 - DNA, 122 bp, Homo sapiens
  misc_feature (61)..(62): /note="This region represents a CpG dinucleotide"
  misc_feature (61)..(61): /note="Nucleotide may be methylated to form 5-methylcytosine"
tgctatcaagtagatactaagactggagccaactcactgaagagcaaagccaagagatggcgagagactatgtctggtaacctcatttgagttcctgaatccagccaggtctgaagccagta

SEQ ID NO: 19526 - DNA, 122 bp, Homo sapiens
  misc_feature (61)..(62): /note="This region represents a CpG dinucleotide"
  misc_feature (61)..(61): /note="Nucleotide may be methylated to form 5-methylcytosine"
ccgtctccccatccaggctgtggatttccatgcacgcttcacaagcagctgtgaggaccacgtgggagcctctgagccagcatggcccaggtctcagcacacagcaagcgactaatccatgt

SEQ ID NO: 19527 - DNA, 122 bp, Homo sapiens
  misc_feature (61)..(62): /note="This region represents a CpG dinucleotide"
  misc_feature (61)..(61): /note="Nucleotide may be methylated to form 5-methylcytosine"
agatcactgcttgaccattaactacttggataaccttgagcaagtcacttaatctctccacgcctacttgtacaaactagttaacctcaaggttctgttgaagtcctagtttctcaccattc

SEQ ID NO: 19528 - DNA, 122 bp, Homo sapiens
  misc_feature (61)..(62): /note="This region represents a CpG dinucleotide"
  misc_feature (61)..(61): /note="Nucleotide may be methylated to form 5-methylcytosine"
accttcccacaatcaaaccaacagctcaaagacatctaaaattacaagatcatttcattacgtgctcctaaaagctgctcctacaacttagacaactacttagggaagaaagaataaaatgt

SEQ ID NO: 19529 - DNA, 122 bp, Homo sapiens
  misc_feature (61)..(62): /note="This region represents a CpG dinucleotide"
  misc_feature (61)..(61): /note="Nucleotide may be methylated to form 5-methylcytosine"
gtttattatttcaattatttctccagcctttgatattgcatctggtttaattagggctagcgttctataaggaaacaaaaaataagtttgcaaataaaaatagttcaacagtttttatttat

SEQ ID NO: 19530 - DNA, 122 bp, Homo sapiens
  misc_feature (61)..(62): /note="This region represents a CpG dinucleotide"
  misc_feature (61)..(61): /note="Nucleotide may be methylated to form 5-methylcytosine"
ctaatccatagggtgccccaaagattaaatgagaaagtgtattagaggcatagcatataacgagtgctcagaaagcccagcagttattttctaaatggacaggtgccaggcaccagtggctt

SEQ ID NO: 19531 - DNA, 122 bp, Homo sapiens
  misc_feature (61)..(62): /note="This region represents a CpG dinucleotide"
  misc_feature (61)..(61): /note="Nucleotide may be methylated to form 5-methylcytosine"
ttattattttaacacagtctttgaagcagtacagctaagacttacaggaaaccttgactacgactcctactttgtggcaataaatagacaacatgatcttgggggaaaaaaaaagaaagaga

SEQ ID NO: 19532 - DNA, 122 bp, Homo sapiens
  misc_feature (61)..(62): /note="This region represents a CpG dinucleotide"
  misc_feature (61)..(61): /note="Nucleotide may be methylated to form 5-methylcytosine"
aaacagccttctgttgctaaaggaaacaggacgcttctggattcacgtatgtaagagcagcgagaagctacaaaggaagccctgggtccacaggcacaccctaagcctttccaggcagatgc

SEQ ID NO: 19533 - DNA, 122 bp, Homo sapiens
  misc_feature (61)..(62): /note="This region represents a CpG dinucleotide"
  misc_feature (61)..(61): /note="Nucleotide may be methylated to form 5-methylcytosine"
ataaataacaagtttattttgtcacagttctggaggctgggaagttcaagatcaaggctccgctaggctcagtgtttgacaagggctgctctctgcttccaaaatggagccttgttgctgtg

SEQ ID NO: 19534 - DNA, 122 bp, Homo sapiens
  misc_feature (61)..(62): /note="This region represents a CpG dinucleotide"
  misc_feature (61)..(61): /note="Nucleotide may be methylated to form 5-methylcytosine"
gcctctttctttcttccttctgctttccccttaacaaatactttcagttcccttcaagtccgctcttattctctttttccatcctttggtccatttccagccaccctgtctgaactgggcag

SEQ ID NO: 19535 - DNA, 122 bp, Homo sapiens
  misc_feature (61)..(62): /note="This region represents a CpG dinucleotide"
  misc_feature (61)..(61): /note="Nucleotide may be methylated to form 5-methylcytosine"
aatgccagatactgagaaaatggagtgcatgggaggtgtgggatttgcagtttaggctctcgtcatcaaagcgatgtgatccctgggatgaggcatggggttaacaacaaggcacaggagat

SEQ ID NO: 19536 - DNA, 122 bp, Homo sapiens
  misc_feature (61)..(62): /note="This region represents a CpG dinucleotide"
  misc_feature (61)..(61): /note="Nucleotide may be methylated to form 5-methylcytosine"
gtagagagagaataagtcacataattacctcatgcactttctgattttcaaacgatgacacgtaaaagagatgggtaataggaactggtatgatcagtggttgactatccctacaagatgtc

SEQ ID NO: 19537 - DNA, 122 bp, Homo sapiens
  misc_feature (61)..(62): /note="This region represents a CpG dinucleotide"
  misc_feature (61)..(61): /note="Nucleotide may be methylated to form 5-methylcytosine"
gctccttttaattagggatccgggtgaggtatcacccaatcccctagaattcccgcagcccgggaggaagcttgcagcccttcaccgaatgtggcccccagtcctctctcggaaggggcaga

SEQ ID NO: 19538 - DNA, 122 bp, Homo sapiens
  misc_feature (61)..(62): /note="This region represents a CpG dinucleotide"
  misc_feature (61)..(61): /note="Nucleotide may be methylated to form 5-methylcytosine"
gattctcattgttcattatcctcccttagggctgggtgaggtggctcattcctgtaaacccggcacttgaagaggctgaggtgggaggattgcttgagcccaagagttcaagaccagcctgg

SEQ ID NO: 19539 - DNA, 122 bp, Homo sapiens
  misc_feature (61)..(62): /note="This region represents a CpG dinucleotide"
  misc_feature (61)..(61): /note="Nucleotide may be methylated to form 5-methylcytosine"
ggaaattatcaaagtggaccacatcttagacagatcggatgatgaggatgacatttcctccgaaaaccctcaaactgacttccttcacaaggtagacactgaaaaatgggtaagagagacac

SEQ ID NO: 19540 - DNA, 122 bp, Homo sapiens
  misc_feature (61)..(62): /note="This region represents a CpG dinucleotide"
  misc_feature (61)..(61): /note="Nucleotide may be methylated to form 5-methylcytosine"
cccagcatcctcttggttaaatagataaaagaatggctgccataccatgtctgtgaaagccggggagcagcaaccacagagcagaagtcacttctgctgagcttccaaatcccatatgcctg

SEQ ID NO: 19541 - DNA, 122 bp, Homo sapiens
  misc_feature (61)..(62): /note="This region represents a CpG dinucleotide"
  misc_feature (61)..(61): /note="Nucleotide may be methylated to form 5-methylcytosine"
tttgggaggctaaggtgggagaatcacttaaacccaggagttcaagaccagcctaggcaacgtggtgagaccatgtctatacatataatttaaacattagctgggcatggtagtgcatactt

SEQ ID NO: 19542 - DNA, 122 bp, Homo sapiens
  misc_feature (61)..(62): /note="This region represents a CpG dinucleotide"
  misc_feature (61)..(61): /note="Nucleotide may be methylated to form 5-methylcytosine"
ccagcagggaaggtgccacttggaagattgctgggtttcctgcttcgaagtcttcaggagcgggctgagctgcgctggtgtgccgcttaggactgcaatgaggagggtgacgttagaaggtc

SEQ ID NO: 19543 - DNA, 122 bp, Homo sapiens
  misc_feature (61)..(62): /note="This region represents a CpG dinucleotide"
  misc_feature (61)..(61): /note="Nucleotide may be methylated to form 5-methylcytosine"
ggttcgaactcaacctcttcattcttggcttgttataagacaccatggcaacagagaatacgtaggacatgtttctgccctcagggaggttgcagagggtggaggagacaaaacatccacag

SEQ ID NO: 19544 - DNA, 122 bp, Homo sapiens
  misc_feature (61)..(62): /note="This region represents a CpG dinucleotide"
  misc_feature (61)..(61): /note="Nucleotide may be methylated to form 5-methylcytosine"
gagcacatgtgatataatcatttaatgtcatttaaaggagggaggagttctgaaggtgggcgctctaactcttgggataggaccaagggaatgaagcccccaggggcttggggaaaggcgtg

SEQ ID NO: 19545 - DNA, 122 bp, Homo sapiens
  misc_feature (61)..(62): /note="This region represents a CpG dinucleotide"
  misc_feature (61)..(61): /note="Nucleotide may be methylated to form 5-methylcytosine"
agtaggatcaggcaaataaaactagttggacagcagacatatcatgaactcttgcaacagcgtgttatctgtgtgcatgtctaaagtgttatactgattcactattacaataaggatcatgc

SEQ ID NO: 19546 - DNA, 122 bp, Homo sapiens
  misc_feature (61)..(62): /note="This region represents a CpG dinucleotide"
  misc_feature (61)..(61): /note="Nucleotide may be methylated to form 5-methylcytosine"
ggaagaggaagggacagcagaagaaaaaaagagaccacatgaagatgaaactttttaagacgagtaagcaggagattgttagttataggaaggaacccattaaaagctgccgcagaactcta

SEQ ID NO: 19547 - DNA, 122 bp, Homo sapiens
  misc_feature (61)..(62): /note="This region represents a CpG dinucleotide"
  misc_feature (61)..(61): /note="Nucleotide may be methylated to form 5-methylcytosine"
ggatcttcagtgatttacataatttctctgagtcatgatttcctcctctctgagacaatccgttcacgaaagtatcaagttgtgaacggcacatagtaggtccccggtgctgactcattact

SEQ ID NO: 19548 - DNA, 122 bp, Homo sapiens
  misc_feature (61)..(62): /note="This region represents a CpG dinucleotide"
  misc_feature (61)..(61): /note="Nucleotide may be methylated to form 5-methylcytosine"
ttattctagtaattattgggttcccccttgctcacatggttactcacacttgaaagtttgcggtaacaagaaggagccttggcaggaagtttgtttgttccatgactgcttttactgtcaca

SEQ ID NO: 19549 - DNA, 122 bp, Homo sapiens
  misc_feature (61)..(62): /note="This region represents a CpG dinucleotide"
  misc_feature (61)..(61): /note="Nucleotide may be methylated to form 5-methylcytosine"
atgcactctgacaggggctatctctgagctctaacagagatggggttgcttggaggagcacgctgtggcaatgacaggctcttaaaccagagcaatggtatctcatctagcaggatttcccc

SEQ ID NO: 19550 - DNA, 122 bp, Homo sapiens
  misc_feature (61)..(62): /note="This region represents a CpG dinucleotide"
  misc_feature (61)..(61): /note="Nucleotide may be methylated to form 5-methylcytosine"
acctactttttatagcactctttgtaaaaacaaaacactggaaacacaaaagtccttcagcgtagaactggctgaataaatgatggaacattcaaaggggagcattttgcaattatagaaaa

SEQ ID NO: 19551 - DNA, 122 bp, Homo sapiens
  misc_feature (61)..(62): /note="This region represents a CpG dinucleotide"
  misc_feature (61)..(61): /note="Nucleotide may be methylated to form 5-methylcytosine"
acaacagggattaattgcaattgtctttgtgtatggaagggactaggctttttcttagggcgctcagcacagcactgcctgccactgagacggttcagggcacagagctctctaggcccaca

SEQ ID NO: 19552 - DNA, 122 bp, Homo sapiens
  misc_feature (61)..(62): /note="This region represents a CpG dinucleotide"
  misc_feature (61)..(61): /note="Nucleotide may be methylated to form 5-methylcytosine"
gacctcgtgattcgcccaccttggcctcccaaagtgctgggattacaggcatgagccacacgtccagcccgtgagccactgcgcctgacctgtatttactctttaaactatatattgctttg

SEQ ID NO: 19553 - DNA, 122 bp, Homo sapiens
  misc_feature (61)..(62): /note="This region represents a CpG dinucleotide"
  misc_feature (61)..(61): /note="Nucleotide may be methylated to form 5-methylcytosine"
aatttggcctctactgatttctgccctttcctctctatgcttctgttatctgaactcctacgtttcacagtctatttacttttgtctctagtttagatactaacccaactggtcaggaataa

SEQ ID NO: 19554 - DNA, 122 bp, Homo sapiens
  misc_feature (61)..(62): /note="This region represents a CpG dinucleotide"
  misc_feature (61)..(61): /note="Nucleotide may be methylated to form 5-methylcytosine"
ttgttgattggctgggggagggaaatgaaatcatcaggatgtggaaactgcattcgtgggcgagtcagcttcttgggtgcttctgaccatctgagtcaggagttgcattggtatgcagtacc

SEQ ID NO: 19555 - DNA, 122 bp, Homo sapiens
  misc_feature (61)..(62): /note="This region represents a CpG dinucleotide"
  misc_feature (61)..(61): /note="Nucleotide may be methylated to form 5-methylcytosine"
tctcagaatgaccctatttattcatcaaactatttgaacctatggcaaagtttgttccttcgtattttattaaactcaattaagtaatggggtcttttgtcatcagtttcaacttcatcttc

SEQ ID NO: 19556 - DNA, 122 bp, Homo sapiens
  misc_feature (61)..(62): /note="This region represents a CpG dinucleotide"
  misc_feature (61)..(61): /note="Nucleotide may be methylated to form 5-methylcytosine"
caagacgtccctggacctgcggcgggagatcatcgatgtgggcgggatccagaacctcatcgagctgcggaagaaacgcaagcagaagaagcgggacgctctggccgcctcgcatgagccgc

SEQ ID NO: 19557 - DNA, 122 bp, Homo sapiens
  misc_feature (61)..(62): /note="This region represents a CpG dinucleotide"
  misc_feature (61)..(61): /note="Nucleotide may be methylated to form 5-methylcytosine"
gaacaatgggggagacacttttgcatttagacacagcctcagtgatcccagggagtgagtcggtgagagatgactcagatgtgaattccccgctgactcccattttcatccccttgggcagt

SEQ ID NO: 19558 - DNA, 122 bp, Homo sapiens
  misc_feature (61)..(62): /note="This region represents a CpG dinucleotide"
  misc_feature (61)..(61): /note="Nucleotide may be methylated to form 5-methylcytosine"
atgtaccttaacatctctgcatcttggcccctaatcatggcggacaactgggggtggtttcgaaaagcagtcatccagaagcccgggatattctgaatgatgtagttcctccgctccaggta

SEQ ID NO: 19559 - DNA, 122 bp, Homo sapiens
  misc_feature (61)..(62): /note="This region represents a CpG dinucleotide"
  misc_feature (61)..(61): /note="Nucleotide may be methylated to form 5-methylcytosine"
cgggcaggggaaggaagggtcatcctatggcttggtccctagagcaaatgttgtgacagccgtgtgctcacctggctggtgaatcagcccaatggcttccatgagctcaggctcagacaact

SEQ ID NO: 19560 - DNA, 122 bp, Homo sapiens
  misc_feature (61)..(62): /note="This region represents a CpG dinucleotide"
  misc_feature (61)..(61): /note="Nucleotide may be methylated to form 5-methylcytosine"
gaacctagttattcaactaaacactaatctaggtgttgctgtgaagttattatgttgatgcggttaggttagcacgtctacagttgcttgactttaaaaacaggacatgaccctcaaggatg

SEQ ID NO: 19561 - DNA, 122 bp, Homo sapiens
  misc_feature (61)..(62): /note="This region represents a CpG dinucleotide"
  misc_feature (61)..(61): /note="Nucleotide may be methylated to form 5-methylcytosine"
gcaagccctgtgcccagagggtgactgacaatttgcaggttgtggtagggagtgacggagcgttggtttctcaataccttacccaggtaggggcaagccatctggccagggctatgctgtgt

SEQ ID NO: 19562 - DNA, 122 bp, Homo sapiens
  misc_feature (61)..(62): /note="This region represents a CpG dinucleotide"
  misc_feature (61)..(61): /note="Nucleotide may be methylated to form 5-methylcytosine"
ccagctccgcctcctgcagagcttggttgccagggctgggtcaggctgcctgggcgttgccgtctgacctgtgcacagatgtggccaggtgaggacacaagctgttgtctcgtttgctgtgt

SEQ ID NO: 19563 - DNA, 122 bp, Homo sapiens
  misc_feature (61)..(62): /note="This region represents a CpG dinucleotide"
  misc_feature (61)..(61): /note="Nucleotide may be methylated to form 5-methylcytosine"
aaggagagctcaggaggcagaacagatggacacacctcaaattcattctctgatatgacccgtgctacaccaagcacctactctgtgccaagccctgcattgaaggcaagtatgagacagca

SEQ ID NO: 19564 - DNA, 122 bp, Homo sapiens
  misc_feature (61)..(62): /note="This region represents a CpG dinucleotide"
  misc_feature (61)..(61): /note="Nucleotide may be methylated to form 5-methylcytosine"
tttagcgtgtctgcttccagatggggaggcccagtccctgtggaagtgactgctctcccgcggcccagcctcgggaccctcccgtcagccctctccattcacgctaaactgcgctgttcctc

SEQ ID NO: 19565 - DNA, 122 bp, Homo sapiens
  misc_feature (61)..(62): /note="This region represents a CpG dinucleotide"
  misc_feature (61)..(61): /note="Nucleotide may be methylated to form 5-methylcytosine"
gttgtctaagggtgaagggtagcttcagagttgggttagttgcacctgcagtcacctccccgccacctcacacaccaccctgcagcttcctgccttccccatcttttcccccagcagtagga

SEQ ID NO: 19566 - DNA, 122 bp, Homo sapiens
  misc_feature (61)..(62): /note="This region represents a CpG dinucleotide"
  misc_feature (61)..(61): /note="Nucleotide may be methylated to form 5-methylcytosine"
tggcggagggtggggtgaggtggaggtcatgtcgtacatcctcctaagcagacacatggacgtcagaggcaccagagggtttccacattgacctgcagtcacccatttacacatcccccacc

SEQ ID NO: 19567 - DNA, 122 bp, Homo sapiens
  misc_feature (61)..(62): /note="This region represents a CpG dinucleotide"
  misc_feature (61)..(61): /note="Nucleotide may be methylated to form 5-methylcytosine"
tttaaggaaaaaaattgctaatacctgacatgtctttcggttcataattgcgattgttagcgaagtggtctcgaattccatttcactccccgttcgccgctctcagactaaattgcaaatat

SEQ ID NO: 19568 - DNA, 122 bp, Homo sapiens
  misc_feature (61)..(62): /note="This region represents a CpG dinucleotide"
  misc_feature (61)..(61): /note="Nucleotide may be methylated to form 5-methylcytosine"
ctacagacaggaagtaggctgtgaaacaattcagctgtaacagacaacatattctggaaacggaagaataattcaagtgtaaaaccaggagcccaaagggtagaaccaagagctgaggagaa

SEQ ID NO: 19569 - DNA, 122 bp, Homo sapiens
  misc_feature (61)..(62): /note="This region represents a CpG dinucleotide"
  misc_feature (61)..(61): /note="Nucleotide may be methylated to form 5-methylcytosine"
ggccaacccagcccccagtgaggcttggagtggagacgcgcccggggccccttccttcaccgaggctcttgggacagggctcaaagctgcccctagcctcctgcgtctcaactcaccgccgc

SEQ ID NO: 19570 - DNA, 122 bp, Homo sapiens
  misc_feature (61)..(62): /note="This region represents a CpG dinucleotide"
  misc_feature (61)..(61): /note="Nucleotide may be methylated to form 5-methylcytosine"
tctgcctgtcttcagtgtcccagtctctacacaagctcagctaagggtggtgccatctcacgggagcattccctcataaccatcactggcttggggaatggagctggcaaatcaaattgtca

SEQ ID NO: 19571 - DNA, 122 bp, Homo sapiens
  misc_feature (61)..(62): /note="This region represents a CpG dinucleotide"
  misc_feature (61)..(61): /note="Nucleotide may be methylated to form 5-methylcytosine"
tgacactgcaatctctttattcttggttttacactgcacttctagtttcataaatgaggccgtatttaggctttggtttatggaattgagtttacaagggtatccttcactctgttttattt

SEQ ID NO: 19572 - DNA, 122 bp, Homo sapiens
  misc_feature (61)..(62): /note="This region represents a CpG dinucleotide"
  misc_feature (61)..(61): /note="Nucleotide may be methylated to form 5-methylcytosine"
tatgccaacacacaagcctccatgcctggaaccagcccaagccccagacctcttgcaccacgctctgaggacaatgggtcccagagaacagcaagttagctcctgactccatctgcagctcc

SEQ ID NO: 19573 - DNA, 122 bp, Homo sapiens
  misc_feature (61)..(62): /note="This region represents a CpG dinucleotide"
  misc_feature (61)..(61): /note="Nucleotide may be methylated to form 5-methylcytosine"
caagcggcagagctgggctttgggtttggggccagattgaggcctccacactctgggctgcggctgcatgttggccacgcactgtgaggttcaccttatcttttcttcctcataccctgggc

SEQ ID NO: 19574 - DNA, 122 bp, Homo sapiens
  misc_feature (61)..(62): /note="This region represents a CpG dinucleotide"
  misc_feature (61)..(61): /note="Nucleotide may be methylated to form 5-methylcytosine"
acccctcatggggctgttgggatgacgaggtgagacggcatctgtcagctcttacagagacgcaggcgaacagtggggcccggcagcccttgctcttcgctccccaggccggggggtggctg

SEQ ID NO: 19575 - DNA, 122 bp, Homo sapiens
  misc_feature (61)..(62): /note="This region represents a CpG dinucleotide"
  misc_feature (61)..(61): /note="Nucleotide may be methylated to form 5-methylcytosine"
tgcaaaggtggagagcctgccagtgcatgtgttctggtaacaaagaacgagatggttggccggctggagagtggggtgagggagggtggggcctagataaggctggatccgcagacagggct

SEQ ID NO: 19576 - DNA, 122 bp, Homo sapiens
  misc_feature (61)..(62): /note="This region represents a CpG dinucleotide"
  misc_feature (61)..(61): /note="Nucleotide may be methylated to form 5-methylcytosine"
ggcttagttgctcgctccttaggaaaggaaaaacttgctgcctgataaagggattaaggccggagtaacacaaccagttctcataccaaggttatcaggcatttgaagtacacataggaaac

SEQ ID NO: 19577 - DNA, 122 bp, Homo sapiens
  misc_feature (61)..(62): /note="This region represents a CpG dinucleotide"
  misc_feature (61)..(61): /note="Nucleotide may be methylated to form 5-methylcytosine"
ctttatgtgcctcacttggaaggggaaaaaaagaacaaaaaaagaaagaaaatcctactgcgggttggcaactctaaaaggattttaatggatttatgaaacccccagatttccttacagcc

SEQ ID NO: 19578 - DNA, 122 bp, Homo sapiens
  misc_feature (61)..(62): /note="This region represents a CpG dinucleotide"
  misc_feature (61)..(61): /note="Nucleotide may be methylated to form 5-methylcytosine"
cttgttattgacttttgccaccttctcattcgtgtgtgggtccctggaattcccctgtaccgagctgctcttgtttgtcttttaagtcagcattttccccagtcctgcctggatgcatatgg

SEQ ID NO: 19579 - DNA, 122 bp, Homo sapiens
  misc_feature (61)..(62): /note="This region represents a CpG dinucleotide"
  misc_feature (61)..(61): /note="Nucleotide may be methylated to form 5-methylcytosine"
ccactgatgtgatgcaatggaatgtacatggcatcactaaagtcttcttgcaccactccccgcaacaggaaaaaaaaaaaaaaaaaactaaatctaattgagcctatagatcaaacactgtg

SEQ ID NO: 19580 - DNA, 122 bp, Homo sapiens
  misc_feature (61)..(62): /note="This region represents a CpG dinucleotide"
  misc_feature (61)..(61): /note="Nucleotide may be methylated to form 5-methylcytosine"
ctttttagtaattattctacaaacaggaagtccttgtttctttagctgagcttagcttgtcggggctttcctaatcccctctgtggttaaagtgctctctgtgttctgagttgtcttcctta

SEQ ID NO: 19581 - DNA, 122 bp, Homo sapiens
  misc_feature (61)..(62): /note="This region represents a CpG dinucleotide"
  misc_feature (61)..(61): /note="Nucleotide may be methylated to form 5-methylcytosine"
gtgcagccgcatgatcgcagctcactgcaacttctgcctctcgggttcaagtgattatgacgttaaatttctacttatataattcagaatgttgccgggtgcagtggctcatgcctgtaatc

SEQ ID NO: 19582 - DNA, 122 bp, Homo sapiens
  misc_feature (61)..(62): /note="This region represents a CpG dinucleotide"
  misc_feature (61)..(61): /note="Nucleotide may be methylated to form 5-methylcytosine"
gctttctccaggtacacctgaccaagcttttcctcaggagagtcttatatctcctacaagcggcaacagggtatgtgtatttaaaacagaccaaaaaaaaaaaaaaacaccaaaaaaccacc

SEQ ID NO: 19583 - DNA, 122 bp, Homo sapiens
  misc_feature (61)..(62): /note="This region represents a CpG dinucleotide"
  misc_feature (61)..(61): /note="Nucleotide may be methylated to form 5-methylcytosine"
ctgactcatctgttcccagagctgactcagtcctcgctccctggagccagaatgctcttccgtgcacattcattgaacattctagacagtgtgccaagatgctggagctacacgggtgaaaa

SEQ ID NO: 19584 - DNA, 122 bp, Homo sapiens
  misc_feature (61)..(62): /note="This region represents a CpG dinucleotide"
  misc_feature (61)..(61): /note="Nucleotide may be methylated to form 5-methylcytosine"
cgtcatatgctctccgtaggttacctgtctatttagaagcaaacctctcgtcacccgctgcggagcatctcgatgttagaaaccacgccactatttttagtgtgtgtccttgtgcttctgca

SEQ ID NO: 19585 - DNA, 122 bp, Homo sapiens
  misc_feature (61)..(62): /note="This region represents a CpG dinucleotide"
  misc_feature (61)..(61): /note="Nucleotide may be methylated to form 5-methylcytosine"
atctgcaaaagtacatattgaaatatgcaaatggtatatagcatgtgagtgtcagattcacggaaattaaatcaaatacaggggagagaaaagaaacagagtgcattaaagctaactttatg

SEQ ID NO: 19586 - DNA, 122 bp, Homo sapiens
  misc_feature (61)..(62): /note="This region represents a CpG dinucleotide"
  misc_feature (61)..(61): /note="Nucleotide may be methylated to form 5-methylcytosine"
tatacctcaactagctctagtgaggtcagaatgactaacatcatcaaacctaggattacacgaaccttaaatcccaggaggtgtgggcagccattagtcagagtattcaactttattcacaa

SEQ ID NO: 19587 - DNA, 122 bp, Homo sapiens
  misc_feature (61)..(62): /note="This region represents a CpG dinucleotide"
  misc_feature (61)..(61): /note="Nucleotide may be methylated to form 5-methylcytosine"
aaccaggttatggcattgcattggatcccaaccaggatatgacattgcatttactcatcacgcctccttaggttcctcttggctgtgacggtttctcagactatccttgttttttaggacct

SEQ ID NO: 19588 - DNA, 122 bp, Homo sapiens
  misc_feature (61)..(62): /note="This region represents a CpG dinucleotide"
  misc_feature (61)..(61): /note="Nucleotide may be methylated to form 5-methylcytosine"
aggtcttaggtgtatgctgtgtgtgtgtgtgcaaaggcttggggagaaggattggtgtcacgtgcggggcagtgtaaaaaacttaactgcttcccacctgggcacaaaatgaaaagaaagac

SEQ ID NO: 19589 - DNA, 122 bp, Homo sapiens
  misc_feature (61)..(62): /note="This region represents a CpG dinucleotide"
  misc_feature (61)..(61): /note="Nucleotide may be methylated to form 5-methylcytosine"
aataaaaggtcggaacatcataatcactgtcagactcaacttccatcattctcctccaggcgctatggagtctaatccaggcactttggaaggctgaggctggaggatcgattgaggccagg

SEQ ID NO: 19590 - DNA, 122 bp, Homo sapiens
  misc_feature (61)..(62): /note="This region represents a CpG dinucleotide"
  misc_feature (61)..(61): /note="Nucleotide may be methylated to form 5-methylcytosine"
tatttttgttaaggatatctgggcaccctaaaaatttcatactttatgtccactcattaccgtatgggagaaaagttgctaccataaagtatgtggtttgtaggagctcctaaaataaaact

SEQ ID NO: 19591 - DNA, 122 bp, Homo sapiens
  misc_feature (61)..(62): /note="This region represents a CpG dinucleotide"
  misc_feature (61)..(61): /note="Nucleotide may be methylated to form 5-methylcytosine"
caaataagataatgggaacgggtgttgtcaggcattacacaaatgtaggattaggtccagcggtttactaacagaggtctggctcaattccagcgagtcccccctggggagcatttaacata

SEQ ID NO: 19592 - DNA, 122 bp, Homo sapiens
  misc_feature (61)..(62): /note="This region represents a CpG dinucleotide"
  misc_feature (61)..(61): /note="Nucleotide may be methylated to form 5-methylcytosine"
gtctggaaagttctatcaggtgcttgttcctctcccttgattttccagcactcaggttcacgagtggtttccaagccaggctgggtgtgcctttgtagatatcaccataaactcaccgatgt

SEQ ID NO: 19593 - DNA, 122 bp, Homo sapiens
  misc_feature (61)..(62): /note="This region represents a CpG dinucleotide"
  misc_feature (61)..(61): /note="Nucleotide may be methylated to form 5-methylcytosine"
tagaaactctccccacccaacatacctggagtgcaggcgaggtccaggcaaacgggaaagcgacttcttgtacgaatagccatctcaagatgaagccaggctgtggaaaacttaaggccatc

SEQ ID NO: 19594 - DNA, 122 bp, Homo sapiens
  misc_feature (61)..(62): /note="This region represents a CpG dinucleotide"
  misc_feature (61)..(61): /note="Nucleotide may be methylated to form 5-methylcytosine"
aatgggatcttaggccaggagcctattgttttcccatttgggctggttaagccatttatccggtactgccaagggaagcaacagggctggctcatacacccactttccctttggttgatatc

SEQ ID NO: 19595 - DNA, 122 bp, Homo sapiens
  misc_feature (61)..(62): /note="This region represents a CpG dinucleotide"
  misc_feature (61)..(61): /note="Nucleotide may be methylated to form 5-methylcytosine"
tcctatgtcatagaattgttgtgatgattaaatgagttattacatttaagtgattagaaccgtgcttagcacagaggaagcactcaaaagttaactactattagtgatgtctaaactttttt

SEQ ID NO: 19596 - DNA, 122 bp, Homo sapiens
  misc_feature (61)..(62): /note="This region represents a CpG dinucleotide"
  misc_feature (61)..(61): /note="Nucleotide may be methylated to form 5-methylcytosine"
gtttactggagtgattgctcacaggactctcattctcaaaataataacagccatcatcagcgtaataccatgttgcatgttcagagcttttaactgtaaccaagaactactatgatctcatg

SEQ ID NO: 19597 - DNA, 122 bp, Homo sapiens
  misc_feature (61)..(62): /note="This region represents a CpG dinucleotide"
  misc_feature (61)..(61): /note="Nucleotide may be methylated to form 5-methylcytosine"
tcaccaaatgtcagttgctgtggtagttattatttttcacagccttcactgtcccagatacgtaacaatgaagaatggcttgcctcgaagcatttccctcagtccagagggggagatttggg

SEQ ID NO: 19598 - DNA, 122 bp, Homo sapiens
  misc_feature (61)..(62): /note="This region represents a CpG dinucleotide"
  misc_feature (61)..(61): /note="Nucleotide may be methylated to form 5-methylcytosine"
gctccaagaagggtagctctgggatcccgggcaggaaattggtgacaaggtgacaaggtgcgcgtgtcacagctgcccagttcacggcttattcagtcttctccctccccccactccccacc

SEQ ID NO: 19599 - DNA, 122 bp, Homo sapiens
  misc_feature (61)..(62): /note="This region represents a CpG dinucleotide"
  misc_feature (61)..(61): /note="Nucleotide may be methylated to form 5-methylcytosine"
aaggaactacttggtttgaatttctccaagtctatgccaaactcctgaatgagtttggcccgcctttggtttatactgtttagccagccctgctctaactaggctcctgtccgcctgagaaa

SEQ ID NO: 19600 - DNA, 122 bp, Homo sapiens
  misc_feature (61)..(62): /note="This region represents a CpG dinucleotide"
  misc_feature (61)..(61): /note="Nucleotide may be methylated to form 5-methylcytosine"
tgacacacaacacctcctcccagatattactggcaacagctaattgtgaccccatctaaacgcagtggaaatgaggactgggaattgttgctcctgatgggcaggtacttcctagcaacagc

SEQ ID NO: 19601 - DNA, 122 bp, Homo sapiens
  misc_feature (61)..(62): /note="This region represents a CpG dinucleotide"
  misc_feature (61)..(61): /note="Nucleotide may be methylated to form 5-methylcytosine"
gaaagcaggtgaggtttactgtatagatgggtgtgcccctaccccacactgaggcttcctcgtctgagcaaactgaggcccagagaggggaaggaagcaggactaccatggtgactcaaaga

SEQ ID NO: 19602 - DNA, 122 bp, Homo sapiens
  misc_feature (61)..(62): /note="This region represents a CpG dinucleotide"
  misc_feature (61)..(61): /note="Nucleotide may be methylated to form 5-methylcytosine"
ttagccgggcatggtggtgcattcctgtaatcaatctcagctactcaggaggctgacgtacgagaatcactttagcccagaaggcggtgcttgcaatgagccaagattgagtcactgcactc

SEQ ID NO: 19603 - DNA, 122 bp, Homo sapiens
  misc_feature (61)..(62): /note="This region represents a CpG dinucleotide"
  misc_feature (61)..(61): /note="Nucleotide may be methylated to form 5-methylcytosine"
aaaaatatttttaagctttctctcagaattgaaggcagtaggggagggatacagaagttccggaaatggctgactgtgtagacaagatggtgtggtttcagagtacagctgaatatatacag

SEQ ID NO: 19604 - DNA, 122 bp, Homo sapiens
  misc_feature (61)..(62): /note="This region represents a CpG dinucleotide"
  misc_feature (61)..(61): /note="Nucleotide may be methylated to form 5-methylcytosine"
agaaacacgagcatgagctgctgagacagacacggctcagccagtttgttgttccctacacgacctcccagagcctttgttgaagctcctgtgcaaggtctgtctcacagcaggacacccca

SEQ ID NO: 19605 - DNA, 122 bp, Homo sapiens
  misc_feature (61)..(62): /note="This region represents a CpG dinucleotide"
  misc_feature (61)..(61): /note="Nucleotide may be methylated to form 5-methylcytosine"
gacgagtttggagggtaaatggccatcttaatggtatcatctgactgcattttgtgctgccgagattgtgctgagtggaaatttccctggaagtagcaagagtggcttagtttcattacagt

SEQ ID NO: 19606 - DNA, 122 bp, Homo sapiens
  misc_feature (61)..(62): /note="This region represents a CpG dinucleotide"
  misc_feature (61)..(61): /note="Nucleotide may be methylated to form 5-methylcytosine"
agtgattcacctgcctcggcctcccgaagtgctgggattacaggcgtgagccaccacccccggccaactgctattgttgtaatagattgtaacaaagccagtggtaatgggtagcccaacga

SEQ ID NO: 19607 - DNA, 122 bp, Homo sapiens
  misc_feature (61)..(62): /note="This region represents a CpG dinucleotide"
  misc_feature (61)..(61): /note="Nucleotide may be methylated to form 5-methylcytosine"
aagatgcccttagatgggtggtgccctggaggtcaggcctgagtctcctgcaggcaggggcgcctggggaattactcacgggtgcctttcattcccttcctgctctgtgagacctgtgttga

SEQ ID NO: 19608 - DNA, 122 bp, Homo sapiens
  misc_feature (61)..(62): /note="This region represents a CpG dinucleotide"
  misc_feature (61)..(61): /note="Nucleotide may be methylated to form 5-methylcytosine"
tagggaatgcttcatgaatttgcaagtcatccttgcacggggccatgctaatttctgtatcgttcaaaaaaaaatgattgcttaatgtacaaatgttcagatgttctctgcagggattagtg

SEQ ID NO: 19609 - DNA, 122 bp, Homo sapiens
  misc_feature (61)..(62): /note="This region represents a CpG dinucleotide"
  misc_feature (61)..(61): /note="Nucleotide may be methylated to form 5-methylcytosine"
tctaaacatatctaagcatagaaaaggtacaggaaaatcttataggaccaccattatatacgctgttcgtcactgaccaaaatgctatgaggtacatgactgtatagatatcctattggttc

SEQ ID NO: 19610 - DNA, 122 bp, Homo sapiens
  misc_feature (61)..(62): /note="This region represents a CpG dinucleotide"
  misc_feature (61)..(61): /note="Nucleotide may be methylated to form 5-methylcytosine"
tatatgcatgagccactgtgcccagccctcaatcctttgaattgtatgaaagttgagtcacgctgctcagcagcataatggaaaagaaataattctaactttggcatgaagacctaaagtac

SEQ ID NO: 19611 - DNA, 122 bp, Homo sapiens
  misc_feature (61)..(62): /note="This region represents a CpG dinucleotide"
  misc_feature (61)..(61): /note="Nucleotide may be methylated to form 5-methylcytosine"
acgaggtcaaggaaaccatcataaataaattttaggcatggatggggtgagacagaaggacgagaaggaagccttcctcatgtcacatgcatgtctagagccactctttctgtccaagctct

SEQ ID NO: 19612 - DNA, 122 bp, Homo sapiens
  misc_feature (61)..(62): /note="This region represents a CpG dinucleotide"
  misc_feature (61)..(61): /note="Nucleotide may be methylated to form 5-methylcytosine"
tcgtccaactttctcgaatgtttggatgaaaacaaatgactctgtcacctttggcattagcgatgtttgacacatctgagtgtgtcagccttgtttacagtcctgtcctgaccaacaactgc

SEQ ID NO: 19613 - DNA, 122 bp, Homo sapiens
  misc_feature (61)..(62): /note="This region represents a CpG dinucleotide"
  misc_feature (61)..(61): /note="Nucleotide may be methylated to form 5-methylcytosine"
tgctgggaaagaagggcagtggtcgatcaatacccaagatcaagtgagcttagctcctcacgtgagtatttcagaaggcattgctttttggttgcatttccttgtaagttggcgagctgcat

SEQ ID NO: 19614 - DNA, 122 bp, Homo sapiens
  misc_feature (61)..(62): /note="This region represents a CpG dinucleotide"
  misc_feature (61)..(61): /note="Nucleotide may be methylated to form 5-methylcytosine"
tcgtgcgggcattgccgggctttcagagccccagtttctccctcaccccacccctttccacgtgctacctatagagaaggcagtgagcctggaggagctgatggcccagatagatagaagac

SEQ ID NO: 19615 - DNA, 122 bp, Homo sapiens
  misc_feature (61)..(62): /note="This region represents a CpG dinucleotide"
  misc_feature (61)..(61): /note="Nucleotide may be methylated to form 5-methylcytosine"
cccacatgacacccgctaattccatacccacagctctccttctccaaacaaacagcagcacggtttgcagaaagaagaaaatgccttcccaagaggagctgcagagaaaggccaggtcataa

SEQ ID NO: 19616 - DNA, 122 bp, Homo sapiens
  misc_feature (61)..(62): /note="This region represents a CpG dinucleotide"
  misc_feature (61)..(61): /note="Nucleotide may be methylated to form 5-methylcytosine"
ccaggccaataagtagcatttgcaggtatgagtcagcttcagtggtaacagtggggtttacgcttgacctttgtttgccagggaaagctcagatattctgatgactggcagaggcaccagcc

SEQ ID NO: 19617 - DNA, 122 bp, Homo sapiens
  misc_feature (61)..(62): /note="This region represents a CpG dinucleotide"
  misc_feature (61)..(61): /note="Nucleotide may be methylated to form 5-methylcytosine"
gaagtggcagaagcttctgtacgtaggaacccagtcacttcgtagcagagaggcagactgcgcacagatctgcgtggggaagggagtgcgccaagccacagcctgatgggccggcgtgcctg

SEQ ID NO: 19618 - DNA, 122 bp, Homo sapiens
  misc_feature (61)..(62): /note="This region represents a CpG dinucleotide"
  misc_feature (61)..(61): /note="Nucleotide may be methylated to form 5-methylcytosine"
gtacacaggtgcttctttctaaattcaagttactgaagctagaccccgcggcgcgctctgcgtctgggtctaggacacgccttctagctgcgatccacgttgaccccgcacaagccgaggtg

SEQ ID NO: 19619 - DNA, 122 bp, Homo sapiens
  misc_feature (61)..(62): /note="This region represents a CpG dinucleotide"
  misc_feature (61)..(61): /note="Nucleotide may be methylated to form 5-methylcytosine"
gcctcacaatttagtaagagagacacaccaacagatcatcaaaatgtaaagtgttgagtgcgtcagacagacacacatgatggcatggaagctgttggagatgggctgtgatccaggagacg

SEQ ID NO: 19620 - DNA, 122 bp, Homo sapiens
  misc_feature (61)..(62): /note="This region represents a CpG dinucleotide"
  misc_feature (61)..(61): /note="Nucleotide may be methylated to form 5-methylcytosine"
tataccgataaggaaatgtcaccaagatagggtgttaaagcgggggaaaaacccaacaaacgtgtagaacgtgtacagactggcactaaatatgttaaaatggagtaaggaagggtatagat

SEQ ID NO: 19621 - DNA, 122 bp, Homo sapiens
  misc_feature (61)..(62): /note="This region represents a CpG dinucleotide"
  misc_feature (61)..(61): /note="Nucleotide may be methylated to form 5-methylcytosine"
tgtgagagttttaagaggtggggcctttgaaaagtgactaagacatgagggcactgcctccgtgagagggattcatgccttcccttataaaagaggtggaaagggccgggcacagtggctca

SEQ ID NO: 19622 - DNA, 122 bp, Homo sapiens
  misc_feature (61)..(62): /note="This region represents a CpG dinucleotide"
  misc_feature (61)..(61): /note="Nucleotide may be methylated to form 5-methylcytosine"
tccagtgtgtgcataaacactgccctgggtgttggtggttttgctgccaggattcccctccgcttctggaaatggcacctgaattttcctgcgggaagcggggtttgccctctcctcaacca

SEQ ID NO: 19623 - DNA, 122 bp, Homo sapiens
  misc_feature (61)..(62): /note="This region represents a CpG dinucleotide"
  misc_feature (61)..(61): /note="Nucleotide may be methylated to form 5-methylcytosine"
agggagccatcccaaagactattagcctctttcacctttaataacctgagatctcccattcgtgatgtgtgcagatgaaaatatgttctgcctgtgggtaaaggtgttattaatgcataatt

SEQ ID NO: 19624 - DNA, 122 bp, Homo sapiens
  misc_feature (61)..(62): /note="This region represents a CpG dinucleotide"
  misc_feature (61)..(61): /note="Nucleotide may be methylated to form 5-methylcytosine"
cagcaaagatgtgatgttctgaacacaacacacattttgagatcattgtccttatggccacggagaaataaacgctaaagtttcacttttatgttgtagcaaaaaggacagtcttaattggt

SEQ ID NO: 19625 - DNA, 122 bp, Homo sapiens
  misc_feature (61)..(62): /note="This region represents a CpG dinucleotide"
  misc_feature (61)..(61): /note="Nucleotide may be methylated to form 5-methylcytosine"
aggtaagtcagttgaagagagaacctgagaaatgtgatcttcaggcttaccactgtggggcgcatagcatgctagaaaaaagtaagtatgaggtttagaagtggagaaatatacactttcca

SEQ ID NO: 19626 - DNA, 122 bp, Homo sapiens
  misc_feature (61)..(62): /note="This region represents a CpG dinucleotide"
  misc_feature (61)..(61): /note="Nucleotide may be methylated to form 5-methylcytosine"
ctaaaaagaggctttgcactccaaacccctcctaacagaggtgagccaagagaggctgaacgacttgcctggcatcatgcagcaagaagggaggttcccgaacccagactatcctacgacca

SEQ ID NO: 19627 - DNA, 122 bp, Homo sapiens
  misc_feature (61)..(62): /note="This region represents a CpG dinucleotide"
  misc_feature (61)..(61): /note="Nucleotide may be methylated to form 5-methylcytosine"
cagactagctgaagcatttcacagtaaactgcagacactctagctcttcactcttacatacgtcagcattccttttcataaaatgatgttttccaccagaaccacaatgggagtagactgaa

SEQ ID NO: 19628 - DNA, 122 bp, Homo sapiens
  misc_feature (61)..(62): /note="This region represents a CpG dinucleotide"
  misc_feature (61)..(61): /note="Nucleotide may be methylated to form 5-methylcytosine"
aaactggaaacatgtaaacatcaggagcaatgataaactgaaataattcatccagtgaaacgccacctggtcttgaaggaagagaggtggtcaagccagactccagagctgctcaccacagg

SEQ ID NO: 19629 - DNA, 122 bp, Homo sapiens
  misc_feature (61)..(62): /note="This region represents a CpG dinucleotide"
  misc_feature (61)..(61): /note="Nucleotide may be methylated to form 5-methylcytosine"
gctagagatagggggacagcaggataaatagagtttccacccagggcctctgcatcagggcgcctagccacagcacacacgcgggctgcagtccaggatatgccgatccactaagcttgaaa

SEQ ID NO: 19630 - DNA, 122 bp, Homo sapiens
  misc_feature (61)..(62): /note="This region represents a CpG dinucleotide"
  misc_feature (61)..(61): /note="Nucleotide may be methylated to form 5-methylcytosine"
agctgggatccatgcagctggtggcttgtcggtggcaggccaaggcctgagtcatgtccccgtcacagccttcagtggagggctgacccacagaggaaattacacagcactctgtggcccat

SEQ ID NO: 19631 - DNA, 122 bp, Homo sapiens
  misc_feature (61)..(62): /note="This region represents a CpG dinucleotide"
  misc_feature (61)..(61): /note="Nucleotide may be methylated to form 5-methylcytosine"
gaggggagctggaagtgtggcggtctgtcttagactatgttagctgtgtcaaaacagctacgccccacatcaccagccgaaaaggaaggggaaacagtggcaggtacttgcctggcatctta

SEQ ID NO: 19632 - DNA, 122 bp, Homo sapiens
  misc_feature (61)..(62): /note="This region represents a CpG dinucleotide"
  misc_feature (61)..(61): /note="Nucleotide may be methylated to form 5-methylcytosine"
acaggacacacatcctgccacacccagcactggtgtgagtgacccgtcccatgaagacagcggacgtgatgagagggcaccagtgttttcacacaatgtgcacacactccagtcaaagactt

SEQ ID NO: 19633 - DNA, 122 bp, Homo sapiens
  misc_feature (61)..(62): /note="This region represents a CpG dinucleotide"
  misc_feature (61)..(61): /note="Nucleotide may be methylated to form 5-methylcytosine"
taagagaagacatttcctaagaatcctaaggtcggtagggatagccctgtgtggtcacagcgccagggcacatgtggttattcacagaagcccgacagaaaacaagccaagaactcaggcat

SEQ ID NO: 19634 - DNA, 122 bp, Homo sapiens
  misc_feature (61)..(62): /note="This region represents a CpG dinucleotide"
  misc_feature (61)..(61): /note="Nucleotide may be methylated to form 5-methylcytosine"
ccacccacatcatttatcatctttctgaacacttccccagaacactcctttggttccaagcggggtaaagtcctgggcacaagccagcgtcacccatggagcacatggagatggtgagtgca

SEQ ID NO: 19635 - DNA, 122 bp, Homo sapiens
  misc_feature (61)..(62): /note="This region represents a CpG dinucleotide"
  misc_feature (61)..(61): /note="Nucleotide may be methylated to form 5-methylcytosine"
ctctgcttcattctttaatcctattccatttgcgttttggaaaatagcctccctcagcttcgaaatttacatgtggtatgtccagccacataagaggctgactattagacctcggttgccat

SEQ ID NO: 19636 - DNA, 122 bp, Homo sapiens
  misc_feature (61)..(62): /note="This region represents a CpG dinucleotide"
  misc_feature (61)..(61): /note="Nucleotide may be methylated to form 5-methylcytosine"
ttaacagcaaacaggatcactcttcaccagtattaaagggtttctcagctttagcaatgccgttagctactaagaatgatgctctcagtgcagacacatttgatgaagtggtggccttcagt

SEQ ID NO: 19637 - DNA, 122 bp, Homo sapiens
  misc_feature (61)..(62): /note="This region represents a CpG dinucleotide"
  misc_feature (61)..(61): /note="Nucleotide may be methylated to form 5-methylcytosine"
ggtgtctaaagaaacagcctacatgaagttaacaaagaatgacagcgcaaaacacactcacgctatgtctgtggaattttggccacacagtggacatgactgtcaactgtctcaggcagccc

SEQ ID NO: 19638 - DNA, 122 bp, Homo sapiens
  misc_feature (61)..(62): /note="This region represents a CpG dinucleotide"
  misc_feature (61)..(61): /note="Nucleotide may be methylated to form 5-methylcytosine"
aaaatctcttctacttggttttctgattcagttcaaacttgtgcttgcaagtgaatcttacgtaaatgtcacctaaaaagagctcaagaagactcataaaaaatatttttttcgtaatttga

SEQ ID NO: 19639 - DNA, 122 bp, Homo sapiens
  misc_feature (61)..(62): /note="This region represents a CpG dinucleotide"
  misc_feature (61)..(61): /note="Nucleotide may be methylated to form 5-methylcytosine"
gatgattaagacttagtaatgtccatcttacacttcagtctgatatttaccttctttagccgtagcccaacttgtagtttcagggactttcatggtccctcttcttttcagtcctggattgt

SEQ ID NO: 19640 - DNA, 122 bp, Homo sapiens
  misc_feature (61)..(62): /note="This region represents a CpG dinucleotide"
  misc_feature (61)..(61): /note="Nucleotide may be methylated to form 5-methylcytosine"
taattaaaagatcttttaacctttaattatagaaaaagatttaaactattcttgaggtaacggagggaagtatttgtccacttacctgttgatatgctacccagacagaagacacccgagca

SEQ ID NO: 19641 - DNA, 122 bp, Homo sapiens
  misc_feature (61)..(62): /note="This region represents a CpG dinucleotide"
  misc_feature (61)..(61): /note="Nucleotide may be methylated to form 5-methylcytosine"
ggctgtataggaaatctgtaacactgttcttgcttaaaaatgtaaaacttcaatagaaggcggttcatcagagaatttggtaacaccaaatagtaaacgctttgatttcagtaatactaaga

SEQ ID NO: 19642 - DNA, 122 bp, Homo sapiens
  misc_feature (61)..(62): /note="This region represents a CpG dinucleotide"
  misc_feature (61)..(61): /note="Nucleotide may be methylated to form 5-methylcytosine"
atagaagaatgaagttggaccccttctaatatcatgtacaaaaattaactcaaaatgaatcgaagacctaaatgtaggacctgaaactgtaaaactcttaggagaaaacacagggcaaaacc

SEQ ID NO: 19643 - DNA, 122 bp, Homo sapiens
  misc_feature (61)..(62): /note="This region represents a CpG dinucleotide"
  misc_feature (61)..(61): /note="Nucleotide may be methylated to form 5-methylcytosine"
caagaaagctaagtaatttttagaaaagcaatacttttcaagagacaatcttggcctcagcgaagaaatgattataactgaagatatggagcaatgtagaagaattcagaaagaaaccaaat

SEQ ID NO: 19644 - DNA, 122 bp, Homo sapiens
  misc_feature (61)..(62): /note="This region represents a CpG dinucleotide"
  misc_feature (61)..(61): /note="Nucleotide may be methylated to form 5-methylcytosine"
tcggggtaaatacggtagaacgcggtaaatacggtagaccggggtaaatgcccctccaggcggacaccctttgagcaatgcttgcgactccctgactccacttcctcatcctcacccagccc

SEQ ID NO: 19645 - DNA, 122 bp, Homo sapiens
  misc_feature (61)..(62): /note="This region represents a CpG dinucleotide"
  misc_feature (61)..(61): /note="Nucleotide may be methylated to form 5-methylcytosine"
agaagctggactctctcagtgggctgtttgcctgcccctcccttcatttcccataggcttcggtagaagcgtggcctgcagaatcaggaaacagtgctggttaatctgtaagtatgcaacat

SEQ ID NO: 19646 - DNA, 122 bp, Homo sapiens
  misc_feature (61)..(62): /note="This region represents a CpG dinucleotide"
  misc_feature (61)..(61): /note="Nucleotide may be methylated to form 5-methylcytosine"
cctcgtctttaaaccagaacagacacaaccttggtcaggaaatttcacattctgaaagtccgtatcacctaacaaggaaaaccttcttatcctggccatgaatctagcagtgatctttcata

SEQ ID NO: 19647 - DNA, 122 bp, Homo sapiens
  misc_feature (61)..(62): /note="This region represents a CpG dinucleotide"
  misc_feature (61)..(61): /note="Nucleotide may be methylated to form 5-methylcytosine"
aagcaggtaaacaaatctgtgttttagaaaaatcacattggctacactccaggaagcagtcgaacaacagcgaaagcttttgggaaactgtaatcccatagaaagacaaaggattataagta

SEQ ID NO: 19648 - DNA, 122 bp, Homo sapiens
  misc_feature (61)..(62): /note="This region represents a CpG dinucleotide"
  misc_feature (61)..(61): /note="Nucleotide may be methylated to form 5-methylcytosine"
gggggatttttagtagagggaatgaatcctggggggaaaaggatgaagtggagccttccacgatacacagcacagacaggctgagttactgctggtgatggagccagaaagtcaaggacgta

SEQ ID NO: 19649 - DNA, 122 bp, Homo sapiens
  misc_feature (61)..(62): /note="This region represents a CpG dinucleotide"
  misc_feature (61)..(61): /note="Nucleotide may be methylated to form 5-methylcytosine"
gaatataaatgaaaatacaaattttaaaatttgtgggatatacataagcaatgcttagagcggaaaatttaaagaattaaatgtatcagaaaagcacaggaaggtctcaataaacaacataa

SEQ ID NO: 19650 - DNA, 122 bp, Homo sapiens
  misc_feature (61)..(62): /note="This region represents a CpG dinucleotide"
  misc_feature (61)..(61): /note="Nucleotide may be methylated to form 5-methylcytosine"
attcttagtcctctgccagtttttcagcatcaagtcacttcatgtttgtctaatgatccacgaggtgaatgccactcatgctcagccgcaaccctaactctgccgcgttgggatttctcatg

SEQ ID NO: 19651 - DNA, 122 bp, Homo sapiens
  misc_feature (61)..(62): /note="This region represents a CpG dinucleotide"
  misc_feature (61)..(61): /note="Nucleotide may be methylated to form 5-methylcytosine"
tggtaccagagcacaatgactgtgtctgtgattcactaatccaagaaatcaggattagggcgtggaaggaggaattcgtgtttctggaagtccgtccacaaaattgtagcctcttgtcttga

SEQ ID NO: 19652 - DNA, 122 bp, Homo sapiens
  misc_feature (61)..(62): /note="This region represents a CpG dinucleotide"
  misc_feature (61)..(61): /note="Nucleotide may be methylated to form 5-methylcytosine"
cagtttcggtgaccgtcacagtgatttctgtggctttggcttttctgctcctagctcactcgtcagcagtttactctcaggtttatctctgaatttgagttagaaatcctcagctgtatgta

SEQ ID NO: 19653 - DNA, 122 bp, Homo sapiens
  misc_feature (61)..(62): /note="This region represents a CpG dinucleotide"
  misc_feature (61)..(61): /note="Nucleotide may be methylated to form 5-methylcytosine"
tggctgacccggcccggcttctcagggcccagaccagcctggcctcgtgcccacctgcttcgctcccaacctcaccaccaggcaagggtttccagaaaaccgagacacgcaaacacccacca

SEQ ID NO: 19654 - DNA, 122 bp, Homo sapiens
  misc_feature (61)..(62): /note="This region represents a CpG dinucleotide"
  misc_feature (61)..(61): /note="Nucleotide may be methylated to form 5-methylcytosine"
accattctccagccagcgttgtctcctgttcttctcacctccccctattccatcctgccccgagtagtctattcgtgctaaagcattcactgagaaaaactgtaaagggagagtcccttctc

SEQ ID NO: 19655 - DNA, 122 bp, Homo sapiens
  misc_feature (61)..(62): /note="This region represents a CpG dinucleotide"
  misc_feature (61)..(61): /note="Nucleotide may be methylated to form 5-methylcytosine"
ccttgacatgagcaacatgatattgcaacagttgatcctaaatgactcacagacagggcgcgtagccagcgtggatctgccggacaaagggagccaggtcctgtgagggatggagtgagatt

SEQ ID NO: 19656 - DNA, 122 bp, Homo sapiens
  misc_feature (61)..(62): /note="This region represents a CpG dinucleotide"
  misc_feature (61)..(61): /note="Nucleotide may be methylated to form 5-methylcytosine"
ggccttatttttgtttttttgagacacaacctcactgtcccccgggatggagtgaagtggcgcaatcagggttcactgcagcctagacctgctgggctcaagccatcctcccacctcagcct

SEQ ID NO: 19657 - DNA, 122 bp, Homo sapiens
  misc_feature (61)..(62): /note="This region represents a CpG dinucleotide"
  misc_feature (61)..(61): /note="Nucleotide may be methylated to form 5-methylcytosine"
cacagggtctgttagcttaaggcaattgattcttcccctgattttggcactgcactagaacggctctcaatccaaaatcaaggagagaagaaagagagaactgaaaagacaagaagggaggg

SEQ ID NO: 19658 - DNA, 122 bp, Homo sapiens
  misc_feature (61)..(62): /note="This region represents a CpG dinucleotide"
  misc_feature (61)..(61): /note="Nucleotide may be methylated to form 5-methylcytosine"
gtctggcacatagtcaatggttagtaaatgtgaactattgtgtgacattgtggttagtcacgtatggggctgtgtttcctttagtatattgctcttttaatgtcatttcctttgtactgtta

SEQ ID NO: 19659 - DNA, 122 bp, Homo sapiens
  misc_feature (61)..(62): /note="This region represents a CpG dinucleotide"
  misc_feature (61)..(61): /note="Nucleotide may be methylated to form 5-methylcytosine"
cgggcctcttggcctcgcactggcgccctcacccacacatcgtccctttatccgctcagacgctgcaaagggccttctgtctccgggggtaggaccgcagaccctctggtggcctgcccgcc

SEQ ID NO: 19660 - DNA, 122 bp, Homo sapiens
  misc_feature (61)..(62): /note="This region represents a CpG dinucleotide"
  misc_feature (61)..(61): /note="Nucleotide may be methylated to form 5-methylcytosine"
gctggtcaggaacaaaatgacattaaacaattgccctcaggcatgaagggggatgaatgacgtctcatacttgtgtgtctctgggcctgcacatctcacagagctcagacttctcggagtta

SEQ ID NO: 19661 - DNA, 122 bp, Homo sapiens
  misc_feature (61)..(62): /note="This region represents a CpG dinucleotide"
  misc_feature (61)..(61): /note="Nucleotide may be methylated to form 5-methylcytosine"
cgctggaaaccagcctggaaaagcctggcattttaattgatcccagagcttcttgcctcacggctcctgctgtgatgaagtctgctacttgttccaaagattctccgcctggttgcctagcc

SEQ ID NO: 19662 - DNA, 122 bp, Homo sapiens
  misc_feature (61)..(62): /note="This region represents a CpG dinucleotide"
  misc_feature (61)..(61): /note="Nucleotide may be methylated to form 5-methylcytosine"
gtgctttggtcagagcaaatctatgctttaaaaagatagtttcggcttatgttctattggcggtagtggtgtccagaggaaagctgcattattaaaattattattagtttggtgcaattact

SEQ ID NO: 19663 - DNA, 122 bp, Homo sapiens
  misc_feature (61)..(62): /note="This region represents a CpG dinucleotide"
  misc_feature (61)..(61): /note="Nucleotide may be methylated to form 5-methylcytosine"
gcacataaggtatcccaggtttagcagggggcggcagaggacagtgtcaatggcaagttccggtcagtgttgagttttaaaggcctttgaggcacacaaggataggttccaggttgaatatc

SEQ ID NO: 19664 - DNA, 122 bp, Homo sapiens
  misc_feature (61)..(62): /note="This region represents a CpG dinucleotide"
  misc_feature (61)..(61): /note="Nucleotide may be methylated to form 5-methylcytosine"
tgggtccaaacccagcatttgctgccaatttctgcaaaggatatactctagagactcacgcgtcctcctaccttgtacagctggacgtcgtagcatttaaagagctggcacacgtcaggcaa

SEQ ID NO: 19665 - DNA, 122 bp, Homo sapiens
  misc_feature (61)..(62): /note="This region represents a CpG dinucleotide"
  misc_feature (61)..(61): /note="Nucleotide may be methylated to form 5-methylcytosine"
agatttagcaatggtttaacatgtatagggcaattgcaatgtgtcattgagtacctcattcgttagtcctgccaacgaatctgtgagataagtcattatacttattttgcagattccatcct

SEQ ID NO: 19666 - DNA, 122 bp, Homo sapiens
  misc_feature (61)..(62): /note="This region represents a CpG dinucleotide"
  misc_feature (61)..(61): /note="Nucleotide may be methylated to form 5-methylcytosine"
agggaggcatagggattttttttcaatggtagtcaccacagacggttgagggtaaattggcgttgttctcaataagggttattgtgaccatggtccaaagtctggcaggaatttttttttat

SEQ ID NO: 19667 - DNA, 122 bp, Homo sapiens
  misc_feature (61)..(62): /note="This region represents a CpG dinucleotide"
  misc_feature (61)..(61): /note="Nucleotide may be methylated to form 5-methylcytosine"
tcctcgaccacctgccaggtggggcggaaacaaacggtgaccttgggcctccatcagggtcgtggggggcagagggggaaggcaccaggagccccgggcgggccagaggagcatactttaca

SEQ ID NO: 19668 - DNA, 122 bp, Homo sapiens
  misc_feature (61)..(62): /note="This region represents a CpG dinucleotide"
  misc_feature (61)..(61): /note="Nucleotide may be methylated to form 5-methylcytosine"
aagtgcatttctccttgtgactcatgaagaacagtgcactcaccctcctcactgagcaggcgtcctgttttactgtgataggaaaattcatggcagcaccacgctgtgtgaggtgagtctgc

SEQ ID NO: 19669 - DNA, 122 bp, Homo sapiens
  misc_feature (61)..(62): /note="This region represents a CpG dinucleotide"
  misc_feature (61)..(61): /note="Nucleotide may be methylated to form 5-methylcytosine"
caagccaagttcctatgcccatccacccatataaaacttccttgttcagaaagtcatctgcgcaactggcaaaggcaccagctcagagttttctatttttattcctgtgtgtaatcaatggg

SEQ ID NO: 19670 - DNA, 122 bp, Homo sapiens
  misc_feature (61)..(62): /note="This region represents a CpG dinucleotide"
  misc_feature (61)..(61): /note="Nucleotide may be methylated to form 5-methylcytosine"
aaggggatgctagccacgttcactcaggccacgggcgcagccctggctaacagggacatacggccctgctgccacggaggcctccagctccaggtccccaagccagtctctcctgctctgcc

SEQ ID NO: 19671 - DNA, 122 bp, Homo sapiens
  misc_feature (61)..(62): /note="This region represents a CpG dinucleotide"
  misc_feature (61)..(61): /note="Nucleotide may be methylated to form 5-methylcytosine"
gactgtgtctgtcacttggctccagctgacttactctgacgtgcctggagaataagtgtccggcacgtgcagagccaagggagaaggaaacccagaccctgccctcagagctcccaggctgt

SEQ ID NO: 19672 - DNA, 122 bp, Homo sapiens
  misc_feature (61)..(62): /note="This region represents a CpG dinucleotide"
  misc_feature (61)..(61): /note="Nucleotide may be methylated to form 5-methylcytosine"
ggaaactagccacttgagaaggaagctcagcttttctgggctttagaggagatggagacacgttggaaattcccgtaaccaataggctggggtgggagggtgttcttcccacacacacacaa

SEQ ID NO: 19673 - DNA, 122 bp, Homo sapiens
  misc_feature (61)..(62): /note="This region represents a CpG dinucleotide"
  misc_feature (61)..(61): /note="Nucleotide may be methylated to form 5-methylcytosine"
cttaataagccactgacccctcagccccacagagagctgggggtgcagcagtgcagcccacgcagttagcaccaaccgggcaggtccagggccaaagccaaatcctgctcagtggccagcgg

SEQ ID NO: 19674 - DNA, 122 bp, Homo sapiens
  misc_feature (61)..(62): /note="This region represents a CpG dinucleotide"
  misc_feature (61)..(61): /note="Nucleotide may be methylated to form 5-methylcytosine"
tgatggaagtcagaatataattatctctggggagtggagggttttgactgagaacgttcacgaacatgcttcctgcagtgctggaaataaagtgagtaatggttacattgatgcatatatag

SEQ ID NO: 19675 - DNA, 122 bp, Homo sapiens
  misc_feature (61)..(62): /note="This region represents a CpG dinucleotide"
  misc_feature (61)..(61): /note="Nucleotide may be methylated to form 5-methylcytosine"
tgggatcattgcacttggccagttttccagcaaaaagctgaactccaaagcttgcaaaaacgagcattaatgtcagcaaaagaatggagacctgaaagaaattgatgaaatgttaaatctct

SEQ ID NO: 19676 - DNA, 122 bp, Homo sapiens
  misc_feature (61)..(62): /note="This region represents a CpG dinucleotide"
  misc_feature (61)..(61): /note="Nucleotide may be methylated to form 5-methylcytosine"
ctcaggtaattagccataacctcatgtatagataatttgccttttcacatgagctctggccgccatgtctgggccctacctccaaaaaaaacttacaccaacattaaccggcaagatgtgtt

SEQ ID NO: 19677 - DNA, 122 bp, Homo sapiens
  misc_feature (61)..(62): /note="This region represents a CpG dinucleotide"
  misc_feature (61)..(61): /note="Nucleotide may be methylated to form 5-methylcytosine"
ctgtttgcaagtttactctgtggagaaaaacactaaatatctcctgctggttgcatttgccgggagaaaataaaattttctacttttgaattaaggacagctgctatttttacctatattca

SEQ ID NO: 19678 - DNA, 122 bp, Homo sapiens
  misc_feature (61)..(62): /note="This region represents a CpG dinucleotide"
  misc_feature (61)..(61): /note="Nucleotide may be methylated to form 5-methylcytosine"
aatgttcattaaccctccattcctgttagattcagtcaggtcttagcaatttttcctgctcgtctccacccccttctctgactcttgtcctttccacttctctattccccatttcctctttc

SEQ ID NO: 19679 - DNA, 122 bp, Homo sapiens
  misc_feature (61)..(62): /note="This region represents a CpG dinucleotide"
  misc_feature (61)..(61): /note="Nucleotide may be methylated to form 5-methylcytosine"
ccccatcaccccgcctctgccccacaagcctcccaaccacagccgccgcctcttcctcttcgcagggccacctcagcctttggactggcacctccttgggaacttttggccaagatatgggc

SEQ ID NO: 19680 - DNA, 122 bp, Homo sapiens
  misc_feature (61)..(62): /note="This region represents a CpG dinucleotide"
  misc_feature (61)..(61): /note="Nucleotide may be methylated to form 5-methylcytosine"
cagcccgagtgacagtgcgagactccgtctcgaaaaaataaaaacaataaataaagtgaacgtatataccttaaaggtatacacacaaattacctgttgggcagcaccatctgtggccagca

SEQ ID NO: 19681 - DNA, 122 bp, Homo sapiens
  misc_feature (61)..(62): /note="This region represents a CpG dinucleotide"
  misc_feature (61)..(61): /note="Nucleotide may be methylated to form 5-methylcytosine"
tcctctgttgaattatgtcatatttctttctttcaatactatatttcaggctcattcctccgtaaggaattcccatagtaatagcacctggtatgtccctttagtcatccaaagaataccac

SEQ ID NO: 19682 - DNA, 122 bp, Homo sapiens
  misc_feature (61)..(62): /note="This region represents a CpG dinucleotide"
  misc_feature (61)..(61): /note="Nucleotide may be methylated to form 5-methylcytosine"
gcgtccaatctaatctcaaggtttgagtagctgtggacagcccaacaggcacaggcctcccgttagtacatccatacgagaagttaagaatgagtgaaaatagtttttttttttttaattta

SEQ ID NO: 19683 - DNA, 122 bp, Homo sapiens
  misc_feature (61)..(62): /note="This region represents a CpG dinucleotide"
  misc_feature (61)..(61): /note="Nucleotide may be methylated to form 5-methylcytosine"
gagtttcagttgactggttacctgaaactagtcaagttacaactggaattgcacagccttcgtcatggtcggtgtgttaatagagcttgctgtgagtgcacctctccctctgatagtaatta

SEQ ID NO: 19684 - DNA, 122 bp, Homo sapiens
  misc_feature (61)..(62): /note="This region represents a CpG dinucleotide"
  misc_feature (61)..(61): /note="Nucleotide may be methylated to form 5-methylcytosine"
cattagcatgacaatactggaggcagagataaagctagagagctttaaagctggaaggagcgggaatgtgtgggttaagacaaccaactcccatttgagtcctaactgagaatgtcattagg

SEQ ID NO: 19685 - DNA, 122 bp, Homo sapiens
  misc_feature (61)..(62): /note="This region represents a CpG dinucleotide"
  misc_feature (61)..(61): /note="Nucleotide may be methylated to form 5-methylcytosine"
tggagtttagcactcaaagacccacttcccaggaaaaccctacctgggatgtgaaaagtccgggctttcggtttttggcgataggttggagagaatatatacacacaaaaagtgacaacccc

SEQ ID NO: 19686 - DNA, 122 bp, Homo sapiens
  misc_feature (61)..(62): /note="This region represents a CpG dinucleotide"
  misc_feature (61)..(61): /note="Nucleotide may be methylated to form 5-methylcytosine"
agtcacacagcccatcatcctcagatgcttcaatctgaggtctgactaagtcagcaagtgcgagcaaagggtgaccagggtgttgagctgagactgcaggcaacacctccctgtaggggtgt

SEQ ID NO: 19687 - DNA, 122 bp, Homo sapiens
  misc_feature (61)..(62): /note="This region represents a CpG dinucleotide"
  misc_feature (61)..(61): /note="Nucleotide may be methylated to form 5-methylcytosine"
tcctctagagcactgagttatatgacccatgagccaatggctgcatttacaacaaagacccgtgaaagttgtaattcatttacaaataactcatgagttcagtcctatccagaaggtgatgc

SEQ ID NO: 19688 - DNA, 122 bp, Homo sapiens
  misc_feature (61)..(62): /note="This region represents a CpG dinucleotide"
  misc_feature (61)..(61): /note="Nucleotide may be methylated to form 5-methylcytosine"
tgattctcggggatgtattgctctggggtctcttgcagcgtctgtgcaaggtcctgaaggcgtctgcaggtgttagttgccaagaaagctgtagagtatcacctgttgctccgttaccctct

SEQ ID NO: 19689 - DNA, 122 bp, Homo sapiens
  misc_feature (61)..(62): /note="This region represents a CpG dinucleotide"
  misc_feature (61)..(61): /note="Nucleotide may be methylated to form 5-methylcytosine"
agtggaagaaacgagatttcactcttggaaagtaatagaggatgaaaatgacctgtgaggcggaaaaagttaaatgcgaaagctctgagcttagaattgtagaaagaaagaaactctgaaga

SEQ ID NO: 19690 - DNA, 122 bp, Homo sapiens
  misc_feature (61)..(62): /note="This region represents a CpG dinucleotide"
  misc_feature (61)..(61): /note="Nucleotide may be methylated to form 5-methylcytosine"
atcagtttctgtcctgaaagacaccacaacctagttgagccacattaacaagcttatttgcgctaacaaggggtagggtaagggtggggaaggattgtgttatgaggatataggagtggctc

SEQ ID NO: 19691 - DNA, 122 bp, Homo sapiens
  misc_feature (61)..(62): /note="This region represents a CpG dinucleotide"
  misc_feature (61)..(61): /note="Nucleotide may be methylated to form 5-methylcytosine"
gacttttggccctggcatccttgtgactttcaacccctctggggttgtcagaggatttgccgctatgttgcccgagatggggttagagacagcctgttgggtggccagcgttccttgtgtgg

SEQ ID NO: 19692 - DNA, 122 bp, Homo sapiens
  misc_feature (61)..(62): /note="This region represents a CpG dinucleotide"
  misc_feature (61)..(61): /note="Nucleotide may be methylated to form 5-methylcytosine"
ggagttaatgattctttggagtccatcagtgaatatcaactacaaaacaaaaaacaaaaacggggggaaaacatcataagctctaaagtcacattatcttcctgatccgattagtaagaggc

SEQ ID NO: 19693 - DNA, 122 bp, Homo sapiens
  misc_feature (61)..(62): /note="This region represents a CpG dinucleotide"
  misc_feature (61)..(61): /note="Nucleotide may be methylated to form 5-methylcytosine"
agaccgtactagacttacacatatacacacaggtgagtgctgagtatcccttattggaaacgcttgggaccaagtgtctgggatttccagattttcaggttgtcagaatatctgtattacgt

SEQ ID NO: 19694 - DNA, 122 bp, Homo sapiens
  misc_feature (61)..(62): /note="This region represents a CpG dinucleotide"
  misc_feature (61)..(61): /note="Nucleotide may be methylated to form 5-methylcytosine"
tacaaagttcttttctaatttgactagcctgatttgtggatgttttaaatgctgccctaccgaatctctcctctatttacttgctgataggcaacgaaatagcttaccattcaaagcatcta

SEQ ID NO: 19695 - DNA, 122 bp, Homo sapiens
  misc_feature (61)..(62): /note="This region represents a CpG dinucleotide"
  misc_feature (61)..(61): /note="Nucleotide may be methylated to form 5-methylcytosine"
gttcttcggtgggtcctgtaacagtgggtgcttgggatcagagcatcagagtggaattttcgcagggaaatggaaatgcctgatcgagctgggcggtggcagcagccgctcctcactcttca

SEQ ID NO: 19696 - DNA, 122 bp, Homo sapiens
  misc_feature (61)..(62): /note="This region represents a CpG dinucleotide"
  misc_feature (61)..(61): /note="Nucleotide may be methylated to form 5-methylcytosine"
ctcaggtgatctgcctgcctcggattcccaaagtgctgggattacaggcatgagccaccgcgcccggcctaagatttgttcttaatgtgatggtgtaattggccagatctggatctgaaatt

SEQ ID NO: 19697 - DNA, 122 bp, Homo sapiens
  misc_feature (61)..(62): /note="This region represents a CpG dinucleotide"
  misc_feature (61)..(61): /note="Nucleotide may be methylated to form 5-methylcytosine"
ctgtttctttccaacccttgtataccgccttgaacatagcaagtgccaggtgtggtggcacgtgcctgtagtctctggaggctgaggcgggaggactgcttgagcccaggagttctgtgtgg

SEQ ID NO: 19698 - DNA, 122 bp, Homo sapiens
  misc_feature (61)..(62): /note="This region represents a CpG dinucleotide"
  misc_feature (61)..(61): /note="Nucleotide may be methylated to form 5-methylcytosine"
agttgtgtgaaaaaattttaacaggttagagttgtgttgtagaaatctggtagccagccacgtgtaagacgaattgtagaaaggagagatcacaaatggctatcataagagaatcactggga

SEQ ID NO: 19699 - DNA, 122 bp, Homo sapiens
  misc_feature (61)..(62): /note="This region represents a CpG dinucleotide"
  misc_feature (61)..(61): /note="Nucleotide may be methylated to form 5-methylcytosine"
ccagttttctaattttgcaagcccagctttcattagaattttgcaaaaatccttgctttgcgagcatggcacaggcaagagatgaggcactctctctttcttcccccagagcctttgactgc

SEQ ID NO: 19700 - DNA, 122 bp, Homo sapiens
  misc_feature (61)..(62): /note="This region represents a CpG dinucleotide"
  misc_feature (61)..(61): /note="Nucleotide may be methylated to form 5-methylcytosine"
taactcctttgagaccagatacagtcatgggactatattctcaaaaagggaatgtgaatacggtacaactcctggatcctttgcttaaaatgaaactgatgctctgaatctggtttctctta

SEQ ID NO: 19701 - DNA, 122 bp, Homo sapiens
  misc_feature (61)..(62): /note="This region represents a CpG dinucleotide"
  misc_feature (61)..(61): /note="Nucleotide may be methylated to form 5-methylcytosine"
tgcccgccttgacctcccaaactgctgggattaaaggcatgagccaccgtgcccagccagcgtgtgaattttctgattcagacctgccaagggaggaagtctctggcaagtccagaaatgct

SEQ ID NO: 19702 - DNA, 122 bp, Homo sapiens
  misc_feature (61)..(62): /note="This region represents a CpG dinucleotide"
  misc_feature (61)..(61): /note="Nucleotide may be methylated to form 5-methylcytosine"
gcaagagcagctgtcattgcttttttcctggtcttagagggatcatgtgcaattaggatccgtcaagtatgatgctagctgtagagttgttcgatgtgctttctgtcagattgaggaaattc

SEQ ID NO: 19703 - DNA, 122 bp, Homo sapiens
  misc_feature (61)..(62): /note="This region represents a CpG dinucleotide"
  misc_feature (61)..(61): /note="Nucleotide may be methylated to form 5-methylcytosine"
caaggccacagggctagttaaggacaggtaagcagaacagctggcgtgtcccagcacctgcgcacttctctctctctctctctctctctgagacagcgtctcactctgtcatccaggctaga

SEQ ID NO: 19704 - DNA, 122 bp, Homo sapiens
  misc_feature (61)..(62): /note="This region represents a CpG dinucleotide"
  misc_feature (61)..(61): /note="Nucleotide may be methylated to form 5-methylcytosine"
agccaaaaggaaacattgctgagctgcccccagggtggctctctcaagattgtggaagggcgaacttaagaggatgttatttgcagctgggtacacctaaaacatgtcccaagtgaggaagc

SEQ ID NO: 19705 - DNA, 122 bp, Homo sapiens
  misc_feature (61)..(62): /note="This region represents a CpG dinucleotide"
  misc_feature (61)..(61): /note="Nucleotide may be methylated to form 5-methylcytosine"
aaaacaactggattgaccaaagaggttaagaaaacatagtctttgacccatccatgtagacggcataggaacacagacttagagagcaaacaagaaggcaccataaacgctattgggaaacc

SEQ ID NO: 19706 - DNA, 122 bp, Homo sapiens
  misc_feature (61)..(62): /note="This region represents a CpG dinucleotide"
  misc_feature (61)..(61): /note="Nucleotide may be methylated to form 5-methylcytosine"
gacagcgaacagatactgttattgcaagtaactttccccacttactgtttacttgaacttcgtgagtcattgaccctcagtggcaattaggacctgatgccaaaacattgtggaaatatctc

SEQ ID NO: 19707 - DNA, 122 bp, Homo sapiens
  misc_feature (61)..(62): /note="This region represents a CpG dinucleotide"
  misc_feature (61)..(61): /note="Nucleotide may be methylated to form 5-methylcytosine"
atcacctatatttcccttggaaaataccttcttagggtacagcaggcattagatacccagcgcatgcctgaatgtcaatcctccatgttctcacctgtgagtccacgatccccacccctagg

SEQ ID NO: 19708 - DNA, 122 bp, Homo sapiens
  misc_feature (61)..(62): /note="This region represents a CpG dinucleotide"
  misc_feature (61)..(61): /note="Nucleotide may be methylated to form 5-methylcytosine"
agagattggagaagaggagaagttgtgaaatagttgttggagaaaagtcatgaaagtgagcggactagagaaataaaagtatcaggggtcagcatgatcgggagtttaaagcaagtctgtac

SEQ ID NO: 19709 - DNA, 122 bp, Homo sapiens
  misc_feature (61)..(62): /note="This region represents a CpG dinucleotide"
  misc_feature (61)..(61): /note="Nucleotide may be methylated to form 5-methylcytosine"
tttgatcctcgcgctgctccccctactcggggcaagcaacaaagccggcatcagaccctgcgtgctgaccaccccctgccctgggagggctgaggggaacacaagagaagaaaaagacacac

SEQ ID NO: 19710 - DNA, 122 bp, Homo sapiens
  misc_feature (61)..(62): /note="This region represents a CpG dinucleotide"
  misc_feature (61)..(61): /note="Nucleotide may be methylated to form 5-methylcytosine"
aggcagtctgtctcatctcttaatcatgagtttgtgctacctctcgtctgtggatctaggcgtgaggaggtagaagggagcccctggtcacgcccctgtgccgccttctagtggcatggcct

SEQ ID NO: 19711 - DNA, 122 bp, Homo sapiens
  misc_feature (61)..(62): /note="This region represents a CpG dinucleotide"
  misc_feature (61)..(61): /note="Nucleotide may be methylated to form 5-methylcytosine"
acctcaggtgatctgcctgcctcggcctcccaaagtgctgggatttcagccatgagccaccgtgcctgtcctggaggatgaatttttgaaaatatttggaagtcattcagatttccttgagg

SEQ ID NO: 19712 - DNA, 122 bp, Homo sapiens
  misc_feature (61)..(62): /note="This region represents a CpG dinucleotide"
  misc_feature (61)..(61): /note="Nucleotide may be methylated to form 5-methylcytosine"
gacagtctgagatagaagcagaactgcagagctagaagactcagagatcattaagaccaacgtaaacatttcacagatgagataatgagtagttgctgaaagagagagctgtttgtggggat

SEQ ID NO: 19713 - DNA, 122 bp, Homo sapiens
  misc_feature (61)..(62): /note="This region represents a CpG dinucleotide"
  misc_feature (61)..(61): /note="Nucleotide may be methylated to form 5-methylcytosine"
caccttgataatcccaggcttcttggctaatcttagcgccttggcccagagcagtcacatcggcaaaaaattcccgcccacttctcctcccagttccacccctcacagcagctgctcacatc

SEQ ID NO: 19714 - DNA, 122 bp, Homo sapiens
  misc_feature (61)..(62): /note="This region represents a CpG dinucleotide"
  misc_feature (61)..(61): /note="Nucleotide may be methylated to form 5-methylcytosine"
tcacagcagctctaaacatgtatgcaagtggtcattatcacaaaagtgtgtaataacactcgcagaatttactgtgttagctctggggtttttctgggagatctgcaaacttagaacaaaca

SEQ ID NO: 19715 - DNA, 122 bp, Homo sapiens
  misc_feature (61)..(62): /note="This region represents a CpG dinucleotide"
  misc_feature (61)..(61): /note="Nucleotide may be methylated to form 5-methylcytosine"
atatctagccaggcctgaagccttctgaggtaactgcccacatgttgagatggcccaggacgtgtggttgattctgagatgggacagagcttcttggaataaaacactccgtgggccatgtc

SEQ ID NO: 19716 - DNA, 122 bp, Homo sapiens
  misc_feature (61)..(62): /note="This region represents a CpG dinucleotide"
  misc_feature (61)..(61): /note="Nucleotide may be methylated to form 5-methylcytosine"
cagagtcttgtgagttgaaaagctgtctgtccctttatcctgccttgactgaggatgtgacgcctggaatggtgatgcctggtgccgtgatgcagtcaccatataatcttgaggtgacaggc

SEQ ID NO: 19717 - DNA, 122 bp, Homo sapiens
  misc_feature (61)..(62): /note="This region represents a CpG dinucleotide"
  misc_feature (61)..(61): /note="Nucleotide may be methylated to form 5-methylcytosine"
tgaagcctttcctaaccatcttccaaaccagcacctcagaaatagtctccctcttctgaccgcctgtagcattgtattgtacctaagatcttatcacagtcaaacttgtcaaatactatgtt

SEQ ID NO: 19718 - DNA, 122 bp, Homo sapiens
  misc_feature (61)..(62): /note="This region represents a CpG dinucleotide"
  misc_feature (61)..(61): /note="Nucleotide may be methylated to form 5-methylcytosine"
cattttattaagagagttcacagaatttcgaacttttattatggtaaaacacacagcaaacgtgaatcttcaatattgggtctgattttgttgcaattatgcctggaagtagctgagaatta

SEQ ID NO: 19719 - DNA, 122 bp, Homo sapiens
  misc_feature (61)..(62): /note="This region represents a CpG dinucleotide"
  misc_feature (61)..(61): /note="Nucleotide may be methylated to form 5-methylcytosine"
tctcttcttctctccaccatggggtggagtcctagaaatgccgtctactagctgggtacccgtggggaaagttacttagcttctcagggtctacttccttcttttgtggacaagggatcaat

SEQ ID NO: 19720 - DNA, 122 bp, Homo sapiens
  misc_feature (61)..(62): /note="This region represents a CpG dinucleotide"
  misc_feature (61)..(61): /note="Nucleotide may be methylated to form 5-methylcytosine"
aaatacagctcaacaacttcatccaactcaactgcagatttttcacagtctttaagtcaacgaattatcctggctttttctagagagtctttcacaaaataagattttattcctaacctcaa

SEQ ID NO: 19721 - DNA, 122 bp, Homo sapiens
  misc_feature (61)..(62): /note="This region represents a CpG dinucleotide"
  misc_feature (61)..(61): /note="Nucleotide may be methylated to form 5-methylcytosine"
ctatgtgcagagtgtggacagggcgcctgggtcacaagcaacagaaactggctctggtcacgtgaagccaagggagcggaacagcgtttccgggtcaggcaggcactgggggcgaagggcag

SEQ ID NO: 19722 - DNA, 122 bp, Homo sapiens
  misc_feature (61)..(62): /note="This region represents a CpG dinucleotide"
  misc_feature (61)..(61): /note="Nucleotide may be methylated to form 5-methylcytosine"
ttagtctgcactggtcactgtcatctagagccaattgttcaagaggaaggaaacactcaacgccaaggagaagagagtcatcaccgctgctttccaaaattgttgtatgagctgctccctca

SEQ ID NO: 19723 - DNA, 122 bp, Homo sapiens
  misc_feature (61)..(62): /note="This region represents a CpG dinucleotide"
  misc_feature (61)..(61): /note="Nucleotide may be methylated to form 5-methylcytosine"
gatgctttgagtggctggtaggaggtcatggtgacctccctgggttggtgagcaggtgaacgctgcatgtgtcaatggatgtgaatgccaagaagaaaataactcaggaaagaggaggggga

SEQ ID NO: 19724 - DNA, 122 bp, Homo sapiens
  misc_feature (61)..(62): /note="This region represents a CpG dinucleotide"
  misc_feature (61)..(61): /note="Nucleotide may be methylated to form 5-methylcytosine"
agaagccaaattttatacctaattgaatttagatctttagcaaaatcactactaaacttacgtaaaacttgttaatgatttagaattgtaaatatcttcctgtttcttgtcaagaacttcct

SEQ ID NO: 19725 - DNA, 122 bp, Homo sapiens
  misc_feature (61)..(62): /note="This region represents a CpG dinucleotide"
  misc_feature (61)..(61): /note="Nucleotide may be methylated to form 5-methylcytosine"
gtaacattaagaaggaaaatcttagcatcctcactcaggtcattcattcaaagtaacacacggtaaacactccaggaaatccaggacatgagatacctctggttgttgacaggcttgcctca

SEQ ID NO: 19726 - DNA, 122 bp, Homo sapiens
  misc_feature (61)..(62): /note="This region represents a CpG dinucleotide"
  misc_feature (61)..(61): /note="Nucleotide may be methylated to form 5-methylcytosine"
tcctcaaaacaacaatataaggtagataccattattctcctcatgttacaaattaggaaacgtaggcacagtaaagtaaagtgacttatagaaagccacatagctagtgagtggtggagaca

SEQ ID NO: 19727 - DNA, 122 bp, Homo sapiens
  misc_feature (61)..(62): /note="This region represents a CpG dinucleotide"
  misc_feature (61)..(61): /note="Nucleotide may be methylated to form 5-methylcytosine"
gatgtacagctcggaggactccaccctggcctctgttccccctgctgccacctttggggccgatgacttggtactgaccctgagcaacccccagatgtcattggagggtacaggtgggtctc

SEQ ID NO: 19728 - DNA, 122 bp, Homo sapiens
  misc_feature (61)..(62): /note="This region represents a CpG dinucleotide"
  misc_feature (61)..(61): /note="Nucleotide may be methylated to form 5-methylcytosine"
cacggggactcccagcccctacccggcaagagaggcatcactgaggctgcatctgccatgcgctcctggtgtgactgcaccctgtcaggccagacccggcttgagccaacttagccaagcca

SEQ ID NO: 19729 - DNA, 122 bp, Homo sapiens
  misc_feature (61)..(62): /note="This region represents a CpG dinucleotide"
  misc_feature (61)..(61): /note="Nucleotide may be methylated to form 5-methylcytosine"
caggcctcttgggaagaataacactactatttatcattcccttaatcttgtgccaaacaccgtgctaagccctttccattcatcatctcaatccccacaacagcctggttagatagacgttc

SEQ ID NO: 19730 - DNA, 122 bp, Homo sapiens
  misc_feature (61)..(62): /note="This region represents a CpG dinucleotide"
  misc_feature (61)..(61): /note="Nucleotide may be methylated to form 5-methylcytosine"
tactctataatagtcactctagtgtacaactcttacatagccctctacatagatactcatcgtatgaactagaggccaaaactgtgaacagttattataagtaaaagcacagttattatgca

SEQ ID NO: 19731 - DNA, 122 bp, Homo sapiens
  misc_feature (61)..(62): /note="This region represents a CpG dinucleotide"
  misc_feature (61)..(61): /note="Nucleotide may be methylated to form 5-methylcytosine"
tttatttctctctctgctcttttggggttcagtgttggtggaagctgctgagtgacactccggtcctttgagcctggcaagttgtggggagaaacggagggaggcggttgtggacatggcga

SEQ ID NO: 19732 - DNA, 122 bp, Homo sapiens
  misc_feature (61)..(62): /note="This region represents a CpG dinucleotide"
  misc_feature (61)..(61): /note="Nucleotide may be methylated to form 5-methylcytosine"
tccaatttctctacattctcatcagctcttattattgtcttgtctcttttgttttagccacgctagtgggtgtgaaatgatatcactttgtggttttgaagtgcactaatcttacattagca

SEQ ID NO: 19733 - DNA, 122 bp, Homo sapiens
  misc_feature (61)..(62): /note="This region represents a CpG dinucleotide"
  misc_feature (61)..(61): /note="Nucleotide may be methylated to form 5-methylcytosine"
atttcctcagccaggaagtttgcttccctcaccaaggtattagctttaaccagctgctctcgcagttttgccaggctttgtcggaagagttcatccctgcagtgtcatagaaaagggaacga

SEQ ID NO: 19734 - DNA, 122 bp, Homo sapiens
  misc_feature (61)..(62): /note="This region represents a CpG dinucleotide"
  misc_feature (61)..(61): /note="Nucleotide may be methylated to form 5-methylcytosine"
agctgcctttgagtaaagaggaaaggggttgtaagatgaagagaggccaaggccaaggtacggtgacattgggcctggatccagtcatgaagtcaatgcttagacttatacttacatacgtc

SEQ ID NO: 19735 - DNA, 122 bp, Homo sapiens
  misc_feature (61)..(62): /note="This region represents a CpG dinucleotide"
  misc_feature (61)..(61): /note="Nucleotide may be methylated to form 5-methylcytosine"
ccaagtgctcaatgttattaaaattttttcttctctttgtctcttggatgtacttttctacgtgttggtcttatttaaggcaggctttcccttccaggtatggccaccagtgctccagattt

SEQ ID NO: 19736 - DNA, 122 bp, Homo sapiens
  misc_feature (61)..(62): /note="This region represents a CpG dinucleotide"
  misc_feature (61)..(61): /note="Nucleotide may be methylated to form 5-methylcytosine"
actgcagcagaaaggggcagagtccctttaggcccttgacaagcacggcggattagtaaccgtataatttaaccctccagttagccttggaggactcggtgtcgcacttccgcccgaactct

SEQ ID NO: 19737 - DNA, 122 bp, Homo sapiens
  misc_feature (61)..(62): /note="This region represents a CpG dinucleotide"
  misc_feature (61)..(61): /note="Nucleotide may be methylated to form 5-methylcytosine"
actcacaaaggtatacatatagaaaagcaacatgacagaaataaccaatgtcccagataacgtcagggagtggagctgcctgcaacttgaaacattcagctcaaactgtaaaggagaaataa

SEQ ID NO: 19738 - DNA, 122 bp, Homo sapiens
  misc_feature (61)..(62): /note="This region represents a CpG dinucleotide"
  misc_feature (61)..(61): /note="Nucleotide may be methylated to form 5-methylcytosine"
tgggggcaaataaggcccccagccagtccaagtggagacatcccaagcctggcagctgggcgggtgtgccccgcacactgcaggagggctggaatgcaccccccatgctctgaggctgggcc

SEQ ID NO: 19739 - DNA, 122 bp, Homo sapiens
  misc_feature (61)..(62): /note="This region represents a CpG dinucleotide"
  misc_feature (61)..(61): /note="Nucleotide may be methylated to form 5-methylcytosine"
gctggggctgctgcattgctcctccctcacccacaggattccctggttccagccaggagacgatggtcaacagccactgctgtagtggtgcctagttaaaactctttggtttctgtctctgt

SEQ ID NO: 19740 - DNA, 122 bp, Homo sapiens
  misc_feature (61)..(62): /note="This region represents a CpG dinucleotide"
  misc_feature (61)..(61): /note="Nucleotide may be methylated to form 5-methylcytosine"
tgaggtctgagagcaaagtcagagatgactcttttgggggcttgaaactgtctattgcagcgaggagtcctttcggtctcacccttgagggtgcatctatcagagcttttgtctgttttaca

SEQ ID NO: 19741 - DNA, 122 bp, Homo sapiens
  misc_feature (61)..(62): /note="This region represents a CpG dinucleotide"
  misc_feature (61)..(61): /note="Nucleotide may be methylated to form 5-methylcytosine"
gcagtgtatgagatttccaggcacttcccttctggctaatgtttggttttgtcagccttgcgaattttaattgttttggggatatatagtaataactcaaagttttagtttgcatttttctg

SEQ ID NO: 19742 - DNA, 122 bp, Homo sapiens
  misc_feature (61)..(62): /note="This region represents a CpG dinucleotide"
  misc_feature (61)..(61): /note="Nucleotide may be methylated to form 5-methylcytosine"
agccgccacacagaaaacccaggaacaagcaagacactggagttaggcacatctaggctgcgccacccctaactgtgtgacctgagaaaggcacctaaaccaaactggtcttgtctcctaac

SEQ ID NO: 19743 - DNA, 122 bp, Homo sapiens
  misc_feature (61)..(62): /note="This region represents a CpG dinucleotide"
  misc_feature (61)..(61): /note="Nucleotide may be methylated to form 5-methylcytosine"
gtacaagcgacaagtctctccaggatacaagaaagtaggaggttcattgttaatgttacccggctacagacttcctgccgaacatatggctgtcatggataacgctgacctcaaggaagttc

SEQ ID NO: 19744 - DNA, 122 bp, Homo sapiens
  misc_feature (61)..(62): /note="This region represents a CpG dinucleotide"
  misc_feature (61)..(61): /note="Nucleotide may be methylated to form 5-methylcytosine"
aatttagtttgtgtgtttatcctataaaatttatctcataataaaaactgaagactaggacggtccttagaaaaacacttgattcggtgtatttattttataaaagggagtcacagagagaa

SEQ ID NO: 19745 - DNA, 122 bp, Homo sapiens
  misc_feature (61)..(62): /note="This region represents a CpG dinucleotide"
  misc_feature (61)..(61): /note="Nucleotide may be methylated to form 5-methylcytosine"
agcagattccaattcaaccaaaggaggaactaactgtgggaactgtctggagctggacagcggggagaacgtgcctgtcactggagtacacaggtaattagtcaaactgggacttgacatgg

SEQ ID NO: 19746 - DNA, 122 bp, Homo sapiens
  misc_feature (61)..(62): /note="This region represents a CpG dinucleotide"
  misc_feature (61)..(61): /note="Nucleotide may be methylated to form 5-methylcytosine"
tgagtgtggaaccgggcatcctttgtgattggagccttctcagctacctggaagcttttacggtggggagcggcggggctctagttcttccgggttaggactttgcgcaggaatgcagaggc

SEQ ID NO: 19747 - DNA, 122 bp, Homo sapiens
  misc_feature (61)..(62): /note="This region represents a CpG dinucleotide"
  misc_feature (61)..(61): /note="Nucleotide may be methylated to form 5-methylcytosine"
agcacctggatcttagacttcccagcctccagaactatgggaaatatgtttttaagtacccggtccatggcattttgtcactgcagtctgagctggtaaaacacagagttttattggctttt

SEQ ID NO: 19748 - DNA, 122 bp, Homo sapiens
  misc_feature (61)..(62): /note="This region represents a CpG dinucleotide"
  misc_feature (61)..(61): /note="Nucleotide may be methylated to form 5-methylcytosine"
gaactacattaatatctggcaggggctctcaaatgtgccatagcaagctacttgattacacgtatgttatttagttaaatttgtgaaaattatgagatgctcaccaacccggtgataaactt

SEQ ID NO: 19749 - DNA, 122 bp, Homo sapiens
  misc_feature (61)..(62): /note="This region represents a CpG dinucleotide"
  misc_feature (61)..(61): /note="Nucleotide may be methylated to form 5-methylcytosine"
tcttggaggaaacaggatgagcagcctcagaagagtctgcctcactgtacatcaagaacacgagaatcttagccaatatacacccctggggcagcacgtgcaggctgttccgagaatcaatg

SEQ ID NO: 19750 - DNA, 122 bp, Homo sapiens
  misc_feature (61)..(62): /note="This region represents a CpG dinucleotide"
  misc_feature (61)..(61): /note="Nucleotide may be methylated to form 5-methylcytosine"
aataacactccatgttttattatagcagtgattccccaaacttaaccaactaacgttcaacgttaatgcttaagaaatgtttatgtttaatatgtttgaactgaaatgctggtttgctatga

SEQ ID NO: 19751 - DNA, 122 bp, Homo sapiens
  misc_feature (61)..(62): /note="This region represents a CpG dinucleotide"
  misc_feature (61)..(61): /note="Nucleotide may be methylated to form 5-methylcytosine"
tgtgaggagcaggccggggcagtgggcaattgagcgaggaacagctgcgggaggactccgcggactcctgagaaccagcttaggggagcggcggcttggggaggtgtagggtggaatcacga

SEQ ID NO: 19752 - DNA, 122 bp, Homo sapiens
  misc_feature (61)..(62): /note="This region represents a CpG dinucleotide"
  misc_feature (61)..(61): /note="Nucleotide may be methylated to form 5-methylcytosine"
agaagcccctgtgaagccagagagggaaagggacctgtccagggtcacacaggaatcatgcgtcaagcctccccagccacggacttgtctccatccagggcatttcagcccctgcagggcag

SEQ ID NO: 19753 - DNA, 122 bp, Homo sapiens
  misc_feature (61)..(62): /note="This region represents a CpG dinucleotide"
  misc_feature (61)..(61): /note="Nucleotide may be methylated to form 5-methylcytosine"
agatgagggaagaatcaagactgatgataagattatttcaactcaacataccagtaaaaccggctccaagatcaagacagagaatatttccagccccgagaagctgccctggctctccttct

SEQ ID NO: 19754 - DNA, 122 bp, Homo sapiens
  misc_feature (61)..(62): /note="This region represents a CpG dinucleotide"
  misc_feature (61)..(61): /note="Nucleotide may be methylated to form 5-methylcytosine"
gtttggagttggtgcaaaagcaattgcagtatttgccattgaaagtaatggcaaaacccacgattacttttcagcagcctaataataggaggtaggtagaattaccagaaatgaggcataag

SEQ ID NO: 19755 - DNA, 122 bp, Homo sapiens
  misc_feature (61)..(62): /note="This region represents a CpG dinucleotide"
  misc_feature (61)..(61): /note="Nucleotide may be methylated to form 5-methylcytosine"
ccttgagaaaatgaacatctgcaagccaaggagagaggcctcaggagaaaccaaatcggccgatacctttgatcatggacttccaatatccagactgcgggaaatggatttctgctatttaa

SEQ ID NO: 19756 - DNA, 122 bp, Homo sapiens
  misc_feature (61)..(62): /note="This region represents a CpG dinucleotide"
  misc_feature (61)..(61): /note="Nucleotide may be methylated to form 5-methylcytosine"
tccttggcagccccttcccaaagggaaatacagtgaaatttagagggagccctccttccccgaaaggaggaagcaaacactctgggtgctgttgctttggcttggttcctttggagtgaggt

SEQ ID NO: 19757 - DNA, 122 bp, Homo sapiens
  misc_feature (61)..(62): /note="This region represents a CpG dinucleotide"
  misc_feature (61)..(61): /note="Nucleotide may be methylated to form 5-methylcytosine"
aaatatgctggctttgagacccggagggcacgaaaacagggagctggggttctggaaggacgccagctcggcctgcgaggggctgaaaaatacctgctgttgcctctgtctcgttgagagtt

SEQ ID NO: 19758 - DNA, 122 bp, Homo sapiens
  misc_feature (61)..(62): /note="This region represents a CpG dinucleotide"
  misc_feature (61)..(61): /note="Nucleotide may be methylated to form 5-methylcytosine"
ctgagactggcaccaacaggagcagcggcatgggaagcaagtaatgtcagagttgcctggcgcagtgcctggaactcagtaggcactcttaaaaaaaatgtgagcagcagagaacacacgag

SEQ ID NO: 19759 - DNA, 122 bp, Homo sapiens
  misc_feature (61)..(62): /note="This region represents a CpG dinucleotide"
  misc_feature (61)..(61): /note="Nucleotide may be methylated to form 5-methylcytosine"
ccacccagagactgcaaggacacaatcagtgagtgatcactgattcttatcatctgtttgcgcccttgcaatccttgtggacaggaataggatttaatgagtacttatgacagtacttgcag

SEQ ID NO: 19760 - DNA, 122 bp, Homo sapiens
  misc_feature (61)..(62): /note="This region represents a CpG dinucleotide"
  misc_feature (61)..(61): /note="Nucleotide may be methylated to form 5-methylcytosine"
cacccgaatattgcgcttttccgactggcttaaaaaccggtgcaccacgagattctatcccgcacgtggctcggaggctcctacgcccacggagtctcactgattgctagcacagcagtctg

SEQ ID NO: 19761 - DNA, 122 bp, Homo sapiens
  misc_feature (61)..(62): /note="This region represents a CpG dinucleotide"
  misc_feature (61)..(61): /note="Nucleotide may be methylated to form 5-methylcytosine"
tcttgaacttactcccagatcagctacaaatttgtcctatggcctgaggcactgaaaacacgacagagctctgcaataatttccagtcagaccagacaacctagttattcccttttcccagg

SEQ ID NO: 19762 - DNA, 122 bp, Homo sapiens
  misc_feature (61)..(62): /note="This region represents a CpG dinucleotide"
  misc_feature (61)..(61): /note="Nucleotide may be methylated to form 5-methylcytosine"
ctgattctactcttcctgaagaactcctacttcctctttaaggtccagggcaaatgtcaccgctcatctgaagcagtcccttagctcagtgactcctctgggcaaaacaaatcatgtatcct

SEQ ID NO: 19763 - DNA, 122 bp, Homo sapiens
  misc_feature (61)..(62): /note="This region represents a CpG dinucleotide"
  misc_feature (61)..(61): /note="Nucleotide may be methylated to form 5-methylcytosine"
ccgcggggggaggcgggcaggggcccatgcccagggtcagatactatgcaggtaagtgtccgacagcaggaagtgtggggatagcaatagagagctggaggtgggtggaggaaggagagagg

SEQ ID NO: 19764 - DNA, 122 bp, Homo sapiens
  misc_feature (61)..(62): /note="This region represents a CpG dinucleotide"
  misc_feature (61)..(61): /note="Nucleotide may be methylated to form 5-methylcytosine"
ttttgactcatctcccccatagtgacagtgtgtgccaaaggtggctgtgggtgacacagccgtgtgttcgtgctgtacggcactgtggtcatgggggtggacgctggagctcctgattagtt

SEQ ID NO: 19765 - DNA, 122 bp, Homo sapiens
  misc_feature (61)..(62): /note="This region represents a CpG dinucleotide"
  misc_feature (61)..(61): /note="Nucleotide may be methylated to form 5-methylcytosine"
aaaacaccttccaaaaaaacaggaagtttcaaattctgactgttggtcctaaatgactcacgttgacatttcccagaaccaaataacaacagatgagctttgtattctgcctgcctccttta

SEQ ID NO: 19766 - DNA, 122 bp, Homo sapiens
  misc_feature (61)..(62): /note="This region represents a CpG dinucleotide"
  misc_feature (61)..(61): /note="Nucleotide may be methylated to form 5-methylcytosine"
tcttatgtaatttccttctttcccttaacataatgttttcaaggttcattcgtgtcaaagcgtgtggtagtacttcctctttttttttctttttttttttttttttgagacagagtctcact

SEQ ID NO: 19767 - DNA, 122 bp, Homo sapiens
  misc_feature (61)..(62): /note="This region represents a CpG dinucleotide"
  misc_feature (61)..(61): /note="Nucleotide may be methylated to form 5-methylcytosine"
gtgttactgtgcggtacaggctgatctttgcacctccactttgggtggtatttgaatatgcgtgtttatgtgtgcttaaaccttggtaaaggcaaacacttggcattttaggatgtcagagg

SEQ ID NO: 19768 - DNA, 122 bp, Homo sapiens
  misc_feature (61)..(62): /note="This region represents a CpG dinucleotide"
  misc_feature (61)..(61): /note="Nucleotide may be methylated to form 5-methylcytosine"
cctggggaccctggaatgcccggttcgcgcgaccggagcggctggacatggtgggggggccgcccaaaggtgcagggaggcttgaaagaggacgtagaggcaccggtggaacgcaaaaaaac

SEQ ID NO: 19769 - DNA, 122 bp, Homo sapiens
  misc_feature (61)..(62): /note="This region represents a CpG dinucleotide"
  misc_feature (61)..(61): /note="Nucleotide may be methylated to form 5-methylcytosine"
aacagacaggattcagacaagattacagctccaagggttgatctgtgtatttcccttgcacgctgctctcttgctggcaccgaagggcaccccagtccagactggtcagaaacaaacactca

SEQ ID NO: 19770 - DNA, 122 bp, Homo sapiens
  misc_feature (61)..(62): /note="This region represents a CpG dinucleotide"
  misc_feature (61)..(61): /note="Nucleotide may be methylated to form 5-methylcytosine"
tggtagtcattatgaggtagctgagggtcagaagaagccaaccaggtaaaaatgaaccaacgggatacaaagagaagtagataaaaatgaaagggaagtaccagagaaattcctaatactac

SEQ ID NO: 19771 - DNA, 122 bp, Homo sapiens
  misc_feature (61)..(62): /note="This region represents a CpG dinucleotide"
  misc_feature (61)..(61): /note="Nucleotide may be methylated to form 5-methylcytosine"
tttcttcctctcctccttccgccgccgggactacggctccgccccccccgccggttcccgcgcccgctcccagcagaacagcgaccgccgcgcgctcccccacttccgctcacaacatggcg

SEQ ID NO: 19772 - DNA, 122 bp, Homo sapiens
  misc_feature (61)..(62): /note="This region represents a CpG dinucleotide"
  misc_feature (61)..(61): /note="Nucleotide may be methylated to form 5-methylcytosine"
ttccatctccagcgagacagatgcgaggaagggaagagggatgccctgtgtgcatctgcccgcactgcgagtccttgccactccttagatcaacggagccagagatcttgccaccaacacac

SEQ ID NO: 19773 - DNA, 122 bp, Homo sapiens
  misc_feature (61)..(62): /note="This region represents a CpG dinucleotide"
  misc_feature (61)..(61): /note="Nucleotide may be methylated to form 5-methylcytosine"
aatactagagtgtttttcactttgctaactttactttctaggtgagctcatccaatctcacggctttaaataatctccttctctgactttccctttgactcctacacttccacatatgtttg

SEQ ID NO: 19774 - DNA, 122 bp, Homo sapiens
  misc_feature (61)..(62): /note="This region represents a CpG dinucleotide"
  misc_feature (61)..(61): /note="Nucleotide may be methylated to form 5-methylcytosine"
gaacaaatttcaaccaacatgaaaagccctggtgagtgtgttagttggatgtcttagactcggaggtaacaaaatgcagagactacctgcagggatagaattgctgattgcatgccctattc

SEQ ID NO: 19775 - DNA, 122 bp, Homo sapiens
  misc_feature (61)..(62): /note="This region represents a CpG dinucleotide"
  misc_feature (61)..(61): /note="Nucleotide may be methylated to form 5-methylcytosine"
ctaaatctgataggtgctccacaaacacatgtgtggcataaatcctgctttctagaaatgcgtattgcagttctgacatgtagctgggcacggtggctcacgcctgtaatcccagcactttg

SEQ ID NO: 19776 - DNA, 122 bp, Homo sapiens
  misc_feature (61)..(62): /note="This region represents a CpG dinucleotide"
  misc_feature (61)..(61): /note="Nucleotide may be methylated to form 5-methylcytosine"
tctggctccggcgggaagcggaaaacgggaggcggctctcgaagcttcccgaccttcctgcgccatcaacttctcaggagtggctggagaaagatgcatgtgccaagcgagacaacaacccc

SEQ ID NO: 19777 - DNA, 122 bp, Homo sapiens
  misc_feature (61)..(62): /note="This region represents a CpG dinucleotide"
  misc_feature (61)..(61): /note="Nucleotide may be methylated to form 5-methylcytosine"
aaaaggctgaatcagagtcaccaacgatgctttttaaaggaatgcagatttctgtccggacgccctgttggagattctgattcagtgtattctgggcaggactctaagattgcacattttga

SEQ ID NO: 19778 - DNA, 122 bp, Homo sapiens
  misc_feature (61)..(62): /note="This region represents a CpG dinucleotide"
  misc_feature (61)..(61): /note="Nucleotide may be methylated to form 5-methylcytosine"
ctgacagtcagcctagcaagaacacacctggcatgagatcgtcatagtttcaccattagacgcccccattcctctcgccaatgcctcatccctcctttagcaaaatgccaccagggaatggg

SEQ ID NO: 19779 - DNA, 122 bp, Homo sapiens
  misc_feature (61)..(62): /note="This region represents a CpG dinucleotide"
  misc_feature (61)..(61): /note="Nucleotide may be methylated to form 5-methylcytosine"
actatattatgaaagccaaaagcaatctaatttctttaacctcctaggtatgataccaatcgtccttacaccctttagaaatcaccaccacagcaagtggcatcttttcccttcattacagc

SEQ ID NO: 19780 - DNA, 122 bp, Homo sapiens
  misc_feature (61)..(62): /note="This region represents a CpG dinucleotide"
  misc_feature (61)..(61): /note="Nucleotide may be methylated to form 5-methylcytosine"
cggcgaggggatgaagccatttcaggttatgcacttgatcccaaagagttttttgtgcttcgctctctaagtgactcataagcagaattcagagaactgttctcattagaatcttgttccct

SEQ ID NO: 19781 - DNA, 122 bp, Homo sapiens
  misc_feature (61)..(62): /note="This region represents a CpG dinucleotide"
  misc_feature (61)..(61): /note="Nucleotide may be methylated to form 5-methylcytosine"
atagtgcgggccatcaacagtgtaacctaggtgatatttgtcattttccaaatttgtagccgagatcatctgtagagagtaaacatattaatgagcagcagtaattttgaatcttaaattgt

SEQ ID NO: 19782 - DNA, 122 bp, Homo sapiens
  misc_feature (61)..(62): /note="This region represents a CpG dinucleotide"
  misc_feature (61)..(61): /note="Nucleotide may be methylated to form 5-methylcytosine"
atggctctgtcctttcctgggccaagtctctcaacactgaaccctcaggttcagtctctgcgcttatgaatgagaagcagaaaccacaccttcaaggaagtgagctgcgaacagagaagctg

SEQ ID NO: 19783 - DNA, 122 bp, Homo sapiens
  misc_feature (61)..(62): /note="This region represents a CpG dinucleotide"
  misc_feature (61)..(61): /note="Nucleotide may be methylated to form 5-methylcytosine"
aagcctaggtcaaatgcctcctctttctttattcttcaggaaacacaaagtaccagagcacgttcctggtgcagaagatgcaacagaaagtgggatgtaagtgatctctatcctcacagagc

SEQ ID NO: 19784 - DNA, 122 bp, Homo sapiens
  misc_feature (61)..(62): /note="This region represents a CpG dinucleotide"
  misc_feature (61)..(61): /note="Nucleotide may be methylated to form 5-methylcytosine"
tagagttggaaagtaaatttaccatctagtcctcattttacacatagggagcctggtggacggaactgggaagcaatgtgtcagagtacagtatgtggtgaggtcactaaacaggttcagtt

SEQ ID NO: 19785 - DNA, 122 bp, Homo sapiens
  misc_feature (61)..(62): /note="This region represents a CpG dinucleotide"
  misc_feature (61)..(61): /note="Nucleotide may be methylated to form 5-methylcytosine"
gagaacttattattatatgcttcgcttaccctgtatatcaagagctgcaaacatcctgtgcgagtcccaaagtgaaaggtaaaatatggttctattaaattttaaacatagtaacacgaata

SEQ ID NO: 19786 - DNA, 122 bp, Homo sapiens
  misc_feature (61)..(62): /note="This region represents a CpG dinucleotide"
  misc_feature (61)..(61): /note="Nucleotide may be methylated to form 5-methylcytosine"
gccaacatcataaaatcatgagagcaaaaaggacctagtttacctactggaggttagctacgcaatgatgataaattagcagggagttgttaatgtgcctacatgacccatgactagttagc

SEQ ID NO: 19787 - DNA, 122 bp, Homo sapiens
  misc_feature (61)..(62): /note="This region represents a CpG dinucleotide"
  misc_feature (61)..(61): /note="Nucleotide may be methylated to form 5-methylcytosine"
atttctaaatgactcaaaaacaactctcagaaacttaggaggccaataagcactgaaacacgttctttccatcagcagagagggcttagaggactctccaaacaacatcctctctcacccta

SEQ ID NO: 19788 - DNA, 122 bp, Homo sapiens
  misc_feature (61)..(62): /note="This region represents a CpG dinucleotide"
  misc_feature (61)..(61): /note="Nucleotide may be methylated to form 5-methylcytosine"
tgaacattatgtatttttttctttaaccctttgccactcccatttcgcagatgaggataccgaggctctgagtcatacagttagtgatttgaaaccagatctttctgactgtaggatctaag

SEQ ID NO: 19789 - DNA, 122 bp, Homo sapiens
  misc_feature (61)..(62): /note="This region represents a CpG dinucleotide"
  misc_feature (61)..(61): /note="Nucleotide may be methylated to form 5-methylcytosine"
atgaatggtgcattctgtgctgagtgctttcccagcgccgtcctggaggccgccacctcacgaggtgcctaatcactactaggagtttaccagcagagccaagcaagaaaagatatttccag

SEQ ID NO: 19790 - DNA, 122 bp, Homo sapiens
  misc_feature (61)..(62): /note="This region represents a CpG dinucleotide"
  misc_feature (61)..(61): /note="Nucleotide may be methylated to form 5-methylcytosine"
agagttctctccttgtaagtgactaaccttctcccttttggtacacaatcctcagatgaacggagatgattcattaggccattctagcttaatggatgcatcactgtgcaaccacgcaaatg

SEQ ID NO: 19791 - DNA, 122 bp, Homo sapiens
  misc_feature (61)..(62): /note="This region represents a CpG dinucleotide"
  misc_feature (61)..(61): /note="Nucleotide may be methylated to form 5-methylcytosine"
cataataaaatgtgtgtaaatacatattcagaagcttcaagtataaaggaagattctaaccgccctaaagaggaaacaatgcttactattaaaaaatctacagtggtcttaggtgactgata

SEQ ID NO: 19792 - DNA, 122 bp, Homo sapiens
  misc_feature (61)..(62): /note="This region represents a CpG dinucleotide"
  misc_feature (61)..(61): /note="Nucleotide may be methylated to form 5-methylcytosine"
aagacattagtatgacggggttcaatactcattcattgttacaatccatgtccctagaagcgcatgtttgccagttcccatccctgacacttaatagccagtgacactgaacaagtcactca

SEQ ID NO: 19793 - DNA, 122 bp, Homo sapiens
  misc_feature (61)..(62): /note="This region represents a CpG dinucleotide"
  misc_feature (61)..(61): /note="Nucleotide may be methylated to form 5-methylcytosine"
tgtggtcggcaagtcaccaagccagcctggattccaggaagcagaaagggagttcccttccgcctccctaatgccatggaatggggaagggtacaactctaggatcagacccaaagggaact

SEQ ID NO: 19794 - DNA, 122 bp, Homo sapiens
  misc_feature (61)..(62): /note="This region represents a CpG dinucleotide"
  misc_feature (61)..(61): /note="Nucleotide may be methylated to form 5-methylcytosine"
aatctggctcctctaattttaagaacagttaatgctccaccatgccttctttgattggtacgggatttgtctaagcctacctgcatattggggaagggaagatacaggttgagtagtaatgt

SEQ ID NO: 19795 - DNA, 122 bp, Homo sapiens
  misc_feature (61)..(62): /note="This region represents a CpG dinucleotide"
  misc_feature (61)..(61): /note="Nucleotide may be methylated to form 5-methylcytosine"
gtttttagatttctagtctctgcagtactggaagacacgcatgaaggaagctggaatggacgctgggtgcctgtctcactgcatccaccacaattgtgttggttagtaggactactacaggg

SEQ ID NO: 19796 - DNA, 122 bp, Homo sapiens
  misc_feature (61)..(62): /note="This region represents a CpG dinucleotide"
  misc_feature (61)..(61): /note="Nucleotide may be methylated to form 5-methylcytosine"
ataaaataattggtatctggaattatattctaaatgaaaaaaaccacatgggatttgaaacgtagaaacagggcaacttcagaaacaccagactgatgtgaattggagcatatttatagttc

SEQ ID NO: 19797 - DNA, 122 bp, Homo sapiens
  misc_feature (61)..(62): /note="This region represents a CpG dinucleotide"
  misc_feature (61)..(61): /note="Nucleotide may be methylated to form 5-methylcytosine"
ccctacagcacccctggcttctacagtagcacttgctatactcactgtaatccttgttggcgcatatatctctccagctagaccatcaatatctgcaggaatgtagcctttttcctgtaccc

SEQ ID NO: 19798 - DNA, 122 bp, Homo sapiens
  misc_feature (61)..(62): /note="This region represents a CpG dinucleotide"
  misc_feature (61)..(61): /note="Nucleotide may be methylated to form 5-methylcytosine"
aagtagacaaaatgactcacccagttgattttagtcatcccagaactgacacagtgggtacgtgaatgaagtagccccagtggcaggcatggaggctatatatatatgggcccaacagcatg

SEQ ID NO: 19799 - DNA, 122 bp, Homo sapiens
  misc_feature (61)..(62): /note="This region represents a CpG dinucleotide"
  misc_feature (61)..(61): /note="Nucleotide may be methylated to form 5-methylcytosine"
tctgtcttgtcaatccacatagtgatcatcatcttggctgcacagatgagtcaatagaggcgtggagatgttgaataatgagcttaaagtcatgccattaatcagtggtgtccatctgcctc

SEQ ID NO: 19800 - DNA, 122 bp, Homo sapiens
  misc_feature (61)..(62): /note="This region represents a CpG dinucleotide"
  misc_feature (61)..(61): /note="Nucleotide may be methylated to form 5-methylcytosine"
cccattcccctctccaggttaaaaagttcctcttcaccctgatgttagtttgaaaagtttcggccataaccatatttagttatatttagggagaggggagtggtgggtcaaaggcttaaaaa

SEQ ID NO: 19801 - DNA, 122 bp, Homo sapiens
  misc_feature (61)..(62): /note="This region represents a CpG dinucleotide"
  misc_feature (61)..(61): /note="Nucleotide may be methylated to form 5-methylcytosine"
agagaagtttagtttagttttattttgcattgacctctgctgtacaggagagtgaggaaacgactattccaagggcactttctgagaaaaacagtggggtagtagtagagagcaatctccta

SEQ ID NO: 19802 - DNA, 122 bp, Homo sapiens
  misc_feature (61)..(62): /note="This region represents a CpG dinucleotide"
  misc_feature (61)..(61): /note="Nucleotide may be methylated to form 5-methylcytosine"
accagtagtttattattcacaaactgtgattcaccagtcctattttttaagccagcatcacgctctaatcatattcctaggttacaagcccagttatttgtgcataataaaaactgaatcca

SEQ ID NO: 19803 - DNA, 122 bp, Homo sapiens
  misc_feature (61)..(62): /note="This region represents a CpG dinucleotide"
  misc_feature (61)..(61): /note="Nucleotide may be methylated to form 5-methylcytosine"
tgtgctgggagcacaccaggcggatggcgccgtggatggtggtgttgttgcagaagaactcgaagagctctcggtaggagcggtggaactcgatcagggcctcctcctccgccgtgggctgc

SEQ ID NO: 19804 - DNA, 122 bp, Homo sapiens
  misc_feature (61)..(62): /note="This region represents a CpG dinucleotide"
  misc_feature (61)..(61): /note="Nucleotide may be methylated to form 5-methylcytosine"
aggaacaaaatttctttatgcaatgtcatttttaaaatgtaacatttacataaacatatacggcttgtttgtttagaagcattcttgtatgagtcaccttatgcaaaccagatttggaaaac

SEQ ID NO: 19805 - DNA, 122 bp, Homo sapiens
  misc_feature (61)..(62): /note="This region represents a CpG dinucleotide"
  misc_feature (61)..(61): /note="Nucleotide may be methylated to form 5-methylcytosine"
ccacccagattcaggactgacccaggcctggccaatcaacaaggccttcagggactggtacgtgtcagttaaatgagtcagtcccaggacgctttgtatatatatgtatgtaatatttgtaa

SEQ ID NO: 19806 - DNA, 122 bp, Homo sapiens
  misc_feature (61)..(62): /note="This region represents a CpG dinucleotide"
  misc_feature (61)..(61): /note="Nucleotide may be methylated to form 5-methylcytosine"
gaaaacagtgtcccttggcttaaaacaaatggtgtcctcttagtctcccgtcccagtgggcgttagatgtcggggcaggcggctgcacacttaattctccgcgggggcattggcctgtctgc

SEQ ID NO: 19807 - DNA, 122 bp, Homo sapiens
  misc_feature (61)..(62): /note="This region represents a CpG dinucleotide"
  misc_feature (61)..(61): /note="Nucleotide may be methylated to form 5-methylcytosine"
gggaaacctgtcttcctaggttctaaattggtggatgactgtctggtgacggagtccaagcgtcattgcacaatgaagatgaaaaacgcatgttggatggctactccagtgaagttgaaaaa

SEQ ID NO: 19808 - DNA, 122 bp, Homo sapiens
  misc_feature (61)..(62): /note="This region represents a CpG dinucleotide"
  misc_feature (61)..(61): /note="Nucleotide may be methylated to form 5-methylcytosine"
cctctgagcaaaaataaccctggaggaagttggtgggtataaatcgtcaatgaataaatacgcatcgctagtaaataggggatggagccccacagggccactcaccccccagggccttgtgg

SEQ ID NO: 19809 - DNA, 122 bp, Homo sapiens
  misc_feature (61)..(62): /note="This region represents a CpG dinucleotide"
  misc_feature (61)..(61): /note="Nucleotide may be methylated to form 5-methylcytosine"
tcagaccttgccccaggcttccctgctgagaaagcaaggccttcagacctcgcccctccccgtctgcctactctgtcagcagctctgcgctggtatctgcagcagttcctgttccctcgcca

SEQ ID NO: 19810 - DNA, 122 bp, Homo sapiens
  misc_feature (61)..(62): /note="This region represents a CpG dinucleotide"
  misc_feature (61)..(61): /note="Nucleotide may be methylated to form 5-methylcytosine"
cttctaaaagaaggaaaaccatagtgtatttgtgtatacaggcttgacagtttcaggacacggatccaactgctaacaccagttatctctgaggacctggaggagctggcacctggggaggg

SEQ ID NO: 19811 - DNA, 122 bp, Homo sapiens
  misc_feature (61)..(62): /note="This region represents a CpG dinucleotide"
  misc_feature (61)..(61): /note="Nucleotide may be methylated to form 5-methylcytosine"
aagaaagggcccttatgaatcatcttcaagttcctcccttccaagaacagagatgctaggcgacttgcccagaggcacacagccagcatgtagcaggattcatgcctgtgggagctggggtt

SEQ ID NO: 19812 - DNA, 122 bp, Homo sapiens
  misc_feature (61)..(62): /note="This region represents a CpG dinucleotide"
  misc_feature (61)..(61): /note="Nucleotide may be methylated to form 5-methylcytosine"
ctaagtcaagaatgtagcacgttgaccagccaccctcaaacttccagagaggagtctacacgtgtaagaatcacagctcaaggagactgagaatctacagtagattgaagcctaactcaaaa

SEQ ID NO: 19813 - DNA, 122 bp, Homo sapiens
  misc_feature (61)..(62): /note="This region represents a CpG dinucleotide"
  misc_feature (61)..(61): /note="Nucleotide may be methylated to form 5-methylcytosine"
tagcatggagattgcagcttgctaactagatggcgcactgttatttggtgttctctgctgcgtagcgcaggagtataaactgagcatgtagctgcttgcgaggtgttcttcaacatttacaa

SEQ ID NO: 19814 - DNA, 122 bp, Homo sapiens
  misc_feature (61)..(62): /note="This region represents a CpG dinucleotide"
  misc_feature (61)..(61): /note="Nucleotide may be methylated to form 5-methylcytosine"
ctctggggaaggcaaggagggagatgacttagattagtaaaacccgactgttccctcagacgaatcaaagtccagacacaaaaatggcaggttcgttagtaaaagcaggaaacaggggaata

SEQ ID NO: 19815 - DNA, 122 bp, Homo sapiens
  misc_feature (61)..(62): /note="This region represents a CpG dinucleotide"
  misc_feature (61)..(61): /note="Nucleotide may be methylated to form 5-methylcytosine"
ttggaagtccctcctaatcctttgcttatatctcatagctagaacttaatcacaagaccacgcttaggtacaaggaaggcaggaatgagcagtccttagctgagcggttaggtcctcaacta

SEQ ID NO: 19816 - DNA, 122 bp, Homo sapiens
  misc_feature (61)..(62): /note="This region represents a CpG dinucleotide"
  misc_feature (61)..(61): /note="Nucleotide may be methylated to form 5-methylcytosine"
gaatgggtctggaggaggagccagcactaaagacacaaggaaagacagtttcacagtcaccgctttgcagcaaatagagccacaggctgccccaagggccaccacatagtcttttcccccga

SEQ ID NO: 19817 - DNA, 122 bp, Homo sapiens
  misc_feature (61)..(62): /note="This region represents a CpG dinucleotide"
  misc_feature (61)..(61): /note="Nucleotide may be methylated to form 5-methylcytosine"
gttcaactgactcattcattcaccacaagattccagggtggcgcaaaactacatcctcgccgtaagccttaaaacatgactgtgccccactgacagacatggaaacttgggctaagagagaa

SEQ ID NO: 19818 - DNA, 122 bp, Homo sapiens
  misc_feature (61)..(62): /note="This region represents a CpG dinucleotide"
  misc_feature (61)..(61): /note="Nucleotide may be methylated to form 5-methylcytosine"
agatgagactgttctgggaacctgctttgctgcttgagtagctgatcgagtcattctcaacgacgtgggcattacaggctgcacaactgtgggaaaaaaaaataactacatcaaatgtccct

SEQ ID NO: 19819 - DNA, 122 bp, Homo sapiens
  misc_feature (61)..(62): /note="This region represents a CpG dinucleotide"
  misc_feature (61)..(61): /note="Nucleotide may be methylated to form 5-methylcytosine"
aggacatgtgaacactgctggctgctgtgcctgaaggaaggggtgtcccagggagtctcacgtggacaattcgtcgctttgacatggatattgtagtgtcatttccactcaacactcattgg

SEQ ID NO: 19820 - DNA, 122 bp, Homo sapiens
  misc_feature (61)..(62): /note="This region represents a CpG dinucleotide"
  misc_feature (61)..(61): /note="Nucleotide may be methylated to form 5-methylcytosine"
gggcacattcggtctctgggtagggcagactggcactgccagggagtcaacccccaggagcggccctcaaccaatgatgaatgggtgttggctgataaataccccagcttcctcgcccttgt

SEQ ID NO: 19821 - DNA, 122 bp, Homo sapiens
  misc_feature (61)..(62): /note="This region represents a CpG dinucleotide"
  misc_feature (61)..(61): /note="Nucleotide may be methylated to form 5-methylcytosine"
tttattagctgaggttttggcccaaatccctaagtcagctcaagtcctagtgaaggacatcgtgtaaatgacatcctctctgtgaggatgtctccttcttgttttttttttttttattttta

SEQ ID NO: 19822 - DNA, 122 bp, Homo sapiens
  misc_feature (61)..(62): /note="This region represents a CpG dinucleotide"
  misc_feature (61)..(61): /note="Nucleotide may be methylated to form 5-methylcytosine"
ttgggacggagcccattttagacagtacaaacaataggcacaagagggatggctctgtaacgttagtagggcatatttgcagaaaagtatgtggtgccttgtaaccagtacttccggtacct

SEQ ID NO: 19823 - DNA, 122 bp, Homo sapiens
  misc_feature (61)..(62): /note="This region represents a CpG dinucleotide"
  misc_feature (61)..(61): /note="Nucleotide may be methylated to form 5-methylcytosine"
cctctgtgcccaagctgtcttatctgtgttttcctgtctgctctttctggctgctctttccgtagttagaagaggtttccttgaaatgcatgaggctagaatgggaggtggaatttaaagtg

SEQ ID NO: 19824 - DNA, 122 bp, Homo sapiens
  misc_feature (61)..(62): /note="This region represents a CpG dinucleotide"
  misc_feature (61)..(61): /note="Nucleotide may be methylated to form 5-methylcytosine"
agcctcccacctagaatatctaatctaggccctgggtgatttcctttcatcactgacaaccgcagcaacattagtaatcataatgaacccttacaagcatgattcatatgtacctggcatga

SEQ ID NO: 19825 - DNA, 122 bp, Homo sapiens
  misc_feature (61)..(62): /note="This region represents a CpG dinucleotide"
  misc_feature (61)..(61): /note="Nucleotide may be methylated to form 5-methylcytosine"
gactgagggttatgtgcgcaggctttgaaacaagacagtcatgagctcaatccctggtaacgggtttagctggtgtgttatcttaaacctgttacttaatccgcctgagccttggtttcctc

SEQ ID NO: 19826 - DNA, 122 bp, Homo sapiens
  misc_feature (61)..(62): /note="This region represents a CpG dinucleotide"
  misc_feature (61)..(61): /note="Nucleotide may be methylated to form 5-methylcytosine"
tacatgcgcatagccatacacttgtatatgcctgtactgtctctgtgaacacgagaatctcgtaacagtaattgccgttgaggaaaggggaactgagtgagaacagaagtgggagacagact

SEQ ID NO: 19827 - DNA, 122 bp, Homo sapiens
  misc_feature (61)..(62): /note="This region represents a CpG dinucleotide"
  misc_feature (61)..(61): /note="Nucleotide may be methylated to form 5-methylcytosine"
taggaatgaggaagattcagttgttgagagggcagatgtcaactaacacatcagcagtatcgagcaaacatattgacatagctgttgggtgttaagtttcacataagtcatattatcttatg

SEQ ID NO: 19828 - DNA, 122 bp, Homo sapiens
  misc_feature (61)..(62): /note="This region represents a CpG dinucleotide"
  misc_feature (61)..(61): /note="Nucleotide may be methylated to form 5-methylcytosine"
ggaaagttcatggtgaatttattagagaaacaaaggggaattgcaaagatattggtgtcacggacaccttgaaaaggaggagataattttaatgagggagtgtcaaaagatctaaataccac

SEQ ID NO: 19829 - DNA, 122 bp, Homo sapiens
  misc_feature (61)..(62): /note="This region represents a CpG dinucleotide"
  misc_feature (61)..(61): /note="Nucleotide may be methylated to form 5-methylcytosine"
gcccgcctccccgagtcggcccccacctctgcacgcagagacctctcctcacctcccgcccggccagatcacagggccgccgagtcagatgggatccctgcccccatcagcccttctgcact

SEQ ID NO: 19830 - DNA, 122 bp, Homo sapiens
  misc_feature (61)..(62): /note="This region represents a CpG dinucleotide"
  misc_feature (61)..(61): /note="Nucleotide may be methylated to form 5-methylcytosine"
caagtattggcccacagaaagagtcactgaaggaaggactactgcatccctaataatgagcggacctgtaataggatttcactgcagtgctgccttattttgtagagaaacctttttagaaa

SEQ ID NO: 19831 - DNA, 122 bp, Homo sapiens
  misc_feature (61)..(62): /note="This region represents a CpG dinucleotide"
  misc_feature (61)..(61): /note="Nucleotide may be methylated to form 5-methylcytosine"
ctttacgtatctcgagttgctggcgctgcacacagcccttgtgatgacaatacaatcatccgcattttacaggtgaagaaactaattcattgaaatttcctccccaaggccctagagctgag

SEQ ID NO: 19832 - DNA, 122 bp, Homo sapiens
  misc_feature (61)..(62): /note="This region represents a CpG dinucleotide"
  misc_feature (61)..(61): /note="Nucleotide may be methylated to form 5-methylcytosine"
agcaaaataaagcttactgagcacaagctctgcaatgccaccacagttggatttgataaccgagatggctgctaagtgactcatgggtgggacagtattcagcatggatctgctggacaaag

SEQ ID NO: 19833 - DNA, 122 bp, Homo sapiens
  misc_feature (61)..(62): /note="This region represents a CpG dinucleotide"
  misc_feature (61)..(61): /note="Nucleotide may be methylated to form 5-methylcytosine"
atcttgtctgccagcacccttttcttcctttgttccttttcctctctgtgttattgcctgcggcagccagtccttcatactagatagagttcagataaagcaaacgtttggcaaaaacatac

SEQ ID NO: 19834 - DNA, 122 bp, Homo sapiens
  misc_feature (61)..(62): /note="This region represents a CpG dinucleotide"
  misc_feature (61)..(61): /note="Nucleotide may be methylated to form 5-methylcytosine"
tagcctccacacctactgctttggccactttgtcatcggtccattgagcaagcaatgggacgattgggaaagaggctgactgacatccgtaagacaagtcatcttgaccacatgattattga

SEQ ID NO: 19835 - DNA, 122 bp, Homo sapiens
  misc_feature (61)..(62): /note="This region represents a CpG dinucleotide"
  misc_feature (61)..(61): /note="Nucleotide may be methylated to form 5-methylcytosine"
acctcttgatccacccgcctcagcctcccaaagtgctgggattacaggtgtaagctaccacgcccggccttgtgtgcatttcaatggctgctgttgactcacacttatgtgtcattaataaa

SEQ ID NO: 19836 - DNA, 122 bp, Homo sapiens
  misc_feature (61)..(62): /note="This region represents a CpG dinucleotide"
  misc_feature (61)..(61): /note="Nucleotide may be methylated to form 5-methylcytosine"
gtactattttgtttttaaaacttctttgtgtatggctaaactgaaacaaacgtactatttcgccatgatagcaattataaagggtacctttaaagcatttgaaactgaatcatgttgcttcg

SEQ ID NO: 19837 - DNA, 122 bp, Homo sapiens
  misc_feature (61)..(62): /note="This region represents a CpG dinucleotide"
  misc_feature (61)..(61): /note="Nucleotide may be methylated to form 5-methylcytosine"
catttgtgtaagtaagaacataaccacaaccttttccattttacttaatggctattttgacgagaagcagatctgtttttgcttttaacacagaggaaacagtgggcaaagaagaaaaagta

SEQ ID NO: 19838 - DNA, 122 bp, Homo sapiens
  misc_feature (61)..(62): /note="This region represents a CpG dinucleotide"
  misc_feature (61)..(61): /note="Nucleotide may be methylated to form 5-methylcytosine"
gtggtgactcatacagctatattcagctaagataggatttctcaagcttggcactagattcggggctggataattgtttgttgttgcgtcctgtgcattgcaggctgttgagcagcatctct

SEQ ID NO: 19839 - DNA, 122 bp, Homo sapiens
  misc_feature (61)..(62): /note="This region represents a CpG dinucleotide"
  misc_feature (61)..(61): /note="Nucleotide may be methylated to form 5-methylcytosine"
ttagttttatcagcgtttgccaggatctcctggtacatcctcatcgctctcttcctgtaacgcctgtggttctctaactaaaatgtccctgggttgcttcggctctgtaggacatactgcgg

SEQ ID NO: 19840 - DNA, 122 bp, Homo sapiens
  misc_feature (61)..(62): /note="This region represents a CpG dinucleotide"
  misc_feature (61)..(61): /note="Nucleotide may be methylated to form 5-methylcytosine"
ccggagtccacctcaccgacttacctgatttctctaggactggttctgtgattgcagaaccgtgggttcctcagactgcgtctgtctgtccttcaccaggccagggccgctgaggagcatgc

SEQ ID NO: 19841 - DNA, 122 bp, Homo sapiens
  misc_feature (61)..(62): /note="This region represents a CpG dinucleotide"
  misc_feature (61)..(61): /note="Nucleotide may be methylated to form 5-methylcytosine"
tctgtttcatttcctctggtattgattctgtctgtaatccagaccagttagaagagataacgtgaacaaaggtgctctgcaaaatgtgctcaggaattgtgctttgaagttcagacactctg

SEQ ID NO: 19842 - DNA, 122 bp, Homo sapiens
  misc_feature (61)..(62): /note="This region represents a CpG dinucleotide"
  misc_feature (61)..(61): /note="Nucleotide may be methylated to form 5-methylcytosine"
ccagagataggggagttttcttcggtaattcaatgtcaacaaggaccttgtgttccagctcgccacactgtatttcataatgttggcagccagcatatccagggacttcagggtctttttct

SEQ ID NO: 19843 - DNA, 122 bp, Homo sapiens
  misc_feature (61)..(62): /note="This region represents a CpG dinucleotide"
  misc_feature (61)..(61): /note="Nucleotide may be methylated to form 5-methylcytosine"
ccctaaactagaagagctagtcagcctctgccaggaactagcttgaatccacaaatgccacgcttgtcaggcccatcctggctttgcatccccactctctctccaccctcaagcctgccttt

SEQ ID NO: 19844 - DNA, 122 bp, Homo sapiens
  misc_feature (61)..(62): /note="This region represents a CpG dinucleotide"
  misc_feature (61)..(61): /note="Nucleotide may be methylated to form 5-methylcytosine"
aagcaacaacaacaaaatgctcagaagctatactcagtagtctcagtgactgaaaaagtccggcttttaactgccatccaatccaaacaacccacttctttagaaagctatgcaaaatattg

SEQ ID NO: 19845 - DNA, 122 bp, Homo sapiens
  misc_feature (61)..(62): /note="This region represents a CpG dinucleotide"
  misc_feature (61)..(61): /note="Nucleotide may be methylated to form 5-methylcytosine"
aaaagataataaagggaaaggagagagagaaaagcattgcctgtggcagggtggagaaggcgaaatgctcagggaggccagaaaaagacccacccattgcagcaccactgaaaagttcaggc

SEQ ID NO: 19846 - DNA, 122 bp, Homo sapiens
  misc_feature (61)..(62): /note="This region represents a CpG dinucleotide"
  misc_feature (61)..(61): /note="Nucleotide may be methylated to form 5-methylcytosine"
agtagggtcgacttggtgcagataaagcatgggtggctttcacagtggttaaaagaaaggcggttttggaagtccagcttctgttactggaggaatgtcttaatatcagacttgattccagg

SEQ ID NO: 19847 - DNA, 122 bp, Homo sapiens
  misc_feature (61)..(62): /note="This region represents a CpG dinucleotide"
  misc_feature (61)..(61): /note="Nucleotide may be methylated to form 5-methylcytosine"
acacacaaaaccacacacacacacacacacacacacacacacacacacacaaccaaaaaacgagcataggatttggtattagactgtttcgaaggcctcaaatttggtgtggtatgaacttg

SEQ ID NO: 19848 - DNA, 122 bp, Homo sapiens
  misc_feature (61)..(62): /note="This region represents a CpG dinucleotide"
  misc_feature (61)..(61): /note="Nucleotide may be methylated to form 5-methylcytosine"
ttattctgctctgggctgcagtgttgttagggaaaacatacgtacacaaactgacatgtgcgtgtatgtgtgcaaatgcatgtacacatacataccacagaccaacagtttcttaccagaac

SEQ ID NO: 19849 - DNA, 122 bp, Homo sapiens
  misc_feature (61)..(62): /note="This region represents a CpG dinucleotide"
  misc_feature (61)..(61): /note="Nucleotide may be methylated to form 5-methylcytosine"
acctcagtttaactccttctcactttaaaaaaaagtgttggtacagccattatgtcaggacgtgcagctgtcgtatgtctactgataattttgaatgaatgactgagctagctatgttcagt

SEQ ID NO: 19850 - DNA, 122 bp, Homo sapiens
  misc_feature (61)..(62): /note="This region represents a CpG dinucleotide"
  misc_feature (61)..(61): /note="Nucleotide may be methylated to form 5-methylcytosine"
aaagagttccaacattggtgggagtgttcccactgccaccctggcccctgaacagggatacgtggctggaattcacaggaagtaactgtgacaaggcaaagtctgtttcagtaccggccctg

SEQ ID NO: 19851 - DNA, 122 bp, Homo sapiens
  misc_feature (61)..(62): /note="This region represents a CpG dinucleotide"
  misc_feature (61)..(61): /note="Nucleotide may be methylated to form 5-methylcytosine"
cctgtcagcaatcactgttctgatttttatctctttagatgtgttttgattgttcttgaacgttatataaatgaaatcctactgcatgtactcttctgtgtctgacttcttttacttaacag

SEQ ID NO: 19852 - DNA, 122 bp, Homo sapiens
  misc_feature (61)..(62): /note="This region represents a CpG dinucleotide"
  misc_feature (61)..(61): /note="Nucleotide may be methylated to form 5-methylcytosine"
acacccagaggcgattacagcaccccagggcaaaggtcacaagacgggtgtgttcagaggcgccttcctgtggcctccccagcgccacctggccatgggagtgcctgactgcaacccagcat

SEQ ID NO: 19853 - DNA, 122 bp, Homo sapiens
  misc_feature (61)..(62): /note="This region represents a CpG dinucleotide"
  misc_feature (61)..(61): /note="Nucleotide may be methylated to form 5-methylcytosine"
gctatatgctatagcctgttgctcccaggctacaaactgttcggcatgttactgtcctgacgactataggcaatggcaacactgtggggagtatttgtgtatctaaacatttttaaccaaga

SEQ ID NO: 19854 - DNA, 122 bp, Homo sapiens
  misc_feature (61)..(62): /note="This region represents a CpG dinucleotide"
  misc_feature (61)..(61): /note="Nucleotide may be methylated to form 5-methylcytosine"
gccaagactgacttgggggatagccctctggcatttgagcatgttatgaccagaggggttcgcccacctgcacctagcctcaaggccaaagccatcaaccagactgcagtggaatgtacctg

SEQ ID NO: 19855 - DNA, 122 bp, Homo sapiens
  misc_feature (61)..(62): /note="This region represents a CpG dinucleotide"
  misc_feature (61)..(61): /note="Nucleotide may be methylated to form 5-methylcytosine"
caatacctgacccaaaccaggtcagattctctaatcctggactttagaattgtgatctgacggcaggtaaggccagctctaagagtagctcagtctttagcacttaaatttgagaactagtg

SEQ ID NO: 19856 - DNA, 122 bp, Homo sapiens
  misc_feature (61)..(62): /note="This region represents a CpG dinucleotide"
  misc_feature (61)..(61): /note="Nucleotide may be methylated to form 5-methylcytosine"
ctcaattttcaagagccagttcaacttgttctgctttagttcctggttcctctagaggaacgggaagaatggaacttaaagcaaatgtgaaaacagacacaattttagtgaacaatggagag

SEQ ID NO: 19857 - DNA, 122 bp, Homo sapiens
  misc_feature (61)..(62): /note="This region represents a CpG dinucleotide"
  misc_feature (61)..(61): /note="Nucleotide may be methylated to form 5-methylcytosine"
ctcagccacgactacgtgcctcatctctgtttttcagatgaaggaattgacactcaaatacgtagagtaacttgtctttcagaatgaaacaagactggtgaaaggagttgacctagaactct

SEQ ID NO: 19858 - DNA, 122 bp, Homo sapiens
  misc_feature (61)..(62): /note="This region represents a CpG dinucleotide"
  misc_feature (61)..(61): /note="Nucleotide may be methylated to form 5-methylcytosine"
tgaaaacgggcactcattgagtgacagatcttttaccacacacaaacactaacagatacgcgtaactgcgccctgcgacattttattttccggctgctccccctccgctgtcaggtgggcag

SEQ ID NO: 19859 - DNA, 122 bp, Homo sapiens
  misc_feature (61)..(62): /note="This region represents a CpG dinucleotide"
  misc_feature (61)..(61): /note="Nucleotide may be methylated to form 5-methylcytosine"
tgacgccagcgtctgggaagacgcccgtggccaggcagacagactgtggtctagcggtagcgttaagtgtcaagggaaaacacccgctacttagcagacaggaaaagggagtcttcctttcc

SEQ ID NO: 19860 - DNA, 122 bp, Homo sapiens
  misc_feature (61)..(62): /note="This region represents a CpG dinucleotide"
  misc_feature (61)..(61): /note="Nucleotide may be methylated to form 5-methylcytosine"
cacatcttggctcctcaaacactcccctcttattctgagtttgcatctttttttttgagacggagtctggctctgtcgcccaggctggagtgcagtggcgcaatctcggctcactgtaagct

SEQ ID NO: 19861 - DNA, 122 bp, Homo sapiens
  misc_feature (61)..(62): /note="This region represents a CpG dinucleotide"
  misc_feature (61)..(61): /note="Nucleotide may be methylated to form 5-methylcytosine"
ggtctgcagggggtggggaggggcagtgcagggggctccagccctcagctgcaggccaggcggacagggcaggacacagctgcctgattccagcccagcatcaaagcacccacatagcccag

SEQ ID NO: 19862 - DNA, 122 bp, Homo sapiens
  misc_feature (61)..(62): /note="This region represents a CpG dinucleotide"
  misc_feature (61)..(61): /note="Nucleotide may be methylated to form 5-methylcytosine"
cacccagcctcctgtgaacaaagcatcacaacagtcagcatcacaaacccccatcagccccgtgcagttgcagttgtgctggaccagagcccatcagcctggccttcgggctctcctccaca

SEQ ID NO: 19863 - DNA, 122 bp, Homo sapiens
  misc_feature (61)..(62): /note="This region represents a CpG dinucleotide"
  misc_feature (61)..(61): /note="Nucleotide may be methylated to form 5-methylcytosine"
ttccccgagggcaccagcactggccgaccgacctggcttggggcgcggcgctggcaaacccggccttctgaggggacgccacgctgactctagtgcaggcagcccccaaaacggtataattg

SEQ ID NO: 19864 - DNA, 122 bp, Homo sapiens
  misc_feature (61)..(62): /note="This region represents a CpG dinucleotide"
  misc_feature (61)..(61): /note="Nucleotide may be methylated to form 5-methylcytosine"
tgtctcatgggcaccgctgtctgcaaatctaccaggcagggctctgcagaggttcaaattcgaactggtttccgcctctcacaaagtgtgttatataagctgggctgggagaatttacatgc

SEQ ID NO: 19865 - DNA, 122 bp, Homo sapiens
  misc_feature (61)..(62): /note="This region represents a CpG dinucleotide"
  misc_feature (61)..(61): /note="Nucleotide may be methylated to form 5-methylcytosine"
actttgagactgtgtaaatgtctattcctcatcacaccttcacctgctagtttctgcatccggtgattttactctgatgcctatagatttttatttttgaattccatccttccttctgcatt

SEQ ID NO: 19866 - DNA, 122 bp, Homo sapiens
  misc_feature (61)..(62): /note="This region represents a CpG dinucleotide"
  misc_feature (61)..(61): /note="Nucleotide may be methylated to form 5-methylcytosine"
cagaatggctcttaccctcttgggacccttagtgtgttctacctcaacaaaacaaggcttcgttttcataccttgtttatcagttaggttctatgctccttcaagaatctaggtcagatctc

SEQ ID NO: 19867 - DNA, 122 bp, Homo sapiens
  misc_feature (61)..(62): /note="This region represents a CpG dinucleotide"
  misc_feature (61)..(61): /note="Nucleotide may be methylated to form 5-methylcytosine"
ttgataacctcggctcttttctcctctgccactcctagggccattgtgacagttgagagacgggatggggtgctcatgcaccatattttacaggtgaaaaaacaggttcagagagggaaagt

SEQ ID NO: 19868 - DNA, 122 bp, Homo sapiens
  misc_feature (61)..(62): /note="This region represents a CpG dinucleotide"
  misc_feature (61)..(61): /note="Nucleotide may be methylated to form 5-methylcytosine"
aggggactgacctattacccccaccccaggagctggtgctggaacctgcgcagaggcgggcgcgcctggaggggctacgctacacggcagtgctgaagcagcaggcaacgcagcactccatg

SEQ ID NO: 19869 - DNA, 122 bp, Homo sapiens
  misc_feature (61)..(62): /note="This region represents a CpG dinucleotide"
  misc_feature (61)..(61): /note="Nucleotide may be methylated to form 5-methylcytosine"
taaatggcattaggaaagctagttggcctcaccagcctcagtttcctggggataataatccgtgctcctcggaagctgttgagaagactgaatgagaggcctacatttgtagctcagaacct

SEQ ID NO: 19870 - DNA, 122 bp, Homo sapiens
  misc_feature (61)..(62): /note="This region represents a CpG dinucleotide"
  misc_feature (61)..(61): /note="Nucleotide may be methylated to form 5-methylcytosine"
ctcaagtgatccacccgcctcagcctcccaaagtgctgggattacaggtgtgagccactgcgcccgtcctgactcatgcaacttctgcttcaggtaagcagatttaggctgtttattctgtg

SEQ ID NO: 19871 - DNA, 122 bp, Homo sapiens
  misc_feature (61)..(62): /note="This region represents a CpG dinucleotide"
  misc_feature (61)..(61): /note="Nucleotide may be methylated to form 5-methylcytosine"
gaccacaaatctatatttcagaaccatactttaatgcctgcgaaatagtctacctttcaacgactgaatttatttaaccaatttccttctgctgaacactcacattaattctacatttttgc

SEQ ID NO: 19872 - DNA, 122 bp, Homo sapiens
  misc_feature (61)..(62): /note="This region represents a CpG dinucleotide"
  misc_feature (61)..(61): /note="Nucleotide may be methylated to form 5-methylcytosine"
acttccctgcatcatgcaatccacatggatcaaggtgggctgtgggatttttttcactggcgggtgacttgctgcaagccctggaacaaattgctcaatgatgactgagtcatcttgtccca

SEQ ID NO: 19873 - DNA, 122 bp, Homo sapiens
  misc_feature (61)..(62): /note="This region represents a CpG dinucleotide"
  misc_feature (61)..(61): /note="Nucleotide may be methylated to form 5-methylcytosine"
attcaatgcaggtcaactctcctggggttgtcctgagcaatgcctccagatccgtgttgacggtgcctacttggccttgggggacaacccactgaatacacaagagtgtcttctgcaagcag

SEQ ID NO: 19874 - DNA, 122 bp, Homo sapiens
  misc_feature (61)..(62): /note="This region represents a CpG dinucleotide"
  misc_feature (61)..(61): /note="Nucleotide may be methylated to form 5-methylcytosine"
gaaggtttatcaccctgaagtcatgtgaaaaatgtacacatttctctgcagggcgagtcccgcatatccccaggtgttctgttaccacctgcaaaaggtagacacgcccgcccgacccccca

SEQ ID NO: 19875 - DNA, 122 bp, Homo sapiens
  misc_feature (61)..(62): /note="This region represents a CpG dinucleotide"
  misc_feature (61)..(61): /note="Nucleotide may be methylated to form 5-methylcytosine"
attacaggcctgagccaccgcgcccagcctacaacaggaagactttgttaaatgaatgagcgcgcagggaagagcaggtgctttgtgaacttgagagcttcacttcctaatcctgtgactcc

SEQ ID NO: 19876 - DNA, 122 bp, Homo sapiens
  misc_feature (61)..(62): /note="This region represents a CpG dinucleotide"
  misc_feature (61)..(61): /note="Nucleotide may be methylated to form 5-methylcytosine"
gccgccagcctgggggagagcagggtctttgttccctgctggccaggccgccacgtgatgcgccacatcactgtcactgcctggaacgaagactgccatggacagccgaggcgctggggcct

SEQ ID NO: 19877 - DNA, 122 bp, Homo sapiens
  misc_feature (61)..(62): /note="This region represents a CpG dinucleotide"
  misc_feature (61)..(61): /note="Nucleotide may be methylated to form 5-methylcytosine"
taattgcagttcagtaatgcctcctttcccttgaaatgtaaccacattcagctatgactacgctggttctcaggagcagaggaaaaatatatgatgtaatgggatgagttttttggggcact

SEQ ID NO: 19878 - DNA, 122 bp, Homo sapiens
  misc_feature (61)..(62): /note="This region represents a CpG dinucleotide"
  misc_feature (61)..(61): /note="Nucleotide may be methylated to form 5-methylcytosine"
aatatattaattcccaagccctaccaccagagatttggatttaatgggtcttagctgaagcgtggacatgggtactttttaaaagctccttacagccgggcatggtggctcacgcctgtaat

SEQ ID NO: 19879 - DNA, 122 bp, Homo sapiens
  misc_feature (61)..(62): /note="This region represents a CpG dinucleotide"
  misc_feature (61)..(61): /note="Nucleotide may be methylated to form 5-methylcytosine"
cagcggctcttttgtggccaacttagcaaaagatctggggctgggtgtaggggaactggccgcgagaggcgcccggattctttccaaagggaacaaacagtatttgcagctcgaacggaaga

SEQ ID NO: 19880 - DNA, 122 bp, Homo sapiens
  misc_feature (61)..(62): /note="This region represents a CpG dinucleotide"
  misc_feature (61)..(61): /note="Nucleotide may be methylated to form 5-methylcytosine"
gacatgtatatcactttctccagatttggagtacctccctttctgattacatgtttgcttcgtaatcctttcctcaagaatgtctgctattctactcttaaaaacttcctgaatattaaccc

SEQ ID NO: 19881 - DNA, 122 bp, Homo sapiens
  misc_feature (61)..(62): /note="This region represents a CpG dinucleotide"
  misc_feature (61)..(61): /note="Nucleotide may be methylated to form 5-methylcytosine"
attcaaggtcaccaaaccagaacccaggtctctcaacgcttaacagctgaatgacacacacggcactgcacagagagacacataagacagctcatgtgggcctaaccagataccagtttcac

SEQ ID NO: 19882 - DNA, 122 bp, Homo sapiens
  misc_feature (61)..(62): /note="This region represents a CpG dinucleotide"
  misc_feature (61)..(61): /note="Nucleotide may be methylated to form 5-methylcytosine"
acaagaggaaaatcacaagtcatcgcccacccccattgtgattcagaagcttacagaccacgctagcaaaacaggttgtggaagtagggaaaataattctattactagggagaatgaatgga

SEQ ID NO: 19883 - DNA, 122 bp, Homo sapiens
  misc_feature (61)..(62): /note="This region represents a CpG dinucleotide"
  misc_feature (61)..(61): /note="Nucleotide may be methylated to form 5-methylcytosine"
aaaaaaaaaattaagagtcttagtagctataacctgctacacacacatctgcaactcggccgcccagcaactggggccagagccactgagtcacagtaatgccaggaacaaggtagctgggc

SEQ ID NO: 19884 - DNA, 122 bp, Homo sapiens
  misc_feature (61)..(62): /note="This region represents a CpG dinucleotide"
  misc_feature (61)..(61): /note="Nucleotide may be methylated to form 5-methylcytosine"
atgacaagtagccaccattattgtatcacacagaatagtttcagttccctaaaagtccctcgtgctttacatattcatcactccccacattcctggcaaccactgctctttttactgtctcc

SEQ ID NO: 19885 - DNA, 122 bp, Homo sapiens
  misc_feature (61)..(62): /note="This region represents a CpG dinucleotide"
  misc_feature (61)..(61): /note="Nucleotide may be methylated to form 5-methylcytosine"
acagtctgtgatagtcacctaactgttctattctgacactagccttactttcctcttaatcgtcagtctccttcttccagtattggtttatctcattcccctattcggaagtatttagttgg

SEQ ID NO: 19886 - DNA, 122 bp, Homo sapiens
  misc_feature (61)..(62): /note="This region represents a CpG dinucleotide"
  misc_feature (61)..(61): /note="Nucleotide may be methylated to form 5-methylcytosine"
tggtgagtagtgttgctgaatatgccgtgtgtcctattaactctgtgacggccacagtcacgtctcctttctgcctcctcctcctcctcctctctgtccagtgactagggagggcaggaagt

SEQ ID NO: 19887 - DNA, 122 bp, Homo sapiens
  misc_feature (61)..(62): /note="This region represents a CpG dinucleotide"
  misc_feature (61)..(61): /note="Nucleotide may be methylated to form 5-methylcytosine"
caaaggcacagagctaaggcttcaggcttcaatactgtcatttactgaaacaaggaaagacgagtgtaggtaaagccccagttacaacaagatggccaggaaaagcttcttaaatgcttggg

SEQ ID NO: 19888 - DNA, 122 bp, Homo sapiens
  misc_feature (61)..(62): /note="This region represents a CpG dinucleotide"
  misc_feature (61)..(61): /note="Nucleotide may be methylated to form 5-methylcytosine"
catgccatcatgcccggctaagtgagtaggatattaattatttctgcagcccaagttatgcggctgactcataaggagatgaaagcattgttcattgcaactagcaagtgaaggatctgacg

SEQ ID NO: 19889 - DNA, 122 bp, Homo sapiens
  misc_feature (61)..(62): /note="This region represents a CpG dinucleotide"
  misc_feature (61)..(61): /note="Nucleotide may be methylated to form 5-methylcytosine"
aatgtcatctcagcacacaaggagttacccacggaaagcccacaccaggaaaaacttccccgagtttctgtggccggaaaatctgtgtcaccagaggtatcactagagaagtctcccttcca

SEQ ID NO: 19890 - DNA, 122 bp, Homo sapiens
  misc_feature (61)..(62): /note="This region represents a CpG dinucleotide"
  misc_feature (61)..(61): /note="Nucleotide may be methylated to form 5-methylcytosine"
cctggcacggagcggggggtgcataacacgccccgggacagttacgggcgctagccacgtcggcgatggccaaataataaactaacagtaatattatagtaacagcatccgaaggatgagat

SEQ ID NO: 19891 - DNA, 122 bp, Homo sapiens
  misc_feature (61)..(62): /note="This region represents a CpG dinucleotide"
  misc_feature (61)..(61): /note="Nucleotide may be methylated to form 5-methylcytosine"
ttctacccagaatacaaagtgacctttttaaaaatgtaaatcagatcatgtaataccctccggtcccaatttacccttaagaaccagttccttatcaaggcctagaaggtactgcataatcc

SEQ ID NO: 19892 - DNA, 122 bp, Homo sapiens
  misc_feature (61)..(62): /note="This region represents a CpG dinucleotide"
  misc_feature (61)..(61): /note="Nucleotide may be methylated to form 5-methylcytosine"
cctccctaccctgcttttgttctccatagcagttatcatcatgggacctactgtcagaggcgtttgaaccagagtgactccatcttgaacaggagctggggagaatgaggctgagacctgct

SEQ ID NO: 19893 - DNA, 122 bp, Homo sapiens
  misc_feature (61)..(62): /note="This region represents a CpG dinucleotide"
  misc_feature (61)..(61): /note="Nucleotide may be methylated to form 5-methylcytosine"
tttccaaaccagttccatgtaagaaatgtggcagagctgctcctggggcgagttacatgccggcctctgggctcagaatccagcacagaaaggaggtgcgggctgactgctttctagacaaa

SEQ ID NO: 19894 - DNA, 122 bp, Homo sapiens
  misc_feature (61)..(62): /note="This region represents a CpG dinucleotide"
  misc_feature (61)..(61): /note="Nucleotide may be methylated to form 5-methylcytosine"
aaaatgatgacatctgaggtttgaagtctgtctccactctctttctgactctgtgatttgcgatatgaagggtgaaactgctgagattgttttaaatccagatggaaagcttgcaacaccaa

SEQ ID NO: 19895 - DNA, 122 bp, Homo sapiens
  misc_feature (61)..(62): /note="This region represents a CpG dinucleotide"
  misc_feature (61)..(61): /note="Nucleotide may be methylated to form 5-methylcytosine"
atatatagcagtatgtagcttttaagatgaagtctcttgtctgtcttgcttgcttgctttcgtgtaatcacaattccatcatcacacctaaaacgcttgatgacaatgccttagcatcacgg

SEQ ID NO: 19896 - DNA, 122 bp, Homo sapiens
  misc_feature (61)..(62): /note="This region represents a CpG dinucleotide"
  misc_feature (61)..(61): /note="Nucleotide may be methylated to form 5-methylcytosine"
cagacacgaagattgcatgagcattattattggcaaatcgggaaccttgcttctctactgcgtgctctgaaaggaggaagaatgctagggttttttccctggaagggagaaaagagtaaaca

SEQ ID NO: 19897 - DNA, 122 bp, Homo sapiens
  misc_feature (61)..(62): /note="This region represents a CpG dinucleotide"
  misc_feature (61)..(61): /note="Nucleotide may be methylated to form 5-methylcytosine"
agtggaggactgattgttaatttcagtacagatcaaaatgggccatggcacattattcagcgtggaatcccagagccctcggagtaaatggcagattgggtctccctttgctgatttatttt

SEQ ID NO: 19898 - DNA, 122 bp, Homo sapiens
  misc_feature (61)..(62): /note="This region represents a CpG dinucleotide"
  misc_feature (61)..(61): /note="Nucleotide may be methylated to form 5-methylcytosine"
tctagaggactggtgggggtctggaaccagctgcccaaggaaaacgattctcccaatgtccgggggacgcagtagcaactgttgcttctgactagctcaggctctggagacccgcgcgctct

SEQ ID NO: 19899 - DNA, 122 bp, Homo sapiens
  misc_feature (61)..(62): /note="This region represents a CpG dinucleotide"
  misc_feature (61)..(61): /note="Nucleotide may be methylated to form 5-methylcytosine"
gctacttccttccaaagccaacagctgtagtcctttccttggacagtgcaggtcatcattcgttgccctgagccttacccataaagaaagtccagactgcaaaacaaaagtggcagagcctg

SEQ ID NO: 19900 - DNA, 122 bp, Homo sapiens
  misc_feature (61)..(62): /note="This region represents a CpG dinucleotide"
  misc_feature (61)..(61): /note="Nucleotide may be methylated to form 5-methylcytosine"
ttagctgaagaggaagggctggaaagcgagaggctcagagatctggcagaacaactctggcgagtcaggaagacctaatcagaattaaacgtgtagccaattcaagagagtttgtaagcgag

SEQ ID NO: 19901 - DNA, 122 bp, Homo sapiens
  misc_feature (61)..(62): /note="This region represents a CpG dinucleotide"
  misc_feature (61)..(61): /note="Nucleotide may be methylated to form 5-methylcytosine"
ggtcatgggttagcaccaggtgtcacagtgaatcaatcttggattggtaaaaggttgtcacgacggcagaaaattgcaggctagagcaaattgtcctatgcccattacagaatctcaagtaa

SEQ ID NO: 19902 - DNA, 122 bp, Homo sapiens
  misc_feature (61)..(62): /note="This region represents a CpG dinucleotide"
  misc_feature (61)..(61): /note="Nucleotide may be methylated to form 5-methylcytosine"
cccatgtaaatgagtcaattcatccaaacaaaggaagagtttaattctaaaggaacacatcgaccctactgggacttcagatataatgtgatgggtgttggttcatgcctcggccataggct

SEQ ID NO: 19903 - DNA, 122 bp, Homo sapiens
  misc_feature (61)..(62): /note="This region represents a CpG dinucleotide"
  misc_feature (61)..(61): /note="Nucleotide may be methylated to form 5-methylcytosine"
tttggtgtggaggactatttggtttgagtgaaagctggcagaaggaaataaatttcatgacgactttcagatctgcttatgtctgttttctgagtacaagtgtgtattgctctagtgaccca

SEQ ID NO: 19904 - DNA, 122 bp, Homo sapiens
  misc_feature (61)..(62): /note="This region represents a CpG dinucleotide"
  misc_feature (61)..(61): /note="Nucleotide may be methylated to form 5-methylcytosine"
ttctccccaactctgaggttgatcagtggccacaagctcctgaaggccttgccttgccaccggcatcctgctgcccctgccacctgcctctagcctctccagaggcggaccacagctgccca

SEQ ID NO: 19905 - DNA, 122 bp, Homo sapiens
  misc_feature (61)..(62): /note="This region represents a CpG dinucleotide"
  misc_feature (61)..(61): /note="Nucleotide may be methylated to form 5-methylcytosine"
tatggcatcacactcccagtatctgtttgattctagatgcccaaggccatgtgagtcacacgtgttaggtaaagcagcatataggaaatggaaatggaagttagggtctagtgggagttagg

SEQ ID NO: 19906 - DNA, 122 bp, Homo sapiens
  misc_feature (61)..(62): /note="This region represents a CpG dinucleotide"
  misc_feature (61)..(61): /note="Nucleotide may be methylated to form 5-methylcytosine"
gtaaagtcgggatgactgtcaccacagaaataaatccacaggaactggatccaagtcactcgttgatttatgtaggcagttggagagacatgcgtttgaaagggtatggtaagaaaatatca

SEQ ID NO: 19907 - DNA, 122 bp, Homo sapiens
  misc_feature (61)..(62): /note="This region represents a CpG dinucleotide"
  misc_feature (61)..(61): /note="Nucleotide may be methylated to form 5-methylcytosine"
cttagtcatctctagccttgggcacatttcataacgcatgagtctcagtttccacatatacggaaaggagataaacatccgggctcagcttatctccaaagagttcctgggaaggtcaagca

SEQ ID NO: 19908 - DNA, 122 bp, Homo sapiens
  misc_feature (61)..(62): /note="This region represents a CpG dinucleotide"
  misc_feature (61)..(61): /note="Nucleotide may be methylated to form 5-methylcytosine"
ttaagcctagctgaaattcttttcaaggttggtcattctcaaatgccagagagggttgcccggctctctctgctcttgccccattccattcacaacaggaggtggggaatgagctcagatga

SEQ ID NO: 19909 - DNA, 122 bp, Homo sapiens
  misc_feature (61)..(62): /note="This region represents a CpG dinucleotide"
  misc_feature (61)..(61): /note="Nucleotide may be methylated to form 5-methylcytosine"
gcatcagtgtaaaagagtttgaaactccttattgacaaaacacggcccactgtgtatcctcgagattagtctagcccatgaattcaatgttaagttcatgaaactcatatcccttgcaaatt

SEQ ID NO: 19910 - DNA, 122 bp, Homo sapiens
  misc_feature (61)..(62): /note="This region represents a CpG dinucleotide"
  misc_feature (61)..(61): /note="Nucleotide may be methylated to form 5-methylcytosine"
tttgaagtcagctgcttagtaaccttaattgcatctgaaaatccctcacagcagtagatccgtgtttgactgaataggggataaggttcttggggaacatttaaaagttaatcctatcacag

SEQ ID NO: 19911 - DNA, 122 bp, Homo sapiens
  misc_feature (61)..(62): /note="This region represents a CpG dinucleotide"
  misc_feature (61)..(61): /note="Nucleotide may be methylated to form 5-methylcytosine"
ttaatacaggagggaaatgggagtaaataacagttattttctgagagacatttctaaggacgactttaaaagaccaggcaaaggagagcagagcccagccgttgccgcttgagagagataag

SEQ ID NO: 19912 - DNA, 122 bp, Homo sapiens
  misc_feature (61)..(62): /note="This region represents a CpG dinucleotide"
  misc_feature (61)..(61): /note="Nucleotide may be methylated to form 5-methylcytosine"
tctctttaaaaacaagtgatttgaaaaatgactatctttcatgtctaagtatagggtgggcgtgtgcagatgtaaaatgtacctgcagtactaaaactggggaaaaggcaaacacaggatga

SEQ ID NO: 19913 - DNA, 122 bp, Homo sapiens
  misc_feature (61)..(62): /note="This region represents a CpG dinucleotide"
  misc_feature (61)..(61): /note="Nucleotide may be methylated to form 5-methylcytosine"
ttattttttaagaatagatcatatattatcgtgttggtctcaaacattgcaattagaccacgttaggtgattataaactgagtaagattgttagtataaataggacagagttcttagctata

SEQ ID NO: 19914 - DNA, 122 bp, Homo sapiens
  misc_feature (61)..(62): /note="This region represents a CpG dinucleotide"
  misc_feature (61)..(61): /note="Nucleotide may be methylated to form 5-methylcytosine"
gtatagttgaactgattgaattactatttctgcctagaaccacagaagctcaagagactccggggcctaaaccacaaacaatggctcttttgtctaagaggaacccatggtggggctattac

SEQ ID NO: 19915 - DNA, 122 bp, Homo sapiens
  misc_feature (61)..(62): /note="This region represents a CpG dinucleotide"
  misc_feature (61)..(61): /note="Nucleotide may be methylated to form 5-methylcytosine"
gcgccgtgcgtgaatctgctcgctgatctgctccaggttacgaagggccacggagtagcgcgtcttggcctgagctacctgctgctccagttctgtcaccttggccttgtgctcctgcagag

SEQ ID NO: 19916 - DNA, 122 bp, Homo sapiens
  misc_feature (61)..(62): /note="This region represents a CpG dinucleotide"
  misc_feature (61)..(61): /note="Nucleotide may be methylated to form 5-methylcytosine"
agtgacagtttaccaagaaatgaactgtgatatacagaactacattcccaggtcctactccggaatgctggcagctaggcttatatctctccggaagattagaagatccttctctgagaaaa

SEQ ID NO: 19917 - DNA, 122 bp, Homo sapiens
  misc_feature (61)..(62): /note="This region represents a CpG dinucleotide"
  misc_feature (61)..(61): /note="Nucleotide may be methylated to form 5-methylcytosine"
ggctaacctgatttacattcccagtgacagtgaataggagttttctattgtctgcagcctcgccagcatttgttaacaaatatttatatatttcaggcaaagatcatctgttagtttttatt

SEQ ID NO: 19918 - DNA, 122 bp, Homo sapiens
  misc_feature (61)..(62): /note="This region represents a CpG dinucleotide"
  misc_feature (61)..(61): /note="Nucleotide may be methylated to form 5-methylcytosine"
aagcagcagagaaggaggtgaggacagttcagaatgaagatgagtgattcaggaaaacaccgacacagataatgcaacttaaatggaagtaaatgtaattgcgaccaatgcaataaacttaa

SEQ ID NO: 19919 - DNA, 122 bp, Homo sapiens
  misc_feature (61)..(62): /note="This region represents a CpG dinucleotide"
  misc_feature (61)..(61): /note="Nucleotide may be methylated to form 5-methylcytosine"
catttccaaaggacaggaagtcacctctgagctgttgcggcttttctacgagaagcagaacgtgtacggcactccaagatcggaaaacaatgtcaggtttcaactggaatgacacagatgta

SEQ ID NO: 19920 - DNA, 122 bp, Homo sapiens
  misc_feature (61)..(62): /note="This region represents a CpG dinucleotide"
  misc_feature (61)..(61): /note="Nucleotide may be methylated to form 5-methylcytosine"
actgaagcaactgccaaaccaaagagaagtttttatgctgccagggatttgtacaagtaccgacaccagtacccagtaagagtatagaatgctatgttttaaactgtaaactattttccttc

SEQ ID NO: 19921 - DNA, 122 bp, Homo sapiens
  misc_feature (61)..(62): /note="This region represents a CpG dinucleotide"
  misc_feature (61)..(61): /note="Nucleotide may be methylated to form 5-methylcytosine"
caaaggagtcatttcccaacttcagtattttgaaacattagatatcctgtttccttacaacgtgaccatcttgcagataagcactgctagatcatctgcacattcgagtaaatcctgttgtg

SEQ ID NO: 19922 - DNA, 122 bp, Homo sapiens
  misc_feature (61)..(62): /note="This region represents a CpG dinucleotide"
  misc_feature (61)..(61): /note="Nucleotide may be methylated to form 5-methylcytosine"
cctgatgaacttagctgaagctaccagatacaactttcaacatccttctaggtggatcctcgttgtttttgttcactcagcttcaaggttaaaaaaaacaagcaaaaaaaaaaagaccaaag

SEQ ID NO: 19923 - DNA, 122 bp, Homo sapiens
  misc_feature (61)..(62): /note="This region represents a CpG dinucleotide"
  misc_feature (61)..(61): /note="Nucleotide may be methylated to form 5-methylcytosine"
tttttttttcctgagacagggttcactgtcacgcaagctggagtgccgtggcattatcaccgctaaccgcagccttgaactcctgggctcaagcgatcctcctgcctcagcctcctgagcag

SEQ ID NO: 19924 - DNA, 122 bp, Homo sapiens
  misc_feature (61)..(62): /note="This region represents a CpG dinucleotide"
  misc_feature (61)..(61): /note="Nucleotide may be methylated to form 5-methylcytosine"
ctgattctcatcccttgagttgcacctttctcctcaggcatcctgctagcctttagaggtcgctgtcactctagcaggaaagggatcgagaaaggatccctactagttcactggtctcctct

SEQ ID NO: 19925 - DNA, 122 bp, Homo sapiens
  misc_feature (61)..(62): /note="This region represents a CpG dinucleotide"
  misc_feature (61)..(61): /note="Nucleotide may be methylated to form 5-methylcytosine"
aaaagcttgagtggtgctttctgggaggcataggagtttccatccttaactggtacccatcggagaacaggcgtatcccttagcccatgatcctgtctggatgctttatgtgaatgcaaggc

SEQ ID NO: 19926 - DNA, 122 bp, Homo sapiens
  misc_feature (61)..(62): /note="This region represents a CpG dinucleotide"
  misc_feature (61)..(61): /note="Nucleotide may be methylated to form 5-methylcytosine"
acctattttattccaaaatgaggtaggagtgctgagctaaactggtgcccttaagggttacgtcctagagactaaagatgcattcactgaaagtcattcatgagcaatgattgggaagactc

SEQ ID NO: 19927 - DNA, 122 bp, Homo sapiens
  misc_feature (61)..(62): /note="This region represents a CpG dinucleotide"
  misc_feature (61)..(61): /note="Nucleotide may be methylated to form 5-methylcytosine"
cccgtttctcttggtcgtaccagcttagcaggctccctcggaaggctgtgacttcagctacgtctctgaatagatggtatgaggagacagaggcctgcaataccacctcttccggctgcctg

SEQ ID NO: 19928 - DNA, 122 bp, Homo sapiens
  misc_feature (61)..(62): /note="This region represents a CpG dinucleotide"
  misc_feature (61)..(61): /note="Nucleotide may be methylated to form 5-methylcytosine"
ctgacagcagcacatgagtctgtgctaacgacaccactgctcctcagcacagggagcagacgttaccacactctggcaagcccactgacagcagaatggcgcctttggggcccgcctggtgg

SEQ ID NO: 19929 - DNA, 122 bp, Homo sapiens
  misc_feature (61)..(62): /note="This region represents a CpG dinucleotide"
  misc_feature (61)..(61): /note="Nucleotide may be methylated to form 5-methylcytosine"
cactcccatgctggaggagctagaatcaggagcttttccactataggtctcaaatgagagcggaaaagaaatgagaataaacattcaaattaatgttgaactgggccgggcacagtggctca

SEQ ID NO: 19930 - DNA, 122 bp, Homo sapiens
  misc_feature (61)..(62): /note="This region represents a CpG dinucleotide"
  misc_feature (61)..(61): /note="Nucleotide may be methylated to form 5-methylcytosine"
atcttctttctagttgctttggagaattcctcccttactagattgacctagactgagccacgttaccacctttccttgatcacagtgattaagtaatgaatacttaagccaagatgggccat

SEQ ID NO: 19931 - DNA, 122 bp, Homo sapiens
  misc_feature (61)..(62): /note="This region represents a CpG dinucleotide"
  misc_feature (61)..(61): /note="Nucleotide may be methylated to form 5-methylcytosine"
tccacggtgatggggctctggaggctggggtgctccacttggcaggtgtagatgtctccacgctggggagttatttccagcatcaccagaatctggaaggtccagtcaccattcctaatgag

SEQ ID NO: 19932 - DNA, 122 bp, Homo sapiens
  misc_feature (61)..(62): /note="This region represents a CpG dinucleotide"
  misc_feature (61)..(61): /note="Nucleotide may be methylated to form 5-methylcytosine"
taacacctaaatttccgttgttttaagacactcagtttatgttaatttgttacaccagcccgaggacacaaatactctagggtacaaaggtctgacttcctagcttaatttgagataagcta

SEQ ID NO: 19933 - DNA, 122 bp, Homo sapiens
  misc_feature (61)..(62): /note="This region represents a CpG dinucleotide"
  misc_feature (61)..(61): /note="Nucleotide may be methylated to form 5-methylcytosine"
cagactgagcctccccatctgggtttatccttttttaaaagtgtgtaaattttagtgtcccgaagtacttctcatttgtctgacttcaaagaacagctgtgccacctgctggctgtgtgctc

SEQ ID NO: 19934 - DNA, 122 bp, Homo sapiens
  misc_feature (61)..(62): /note="This region represents a CpG dinucleotide"
  misc_feature (61)..(61): /note="Nucleotide may be methylated to form 5-methylcytosine"
agctgctccatatacccttctgagtccctgctgtgccctgccccttggagcttgagatgacgctgtgcactgcctcctgaagaaacaatgccttggcaaagtggtccaactacccctcccag

SEQ ID NO: 19935 - DNA, 122 bp, Homo sapiens
  misc_feature (61)..(62): /note="This region represents a CpG dinucleotide"
  misc_feature (61)..(61): /note="Nucleotide may be methylated to form 5-methylcytosine"
acacacacacacacacacacacacacacacacacacacacacacatttaatgttcccaaacgattactgagtgctaaatagacttgctggaatctgatggttgaaagaaaattcaaaaatgt

SEQ ID NO: 19936 - DNA, 122 bp, Homo sapiens
  misc_feature (61)..(62): /note="This region represents a CpG dinucleotide"
  misc_feature (61)..(61): /note="Nucleotide may be methylated to form 5-methylcytosine"
ttctattaacttccctttttgacaataatctgttacatttataaaagattctgatatccacgctaaaaagaaggaaggaaaaaaggaagtgaaggtaggaatatttactgagtgcctgctag

SEQ ID NO: 19937 - DNA, 122 bp, Homo sapiens
  misc_feature (61)..(62): /note="This region represents a CpG dinucleotide"
  misc_feature (61)..(61): /note="Nucleotide may be methylated to form 5-methylcytosine"
tagatgaagagctatcttctttcactttggtattatgtttgacactctcctcttaagccccgtcaagggtaagtgtgtgtctttgtatctgaagttgtcacatatacaaactttacagtcta

SEQ ID NO: 19938 - DNA, 122 bp, Homo sapiens
  misc_feature (61)..(62): /note="This region represents a CpG dinucleotide"
  misc_feature (61)..(61): /note="Nucleotide may be methylated to form 5-methylcytosine"
tttcttaaagccttctatggaacccttagataatttaactataaaatgagttttctaaaacgtctgcgttagaattggagcattcttattgaatgttgaagcttttaagagagaacttgatg

SEQ ID NO: 19939 - DNA, 122 bp, Homo sapiens
  misc_feature (61)..(62): /note="This region represents a CpG dinucleotide"
  misc_feature (61)..(61): /note="Nucleotide may be methylated to form 5-methylcytosine"
agaacttataatagcttccttcttataccattttattttgtgcctcagtactttttattacgttgtttctttacctggctaactctattattttttaaataatggctttattaaggtatcat

SEQ ID NO: 19940 - DNA, 122 bp, Homo sapiens
  misc_feature (61)..(62): /note="This region represents a CpG dinucleotide"
  misc_feature (61)..(61): /note="Nucleotide may be methylated to form 5-methylcytosine"
ccctgaccacagcgcatctcacgccggcgagcaggtccaccctgaccatggcacatctcacgccggtgagcaggtccaccctgacaaaggaaagggagagcccaggagtgtccacttccagc

SEQ ID NO: 19941 - DNA, 122 bp, Homo sapiens
  misc_feature (61)..(62): /note="This region represents a CpG dinucleotide"
  misc_feature (61)..(61): /note="Nucleotide may be methylated to form 5-methylcytosine"
cctggggtggacgctccagtttcttcccagcatggcacactcctgtggcatttgacttagcggtggagggggcatcccccaagagtgaggtaagagaatacccatgtccctaaaagcagaca

SEQ ID NO: 19942 - DNA, 122 bp, Homo sapiens
  misc_feature (61)..(62): /note="This region represents a CpG dinucleotide"
  misc_feature (61)..(61): /note="Nucleotide may be methylated to form 5-methylcytosine"
gctttgcatcactgaaaattaatctcagagttctctgtaccccataacccaagaatgctacgtctctggggaaccctgcagaaacccagaaagagcatgatcatttggttataaattccacc

SEQ ID NO: 19943 - DNA, 122 bp, Homo sapiens
  misc_feature (61)..(62): /note="This region represents a CpG dinucleotide"
  misc_feature (61)..(61): /note="Nucleotide may be methylated to form 5-methylcytosine"
gcggcttcaaggcctgggccgagcgggggagccacagcgagggttccggagcctgcaaggcggagtcccgggctcagctcaccccaggcgcaggcctgagggctgggagggctccgggggct

SEQ ID NO: 19944 - DNA, 122 bp, Homo sapiens
  misc_feature (61)..(62): /note="This region represents a CpG dinucleotide"
  misc_feature (61)..(61): /note="Nucleotide may be methylated to form 5-methylcytosine"
ttagaactgtaaattggatgtccttggcagccttactcattcgtgagcattctaaactatcgtcatgtaacaggaagtctgagaatgaacaaagagaagggaacctaaagacagctctgtcc

SEQ ID NO: 19945 - DNA, 122 bp, Homo sapiens
  misc_feature (61)..(62): /note="This region represents a CpG dinucleotide"
  misc_feature (61)..(61): /note="Nucleotide may be methylated to form 5-methylcytosine"
gccttagctcagtgccagtgtggtaaccttaaactcgcttacttaagtggctgatctcatcgcttcctttatgtggtttgtgggatttttcccctctttgccttattacgtcccttgaccac

SEQ ID NO: 19946 - DNA, 122 bp, Homo sapiens
  misc_feature (61)..(62): /note="This region represents a CpG dinucleotide"
  misc_feature (61)..(61): /note="Nucleotide may be methylated to form 5-methylcytosine"
tggggttgtctgagtcattttatcaacatgattctctaagtaatcttagctgtgttggtacgtaatgacagatggaaatgctttggctttgttggtactgagttcacaccagggaaacatac

SEQ ID NO: 19947 - DNA, 122 bp, Homo sapiens
  misc_feature (61)..(62): /note="This region represents a CpG dinucleotide"
  misc_feature (61)..(61): /note="Nucleotide may be methylated to form 5-methylcytosine"
tactcacagcccaaataaacaaaagcagtttacctccaatgcaacctagagtcctagcctcgccctttctctccctctggactgagacctctttatttcctctgtagtttctcggtgtctct

SEQ ID NO: 19948 - DNA, 122 bp, Homo sapiens
  misc_feature (61)..(62): /note="This region represents a CpG dinucleotide"
  misc_feature (61)..(61): /note="Nucleotide may be methylated to form 5-methylcytosine"
ctagggactcctgagttagttaacagagcagggaagaagactgactctgccattaattcacgagtggcctggggccaatcctctctgggcctcaactggaaaaacagagaacttgatcaaaa

SEQ ID NO: 19949 - DNA, 122 bp, Homo sapiens
  misc_feature (61)..(62): /note="This region represents a CpG dinucleotide"
  misc_feature (61)..(61): /note="Nucleotide may be methylated to form 5-methylcytosine"
taaatttttgttgtgtggccccggaatctggggtagactctgtgactcacattactgtcacgtttccttgtctttcaagtgagaaagctagcagttaaagtgactcctagtagaagtccatc

SEQ ID NO: 19950 - DNA, 122 bp, Homo sapiens
  misc_feature (61)..(62): /note="This region represents a CpG dinucleotide"
  misc_feature (61)..(61): /note="Nucleotide may be methylated to form 5-methylcytosine"
gtgacttggggcagctgactgcaggcgtctccacctctgtgtaatggaagtaataatgcccgcccacaggacgggaggaattaatatgagatacatacaatctggcggtttccgccgggccg

SEQ ID NO: 19951 - DNA, 122 bp, Homo sapiens
  misc_feature (61)..(62): /note="This region represents a CpG dinucleotide"
  misc_feature (61)..(61): /note="Nucleotide may be methylated to form 5-methylcytosine"
ctttggggccaggctcaaactgagaatttgtggacacctcagagtcccttgcctgatcgccggcctctgaccacagcctgtgcccagcacttcctgtcttctctcttgcagtctcagctcta

SEQ ID NO: 19952 - DNA, 122 bp, Homo sapiens
  misc_feature (61)..(62): /note="This region represents a CpG dinucleotide"
  misc_feature (61)..(61): /note="Nucleotide may be methylated to form 5-methylcytosine"
acaaacaaaagaacaagaactcccccataattccacttctcagaaatcacatcacattgacgtttttgtctgcgtatccagatcattttgggggtgctcatgattttttaaacaaaagaact

SEQ ID NO: 19953 - DNA, 122 bp, Homo sapiens
  misc_feature (61)..(62): /note="This region represents a CpG dinucleotide"
  misc_feature (61)..(61): /note="Nucleotide may be methylated to form 5-methylcytosine"
taaaagggtgcctttaatacaatatttaggtaggttgacctgactgcctaatttatatgacgaaatattaaagccctgggtactgtgaggatttcctagtactaaagtttgtccttatgttt

SEQ ID NO: 19954 - DNA, 122 bp, Homo sapiens
  misc_feature (61)..(62): /note="This region represents a CpG dinucleotide"
  misc_feature (61)..(61): /note="Nucleotide may be methylated to form 5-methylcytosine"
gagtcacccgacaaggcagggtggggctgccaaagcctatggcctagagagctgagggcacgaccacagccctgtggccagcattctcgagactccaaagataggcccggccagtgccccca

SEQ ID NO: 19955 - DNA, 122 bp, Homo sapiens
  misc_feature (61)..(62): /note="This region represents a CpG dinucleotide"
  misc_feature (61)..(61): /note="Nucleotide may be methylated to form 5-methylcytosine"
ctcgctaaagccccgcagcctggattcagttgtccttattgcataaacctaaccgcattacggcacttggcatgcaaatcgcttctgtgctgcaggccgggtgctgggcagggctcgcggaa

SEQ ID NO: 19956 - DNA, 122 bp, Homo sapiens
  misc_feature (61)..(62): /note="This region represents a CpG dinucleotide"
  misc_feature (61)..(61): /note="Nucleotide may be methylated to form 5-methylcytosine"
accccatcagaatattaccacatgtgtcaatcacacaccttgtggtgaaagcgagctgaacgcactgatacatgaagacatttctgactcctccctgaccttcagcctgctgggagagagac

SEQ ID NO: 19957 - DNA, 122 bp, Homo sapiens
  misc_feature (61)..(62): /note="This region represents a CpG dinucleotide"
  misc_feature (61)..(61): /note="Nucleotide may be methylated to form 5-methylcytosine"
gaatttagtcatcagctgtagctgacaaaaccaagacaacaattatagggattcaaattacgttgttagtaaacttacagtaaatgaagacagattgatgcactggttttgtctgagaacat

SEQ ID NO: 19958 - DNA, 122 bp, Homo sapiens
  misc_feature (61)..(62): /note="This region represents a CpG dinucleotide"
  misc_feature (61)..(61): /note="Nucleotide may be methylated to form 5-methylcytosine"
accaatgtaaagcatgatcctaatagaatggatcttaacaaagtgattatttccactgtacgttgtggtaattggaaaatgagcctgtggaaacagtcctatatctaggtcattatttcacc

SEQ ID NO: 19959 - DNA, 122 bp, Homo sapiens
  misc_feature (61)..(62): /note="This region represents a CpG dinucleotide"
  misc_feature (61)..(61): /note="Nucleotide may be methylated to form 5-methylcytosine"
aagtaaataagtaaatgaaataaagaatggatctcaagttaggtctccagtggtatgttccggaatttttcaacaacttataaaagccagagggaggcagcatggcctaataattaagagag

SEQ ID NO: 19960 - DNA, 122 bp, Homo sapiens
  misc_feature (61)..(62): /note="This region represents a CpG dinucleotide"
  misc_feature (61)..(61): /note="Nucleotide may be methylated to form 5-methylcytosine"
aatttttaaaaatgaactgctgatacacacagtaacctggatgacgccctcaggtggctacgctgcatgaaaaccataatcctgggctacatactgtgtcattccatttgtataacattctt

SEQ ID NO: 19961 - DNA, 122 bp, Homo sapiens
  misc_feature (61)..(62): /note="This region represents a CpG dinucleotide"
  misc_feature (61)..(61): /note="Nucleotide may be methylated to form 5-methylcytosine"
atctgtgatcaaatatccctgaataaccatatgtaaatattctctttaagtatttaccaccgtaaatgaaggaaagccatccacggcttgggctgatgtaaccaggaagtattccaatgatg

SEQ ID NO: 19962 - DNA, 122 bp, Homo sapiens
  misc_feature (61)..(62): /note="This region represents a CpG dinucleotide"
  misc_feature (61)..(61): /note="Nucleotide may be methylated to form 5-methylcytosine"
gctgcatgtagaagcatttaaagacatagaatgctgtgtcacacagaagttgtgtttaaccgattagcagattagttaacaagggcacagacatggcttagacagttgatgaagtgactatt

SEQ ID NO: 19963 - DNA, 122 bp, Homo sapiens
  misc_feature (61)..(62): /note="This region represents a CpG dinucleotide"
  misc_feature (61)..(61): /note="Nucleotide may be methylated to form 5-methylcytosine"
gtgtgtgtgtgtgtatttttttcttttaatccagtcttccattgcctgacattgattccacgacttcacctttgtgtgtagtgctgtgataaacatatcagtataggttttttaaaaaccat

SEQ ID NO: 19964 - DNA, 122 bp, Homo sapiens
  misc_feature (61)..(62): /note="This region represents a CpG dinucleotide"
  misc_feature (61)..(61): /note="Nucleotide may be methylated to form 5-methylcytosine"
cacttgaaaagttcctcttctttattaataaactgcactgcttcttcagattcctgaatacgtttttgtagttgtcttacatctgtcacatactgaaagtaaataagttttttgtcttaaaa

SEQ ID NO: 19965 - DNA, 122 bp, Homo sapiens
  misc_feature (61)..(62): /note="This region represents a CpG dinucleotide"
  misc_feature (61)..(61): /note="Nucleotide may be methylated to form 5-methylcytosine"
aggaaatccctctcagacatgagatgctactcctcgaagtccattcaaaagttgcaaggtcgggaatttcagacagccaattaatcatgaaagggtgttatgaccttcattcatctcactct

SEQ ID NO: 19966 - DNA, 122 bp, Homo sapiens
  misc_feature (61)..(62): /note="This region represents a CpG dinucleotide"
  misc_feature (61)..(61): /note="Nucleotide may be methylated to form 5-methylcytosine"
tcagcatagattaagtgtccaataatgtaggagaatcagaggactgagaaaagtccagggcgtggattttgctgtcaaggaacacccagctgtaatgattcgaaactagatgtgccttgcag

SEQ ID NO: 19967 - DNA, 122 bp, Homo sapiens
  misc_feature (61)..(62): /note="This region represents a CpG dinucleotide"
  misc_feature (61)..(61): /note="Nucleotide may be methylated to form 5-methylcytosine"
tttcatgattttttaaaaataaagcaaacactctatccccaatgctttctgctgcatatacgtttatttctttagattcaggtcactttgtccttgcttagtcttgatctctgctgtatcct

SEQ ID NO: 19968 - DNA, 122 bp, Homo sapiens
  misc_feature (61)..(62): /note="This region represents a CpG dinucleotide"
  misc_feature (61)..(61): /note="Nucleotide may be methylated to form 5-methylcytosine"
cacattcagtcctgttcatcttcaaaacaggcatttcctcattcacacaagcttgtacatcgcattaactcatttctgaaaggagcaagacgtaaagtagatggcgagagacaatgctgttt

SEQ ID NO: 19969 - DNA, 122 bp, Homo sapiens
  misc_feature (61)..(62): /note="This region represents a CpG dinucleotide"
  misc_feature (61)..(61): /note="Nucleotide may be methylated to form 5-methylcytosine"
tttctatgtgtaattgacacaaatgagtatttgtgtactgtctagaccatgtcaccatcccgtcagaagctcaggcaatacttatacatgatatgtactagaacacattattttcctggaaa

SEQ ID NO: 19970 - DNA, 122 bp, Homo sapiens
  misc_feature (61)..(62): /note="This region represents a CpG dinucleotide"
  misc_feature (61)..(61): /note="Nucleotide may be methylated to form 5-methylcytosine"
tgttcagttgaaagccaagttattttgagctgagcaaaatgaggattcaaattacaggagcgcagagtaaacttttggcatattagcggacatcttggtaagtttctcaggacagtgttttt

SEQ ID NO: 19971 - DNA, 122 bp, Homo sapiens
  misc_feature (61)..(62): /note="This region represents a CpG dinucleotide"
  misc_feature (61)..(61): /note="Nucleotide may be methylated to form 5-methylcytosine"
tttcaacatttgatcagtgcataacatttcttggagaggtgtggttttttttcttcccttcgttatctgtttactagggtgatgggagttaaaggtagtaaaaacttcacaatcatggttga

SEQ ID NO: 19972 - DNA, 122 bp, Homo sapiens
  misc_feature (61)..(62): /note="This region represents a CpG dinucleotide"
  misc_feature (61)..(61): /note="Nucleotide may be methylated to form 5-methylcytosine"
tatcagctcacaagaacggattctacacatctcttcctaactccatgttcagtgacttcacgttggtagctttcaactggcaacagtgggagttgctacatcacggaaatcagggaatagtc

SEQ ID NO: 19973 - DNA, 122 bp, Homo sapiens
  misc_feature (61)..(62): /note="This region represents a CpG dinucleotide"
  misc_feature (61)..(61): /note="Nucleotide may be methylated to form 5-methylcytosine"
cttctgtagtttcttccagttttgttcacatgtgtatgctttttatttactgacagttaccgtatatacatcacttggccctcagcctctttcactgttaggtcctataaatttttcatttc

SEQ ID NO: 19974 - DNA, 122 bp, Homo sapiens
  misc_feature (61)..(62): /note="This region represents a CpG dinucleotide"
  misc_feature (61)..(61): /note="Nucleotide may be methylated to form 5-methylcytosine"
gtagcccaaggtcatgacataagccagtggcagggctgaatttaaaggcacaaagcagtgcgccccagagtcacgcgggtggactctgacagtgatagtgtccatttcccacatctgccagg

SEQ ID NO: 19975 - DNA, 122 bp, Homo sapiens
  misc_feature (61)..(62): /note="This region represents a CpG dinucleotide"
  misc_feature (61)..(61): /note="Nucleotide may be methylated to form 5-methylcytosine"
cccttaatgccttatgctaattcctgttggtaacatgaatgacaagagacggaatcagtgcgaatccaggtggtgcaaagtagactgactggtatcccgcaccccctttcctccctggggag

SEQ ID NO: 19976 - DNA, 122 bp, Homo sapiens
  misc_feature (61)..(62): /note="This region represents a CpG dinucleotide"
  misc_feature (61)..(61): /note="Nucleotide may be methylated to form 5-methylcytosine"
ggacacataatggaactgtcattctgaaaggttataaagaccagaaatctataaagtggacgaccataagaaacagttccatccttatgtaacacagtttggaaaaacctcagttactttag

SEQ ID NO: 19977 - DNA, 122 bp, Homo sapiens
  misc_feature (61)..(62): /note="This region represents a CpG dinucleotide"
  misc_feature (61)..(61): /note="Nucleotide may be methylated to form 5-methylcytosine"
ccctgaggggaggtgcttctgttttctgctttccctgtaagctgctgtgctgagcagcaacgtcagaactaatgcatgtggtcatcagtggatgagcaggattacataaggcctttactgtg

SEQ ID NO: 19978 - DNA, 122 bp, Homo sapiens
  misc_feature (61)..(62): /note="This region represents a CpG dinucleotide"
  misc_feature (61)..(61): /note="Nucleotide may be methylated to form 5-methylcytosine"
gtcagtagacaggcatgaaaccaatggcccaaggggaacccctgggcaagcaggaagtagcgccctagaaaggaagccaattccgtgaagcgttatctgccaaggaaaacaggatctcagta

SEQ ID NO: 19979 - DNA, 122 bp, Homo sapiens
  misc_feature (61)..(62): /note="This region represents a CpG dinucleotide"
  misc_feature (61)..(61): /note="Nucleotide may be methylated to form 5-methylcytosine"
ctacaaataaagggcaaaatagatatttaaaagataaagatctaccacatagtcaatctacgccttagaaaagacatagctaggttcgggtcctgatccctgacccatatcatttgggagaa

SEQ ID NO: 19980 - DNA, 122 bp, Homo sapiens
  misc_feature (61)..(62): /note="This region represents a CpG dinucleotide"
  misc_feature (61)..(61): /note="Nucleotide may be methylated to form 5-methylcytosine"
gagcttgaagatacatagtttcttctacacacagcaggatgaggcaaatccttctgcctacgatgactaggacctgaggcatcctgccctttcttgctccttggtgaatgaaaaggagaact

SEQ ID NO: 19981 - DNA, 122 bp, Homo sapiens
  misc_feature (61)..(62): /note="This region represents a CpG dinucleotide"
  misc_feature (61)..(61): /note="Nucleotide may be methylated to form 5-methylcytosine"
ccccctcttctccaccccctttcctcctcctcctcctcctcctcctcctcctcataaccacggccttttcagtttgatgtttttagatatcaaaggaagttctccaggaaccctgcaactaa

SEQ ID NO: 19982 - DNA, 122 bp, Homo sapiens
  misc_feature (61)..(62): /note="This region represents a CpG dinucleotide"
  misc_feature (61)..(61): /note="Nucleotide may be methylated to form 5-methylcytosine"
gtggaaagctgggaaacgcgtgtgtgtgtgctcactgcagtgacacagcatggccatatccgtttgctgtggaggtggggttgacagaggagagaaccgaggcccaagaggtgaagcagctt

SEQ ID NO: 19983 - DNA, 122 bp, Homo sapiens
  misc_feature (61)..(62): /note="This region represents a CpG dinucleotide"
  misc_feature (61)..(61): /note="Nucleotide may be methylated to form 5-methylcytosine"
tgtcaatcacttctgacactctactcatatcatgttcctaaggaagttgaacaaaaggagcgatagccaaatgggactaactataatagctaatatttattgagtacttattaatactgtac

SEQ ID NO: 19984 - DNA, 122 bp, Homo sapiens
  misc_feature (61)..(62): /note="This region represents a CpG dinucleotide"
  misc_feature (61)..(61): /note="Nucleotide may be methylated to form 5-methylcytosine"
gtgtctgaaccacatacttcctgggtgcctactgttctaagcactatgctggctgctgggcgaataaaagctggtaaacaagagaggcatgatcattggttttacagatttttcatctagag

SEQ ID NO: 19985 - DNA, 122 bp, Homo sapiens
  misc_feature (61)..(62): /note="This region represents a CpG dinucleotide"
  misc_feature (61)..(61): /note="Nucleotide may be methylated to form 5-methylcytosine"
accttcccccattttccctttctgtttttcctctgctttcttagagttaggtactgctttcgtcttgtctcacttctaacagctgccatccaacctccctaccctcgtttcaccacccctca

SEQ ID NO: 19986 - DNA, 122 bp, Homo sapiens
  misc_feature (61)..(62): /note="This region represents a CpG dinucleotide"
  misc_feature (61)..(61): /note="Nucleotide may be methylated to form 5-methylcytosine"
ttactccatgaccaccatccactggggaggaagtgctgaataaacagggggctttctcgccggtcatcacccggtgaagaggaagtgctaactagttattgtgcttactccccatcgtcacc

SEQ ID NO: 19987 - DNA, 122 bp, Homo sapiens
  misc_feature (61)..(62): /note="This region represents a CpG dinucleotide"
  misc_feature (61)..(61): /note="Nucleotide may be methylated to form 5-methylcytosine"
aatggggccacagttgggcaaaacgcccatcactttaaaaccacctctcggctggaagtacgtaatttttagcgagtcacagaaaaatagggaaacttatgcggcgtttccttggccacttc

SEQ ID NO: 19988 - DNA, 122 bp, Homo sapiens
  misc_feature (61)..(62): /note="This region represents a CpG dinucleotide"
  misc_feature (61)..(61): /note="Nucleotide may be methylated to form 5-methylcytosine"
aattggaggttagcccaggagggttatcagcttcgcccaggaaagaattcaagggtgagccggtggtgtcaggtggaaaccttttattgaagagcactgctccttgaggagcaggactaact

SEQ ID NO: 19989 - DNA, 122 bp, Homo sapiens
  misc_feature (61)..(62): /note="This region represents a CpG dinucleotide"
  misc_feature (61)..(61): /note="Nucleotide may be methylated to form 5-methylcytosine"
ctggggactgtgcctggtgacacaatagtcctgcattcccatgtagtgtatcagtccaagcgtgagaaagctctctgtgtttcctgagctggccagtggccagatgtgcaatgtggattacg

SEQ ID NO: 19990 - DNA, 122 bp, Homo sapiens
  misc_feature (61)..(62): /note="This region represents a CpG dinucleotide"
  misc_feature (61)..(61): /note="Nucleotide may be methylated to form 5-methylcytosine"
atgactcaatcattggtaggaggaaggagaggctttgcttcatattgggaagttcgctgacgcaaattcttgagttatgtgtattgcaggtggagaaagtggtgattctgaaggtgtttcag

SEQ ID NO: 19991 - DNA, 122 bp, Homo sapiens
  misc_feature (61)..(62): /note="This region represents a CpG dinucleotide"
  misc_feature (61)..(61): /note="Nucleotide may be methylated to form 5-methylcytosine"
tacaggtggcagcctcggagggtgattgtgaagggtccaggcggttcccgcgtgcagcctcgggacagggctgtgctggagccatcgagctggagagagagtgagcttcaccccagggcagc

SEQ ID NO: 19992 - DNA, 122 bp, Homo sapiens
  misc_feature (61)..(62): /note="This region represents a CpG dinucleotide"
  misc_feature (61)..(61): /note="Nucleotide may be methylated to form 5-methylcytosine"
ctgtaaaaggagccacagaagctaaattggccttggactgtggaaaagacagctgaataacggcaagagctaagaaactatttaacatcccactttcaatagcaacagttttacaaacagga

SEQ ID NO: 19993 - DNA, 122 bp, Homo sapiens
  misc_feature (61)..(62): /note="This region represents a CpG dinucleotide"
  misc_feature (61)..(61): /note="Nucleotide may be methylated to form 5-methylcytosine"
cacagaaagtcccagtacaacttccattgctgagaaaatcctcagaggactttcccacttcgctcctgtgatggatgacagaagagtgattcattaacaattgctcagccacaattctcgga

SEQ ID NO: 19994 - DNA, 122 bp, Homo sapiens
  misc_feature (61)..(62): /note="This region represents a CpG dinucleotide"
  misc_feature (61)..(61): /note="Nucleotide may be methylated to form 5-methylcytosine"
atcacaccactgcactccatcctgggtgacagagcgagggtccgtctcaaaaaaaaaaaccgaagacaaaagctgacaagtagctgtgaagtcccaagataaactatggttgaaaattgttt

SEQ ID NO: 19995 - DNA, 122 bp, Homo sapiens
  misc_feature (61)..(62): /note="This region represents a CpG dinucleotide"
  misc_feature (61)..(61): /note="Nucleotide may be methylated to form 5-methylcytosine"
tttgtagcttacacagtaccaaacctgagagagcactgcaaagtcaggtcaggaaggtttcgccaaggcttggaaataagaacagggtatgagtcttataccacctaactgggccttccagt

SEQ ID NO: 19996 - DNA, 122 bp, Homo sapiens
  misc_feature (61)..(62): /note="This region represents a CpG dinucleotide"
  misc_feature (61)..(61): /note="Nucleotide may be methylated to form 5-methylcytosine"
ctggagagtgggaggctctgcagcgggcccggacacaggtgagcccaggcacgccctcaccgccccctctcgacccacagggcttccggcccatcgccaagccggcctacagcccagcctcc

SEQ ID NO: 19997 - DNA, 122 bp, Homo sapiens
  misc_feature (61)..(62): /note="This region represents a CpG dinucleotide"
  misc_feature (61)..(61): /note="Nucleotide may be methylated to form 5-methylcytosine"
gattttcccagctacagtcattgttatcttttgtcagcctataagcatgttctggctgggcgcggtgtctcacccctgtaatcccagcactttgggaggcttagctgggtggatcacttgag

SEQ ID NO: 19998 - DNA, 122 bp, Homo sapiens
  misc_feature (61)..(62): /note="This region represents a CpG dinucleotide"
  misc_feature (61)..(61): /note="Nucleotide may be methylated to form 5-methylcytosine"
aactcttatagtactcccagtcagcatatgatggaaaacatgcggtatgttcctggactccgtctccgtccaaaacatgaagggattactaaacccctcccaattactataaaagaagacag

SEQ ID NO: 19999 - DNA, 122 bp, Homo sapiens
  misc_feature (61)..(62): /note="This region represents a CpG dinucleotide"
  misc_feature (61)..(61): /note="Nucleotide may be methylated to form 5-methylcytosine"
gcgggtgcaagaactcccaggtcactgctttattcagaggacctaaggaattgggttgagcggaagcgcacagagctgcagattttctttgatgaatgaaagcttcaatccacaggtttcta

SEQ ID NO: 20000 - DNA, 122 bp, Homo sapiens
  misc_feature (61)..(62): /note="This region represents a CpG dinucleotide"
  misc_feature (61)..(61): /note="Nucleotide may be methylated to form 5-methylcytosine"
taggagggccttctctaaaccaatcttttcctgtactcatgctggtatcctctttggccacggaagatggagctacatgtaaattaggagaaagtgacaagaaagagaatacaggagaaaga

SEQ ID NO: 20001 - DNA, 122 bp, Homo sapiens
  misc_feature (61)..(62): /note="This region represents a CpG dinucleotide"
  misc_feature (61)..(61): /note="Nucleotide may be methylated to form 5-methylcytosine"
aaaaccgtggcagtaagagatgcctttctctggcacatcccacctgctgggcataagcggcgccaccctctggagttacagcctcaaggcagtccggtaactaatcaggctttgggatggag

SEQ ID NO: 20002 - DNA, 122 bp, Homo sapiens
  misc_feature (61)..(62): /note="This region represents a CpG dinucleotide"
  misc_feature (61)..(61): /note="Nucleotide may be methylated to form 5-methylcytosine"
ggcaatgccagaaaaatggcaattagatcacaatactactagggagattcttacccaagtcgatggccttactgaaagaggtgactaatggttcaatgttcatttggaaaggactctaatga

SEQ ID NO: 20003 - DNA, 122 bp, Homo sapiens
  misc_feature (61)..(62): /note="This region represents a CpG dinucleotide"
  misc_feature (61)..(61): /note="Nucleotide may be methylated to form 5-methylcytosine"
ccagggactttccttggtaagccttcccatttttgtttgcccagctttcccaggcagagacgatgttagtgcagatgaaggtcaaggagaatctcaagtctttttttttttttaaaaaaagg

SEQ ID NO: 20004 - DNA, 122 bp, Homo sapiens
  misc_feature (61)..(62): /note="This region represents a CpG dinucleotide"
  misc_feature (61)..(61): /note="Nucleotide may be methylated to form 5-methylcytosine"
ttgaagagcatgtaatgaagaaactatgtgtagagtgtgggcaggtccacgtgcatgacacggtatgactcccagggatcagcaacagtggggagtcattactactctggggctgaagggca

SEQ ID NO: 20005 - DNA, 122 bp, Homo sapiens
  misc_feature (61)..(62): /note="This region represents a CpG dinucleotide"
  misc_feature (61)..(61): /note="Nucleotide may be methylated to form 5-methylcytosine"
agaatcaaatggagaaaacagtgaggatggtgtggggttccagaaacaagtgatcaactacgtcaaatgctggtaagaagtcaagtgagataaggacagaattaaccagagaatgggcaatg

SEQ ID NO: 20006 - DNA, 122 bp, Homo sapiens
  misc_feature (61)..(62): /note="This region represents a CpG dinucleotide"
  misc_feature (61)..(61): /note="Nucleotide may be methylated to form 5-methylcytosine"
ccaccaggcccacagcagagcctgaatctcaggagcaggttttctaaattgttcagctgacggcaaatcctgtgcttctgactcatgactgtcccccaagggctggtttgtcctccctggtg

SEQ ID NO: 20007 - DNA, 122 bp, Homo sapiens
  misc_feature (61)..(62): /note="This region represents a CpG dinucleotide"
  misc_feature (61)..(61): /note="Nucleotide may be methylated to form 5-methylcytosine"
cagtcagtagctttagataaaaaagactttcgaatgggcaaaaagcttccctgcagcctgcgaagatgttaattataagaaatagcaatttacattatttataaggaagctatttacagtac

SEQ ID NO: 20008 - DNA, 122 bp, Homo sapiens
  misc_feature (61)..(62): /note="This region represents a CpG dinucleotide"
  misc_feature (61)..(61): /note="Nucleotide may be methylated to form 5-methylcytosine"
ctagatagttataaaattctgagtttgccttatgtttccagggagttttcagattagcaacggtgaaataagttgaatttgaggcgtttttgctgtccaagtgttattgtaataattagggc

SEQ ID NO: 20009 - DNA, 122 bp, Homo sapiens
  misc_feature (61)..(62): /note="This region represents a CpG dinucleotide"
  misc_feature (61)..(61): /note="Nucleotide may be methylated to form 5-methylcytosine"
acgcatctaagcgcagtgtgcttttgaggcttggaaattcatggtggcagctctgccacccgcagccaggctggtggctgccgaggcctagaaaggacagggcatccaccaggctaggatgg

SEQ ID NO: 20010 - DNA, 122 bp, Homo sapiens
  misc_feature (61)..(62): /note="This region represents a CpG dinucleotide"
  misc_feature (61)..(61): /note="Nucleotide may be methylated to form 5-methylcytosine"
tgttatcctcttagccctactgtgttggaatagagcgtaaccagctggaggactgtaagacgcctgataatgccgctcttttccgctgtcccgtcttaatcttgttacacaaatggtcgtga

SEQ ID NO: 20011 - DNA, 122 bp, Homo sapiens
  misc_feature (61)..(62): /note="This region represents a CpG dinucleotide"
  misc_feature (61)..(61): /note="Nucleotide may be methylated to form 5-methylcytosine"
cacagcttacggtttctttcaattctcagggtctgtacttttacaggtcttatctcaccccgttagctagtcatcaattgcaaatttattaaacatttcaaatgatactgtcagctaaagac

SEQ ID NO: 20012 - DNA, 122 bp, Homo sapiens
  misc_feature (61)..(62): /note="This region represents a CpG dinucleotide"
  misc_feature (61)..(61): /note="Nucleotide may be methylated to form 5-methylcytosine"
catgaaaacagtgcttaacattgacttaggtcttgactgcatgccaggtagtgtctcacacgcttcacatgtatgaactcacttgatctttatgacagtcctataagatggtgctattatta

SEQ ID NO: 20013 - DNA, 122 bp, Homo sapiens
  misc_feature (61)..(62): /note="This region represents a CpG dinucleotide"
  misc_feature (61)..(61): /note="Nucleotide may be methylated to form 5-methylcytosine"
gagaagagcagtgacctctcaggtgactcaggagtgactcaggacaaagtctgaagcagccgctccaggagtgaccctgaggagaaggagtctaccctcactccatttccttccctcattgg

SEQ ID NO: 20014 - DNA, 122 bp, Homo sapiens
  misc_feature (61)..(62): /note="This region represents a CpG dinucleotide"
  misc_feature (61)..(61): /note="Nucleotide may be methylated to form 5-methylcytosine"
atggcgtgaacgaggagcgcagagctgggcctgcttggggacaagcccggagcaagatgacggggatgtcaggtgttgacggggatgtcacctgtcacttgggaatgaacacatgttctctg

SEQ ID NO: 20015 - DNA, 122 bp, Homo sapiens
  misc_feature (61)..(62): /note="This region represents a CpG dinucleotide"
  misc_feature (61)..(61): /note="Nucleotide may be methylated to form 5-methylcytosine"
atatgcattggcactgttatccccattttacagatgaggaaactaaggtgagagaggctgcgtaatatgtctgaggtcatagagctattgagtggatgagtcaggattcattctggcaccag

SEQ ID NO: 20016 - DNA, 122 bp, Homo sapiens
  misc_feature (61)..(62): /note="This region represents a CpG dinucleotide"
  misc_feature (61)..(61): /note="Nucleotide may be methylated to form 5-methylcytosine"
gtcttctatgttctaagcacaaagtagaaactcaaaagtgattgtgaaatgagtgaacaacgattaattaaaaaaataagagtaagagggtataagattcaggaaatacccccttaaggaaa

SEQ ID NO: 20017 - DNA, 122 bp, Homo sapiens
  misc_feature (61)..(62): /note="This region represents a CpG dinucleotide"
  misc_feature (61)..(61): /note="Nucleotide may be methylated to form 5-methylcytosine"
tacttaaccctttgagcccttctcatccatacaggaaggagaagagtagcacctgcctcacgtgtttaaccagaaagaggacctcaggctccagtgatggatcgggacatgtcttgtcctga

SEQ ID NO: 20018 - DNA, 122 bp, Homo sapiens
  misc_feature (61)..(62): /note="This region represents a CpG dinucleotide"
  misc_feature (61)..(61): /note="Nucleotide may be methylated to form 5-methylcytosine"
aaggccagcccaggttcacagggcagagacatagactccacctcgggattgggggcctggcgtggcagtgtcattgttgcaaaggaatttatggccactaaatggtttaccacaggtgactg

SEQ ID NO: 20019 - DNA, 122 bp, Homo sapiens
  misc_feature (61)..(62): /note="This region represents a CpG dinucleotide"
  misc_feature (61)..(61): /note="Nucleotide may be methylated to form 5-methylcytosine"
gccttaaaaaggaagggaattctgacacacgcctcaacacggatgaaccctgaagcattacgctaactaaactacagcagacacagaggacaaatattgtatgagtccgctcacacgagatg

SEQ ID NO: 20020 - DNA, 122 bp, Homo sapiens
  misc_feature (61)..(62): /note="This region represents a CpG dinucleotide"
  misc_feature (61)..(61): /note="Nucleotide may be methylated to form 5-methylcytosine"
tgcgctgggtcccttgggggagcgagctggcatcggaggcccttaccccaggaaaagcgccggaaataggttccttgggaagctggggcctgggcccgggcggtccgggtctctggactgct

SEQ ID NO: 20021 - DNA, 122 bp, Homo sapiens
  misc_feature (61)..(62): /note="This region represents a CpG dinucleotide"
  misc_feature (61)..(61): /note="Nucleotide may be methylated to form 5-methylcytosine"
gtttgactgtaactgtgtatggtatcactgagtgcttcgtcctagtcccaggaagtctaacgtcctgtcttatgcattgaagtgagaggttagaatcttgggtctgattctgactcaggatt

SEQ ID NO: 20022 - DNA, 122 bp, Homo sapiens
  misc_feature (61)..(62): /note="This region represents a CpG dinucleotide"
  misc_feature (61)..(61): /note="Nucleotide may be methylated to form 5-methylcytosine"
acggaacgggaactgcagatccaggcactccattatggcaacccagcaagcagttcagcacggacttaatgagctcttggaaggaaacaggaagtctataaagtaatttaaataacttccag

SEQ ID NO: 20023 - DNA, 122 bp, Homo sapiens
  misc_feature (61)..(62): /note="This region represents a CpG dinucleotide"
  misc_feature (61)..(61): /note="Nucleotide may be methylated to form 5-methylcytosine"
attctgacacccagacagggccattgttttccaggtgcaagcttgatcacctatgcaacccgtgtgtgtattcacctcaggaattcatgttgaagaatttaatcttgcagccactccaacaa

SEQ ID NO: 20024 - DNA, 122 bp, Homo sapiens
  misc_feature (61)..(62): /note="This region represents a CpG dinucleotide"
  misc_feature (61)..(61): /note="Nucleotide may be methylated to form 5-methylcytosine"
tcccagtcaagtggcaaacagatacagaccaaaaagtgctataatcatgacgcacgaagacggaaagactggttggaggatgaagaattgaaagaaaacttacttgaaatgaggtaattatg

SEQ ID NO: 20025 - DNA, 122 bp, Homo sapiens
  misc_feature (61)..(62): /note="This region represents a CpG dinucleotide"
  misc_feature (61)..(61): /note="Nucleotide may be methylated to form 5-methylcytosine"
gagagtgactctccgatgagtcacagctgcttctttgctgattggtatggccacaaggagcgtcctcttggccctcgtggtccttaacttactcttctatgttccaccaggtaaaatggagt

SEQ ID NO: 20026 - DNA, 122 bp, Homo sapiens
  misc_feature (61)..(62): /note="This region represents a CpG dinucleotide"
  misc_feature (61)..(61): /note="Nucleotide may be methylated to form 5-methylcytosine"
gcggccagccggctggggtgctgactctcagctctcttgtttttgtgcctgccaggcactcgcaggcttctgggaagaagactgtgtgggaggatgaagccaaattgggctgcagtttgaaa

SEQ ID NO: 20027 - DNA, 122 bp, Homo sapiens
  misc_feature (61)..(62): /note="This region represents a CpG dinucleotide"
  misc_feature (61)..(61): /note="Nucleotide may be methylated to form 5-methylcytosine"
gaggcaagaggatggcttgagcctgggaatttgaggcagcagtgagctatcaccatgccccggcactcctgagtgacaaagctagattctatctctaaaatagaataaataaaaataagaaa

SEQ ID NO: 20028 - DNA, 122 bp, Homo sapiens
  misc_feature (61)..(62): /note="This region represents a CpG dinucleotide"
  misc_feature (61)..(61): /note="Nucleotide may be methylated to form 5-methylcytosine"
gttttctttcctcattcaccaaagggaagcaaacattttaaaaatagttcttcaaacacccgaaaacagaggatgcagacaactgcataatgatgcagagatgatgatgaataataagttct

SEQ ID NO: 20029 - DNA, 122 bp, Homo sapiens
  misc_feature (61)..(62): /note="This region represents a CpG dinucleotide"
  misc_feature (61)..(61): /note="Nucleotide may be methylated to form 5-methylcytosine"
taggcctatgcaaatactgttctcttcacggacaaattgagtgtttcccttcctgtacagcgtggatttttctgttagtcatggcttttctcttggcactttctgttcccatcgactcctta

SEQ ID NO: 20030 - DNA, 122 bp, Homo sapiens
  misc_feature (61)..(62): /note="This region represents a CpG dinucleotide"
  misc_feature (61)..(61): /note="Nucleotide may be methylated to form 5-methylcytosine"
aaaaatgttccttatgttaatcatacatttgacaatgaaaaggaaatgtagatagtgtgacggaggcagattaaatcagacctcagtttcaatactctgcgttactgggtgcaacacgagac

SEQ ID NO: 20031 - DNA, 122 bp, Homo sapiens
  misc_feature (61)..(62): /note="This region represents a CpG dinucleotide"
  misc_feature (61)..(61): /note="Nucleotide may be methylated to form 5-methylcytosine"
atgtcctgctgcttctgcaaaaaactcagagtggggtggggagcatgttcatttgtacctcgagttttaaactggttcctagggatgtgtgagaataaactagactctgaacaactgctttg

SEQ ID NO: 20032 - DNA, 122 bp, Homo sapiens
  misc_feature (61)..(62): /note="This region represents a CpG dinucleotide"
  misc_feature (61)..(61): /note="Nucleotide may be methylated to form 5-methylcytosine"
gtaaggtatacagggaacagcactctagaagctatgactcaattgagactacaagtaccacggtgctacttgcacagacccctttggttaaatgtaaattcttgtacaattgaaggatacgc

SEQ ID NO: 20033 - DNA, 122 bp, Homo sapiens
  misc_feature (61)..(62): /note="This region represents a CpG dinucleotide"
  misc_feature (61)..(61): /note="Nucleotide may be methylated to form 5-methylcytosine"
atgcaggatcacactggattttacagctgactggaactgtctgtcttcagacgcagcctccgtatgactacatttcataacagaagatccttctttttgattttctcttgtgtgatcatctg

SEQ ID NO: 20034 - DNA, 122 bp, Homo sapiens
  misc_feature (61)..(62): /note="This region represents a CpG dinucleotide"
  misc_feature (61)..(61): /note="Nucleotide may be methylated to form 5-methylcytosine"
aagccaagctcctcaccatgcctagcatgccctttgtgttctgggcctttgctctccttccgtcttatttcctgctgctcacatagcattgctgcagccatcatgaccctgtgggatcattg

SEQ ID NO: 20035 - DNA, 122 bp, Homo sapiens
  misc_feature (61)..(62): /note="This region represents a CpG dinucleotide"
  misc_feature (61)..(61): /note="Nucleotide may be methylated to form 5-methylcytosine"
cttcgaagtcaggctcctgcccgcccaccgcctctgtgccagggtccaacccccgccccacggtgcaccccccagggcctggggtcccagtccccaagtaccccttgctatcaggtgggctt

SEQ ID NO: 20036 - DNA, 122 bp, Homo sapiens
  misc_feature (61)..(62): /note="This region represents a CpG dinucleotide"
  misc_feature (61)..(61): /note="Nucleotide may be methylated to form 5-methylcytosine"
taaatatttatatacctgttataaaattcaagttattctaagtttaattctgtccttctacgtggcactgctgccacatgtgtttgcttgctagttacccatttggctgtttgctatgcagg

SEQ ID NO: 20037 - DNA, 122 bp, Homo sapiens
  misc_feature (61)..(62): /note="This region represents a CpG dinucleotide"
  misc_feature (61)..(61): /note="Nucleotide may be methylated to form 5-methylcytosine"
gtgatccacctgcctcggcctcccaaagtgccagatttacaggtgtgagccactgcgcctcgcctagacatcagtttttatttgttatagtaaactatggaaatactagttaatagatgccc

SEQ ID NO: 20038 - DNA, 122 bp, Homo sapiens
  misc_feature (61)..(62): /note="This region represents a CpG dinucleotide"
  misc_feature (61)..(61): /note="Nucleotide may be methylated to form 5-methylcytosine"
cttaagagtgtatgtgtattgcttgaaccccaaaagctaggcagtgaaccaaggccactgcgcccagccaaggaccacgtgtccctgagaacctaaacatcctggggcatagctggggacat

SEQ ID NO: 20039 - DNA, 122 bp, Homo sapiens
  misc_feature (61)..(62): /note="This region represents a CpG dinucleotide"
  misc_feature (61)..(61): /note="Nucleotide may be methylated to form 5-methylcytosine"
attcaaggggaaaaaatatataagttcttaggtgttactgaggataaactgtactttttccgtcatgttgaagagggagacaacctgagcatcaaagtcttcagtataaattaaagcagctt

SEQ ID NO: 20040 - DNA, 122 bp, Homo sapiens
  misc_feature (61)..(62): /note="This region represents a CpG dinucleotide"
  misc_feature (61)..(61): /note="Nucleotide may be methylated to form 5-methylcytosine"
tgccttgggggtgggaggctaaggaactgttcacggtcttctgggtgggccctggattcccgcacttctggagcagtcctcagacagccaagggatccatccacgggccagggcttcccgag

SEQ ID NO: 20041 - DNA, 122 bp, Homo sapiens
  misc_feature (61)..(62): /note="This region represents a CpG dinucleotide"
  misc_feature (61)..(61): /note="Nucleotide may be methylated to form 5-methylcytosine"
cactcataatttcgggctcaggggagaaatggaagtcaaagaatctcataaacacagctgcgatgacgaaccctttcacgggaaggaacatgcgagcccagaaaagtctctcctggtcttgg

SEQ ID NO: 20042 - DNA, 122 bp, Homo sapiens
  misc_feature (61)..(62): /note="This region represents a CpG dinucleotide"
  misc_feature (61)..(61): /note="Nucleotide may be methylated to form 5-methylcytosine"
aaggtaggggtacgtgcagtgagttgttagctagttgagttgtttcttaatcaaccttggcgtgacttcttcctctggcaccctgttgaggcctctccatcagattaacaggcttcctagtt

SEQ ID NO: 20043 - DNA, 122 bp, Homo sapiens
  misc_feature (61)..(62): /note="This region represents a CpG dinucleotide"
  misc_feature (61)..(61): /note="Nucleotide may be methylated to form 5-methylcytosine"
caaataagccagacccagagaatctgtcatgtacacttcctcattcttctttctggtgagcgggaggagaaattccagtgaaggagaggagcaaataccctctcacggccaccctgggacta

SEQ ID NO: 20044 - DNA, 122 bp, Homo sapiens
  misc_feature (61)..(62): /note="This region represents a CpG dinucleotide"
  misc_feature (61)..(61): /note="Nucleotide may be methylated to form 5-methylcytosine"
agccagaaaaggtgtgtggtttcgcagtctttcagacaaactgaatttaatagtagctgacgtgaacccctgtttctcctctaggctccagagccgcaccccagtgcaggtgtggaagctca

SEQ ID NO: 20045 - DNA, 122 bp, Homo sapiens
  misc_feature (61)..(62): /note="This region represents a CpG dinucleotide"
  misc_feature (61)..(61): /note="Nucleotide may be methylated to form 5-methylcytosine"
tggttagaatacatattcttaaaattatgacactgacaggaatgccaaacctgaaaaaggcgaagcagtccttgatttaatttacagggtcctattccaaatatgccattacaaagctagtt

SEQ ID NO: 20046 - DNA, 122 bp, Homo sapiens
  misc_feature (61)..(62): /note="This region represents a CpG dinucleotide"
  misc_feature (61)..(61): /note="Nucleotide may be methylated to form 5-methylcytosine"
ctgacatttgagcaaaaggtggtgactcagccaactggagaactcacaacaagttctacccgtctggggttgttaccagctggcccttccagaatcacagtctaggctacatagtgaagatc

SEQ ID NO: 20047 - DNA, 122 bp, Homo sapiens
  misc_feature (61)..(62): /note="This region represents a CpG dinucleotide"
  misc_feature (61)..(61): /note="Nucleotide may be methylated to form 5-methylcytosine"
ttgtgccctaacagatcttatggtctgacaggcaagagacattgaacaagtaattacagtcgcatgtgatgaatgtcaagctgggctgatacacagttcttttggaacaagcagctagggga

SEQ ID NO: 20048 - DNA, 122 bp, Homo sapiens
  misc_feature (61)..(62): /note="This region represents a CpG dinucleotide"
  misc_feature (61)..(61): /note="Nucleotide may be methylated to form 5-methylcytosine"
ccactgatttgtgcatttcacaatgaacatgacccaaacaaaatccagttaattagttaacgtaatctgcattaagtacctttcaatagaactcttggggaatctacttacaggtactgtac

SEQ ID NO: 20049 - DNA, 122 bp, Homo sapiens
  misc_feature (61)..(62): /note="This region represents a CpG dinucleotide"
  misc_feature (61)..(61): /note="Nucleotide may be methylated to form 5-methylcytosine"
agtactgatgggcgctactttcacagtaatttgccttcttttcaccttaaccttgctaagcgttatgctaagtgcattgtattttatatctattcttctcaactattctgcaacctgagtgt

SEQ ID NO: 20050 - DNA, 122 bp, Homo sapiens
  misc_feature (61)..(62): /note="This region represents a CpG dinucleotide"
  misc_feature (61)..(61): /note="Nucleotide may be methylated to form 5-methylcytosine"
cggcatctgcataaattggttaatgggtgctgttgaagagagtgtgatttgtccaatggccgaactcaggagtccttgagtacttgacccaggaagacaggggagagtaggcttagcaatta

SEQ ID NO: 20051 - DNA, 122 bp, Homo sapiens
  misc_feature (61)..(62): /note="This region represents a CpG dinucleotide"
  misc_feature (61)..(61): /note="Nucleotide may be methylated to form 5-methylcytosine"
ttccttaaggctgagccctagtgtgactttcagtcagaaatgggttatactgtggccaggcgtggtggctcacgcctgtaatcccagcactgtgggaggctgaggtgggctgatcacttgag

SEQ ID NO: 20052 - DNA, 122 bp, Homo sapiens
  misc_feature (61)..(62): /note="This region represents a CpG dinucleotide"
  misc_feature (61)..(61): /note="Nucleotide may be methylated to form 5-methylcytosine"
cttacccagcccctagcccctattgggtgagctctgctgccaatcactttccccaccccccgcctcattgtttgcaatctgttgcattttgttccaggccatgtggcctgtgagtgaactag

SEQ ID NO: 20053 - DNA, 122 bp, Homo sapiens
  misc_feature (61)..(62): /note="This region represents a CpG dinucleotide"
  misc_feature (61)..(61): /note="Nucleotide may be methylated to form 5-methylcytosine"
tgagtacgtgtcacgcacgcataacagtcctgggcacatagcacacactgtggggccagccgctgtcagaattctcctgttcctcagtgtgcgggtgggtcggcctaaagagtgctgctttc

SEQ ID NO: 20054 - DNA, 122 bp, Homo sapiens
  misc_feature (61)..(62): /note="This region represents a CpG dinucleotide"
  misc_feature (61)..(61): /note="Nucleotide may be methylated to form 5-methylcytosine"
acctaactgacagcagcaatactgatgtttatttcactcccttaggcaattcttacactacgtgaccttccaaaggcaaaaagagttggttaataacacagacatagcatcactgtcttcaa

SEQ ID NO: 20055 - DNA, 122 bp, Homo sapiens
  misc_feature (61)..(62): /note="This region represents a CpG dinucleotide"
  misc_feature (61)..(61): /note="Nucleotide may be methylated to form 5-methylcytosine"
agccagagagtggcctctgtcattgctcattcagttcctgagtcaggccttattgggcaacgtggttgaatttcatgactgtgtttcctaaactgaacaatctagttagcatgcacctcctc

SEQ ID NO: 20056 - DNA, 122 bp, Homo sapiens
  misc_feature (61)..(62): /note="This region represents a CpG dinucleotide"
  misc_feature (61)..(61): /note="Nucleotide may be methylated to form 5-methylcytosine"
ctagcatagttgaatgtattccctttcctaccaggagttcagaggatcattaaagactcacgctggccatagggtgagtaataagatgctgttttctgggcgtcgccaaaatcatagaccac

SEQ ID NO: 20057 - DNA, 122 bp, Homo sapiens
  misc_feature (61)..(62): /note="This region represents a CpG dinucleotide"
  misc_feature (61)..(61): /note="Nucleotide may be methylated to form 5-methylcytosine"
taaaaccctctgcatgaagacttcctgtttctgtaagtcacctacagagacaacattcaccgtaagcttcatcagacactgcattatttcaaagaactaggagttctcagttctcagagcca

SEQ ID NO: 20058 - DNA, 122 bp, Homo sapiens
  misc_feature (61)..(62): /note="This region represents a CpG dinucleotide"
  misc_feature (61)..(61): /note="Nucleotide may be methylated to form 5-methylcytosine"
ctgcttggtttgtgtcaggcatttcctggtcccttgtgtctgccgggcttgtggaggaggcgtgtggaagcttttttctgagccatccgccctgtggaagccacacaggcaaggccagagga

SEQ ID NO: 20059 - DNA, 122 bp, Homo sapiens
  misc_feature (61)..(62): /note="This region represents a CpG dinucleotide"
  misc_feature (61)..(61): /note="Nucleotide may be methylated to form 5-methylcytosine"
agaaggctttcctctccaatagtgaattaataaaggataagtaggaaaaacgttacgaaacgatgtggtaacattatagactctgtattagggcaaaaattgtgagatagtagaagatctgt

SEQ ID NO: 20060 - DNA, 122 bp, Homo sapiens
  misc_feature (61)..(62): /note="This region represents a CpG dinucleotide"
  misc_feature (61)..(61): /note="Nucleotide may be methylated to form 5-methylcytosine"
gtatgttggggaacttcacggaaggggctttgttacaggaacccaagtcaccatcctccccggtcctgtggcaggaagcggtgctaggcgcagctggagtggttttagagcagcctgaaata

SEQ ID NO: 20061 - DNA, 122 bp, Homo sapiens
  misc_feature (61)..(62): /note="This region represents a CpG dinucleotide"
  misc_feature (61)..(61): /note="Nucleotide may be methylated to form 5-methylcytosine"
gtcatgagaagactgagatggggacagtgtccctgactcagggaacagctcgtgccaagtcggatgagatacttgggtgtggctgcagtttagggcttgcacatgggcagctcagtactggg

SEQ ID NO: 20062 - DNA, 122 bp, Homo sapiens
  misc_feature (61)..(62): /note="This region represents a CpG dinucleotide"
  misc_feature (61)..(61): /note="Nucleotide may be methylated to form 5-methylcytosine"
gagaatataggaaaacacaaacagtacaagagaggcatgatccaaatatggagtaacctacgatgacactgatcctgagtaattcaaatattaggaaagacaattcatttgaatcatctcct

SEQ ID NO: 20063 - DNA, 122 bp, Homo sapiens
  misc_feature (61)..(62): /note="This region represents a CpG dinucleotide"
  misc_feature (61)..(61): /note="Nucleotide may be methylated to form 5-methylcytosine"
ctgtctctgcagcttatgtatgactctttgttaagcatttcaaaatattacatgttactgcgttgtaatactttgcttgtatctagcacctcttatttttagaacttagtgtttaaacaaat

SEQ ID NO: 20064 - DNA, 122 bp, Homo sapiens
  misc_feature (61)..(62): /note="This region represents a CpG dinucleotide"
  misc_feature (61)..(61): /note="Nucleotide may be methylated to form 5-methylcytosine"
taaaataagtaaactataagtaagaaggaaaataaagcatatgaatgatcaggatcattgcgggtggagggctcaattttaaacagtatgagccaggatactatcggatactccctctctgt

SEQ ID NO: 20065 - DNA, 122 bp, Homo sapiens
  misc_feature (61)..(62): /note="This region represents a CpG dinucleotide"
  misc_feature (61)..(61): /note="Nucleotide may be methylated to form 5-methylcytosine"
acctttggctttaagcctcaagttctacatttttttcttccccgtgtgcaaaggtgctctcgccaacaaagtgaagaggaaagacacactggcaatgaagttgaaccacagacccagtgaac

SEQ ID NO: 20066 - DNA, 122 bp, Homo sapiens
  misc_feature (61)..(62): /note="This region represents a CpG dinucleotide"
  misc_feature (61)..(61): /note="Nucleotide may be methylated to form 5-methylcytosine"
gtagatgacatcaggattcaggactctgaacacaaacacagtgacactgatcagggttgccgaggtgctgtgtttcggtccagaaagtcactgctgcaggggaggggagtatggtcacagcc

SEQ ID NO: 20067 - DNA, 122 bp, Homo sapiens
  misc_feature (61)..(62): /note="This region represents a CpG dinucleotide"
  misc_feature (61)..(61): /note="Nucleotide may be methylated to form 5-methylcytosine"
atatctcttttggcaccaatagttcttgcttcagtaattcaccagtaggttttcattcatcgataatatatcagtttaaggctaaaataaaacacctacatttcttagggcttatcattcta

SEQ ID NO: 20068 - DNA, 122 bp, Homo sapiens
  misc_feature (61)..(62): /note="This region represents a CpG dinucleotide"
  misc_feature (61)..(61): /note="Nucleotide may be methylated to form 5-methylcytosine"
ggcctttcttttcctgtactgtgctctacttccttatgcatgcttggtttcaaagatgaccgccactttaaaagaaagatttcctcacagctctccagagaactatcatactaaggtgatag

SEQ ID NO: 20069 - DNA, 122 bp, Homo sapiens
  misc_feature (61)..(62): /note="This region represents a CpG dinucleotide"
  misc_feature (61)..(61): /note="Nucleotide may be methylated to form 5-methylcytosine"
aggcagtttctcctgctcttcaggaatagcacatgggctgtatacttgtgtgcaccaccacgctcagctatttttaaaatactttgtagagatggggtcttgctatgttactcaggctggcc

SEQ ID NO: 20070 - DNA, 122 bp, Homo sapiens
  misc_feature (61)..(62): /note="This region represents a CpG dinucleotide"
  misc_feature (61)..(61): /note="Nucleotide may be methylated to form 5-methylcytosine"
gcgcggtgatatgacagcatgtgaagtgagtgggtgagcacggactcctgagagcgagggcgcacccaatacctggttatctggtactgcagagagacacctagtcagccagcgttgcaaag

SEQ ID NO: 20071 - DNA, 122 bp, Homo sapiens
  misc_feature (61)..(62): /note="This region represents a CpG dinucleotide"
  misc_feature (61)..(61): /note="Nucleotide may be methylated to form 5-methylcytosine"
ggctggaggaatgttctggccttgggctgtggtgtctcagtccaaggacactggcaggctcgccctcgggggaggaaggcaggcagcgcctgcagcgaggagtgtgccctagaagaatgcac

SEQ ID NO: 20072 - DNA, 122 bp, Homo sapiens
  misc_feature (61)..(62): /note="This region represents a CpG dinucleotide"
  misc_feature (61)..(61): /note="Nucleotide may be methylated to form 5-methylcytosine"
gggtgaggttgagtctatgtagaaatgttggcttctcagttctggcagagtcttatggtgcgtagaggtctgatggagttagggagtcagaggtgaaagctcagaggcaggtggatgtatgg

SEQ ID NO: 20073 - DNA, 122 bp, Homo sapiens
  misc_feature (61)..(62): /note="This region represents a CpG dinucleotide"
  misc_feature (61)..(61): /note="Nucleotide may be methylated to form 5-methylcytosine"
atagcaagtctcaccatgtgttgaaataatttatttcaacacttaatgcatcacctgtcccgtatttccacatgttgtgtcatcaccatttgacctcaacccattgttaaatatttaatagt

SEQ ID NO: 20074 - DNA, 122 bp, Homo sapiens
  misc_feature (61)..(62): /note="This region represents a CpG dinucleotide"
  misc_feature (61)..(61): /note="Nucleotide may be methylated to form 5-methylcytosine"
ggactacagatttgaggagcccgcaacttattcaggaagccctcttatgggaaaatgatacgaaattataaatgcaaagttaggtacaaaagcagaaggggtctgtacaggtgagaagtcct

SEQ ID NO: 20075 - DNA, 122 bp, Homo sapiens
  misc_feature (61)..(62): /note="This region represents a CpG dinucleotide"
  misc_feature (61)..(61): /note="Nucleotide may be methylated to form 5-methylcytosine"
tgattttgtgttggttggcctccagctaggagttggtgctctcaagaatgcatcagtatacggaggatcaggcagtgggtgagacctactcctggccttaaagctcccaagagattatgtat

SEQ ID NO: 20076 - DNA, 122 bp, Homo sapiens
  misc_feature (61)..(62): /note="This region represents a CpG dinucleotide"
  misc_feature (61)..(61): /note="Nucleotide may be methylated to form 5-methylcytosine"
tcattctggacagccctcccgtgaaccgtccctgtactggcacttgttgctggggactgtcgctgtcctctccctccccgggccaggtgtgtcctggagggcagggaagcgtcttggcacgc

SEQ ID NO: 20077 - DNA, 122 bp, Homo sapiens
  misc_feature (61)..(62): /note="This region represents a CpG dinucleotide"
  misc_feature (61)..(61): /note="Nucleotide may be methylated to form 5-methylcytosine"
cctcactttcacatctggaggttcctggaacaacagtctagtattttctagctctatttacgattctgtttgactgtggactataatccttttcaagtattattttaaagtacacactgttt

SEQ ID NO: 20078 - DNA, 122 bp, Homo sapiens
  misc_feature (61)..(62): /note="This region represents a CpG dinucleotide"
  misc_feature (61)..(61): /note="Nucleotide may be methylated to form 5-methylcytosine"
accaacaactgcccgttcaggtcaaggtccccatctacaggagaaagggatgtgttctgtcgtaaccaagaaggaaatacacgcaggttcaggtcaaggtccccgtccacaggagaaaggga

SEQ ID NO: 20079 - DNA, 122 bp, Homo sapiens
  misc_feature (61)..(62): /note="This region represents a CpG dinucleotide"
  misc_feature (61)..(61): /note="Nucleotide may be methylated to form 5-methylcytosine"
gaggttcccaagcctggcagcagatccttaaggctgattcattcagcacatctgattgagcgtgtctgacttggcaaatgggaatgaactagaagatcagtgccttggagctgcagtatgtg

SEQ ID NO: 20080 - DNA, 122 bp, Homo sapiens
  misc_feature (61)..(62): /note="This region represents a CpG dinucleotide"
  misc_feature (61)..(61): /note="Nucleotide may be methylated to form 5-methylcytosine"
gataatgaggcagacagagaggttatgtgactcacttggggccgcccagctggttagtgacgggcccagagcaccctccagagacactgtcctgaaccatcgtgctgtgctgccacccactg

SEQ ID NO: 20081 - DNA, 122 bp, Homo sapiens
  misc_feature (61)..(62): /note="This region represents a CpG dinucleotide"
  misc_feature (61)..(61): /note="Nucleotide may be methylated to form 5-methylcytosine"
ttatttctagggaaatggcaggaatgcctctccaggtgggagggcatgacatttctgccacgcgccacctcagcccctccttacctcccccacaaaggagtattttaatagaaggttaatgg

SEQ ID NO: 20082 - DNA, 122 bp, Homo sapiens
  misc_feature (61)..(62): /note="This region represents a CpG dinucleotide"
  misc_feature (61)..(61): /note="Nucleotide may be methylated to form 5-methylcytosine"
ccgggtcggggggctgtgggagagcccccagatcagccctaagactgcgggctagaggggcgttggctgcatggggtccctgggccctgtatttacccaggccagagcagtgcagcttgagt

SEQ ID NO: 20083 - DNA, 122 bp, Homo sapiens
  misc_feature (61)..(62): /note="This region represents a CpG dinucleotide"
  misc_feature (61)..(61): /note="Nucleotide may be methylated to form 5-methylcytosine"
agatgaagacactgagggtcagagtggtgatgtgtcaggaaccctcccactgggttctcacgcttgaaacacagattgctggtccccacccacacagtttctgatgcagtaggtctgggtgg

SEQ ID NO: 20084 - DNA, 122 bp, Homo sapiens
  misc_feature (61)..(62): /note="This region represents a CpG dinucleotide"
  misc_feature (61)..(61): /note="Nucleotide may be methylated to form 5-methylcytosine"
ggactgccttctcgagactgtgagctgtcagtgactaagggttcatcatttttatgctctcggtacttggcacagagctaaacgaatcaggccttgcattataaagcactgatctatctact

SEQ ID NO: 20085 - DNA, 122 bp, Homo sapiens
  misc_feature (61)..(62): /note="This region represents a CpG dinucleotide"
  misc_feature (61)..(61): /note="Nucleotide may be methylated to form 5-methylcytosine"
cttttaatttgactccattcttaggatgatgtgctgcatttctgcaatggcacccactggcgtgcaaaagaaaaactggattttccaggttaagcagaaacatggacgccatactaaactct

SEQ ID NO: 20086 - DNA, 122 bp, Homo sapiens
  misc_feature (61)..(62): /note="This region represents a CpG dinucleotide"
  misc_feature (61)..(61): /note="Nucleotide may be methylated to form 5-methylcytosine"
aacagaaaggtgacttagttccaaaggcaaatttgtttccatgacatttttctcttcccacgtgaccatgcctgccgggtttaggattcacagaattctgcgaaaatacagtcatgcatcac

SEQ ID NO: 20087 - DNA, 122 bp, Homo sapiens
  misc_feature (61)..(62): /note="This region represents a CpG dinucleotide"
  misc_feature (61)..(61): /note="Nucleotide may be methylated to form 5-methylcytosine"
aagtaaaaaggtgaaagttctccacttaataagaaaagaaaaaaaattgtatactgaggtcgctaagatctatggtaagaatgaaactatctgtgaaatcatgaagaaggaaaaataaattt

SEQ ID NO: 20088 - DNA, 122 bp, Homo sapiens
  misc_feature (61)..(62): /note="This region represents a CpG dinucleotide"
  misc_feature (61)..(61): /note="Nucleotide may be methylated to form 5-methylcytosine"
ccgcgccgccctctacagatgggtgcgccacgatggcaacgggcaatgcaaagccacacacgccggccacatgtggacagacatcgttttgtctgcatcctgtgacactggtgaacttcatc

SEQ ID NO: 20089 - DNA, 122 bp, Homo sapiens
  misc_feature (61)..(62): /note="This region represents a CpG dinucleotide"
  misc_feature (61)..(61): /note="Nucleotide may be methylated to form 5-methylcytosine"
atttatctcttctgttgttttaagtgccttggaacagattttatgaacaacagcaacattcgatattgatttgctcagtgttagtagtgagatgcctttagtagtgagatcacacctttcag

SEQ ID NO: 20090 - DNA, 122 bp, Homo sapiens
  misc_feature (61)..(62): /note="This region represents a CpG dinucleotide"
  misc_feature (61)..(61): /note="Nucleotide may be methylated to form 5-methylcytosine"
ggcaaaacagctgtggcctcccccaggcagggaaagtggtgggtgtagggctggacttgccggctgagcttgcaggacaatctggttattcatctgcttgaagtcagggcaactctttgagt

SEQ ID NO: 20091 - DNA, 122 bp, Homo sapiens
  misc_feature (61)..(62): /note="This region represents a CpG dinucleotide"
  misc_feature (61)..(61): /note="Nucleotide may be methylated to form 5-methylcytosine"
ggctaggatagcagtgccatggagtcaacacagagtaagatgaaccagggttgctgccaacgcccagcacctgctaagtgactcagcagagaagccagtcccaggagggcagcctaaagtgt

SEQ ID NO: 20092 - DNA, 122 bp, Homo sapiens
  misc_feature (61)..(62): /note="This region represents a CpG dinucleotide"
  misc_feature (61)..(61): /note="Nucleotide may be methylated to form 5-methylcytosine"
gaccaggtgggtctgacttcatggctgtgctgattcaaatcctctgcacagctgctatgacgcaaaataataattattattatagttctgtctgggtgcggtggctcatgcctgtaacctca

SEQ ID NO: 20093 - DNA, 122 bp, Homo sapiens
  misc_feature (61)..(62): /note="This region represents a CpG dinucleotide"
  misc_feature (61)..(61): /note="Nucleotide may be methylated to form 5-methylcytosine"
tctgtggcttctataattaatctcccagtagaagctgttttagaaagactccagaacaaccgaaagaagtcttttctttgtggaattgttttgggtcttgtgagtggaaacattcagaaaca

SEQ ID NO: 20094 - DNA, 122 bp, Homo sapiens
  misc_feature (61)..(62): /note="This region represents a CpG dinucleotide"
  misc_feature (61)..(61): /note="Nucleotide may be methylated to form 5-methylcytosine"
ccacaggtcaggtggagggtggggcatgggcatcggccaggattgctgtcaccttttctccggagctaccaagatcgttcctgtttctaagcagtcgcaccccagcagcctctctctctcca

SEQ ID NO: 20095 - DNA, 122 bp, Homo sapiens
  misc_feature (61)..(62): /note="This region represents a CpG dinucleotide"
  misc_feature (61)..(61): /note="Nucleotide may be methylated to form 5-methylcytosine"
atagtgtgcttctgggtggggccacaggaccagtgggcggtccaggtagagccatgcgaacgcccgaaaagacgtctcaaaaggccaatcttaggttaaaccacagtgatgttatctgtagg

SEQ ID NO: 20096 - DNA, 122 bp, Homo sapiens
  misc_feature (61)..(62): /note="This region represents a CpG dinucleotide"
  misc_feature (61)..(61): /note="Nucleotide may be methylated to form 5-methylcytosine"
ctcatccccgcccctcccacagcccagccccccccttcctgtttgacaactgccacttcccgcttttgcacagggccacttcctgcctgcctgtgtgctactgccatggagagacccacccc

SEQ ID NO: 20097 - DNA, 122 bp, Homo sapiens
  misc_feature (61)..(62): /note="This region represents a CpG dinucleotide"
  misc_feature (61)..(61): /note="Nucleotide may be methylated to form 5-methylcytosine"
aacctacctcatgggttggtgaggaattaatcagctcacacatggttagccctcagtaaacgttggctgttatggttgtgtctttccactctctgcctcgcactttaagatctggctacatg

SEQ ID NO: 20098 - DNA, 122 bp, Homo sapiens
  misc_feature (61)..(62): /note="This region represents a CpG dinucleotide"
  misc_feature (61)..(61): /note="Nucleotide may be methylated to form 5-methylcytosine"
atcctgctccatgtcaggaaaatatttataggtccccagtcatgggatctggaaacagagcggaggaaggagctcgggaatggtcttgctcaatccttcccggcctctgctcatcggaatca

SEQ ID NO: 20099 - DNA, 122 bp, Homo sapiens
  misc_feature (61)..(62): /note="This region represents a CpG dinucleotide"
  misc_feature (61)..(61): /note="Nucleotide may be methylated to form 5-methylcytosine"
tggctctgccactagcttgctctgtgaccttgggcaatttgcttaacctctctgtgcttccgtttccatctctgtaaaacgatggctcttcacagcacccacatccgagggtttttgtaggg

SEQ ID NO: 20100 - DNA, 122 bp, Homo sapiens
  misc_feature (61)..(62): /note="This region represents a CpG dinucleotide"
  misc_feature (61)..(61): /note="Nucleotide may be methylated to form 5-methylcytosine"
ctgtggtgggagcatgagaccacaaaccaggaagtggggggggggagtgcccagagattgcgcaacccccagcactcagtccagaacatctggagaagttggttgctggcgccccggtgccg

SEQ ID NO: 20101 - DNA, 122 bp, Homo sapiens
  misc_feature (61)..(62): /note="This region represents a CpG dinucleotide"
  misc_feature (61)..(61): /note="Nucleotide may be methylated to form 5-methylcytosine"
cctgcaccccgggctgacctgccagagcctgaagtcaccagcttcccgtcactgctcaagcgaagtgggggtctgaattcacagcttcgccatcagctattgggggacccgcacgagtcatt

SEQ ID NO: 20102 - DNA, 122 bp, Homo sapiens
  misc_feature (61)..(62): /note="This region represents a CpG dinucleotide"
  misc_feature (61)..(61): /note="Nucleotide may be methylated to form 5-methylcytosine"
aagcaatgcaggcttcctctgctggggcagggaggggctgcttcctcactgttgctggtgcggtgtctggggggagggattccttgttattgctgtatgactgtaagagttccccattaggc

SEQ ID NO: 20103 - DNA, 122 bp, Homo sapiens
  misc_feature (61)..(62): /note="This region represents a CpG dinucleotide"
  misc_feature (61)..(61): /note="Nucleotide may be methylated to form 5-methylcytosine"
ctgcctgcctccttctactgatctgtcagctccgatctgactcaaggaccaaggcttagtcgtccttctacctgctcgggttcttgcacaagaataaacaaatcgataaaaaccctggattg

SEQ ID NO: 20104 - DNA, 122 bp, Homo sapiens
  misc_feature (61)..(62): /note="This region represents a CpG dinucleotide"
  misc_feature (61)..(61): /note="Nucleotide may be methylated to form 5-methylcytosine"
aagccactttggtgaaacaaaaagaaaagcatttgtttatttagaacgggcaaaatgatacgtttcagtgggtgttttctttgtactttgatctttttgtactgatatttaagcttctgttt

SEQ ID NO: 20105 - DNA, 122 bp, Homo sapiens
  misc_feature (61)..(62): /note="This region represents a CpG dinucleotide"
  misc_feature (61)..(61): /note="Nucleotide may be methylated to form 5-methylcytosine"
gagctgtgcggctcctggtgagaggcacacttatctgggatgcagtctggggagtcctggcgaggcagcttccacctgctggaggaggggccggggcggagctaagatgcggaggagggtga

SEQ ID NO: 20106 - DNA, 122 bp, Homo sapiens
  misc_feature (61)..(62): /note="This region represents a CpG dinucleotide"
  misc_feature (61)..(61): /note="Nucleotide may be methylated to form 5-methylcytosine"
gtcctggggctgagatggaacaggtcaggatggatgggacaggacccacagactggatgccgcagggacagacctggtaagtgacttatgtgggagggaggggccaaactgctgtagggggc

SEQ ID NO: 20107 - DNA, 122 bp, Homo sapiens
  misc_feature (61)..(62): /note="This region represents a CpG dinucleotide"
  misc_feature (61)..(61): /note="Nucleotide may be methylated to form 5-methylcytosine"
aaaagttagtcagagccacacttctcaaactttactgtttatcatattcatctgggacctcgttaattgcaggttccacttcagtaggtctgagtcagggccggagattctacttttccaac

SEQ ID NO: 20108 - DNA, 122 bp, Homo sapiens
  misc_feature (61)..(62): /note="This region represents a CpG dinucleotide"
  misc_feature (61)..(61): /note="Nucleotide may be methylated to form 5-methylcytosine"
actgtcttgaggggggaggaagccgaacaacaagaggaaagcagcgttcgctcctgatttcgcacaggaagtccacagcacctcctgccaaagcgagataagaaagctcccatgcactattc

SEQ ID NO: 20109 - DNA, 122 bp, Homo sapiens
  misc_feature (61)..(62): /note="This region represents a CpG dinucleotide"
  misc_feature (61)..(61): /note="Nucleotide may be methylated to form 5-methylcytosine"
tacactccctcaacccagccccaagcccaggtcaggcttctccgtggccaaagaggtgcccggctgagccctgccgcctgctggtgtctcagctgcactgttcaagttcccctcccagcctg

SEQ ID NO: 20110 - DNA, 122 bp, Homo sapiens
  misc_feature (61)..(62): /note="This region represents a CpG dinucleotide"
  misc_feature (61)..(61): /note="Nucleotide may be methylated to form 5-methylcytosine"
ggagtcctgagtccacctggggctggtcttgggagccctgatacgggctttgtgactcaacgcctatgaccaggaaccaagagtcctcagtgggaagacaccctgtgcttcactgactcatt

SEQ ID NO: 20111 - DNA, 122 bp, Homo sapiens
  misc_feature (61)..(62): /note="This region represents a CpG dinucleotide"
  misc_feature (61)..(61): /note="Nucleotide may be methylated to form 5-methylcytosine"
aaataagtagaaaccttcattaaggacttggccattcaaggtagtgttagtcttacaaagcgagctacacaccaacttcagaggctttcgctccaaacctgcatcaatcccttattaaatca

SEQ ID NO: 20112 - DNA, 122 bp, Homo sapiens
  misc_feature (61)..(62): /note="This region represents a CpG dinucleotide"
  misc_feature (61)..(61): /note="Nucleotide may be methylated to form 5-methylcytosine"
cctgccaccacacccagctaagtttttgtatttttagtagagacggggtttcagtagagacggggtgacaggatctacaattccaggtaaggtcaggttggtctcaaactcctgaccttgtg

SEQ ID NO: 20113 - DNA, 122 bp, Homo sapiens
  misc_feature (61)..(62): /note="This region represents a CpG dinucleotide"
  misc_feature (61)..(61): /note="Nucleotide may be methylated to form 5-methylcytosine"
atatgcattcctctcaggtgagccaagggatgccctctaggcctgtctttgtcaaggtaccggtgaagataagctgttagtttacattgtcaaggtgaaatagaacagcgttctgttttagg

SEQ ID NO: 20114 - DNA, 122 bp, Homo sapiens
  misc_feature (61)..(62): /note="This region represents a CpG dinucleotide"
  misc_feature (61)..(61): /note="Nucleotide may be methylated to form 5-methylcytosine"
ttctgctctgcaggacaagattaccattaactaccatcatgacttcagaagatgctgtcacgatgaaattcatttctgctgcctaaccccataataaggctggctgttctctttaagtaaaa

SEQ ID NO: 20115 - DNA, 122 bp, Homo sapiens
  misc_feature (61)..(62): /note="This region represents a CpG dinucleotide"
  misc_feature (61)..(61): /note="Nucleotide may be methylated to form 5-methylcytosine"
tacctaaattgcaaataccttaaatgaaagcaagttcatgccctgggatccccctaaacacggtgatgaagcctattctcaaaaccagactcagatatcacactcgtaaatgtcaagaatcg

SEQ ID NO: 20116 - DNA, 122 bp, Homo sapiens
  misc_feature (61)..(62): /note="This region represents a CpG dinucleotide"
  misc_feature (61)..(61): /note="Nucleotide may be methylated to form 5-methylcytosine"
actgtgattatccatttcagaaaatacacattcttctcagaaataggatttaattttaaacgtgtcgtttgttatgaaaattaatcacctaatgtcatagatagattagattggcaagggtc

SEQ ID NO: 20117 - DNA, 122 bp, Homo sapiens
  misc_feature (61)..(62): /note="This region represents a CpG dinucleotide"
  misc_feature (61)..(61): /note="Nucleotide may be methylated to form 5-methylcytosine"
tacactcaacaatagagaagaattaccaaaacatgctgaggaaaagaagacagctgtctacgcatacatactgcatgattccactgacagtgctggatctcagccagggacaatttggccgc

SEQ ID NO: 20118 - DNA, 122 bp, Homo sapiens
  misc_feature (61)..(62): /note="This region represents a CpG dinucleotide"
  misc_feature (61)..(61): /note="Nucleotide may be methylated to form 5-methylcytosine"
agtatagatgtacttacattctacaaaaatagaacaactaagatagcaaaatcaaaggcccgcagacaacatctaaagcaaaatgaggtgacagaatgtatgtgcataaatcatacatggct

SEQ ID NO: 20119 - DNA, 122 bp, Homo sapiens
  misc_feature (61)..(62): /note="This region represents a CpG dinucleotide"
  misc_feature (61)..(61): /note="Nucleotide may be methylated to form 5-methylcytosine"
accacactgtcaggtgggaaggctgatgtggcagagggagaatcagacaggagaatgttacgtaaccaaggattcagggaggtgatcgtttcacctgcttgcacctatcctaggtgtgttca

SEQ ID NO: 20120 - DNA, 122 bp, Homo sapiens
  misc_feature (61)..(62): /note="This region represents a CpG dinucleotide"
  misc_feature (61)..(61): /note="Nucleotide may be methylated to form 5-methylcytosine"
aggtggggggtgcagcactaggcgaggggggtgttgcaggcctgagccaggcaggggctgcgggtcggggtcaggtggtaggtgcggggtcaggcaggagagtgcggagtcaggccctgggg

SEQ ID NO: 20121 - DNA, 122 bp, Homo sapiens
  misc_feature (61)..(62): /note="This region represents a CpG dinucleotide"
  misc_feature (61)..(61): /note="Nucleotide may be methylated to form 5-methylcytosine"
tttttgttttcatttcactgatgaggaagctgatgattaaagaggttaaatgacttgtcccgggtcatacttagtcttgagtaagcaagattaagtcttctgactcttaattctgctttttc

SEQ ID NO: 20122 - DNA, 122 bp, Homo sapiens
  misc_feature (61)..(62): /note="This region represents a CpG dinucleotide"
  misc_feature (61)..(61): /note="Nucleotide may be methylated to form 5-methylcytosine"
ctatgagggtaagtgacttgcccagttaccaagttgcagagctggaacttgaaccaaggccgctttggctccagagtccatgccgttaaccacttctgtgcatttattgagcaactctgggg

SEQ ID NO: 20123 - DNA, 122 bp, Homo sapiens
  misc_feature (61)..(62): /note="This region represents a CpG dinucleotide"
  misc_feature (61)..(61): /note="Nucleotide may be methylated to form 5-methylcytosine"
aatattatataatcagaaatcaatctcatacagctccctatcaagaatggataacaatgacgttaagtattccttccatgatttactttggcataattaataataactttattagacattag

SEQ ID NO: 20124 - DNA, 122 bp, Homo sapiens
  misc_feature (61)..(62): /note="This region represents a CpG dinucleotide"
  misc_feature (61)..(61): /note="Nucleotide may be methylated to form 5-methylcytosine"
tagcctgtgctcactcagcttgcactcatcatgcctgtcaagttgtgtgaggaagctttccgttctcactaaagaaagaaagcagtttcatttcctggttttgttttgtttctttgtaacaa

SEQ ID NO: 20125 - DNA, 122 bp, Homo sapiens
  misc_feature (61)..(62): /note="This region represents a CpG dinucleotide"
  misc_feature (61)..(61): /note="Nucleotide may be methylated to form 5-methylcytosine"
tgaagcaatactgaactacagatctagtttatttatctgcatgcctttctgtcaaattcacgcttgtgtgcataaacacttttttttcttatatatgctttctgtgccgaggaaagttcagc

SEQ ID NO: 20126 - DNA, 122 bp, Homo sapiens
  misc_feature (61)..(62): /note="This region represents a CpG dinucleotide"
  misc_feature (61)..(61): /note="Nucleotide may be methylated to form 5-methylcytosine"
agaatcaaaatattaagatccctcagagcaaggtcaattaagcttttgacatttaaatttcgaaggatttttttttttaaagcatatctgggcaagtaaagaacataagcactagttccaaa

SEQ ID NO: 20127 - DNA, 122 bp, Homo sapiens
  misc_feature (61)..(62): /note="This region represents a CpG dinucleotide"
  misc_feature (61)..(61): /note="Nucleotide may be methylated to form 5-methylcytosine"
aggatttgtcactgaactgtggtaaaaacagcctccctgaagccttgggttggaataatacgtgtgagggaattggcaacaaaaggaagccggaaaggctggttgttcagggctctgtggct

SEQ ID NO: 20128 - DNA, 122 bp, Homo sapiens
  misc_feature (61)..(62): /note="This region represents a CpG dinucleotide"
  misc_feature (61)..(61): /note="Nucleotide may be methylated to form 5-methylcytosine"
atttggatttgaggaaaggagacttgagcgcaggagaaaggcacccaggagcctgtgagtcgtgcctaagcctctggatcccacatctgaggaaacaacttaatgtaagctttgagtggtgc

SEQ ID NO: 20129 - DNA, 122 bp, Homo sapiens
  misc_feature (61)..(62): /note="This region represents a CpG dinucleotide"
  misc_feature (61)..(61): /note="Nucleotide may be methylated to form 5-methylcytosine"
ctgtgcatgatcaaggtcatgatcaggcaaagttcagtcacctcagggcacacccctttccgaaacgggcaggaggtcgaagtgccaagtgaccagggaagaggaaggggtggacctgggca

SEQ ID NO: 20130 - DNA, 122 bp, Homo sapiens
  misc_feature (61)..(62): /note="This region represents a CpG dinucleotide"
  misc_feature (61)..(61): /note="Nucleotide may be methylated to form 5-methylcytosine"
agaaagactatcctttagttatccagtgtggaaacagtcctgaaatccaaactgatactgcgatcctgtgccaggttattactgtgacaattacttaatattctctgtgctcacgatatcac

SEQ ID NO: 20131 - DNA, 122 bp, Homo sapiens
  misc_feature (61)..(62): /note="This region represents a CpG dinucleotide"
  misc_feature (61)..(61): /note="Nucleotide may be methylated to form 5-methylcytosine"
cgtggacaggggccaagtgaagctgaactggtcatggtctgtcgcccagtgttcccttgtcgtcggcgattttgcccccgacccttcttggtgggcttagtggtggcaatctgtctcttcta

SEQ ID NO: 20132 - DNA, 122 bp, Homo sapiens
  misc_feature (61)..(62): /note="This region represents a CpG dinucleotide"
  misc_feature (61)..(61): /note="Nucleotide may be methylated to form 5-methylcytosine"
tttaggagtcatgaggctgagaacctcttcacagggcctgctgccccacccagggggaaacggaactgcctaaaatgggctggtccagtaatgtcccatccaaaatgcaaatttatccataa

SEQ ID NO: 20133 - DNA, 122 bp, Homo sapiens
  misc_feature (61)..(62): /note="This region represents a CpG dinucleotide"
  misc_feature (61)..(61): /note="Nucleotide may be methylated to form 5-methylcytosine"
tcgtcaccgcatgtgctcccagagaaaggcattagtacagggtcacttatggcagcggggcgagccagcagaccctgcaacacaaacactgaggtttttcttctccttcctcctctcgacgc

SEQ ID NO: 20134 - DNA, 122 bp, Homo sapiens
  misc_feature (61)..(62): /note="This region represents a CpG dinucleotide"
  misc_feature (61)..(61): /note="Nucleotide may be methylated to form 5-methylcytosine"
tcagcagcccccgagtgttgtattctcctaacccatgtgcatgtcttccatggggaagatcgttttgaaatcagttctttcctcctttaaaggtaaacataagtcgtggggatctcagtgag

SEQ ID NO: 20135 - DNA, 122 bp, Homo sapiens
  misc_feature (61)..(62): /note="This region represents a CpG dinucleotide"
  misc_feature (61)..(61): /note="Nucleotide may be methylated to form 5-methylcytosine"
ggtgcgtgcgctagtgcccgcacccggtgtgtagaagggcgcgagcgttggcgtgagagccggtgtggcctggaagctctgcaggaacgtgtgggggtaggaggtgaggggaccctcagtta

SEQ ID NO: 20136 - DNA, 122 bp, Homo sapiens
  misc_feature (61)..(62): /note="This region represents a CpG dinucleotide"
  misc_feature (61)..(61): /note="Nucleotide may be methylated to form 5-methylcytosine"
ttatgtgggacaatatgataaaattatgtcagtgaaggtaacatcatttccttctcacaacggatgatgtcttaggtacttctcagggaaggggtggagcaagccatagccacaatgcagct

SEQ ID NO: 20137 - DNA, 122 bp, Homo sapiens
  misc_feature (61)..(62): /note="This region represents a CpG dinucleotide"
  misc_feature (61)..(61): /note="Nucleotide may be methylated to form 5-methylcytosine"
ttgcagcaagtacagcctcagctgtcatctgtgccctagggcagggttcagtaggttaggcgttaagagacagtgtacctcataagaagtggtcaggtttctttctgagtttcagttcttca

SEQ ID NO: 20138 - DNA, 122 bp, Homo sapiens
  misc_feature (61)..(62): /note="This region represents a CpG dinucleotide"
  misc_feature (61)..(61): /note="Nucleotide may be methylated to form 5-methylcytosine"
gaagaacagctaggttctgatttgccaagagctgaggtatctgcctctcattcaatggcacgcagggggagagaagaaacagtgaggctaacagggacacacagagaggctactgcctgtcc
